(19) United States
(12) Patent Application Publication
(10) Pub. No.: US 2011/0252501 A1
(43) Pub. Date: Oct. 13, 2011

(54) Transgenic plants with enhanced agronomic traits

(75) Inventors: Mark Abad, Webster Groves, MO (US); Molian Deng, Grover, MO (US); Sephen Duff, St. Louis, MO (US); Mary Fernandes, St. Louis, MO (US); Karen K. Gabbert, St. Louis, MO (US); Julie A. Alvarez, Woodland, CA (US); Kristen A. Bennett, Davis, CA (US); Paolo Castiglioni, Davis, CA (US); Jill Deikman, Davis, CA (US); Jason Fenner, Sacramento, CA (US); Danyang Ke, Sacramento, CA (US); Barry S. Goldman, St. Louis, MO (US); Qungang Qi, Ballwin, MO (US); Thomas G. Ruff, Wildwood, MO (US); Rebecca L. Thompason-Mize, St. Charles, MO (US); Jingrui Wu, Chesterfield, MO (US); Thomas R. Adams, Stonigton, CT (US); Robert Bensen, Niantic, CT (US); Jacqueline E. Heard, Stonington, CT (US); Donald E. Nelson, Stonington, CT (US); Erin Bell, St. Louis, MO (US); R. Eric Cerny, Chesterfield, MO (US); Jaishree M. Chittoor-Vijayanath, Wildwood, MO (US); Bradon J. Fabbri, Chesterfield, MO (US); Balasulojini Karunanandaa, Creve Coeur, MO (US); John R. LeDeaux, Creve Coeur, MO (US); Xianfeng Chen, Christianburg, VA (US); Meghan Galligan-Donnarummo, Westerly, RI (US); Deborah J. Hawkins, Davis, CA (US); Garrett J. Lee, Wayne, NJ (US); Obed Patty, Marysville, CA (US); Rick A. Sanders, Davis, CA (US); Beth Savidge, Davis, CA (US); Dale L. Val, Zamora, CA (US); Wei Zheng, Davis, CA (US); Thomas J. Savage, Sacramento, CA (US); Rajani Monnanda Somaiah, St. Louis, MO (US); Sreekanta Suma, Bangalore (IN); Jindong Sun, Urbana, IL (US); Tymagondlu Venkatesh, St. Louis, MO (US); Nanfei Xu, Cary, NC (US); Mahindra Anuradha, Bangalore (IN); Alice Clara Augustine, Karnataka (IN); Farah Deeba, Bangalore (IN); Ramachandra Dhanalakshmi, Karnataka (IN); Savitha Madappa, Bangalore (IN); Badami S. Pranesh, Karnataka (IN); M. S. Rajani, Karnataka (IN); G. Ramamohan, Karnataka (IN); S. Sangeetha, Karnataka (IN); Char Shobha, Karnataka (IN); Padmini Sudarshana, Bangalore (IN); K. R. Vidva, Karnataka (IN); Srikanth Venkatachalayya, Karnataka (IN); Tymagondlu Venkatesh, St. Louis, MO (US)

(73) Assignee: MONSANTO TECHNOLOGY LLC, ST. LOUIS, MO (US)

(21) Appl. No.: 11/893,915

(22) Filed: Aug. 17, 2007

Related U.S. Application Data
(60) Provisional application No. 60/838,415, filed on Aug. 17, 2006.

(51) Int. Cl. A01H 5/10; A01H 1/02; C12Q 1/68; C12N 5/10; A01H 5/00

(52) U.S. Cl. 800/275; 435/419; 800/298; 800/320.1; 800/314; 800/320.3; 800/320.2; 435/6.1

(57) ABSTRACT

This invention provides transgenic plant cells with recombinant DNA for expression of proteins that are useful for imparting enhanced agronomic trait(s) to transgenic crop plants. This invention also provides transgenic plants and progeny seed comprising the transgenic plant cells where the plants are selected for having an enhanced trait selected from the group of traits consisting of enhanced water use efficiency, enhanced cold tolerance, increased yield, enhanced nitrogen use efficiency, enhanced seed protein and enhanced seed oil. Also disclosed are methods for manufacturing transgenic seed and plants with enhanced traits.

### CROSS REFERENCE TO RELATED APPLICATIONS

[0001] This application claims benefit under 35USC §119(e) of U.S. provisional application Ser. No. 60/838,415, filed Aug. 17, 2006, herein incorporated by reference.

### Incorporation of Sequence Listing

[0002] Two copies of the sequence listing (Copy 1 and Copy 2) and a computer readable form (CRF) of the sequence listing, all on CD-Rs, each containing the text file named 38-21(54146)B_seqListing.txt, which is 103,067,648 bytes (measured in MS-WINDOWS), were created on Aug. 16, 2007 and are herein incorporated by reference.

### Incorporation of Computer Program Listing

[0003] Two copies of the Computer Program Listing (Copy 1 and Copy 2) and a computer readable form (CRF) containing folders hmmer-2.3.2 and 248 pfamDir, all on CD-Rs are incorporated herein by reference in their entirety. Folder hmmer-2.3.2 contains the source code and other associated file for implementing the HMMer software for Pfam analysis. Folder 248 pfamDir contains 248 Pfam Hidden Markov Models. Both folders were created on CD-R on Aug. 16, 2007, having a total size of 20,594,688 bytes (measured in MS-WINDOWS).

### Incorporation of Table

[0004] Two copies of Table 9 (Copy 1 and Copy 2) and a computer readable form (CRF), all on CD-Rs, each containing the file named 38-21(54146)B_table9.txt, which is 319,488 bytes (measured in MS-WINDOWS), were created on Aug. 16, 2007, and comprise 74 pages when viewed in MS Word, are herein incorporated by reference.

### FIELD OF THE INVENTION

[0005] Disclosed herein are inventions in the field of plant genetics and developmental biology. More specifically, the present inventions provide plant cells with recombinant DNA for providing an enhanced trait in a transgenic plant, plants comprising such cells, seed and pollen derived from such plants, methods of making and using such cells, plants, seeds and pollen.

### BACKGROUND OF THE INVENTION

[0006] Transgenic plants with improved agronomic traits such as yield, environmental stress tolerance, pest resistance, herbicide tolerance, improved seed compositions, and the like are desired by both farmers and consumers. Although considerable efforts in plant breeding have provided significant gains in desired traits, the ability to introduce specific DNA into plant genomes provides further opportunities for generation of plants with improved and/or unique traits. Merely introducing recombinant DNA into a plant genome doesn't always produce a transgenic plant with an enhanced agronomic trait. Methods to select individual transgenic events from a population are required to identify those transgenic events that are characterized by the enhanced agronomic trait.

### SUMMARY OF THE INVENTION

[0007] This invention provides plant cell nuclei with recombinant DNA that imparts enhanced agronomic traits in transgenic plants having the nuclei in their cells, e.g. enhanced water use efficiency, enhanced cold tolerance, increased yield, enhanced nitrogen use efficiency, enhanced seed protein or enhanced seed oil. Such recombinant DNA in a plant cell nucleus of this invention is provided in as a construct comprising a promoter that is functional in plant cells and that is operably linked to DNA that encodes a protein. Such DNA in the construct is sometimes defined by protein domains of an encoded protein targeted for production or suppression, e.g. a “Pfam domain module” (as defined herein below) from the group of Pfam domain modules identified in Table 9. Alternatively, e.g. where a Pfam domain module is not available, such DNA in the construct is defined a consensus amino acid sequence of an encoded protein that is targeted for production e.g. a protein having amino acid sequence with at least 90% identity to a consensus amino acid sequence in the group of SEQ ID NO: 30328, and SEQ ID NO: 30377 through SEQ ID NO: 30418. Alternatively, in other cases where neither a Pfam domain module nor a consensus amino acid sequence is available, such DNA in the construct is defined by the sequence of a specific encoded and/or its homologous proteins.

[0008] Other aspects of the invention are specifically directed to transgenic plant cells comprising the recombinant DNA of the invention, transgenic plants comprising a plurality of such plant cells, progeny transgenic seed, embryo and transgenic pollen from such plants. Such plant cells are selected from a population of transgenic plants regenerated from plant cells transformed with recombinant DNA and that express the protein by screening transgenic plants in the population for an enhanced trait as compared to control plants that do not have said recombinant DNA, where the enhanced trait is selected from group of enhanced traits consisting of enhanced water use efficiency, enhanced cold tolerance, increased yield, enhanced nitrogen use efficiency, enhanced seed protein and enhanced seed oil.

[0009] In yet another aspect of the invention the plant cells, plants, seeds, embryo and pollen further comprise DNA expressing a protein that provides tolerance from exposure to an herbicide applied at levels that are lethal to a wild type of said plant cell. Such tolerance is especially useful not only as an advantageous trait in such plants but is also useful in a selection step in the methods of the invention. In aspects of the invention the agent of such herbicide is a glyphosate, dicamba, or glufosinate compound.

[0010] Yet other aspects of the invention provide transgenic plants which are homozygous for the recombinant DNA and transgenic seed of the invention from corn, soybean, cotton, canola, alfalfa, wheat or rice plants.

[0011] This invention also provides methods for manufacturing non-natural, transgenic seed that can be used to produce a crop of transgenic plants with an enhanced trait resulting from expression of stably-integrated, recombinant DNA in the nucleus of the plant cells. More specifically the method comprises (a) screening a population of plants for an enhanced trait and recombinant DNA, where individual plants in the population can exhibit the trait at a level less than, essentially the same as or greater than the level that the trait is exhibited in control plants which do not express the recombinant DNA; (b) selecting from the population one or more plants that exhibit the trait at a level greater than the level that said trait is exhibited in control plants and (c) collecting seed from a selected plant. Such method further comprises steps (d) verifying that the recombinant DNA is stably integrated in said selected plants; and (e) analyzing tissue of a selected plant to determine the production of a protein having the function of a protein encoded by a recombinant DNA with a sequence of one of SEQ ID NO: 1-358; In one aspect of the invention the plants in the population further comprise DNA expressing a protein that provides tolerance to exposure to an herbicide applied at levels that are lethal to wild type plant cells and where the selecting is effected by treating the population with the herbicide, e.g. a glyphosate, dicamba, or glufosinate compound. In another aspect of the invention the transgenic plants are selected by identifying plants with the enhanced trait. The methods are especially useful for manufacturing corn, soybean, cotton, alfalfa, wheat or rice seed selected as having one of the enhanced traits described above.

[0012] Another aspect of the invention provides a method of producing hybrid corn seed comprising acquiring hybrid corn seed from a herbicide tolerant corn plant which also has stably-integrated, recombinant DNA comprising a promoter that is (a) functional in plant cells and (b) is operably linked to DNA that encodes a protein. Such protein is defined by protein domains of an encoded protein targeted for production or suppression, e.g. a “Pfam domain module” (as defined herein below) from the group of Pfam domain modules identified in Table 9. Alternatively, e.g. where a Pfam domain module is not available, such protein is defined by a consensus amino acid sequence of an encoded protein that is targeted for production e.g. a protein having amino acid sequence with at least 90% identity to a consensus amino acid sequence in the group of SEQ ID NO: 30328, and SEQ ID NO: 30377 through SEQ ID NO: 30418. Alternatively, in other cases where neither a Pfam domain module nor a consensus amino acid sequence is available, such DNA in the construct is defined by the sequence of a specific encoded and/or its homologous proteins. The methods further comprise producing corn plants from said hybrid corn seed, wherein a fraction of the plants produced from said hybrid corn seed is homozygous for said recombinant DNA, a fraction of the plants produced from said hybrid corn seed is hemizygous for said recombinant DNA, and a fraction of the plants produced from said hybrid corn seed has none of said recombinant DNA; selecting corn plants which are homozygous and hemizygous for said recombinant DNA by treating with an herbicide; collecting seed from herbicide-treated-surviving corn plants and planting said seed to produce further progeny corn plants; repeating the selecting and collecting steps at least once to produce an inbred corn line; and crossing the inbred corn line with a second corn line to produce hybrid seed.

### BRIEF DESCRIPTION OF THE DRAWINGS

[0013] FIG. 1 is a consensus amino acid sequence of SEQ ID NO: 561 and its homologs.

[0014] FIGS. 2-5 are plasmid maps.

### DETAILED DESCRIPTION OF THE INVENTION

[0015] In the attached sequence listing:

[0016] SEQ ID NO:1-358 are nucleotide sequences of the coding strand of DNA for “genes” used in the recombinant DNA imparting an enhanced trait in plant cells, i.e. each represents a coding sequence for a protein;

[0017] SEQ ID NO: 359-716 are amino acid sequences of the cognate protein of the “genes” with nucleotide coding sequences 1-358;

[0018] SEQ ID NO: 717-30327 are amino acid sequences of homologous proteins;

[0019] SEQ ID NO: 30328 is a consensus sequence of SEQ ID NO: 561 and its homologs;

[0020] SEQ ID NO: 30329 is the nucleotide sequence of a plasmid base vector pMON93039 useful for corn transformation;

[0021] SEQ ID NO: 30330 is the nucleotide sequence of a plasmid base vector pMON92705 useful for corn transformation;

[0022] SEQ ID NO: 30331 is the nucleotide sequence of a plasmid base vector pMON82053 useful for soybean and canola transformation;

[0023] SEQ ID NO: 30332-30375 are nucleotide sequences of the regulatory elements in base vectors;

[0024] SEQ ID NO: 30376 is the nucleotide sequence of a plasmid base vector pMON99053 useful for cotton transformation; and SEQ ID NO: 30377-30418 are consensus sequences.

[0025] Table 1 lists the protein SEQ ID Nos and their corresponding consensus SEQ ID Nos.

TABLE 1

| PEP | | Consensus |
|---|---|---|
| SEQ ID | | SEQ ID |
| NO | Gene ID | NO |
| 371 | PHE0002860_7494 | 30377 |
| 372 | PHE0002860_8694 | 30378 |
| 378 | PHE0004013_9281 | 30379 |
| 401 | PHE0004780_5752 | 30380 |
| 402 | PHE0004782_5754 | 30381 |
| 420 | PHE0004859_5896 | 30382 |
| 421 | PHE0004859_5917 | 30383 |
| 427 | PHE0004889_7961 | 30384 |
| 436 | PHE0004903_5960 | 30385 |
| 446 | PHE0004948_6003 | 30386 |
| 470 | PHE0006047_7234 | 30387 |
| 471 | PHE0006047_8766 | 30388 |
| 474 | PHE0006049_7107 | 30389 |
| 480 | PHE0006062_7058 | 30390 |
| 485 | PHE0006072_7071 | 30391 |
| 486 | PHE0006074_7060 | 30392 |
| 487 | PHE0006076_7052 | 30393 |
| 488 | PHE0006076_7331 | 30394 |
| 514 | PHE0006176_7147 | 30395 |
| 544 | PHE0006286_7314 | 30396 |
| 545 | PHE0006286_8011 | 30397 |
| 546 | PHE0006288_7310 | 30398 |
| 547 | PHE0006288_8023 | 30399 |
| 558 | PHE0006346_8132 | 30400 |
| 561 | PHE0006351_8200 | 30328 |
| 562 | PHE0006353_8098 | 30401 |
| 563 | PHE0006355_8084 | 30402 |
| 567 | PHE0006378_7667 | 30403 |
| 568 | PHE0006378_8715 | 30404 |
| 615 | PHE0006593_8245 | 30405 |
| 616 | PHE0006593_8256 | 30406 |
| 654 | PHE0006740_8446 | 30407 |
| 655 | PHE0006740_8596 | 30408 |
| 679 | PHE0006816_8560 | 30409 |
| 680 | PHE0006844_8839 | 30410 |
| 683 | PHE0006908_9016 | 30411 |
| 699 | PHE0006941_9117 | 30412 |
| 707 | PHE0006954_9154 | 30413 |
| 708 | PHE0006954_9161 | 30414 |
| 712 | PHE0006970_9141 | 30415 |
| 714 | PHE0006986_9183 | 30416 |
| 715 | PHE0006992_9140 | 30417 |
| 716 | PHE0006992_9184 | 30418 |

[0026] As used herein a “plant cell” means a plant cell that is transformed with stably-integrated, non-natural, recombinant DNA, e.g. by Agrobacterium-mediated transformation or by bombardment using microparticles coated with recombinant DNA or other means. A plant cell of this invention can be an originally-transformed plant cell that exists as a microorganism or as a progeny plant cell that is regenerated into differentiated tissue, e.g. into a transgenic plant with stably-integrated, non-natural recombinant DNA, or seed or pollen derived from a progeny transgenic plant.

[0027] As used herein a “transgenic plant” means a plant whose genome has been altered by the stable integration of recombinant DNA. A transgenic plant includes a plant regenerated from an originally-transformed plant cell and progeny transgenic plants from later generations or crosses of a transformed plant.

[0028] As used herein “recombinant DNA” means DNA which has been a genetically engineered and constructed outside of a cell including DNA containing naturally occurring DNA or cDNA or synthetic DNA.

[0029] As used herein “consensus sequence” means an artificial sequence of amino acids in a conserved region of an alignment of amino acid sequences of homologous proteins, e.g. as determined by a CLUSTALW alignment of amino acid sequence of homolog proteins.

[0030] As used herein “homolog” means a protein in a group of proteins that perform the same biological function, e.g. proteins that belong to the same Pfam protein family and that provide a common enhanced trait in transgenic plants of this invention. Homologs are expressed by homologous genes. Homologous genes include naturally occurring alleles and artificially-created variants. Degeneracy of the genetic code provides the possibility to substitute at least one base of the protein encoding sequence of a gene with a different base without causing the amino acid sequence of the polypeptide produced from the gene to be changed. Hence, a polynucleotide useful in the present invention may have any base sequence that has been changed from SEQ ID NO:1 through SEQ ID NO: 358 substitution in accordance with degeneracy of the genetic code. Homologs are proteins that, when optimally aligned, have at least 60% identity, more preferably about 70% or higher, more preferably at least 80% and even more preferably at least 90% identity over the full length of a protein identified as being associated with imparting an enhanced trait when expressed in plant cells. Homologs include proteins with an amino acid sequence that has at least 90% identity to a consensus amino acid sequence of proteins and homologs disclosed herein.

[0031] Homologs are be identified by comparison of amino acid sequence, e.g. manually or by use of a computer-based tool using known homology-based search algorithms such as those commonly known and referred to as BLAST, FASTA, and Smith-Waterman. A local sequence alignment program, e.g. BLAST, can be used to search a database of sequences to find similar sequences, and the summary Expectation value (E-value) used to measure the sequence base similarity. As a protein hit with the best E-value for a particular organism may not necessarily be an ortholog or the only ortholog, a reciprocal query is used in the present invention to filter hit sequences with significant E-values for ortholog identification. The reciprocal query entails search of the significant hits against a database of amino acid sequences from the base organism that are similar to the sequence of the query protein. A hit is a likely ortholog, when the reciprocal query's best hit is the query protein itself or a protein encoded by a duplicated gene after specification. A further aspect of the invention comprises functional homolog proteins that differ in one or more amino acids from those of disclosed protein as the result of conservative amino acid substitutions, for example substitutions are among: acidic (negatively charged) amino acids such as aspartic acid and glutamic acid; basic (positively charged) amino acids such as arginine, histidine, and lysine; neutral polar amino acids such as glycine, serine, threonine, cysteine, tyrosine, asparagine, and glutamine; neutral nonpolar (hydrophobic) amino acids such as alanine, leucine, isoleucine, valine, proline, phenylalanine, tryptophan, and methionine; amino acids having aliphatic side chains such as glycine, alanine, valine, leucine, and isoleucine; amino acids having aliphatic-hydroxyl side chains such as serine and threonine; amino acids having amide-containing side chains such as asparagine and glutamine; amino acids having aromatic side chains such as phenylalanine, tyrosine, and tryptophan; amino acids having basic side chains such as lysine, arginine, and histidine; amino acids having sulfur-containing side chains such as cysteine and methionine; naturally conservative amino acids such as valine-leucine, valine-isoleucine, phenylalanine-tyrosine, lysine-arginine, alanine-valine, aspartic acid-glutamic acid, and asparagine-glutamine. A further aspect of the homologs encoded by DNA useful in the transgenic plants of the invention are those proteins that differ from a disclosed protein as the result of deletion or insertion of one or more amino acids in a native sequence.

[0032] As used herein, “percent identity” means the extent to which two optimally aligned DNA or protein segments are invariant throughout a window of alignment of components, for example nucleotide sequence or amino acid sequence. An “identity fraction” for aligned segments of a test sequence and a reference sequence is the number of identical components that are shared by sequences of the two aligned segments divided by the total number of sequence components in the reference segment over a window of alignment which is the smaller of the full test sequence or the full reference sequence. “Percent identity” (“% identity”) is the identity fraction times 100.

[0033] The “Pfam” database is a large collection of multiple sequence alignments and hidden Markov models covering many common protein families, e.g. Pfam version 19.0 (December 2005) contains alignments and models for 8183 protein families and is based on the Swissprot 47.0 and SP-TrEMBL 30.0 protein sequence databases. See S. R. Eddy, “Profile Hidden Markov Models”, Bioinformatics 14:755-763, 1998. The Pfam database is currently maintained and updated by the Pfam Consortium. The alignments represent some evolutionary conserved structure that has implications for the protein's function. Profile hidden Markov models (profile HMMs) built from the protein family alignments are useful for automatically recognizing that a new protein belongs to an existing protein family even if the homology by alignment appears to be low.

[0034] A “Pfam domain module” is a representation of Pfam domains in a protein, in order from N terminus to C terminus. In a Pfam domain module individual Pfam domains are separated by double colons “::”. The order and copy number of the Pfam domains from N to C terminus are attributes of a Pfam domain module. Although the copy number of repetitive domains is important, varying copy number often enables a similar function. Thus, a Pfam domain module with multiple copies of a domain should define an equivalent Pfam domain module with variance in the number of multiple copies. A Pfam domain module is not specific for distance between adjacent domains, but contemplates natural distances and variations in distance that provide equivalent function. The Pfam database contains both narrowly- and broadly-defined domains, leading to identification of overlapping domains on some proteins. A Pfam domain module is characterized by non-overlapping domains. Where there is overlap, the domain having a function that is more closely associated with the function of the protein (based on the E value of the Pfam match) is selected.

[0035] Once one DNA is identified as encoding a protein which imparts an enhanced trait when expressed in transgenic plants, other DNA encoding proteins with the same Pfam domain module are identified by querying the amino acid sequence of protein encoded by candidate DNA against the Hidden Markov Models which characterizes the Pfam domains using HMMER software, a current version of which is provided in the appended computer listing. Candidate proteins meeting the same Pfam domain module are in the protein family and have cognate DNA that is useful in constructing recombinant DNA for the use in the plant cells of this invention. Hidden Markov Model databases for use with HMMER software in identifying DNA expressing protein with a common Pfam domain module for recombinant DNA in the plant cells of this invention are also included in the appended computer listing.

[0036] Version 19.0 of the HMMER software and Pfam databases were used to identify known domains in the proteins corresponding to amino acid sequence of SEQ ID NO: 359 through SEQ ID NO: 716. All DNA encoding proteins that have scores higher than the gathering cutoff disclosed in Table 16 by Pfam analysis disclosed herein can be used in recombinant DNA of the plant cells of this invention, e.g. for selecting transgenic plants having enhanced agronomic traits. The relevant Pfams modules for use in this invention, as more specifically disclosed below, are Gp_dh_N::Gp_dh_C, Mg_chelatase::VWA, zf-CCCH::zf-CCCH::zf-CCCH::zf-CCCH::zf-CCCH, WD40, tRNA-synt_{—}2b::HGTP_anticodon, RNase_PH::RNase_PH_C, F-box::Kelch_{—}1::Kelch_{—}1, Peptidase_C54, Iso_dh, Metallophos, OTU, Rotamase, Sugar_tr, Glyoxalase::Glyoxalase, Ras, Brix, S6PP::S6PP_C, PsbR, Pkinase, p450, PP2C, CH::EB1, DUF537, Histone, PPR::PPR::PPR::PPR::PPR, TFIIS_M::TFIIS_, DUF751, RRM_{—}1::RRM_{—}1, ETC_C1_NDUFA4, SRF-TF, CCT, Globin::FAD_binding_{—}6::NAD_binding_{—}1, FAE1_CUT1_RppA::ACP_syn_III_C, Frataxin_Cyay, F-box::LRR_{—}2, Tryp_alpha_amyl, PFK::PFK, Dehydrin, RLI::Fer4::ABC_tran::ABC_tran, CTP_transf_{—}2, GTP_EFTU::GTP_EFTU_D2::GTP_EFTU_D3, PfkB, IPT, TPR_{—}1::TPR_{—}2::TPR_{—}1::TPR_{—}2::TPR_{—}1::TPR_{—}1::TPR_{—}1::TPR_{—}1::TPR_{—}1, Globin, Porphobil_deam::Porphobil_deamC, NB-ARC::LRR_{—}1::LRR_{—}1::LRR_{—}1, Bromodomain, DUF1365, PTS_{—}2-RNA, Pkinase::UBA::KA1, MATH::BTB, DUF6::TPT, Cyclin_N::Cyclin_C, zf-AN1, Methyltransf_{—}6, Thioredoxin, DNA_photolyase::FAD_binding_{—}7, vATP-synt_E, Bac_globin, B_lectin::S_locus_glycop::PAN_{—}2::Pkinase_Tyr, Sigma70_r2::Sigma70_r3::Sigma70_r4, Ribosomal_L10, zf-C3HC4::WD40::WD40::WD40, PGM_PMM_I:PGM_PMM_II:PGM_PMM_III::PGM_PMM_IV, Hydrolase, Peptidase_C1, DS, Carotene_hydrox, Aa_trans, Mov34, zf-MYND::UCH, Heme_oxygenase, S6PP, SSB, Peptidase_M16::Peptidase_M16_C, Bet_v_I, Auxin_inducible, Response_reg, Di19, DUF125, GDC-P, Pyr_redox_{—}2::Fer2_BFD::NIR_SIR_ferr::NIR_SIR, KOW::eIF-5a, MtN3_slv::MtN3_slv, Ribul_P_{—}3_epim, NPH3, DnaJ::DnaJ_C, UQ_con, RRM_{—}1::RRM_{—}1::RRM_{—}1, F-box, CoA_binding::Ligase_CoA, adh_short, Ribosomal_L22, AA_permease, Acyltransferase, AMPKBI, RRM_{—}1, Chalcone, GATase_{—}2::Asn_synthase, Peptidase_M24, DUF498, DAGAT, PFK, DUF1677, Glyco_transf_{—}43, zf-DNL, DHBP_synthase::GTP_cyclohydro-2, PseudoU_synth_{—}2, Glyoxalase, DUF21::CBS, Ribosomal_S30AE, Glycolytic, Chloroa_b-bind, ZF-HD_dimer, Usp, Ferrochelatase, Pyridoxal_deC, Glyco_transf_{—}8, Pyr_redox_{—}2::Glutaredoxin, Epimerase, UPF0113, RNase_PH, AIG1, Phi_{—}1, CorA, HD::RelA_SpoT, P-II, GSHPx, PGAM, PGI, DUF868, Lung_{—}7-TM_R, F-box::FBA_{—}1, TPP_enzyme_N::TPP_enzyme_M::TPP_enzyme_C, DnaJ::zf-CSL, DEAD::Helicase_C, 2OG-FeII_Oxy, HMGL-like::LeuA_dimer, VQ, DUF298, DREPP, ketoacyl-synt::Ketoacyl-synt_C, THF_DHG_CYH::THF_DHG_CYH_C, DNA_pol_E_B, UPF0051, Pkinase::efhand::efhand::efhand::efhand, malic::Malic_M, ThiF, Transket_pyr::Transketolase_C, Ribosomal_L37ae, PEPcase, Glyco_hydro_{—}32N::Glyco_hydro_{—}32C, GASA, DnaJ, AA_kinase::ACT::ACT, Pkinase_Tyr, Cupin_{—}1, zf-LSD1::zf-LSD1::zf-LSD1, Cupin_{—}3, GAF::HisKA::HATPase_c::Response_reg, Methyltransf_{—}12::Mg-por_mtran_C, DUF516, PTR2, Ammonium_transp, eIF-5a, ECH, Aldedh, zf-C3HC4, SAM_decarbox, X8, Mg_chelatase, PurA, Ribosomal_S6e, Molybdop_Fe4S4::Molybdopterin::Molydop_binding, CP12, Biotin_lipoyl::E3_binding::2-oxoacid_dh, NOI, Tubulin::Tubulin_C, V-SNARE, AP2, ELFV_dehydrog_N::ELFV_dehydrog, Ribosomal_L32e, and FAD_binding_{—}3.

[0037] As used herein “promoter” means regulatory DNA for initializing transcription. A “plant promoter” is a promoter capable of initiating transcription in plant cells whether or not its origin is a plant cell, e.g. is it well known that Agrobacterium promoters are functional in plant cells. Thus, plant promoters include promoter DNA obtained from plants, plant viruses and bacteria such as Agrobacterium and Bradyrhizobium bacteria. Examples of promoters under developmental control include promoters that preferentially initiate transcription in certain tissues, such as leaves, roots, or seeds. Such promoters are referred to as “tissue preferred”. Promoters that initiate transcription only in certain tissues are referred to as “tissue specific”. A “cell type” specific promoter primarily drives expression in certain cell types in one or more organs, for example, vascular cells in roots or leaves. An “inducible” or “repressible” promoter is a promoter which is under environmental control. Examples of environmental conditions that may effect transcription by inducible promoters include anaerobic conditions, or certain chemicals, or the presence of light. Tissue specific, tissue preferred, cell type specific, and inducible promoters constitute the class of “non-constitutive” promoters. A “constitutive” promoter is a promoter which is active under most conditions.

[0038] As used herein “operably linked” means the association of two or more DNA fragments in a DNA construct so that the function of one, e.g. protein-encoding DNA, is controlled by the other, e.g. a promoter.

[0039] As used herein “expressed” means produced, e.g. a protein is expressed in a plant cell when its cognate DNA is transcribed to mRNA that is translated to the protein.

[0040] As used herein a “control plant” means a plant that does not contain the recombinant DNA that expressed a protein that impart an enhanced trait. A control plant is to identify and select a transgenic plant that has an enhance trait. A suitable control plant can be a non-transgenic plant of the parental line used to generate a transgenic plant, i.e. devoid of recombinant DNA. A suitable control plant may in some cases be a progeny of a hemizygous transgenic plant line that is does not contain the recombinant DNA, known as a negative segregant.

[0041] As used herein an “enhanced trait” means a characteristic of a transgenic plant that includes, but is not limited to, an enhance agronomic trait characterized by enhanced plant morphology, physiology, growth and development, yield, nutritional enhancement, disease or pest resistance, or environmental or chemical tolerance. In more specific aspects of this invention enhanced trait is selected from group of enhanced traits consisting of enhanced water use efficiency, enhanced cold tolerance, increased yield, enhanced nitrogen use efficiency, enhanced seed protein and enhanced seed oil. In an important aspect of the invention the enhanced trait is enhanced yield including increased yield under non-stress conditions and increased yield under environmental stress conditions. Stress conditions may include, for example, drought, shade, fungal disease, viral disease, bacterial disease, insect infestation, nematode infestation, cold temperature exposure, heat exposure, osmotic stress, reduced nitrogen nutrient availability, reduced phosphorus nutrient availability and high plant density. “Yield” can be affected by many properties including without limitation, plant height, pod number, pod position on the plant, number of internodes, incidence of pod shatter, grain size, efficiency of nodulation and nitrogen fixation, efficiency of nutrient assimilation, resistance to biotic and abiotic stress, carbon assimilation, plant architecture, resistance to lodging, percent seed germination, seedling vigor, and juvenile traits. Yield can also affected by efficiency of germination (including germination in stressed conditions), growth rate (including growth rate in stressed conditions), ear number, seed number per ear, seed size, composition of seed (starch, oil, protein) and characteristics of seed

[0042] Increased yield of a transgenic plant of the present invention can be measured in a number of ways, including test weight, seed number per plant, seed weight, seed number per unit area (i.e. seeds, or weight of seeds, per acre), bushels per acre, tons per acre, tons per acre, kilo per hectare. For example, maize yield may be measured as production of shelled corn kernels per unit of production area, for example in bushels per acre or metric tons per hectare, often reported on a moisture adjusted basis, for example at 15.5 percent moisture. Increased yield may result from improved utilization of key biochemical compounds, such as nitrogen, phosphorous and carbohydrate, or from improved responses to environmental stresses, such as cold, heat, drought, salt, and attack by pests or pathogens. Recombinant DNA used in this invention can also be used to provide plants having improved growth and development, and ultimately increased yield, as the result of modified expression of plant growth regulators or modification of cell cycle or photosynthesis pathways. Also of interest is the generation of transgenic plants that demonstrate enhanced yield with respect to a seed component that may or may not correspond to an increase in overall plant yield. Such properties include enhancements in seed oil, seed molecules such as tocopherol, protein and starch, or oil particular oil components as may be manifest by an alterations in the ratios of seed components.

[0043] A subset of the nucleic molecules of this invention includes fragments of the disclosed recombinant DNA consisting of oligonucleotides of at least 15, preferably at least 16 or 17, more preferably at least 18 or 19, and even more preferably at least 20 or more, consecutive nucleotides. Such oligonucleotides are fragments of the larger molecules having a sequence selected from the group consisting of SEQ ID NO:1 through SEQ ID NO: 358, and find use, for example as probes and primers for detection of the polynucleotides of the present invention.

[0044] DNA constructs are assembled using methods well known to persons of ordinary skill in the art and typically comprise a promoter operably linked to DNA, the expression of which provides the enhanced agronomic trait. Other construct components may include additional regulatory elements, such as 5′ leaders and introns for enhancing transcription, 3′ untranslated regions (such as polyadenylation signals and sites), DNA for transit or signal peptides.

[0045] Numerous promoters that are active in plant cells have been described in the literature. These include promoters present in plant genomes as well as promoters from other sources, including nopaline synthase (NOS) promoter and octopine synthase (OCS) promoters carried on tumor-inducing plasmids of Agrobacterium tumefaciens, caulimovirus promoters such as the cauliflower mosaic virus. For instance, see U.S. Pat. Nos. 5,858,742 and 5,322,938, which disclose versions of the constitutive promoter derived from cauliflower mosaic virus (CaMV35S), U.S. Pat. No. 5,641,876, which discloses a rice actin promoter, U.S. Patent Application Publication 2002/0192813A1, which discloses 5′, 3′ and intron elements useful in the design of effective plant expression vectors, U.S. patent application Ser. No. 09/757,089, which discloses a maize chloroplast aldolase promoter, U.S. patent application Ser. No. 08/706,946, which discloses a rice glutelin promoter, U.S. patent application Ser. No. 09/757,089, which discloses a maize aldolase (FDA) promoter, and U.S. patent application Ser. No. 60/310,370, which discloses a maize nicotianamine synthase promoter, all of which are incorporated herein by reference. These and numerous other promoters that function in plant cells are known to those skilled in the art and available for use in recombinant polynucleotides of the present invention to provide for expression of desired genes in transgenic plant cells.

[0046] In other aspects of the invention, preferential expression in plant green tissues is desired. Promoters of interest for such uses include those from genes such as Arabidopsis thaliana ribulose-1,5-bisphosphate carboxylase (Rubisco) small subunit (Fischhoff et al. (1992) Plant Mol. Biol. 20:81-93), aldolase and pyruvate orthophosphate dikinase (PPDK) (Taniguchi et al. (2000) Plant Cell Physiol. 41(1):42-48).

[0047] Furthermore, the promoters may be altered to contain multiple “enhancer sequences” to assist in elevating gene expression. Such enhancers are known in the art. By including an enhancer sequence with such constructs, the expression of the selected protein may be enhanced. These enhancers often are found 5′ to the start of transcription in a promoter that functions in eukaryotic cells, but can often be inserted upstream (5′) or downstream (3′) to the coding sequence. In some instances, these 5′ enhancing elements are introns. Particularly useful as enhancers are the 5′ introns of the rice actin 1 (see U.S. Pat. No. 5,641,876) and rice actin 2 genes, the maize alcohol dehydrogenase gene intron, the maize heat shock protein 70 gene intron (U.S. Pat. No. 5,593,874) and the maize shrunken 1 gene.

[0048] In other aspects of the invention, sufficient expression in plant seed tissues is desired to effect improvements in seed composition. Exemplary promoters for use for seed composition modification include promoters from seed genes such as napin (U.S. Pat. No. 5,420,034), maize L3 oleosin (U.S. Pat. No. 6,433,252), zein Z27 (Russell et al. (1997) Transgenic Res. 6(2):157-166), globulin 1 (Belanger et al (1991) Genetics 129:863-872), glutelin 1 (Russell (1997) supra), and peroxiredoxin antioxidant (Perl) (Stacy et al. (1996) Plant Mol. Biol. 31(6):1205-1216).

[0049] Recombinant DNA constructs prepared in accordance with the invention will also generally include a 3′ element that typically contains a polyadenylation signal and site. Well-known 3′ elements include those from Agrobacterium tumefaciens genes such as nos 3′, tml 3′, tmr 3′, tms 3′, ocs 3′, tr7 3′, for example disclosed in U.S. Pat. No. 6,090,627, incorporated herein by reference; 3′ elements from plant genes such as wheat (Triticum aesevitum) heat shock protein 17 (Hsp17 3′), a wheat ubiquitin gene, a wheat fructose-1,6-biphosphatase gene, a rice glutelin gene a rice lactate dehydrogenase gene and a rice beta-tubulin gene, all of which are disclosed in U.S. published patent application 2002/0192813 A1, incorporated herein by reference; and the pea (Pisum sativum) ribulose biphosphate carboxylase gene (rbs 3′), and 3′ elements from the genes within the host plant.

[0050] Constructs and vectors may also include a transit peptide for targeting of a gene target to a plant organelle, particularly to a chloroplast, leucoplast or other plastid organelle. For descriptions of the use of chloroplast transit peptides see U.S. Pat. No. 5,188,642 and U.S. Pat. No. 5,728,925, incorporated herein by reference. For description of the transit peptide region of an Arabidopsis EPSPS gene useful in the present invention, see Klee, H. J. et al (MGG (1987) 210:437-442).

[0051] Transgenic plants comprising or derived from plant cells of this invention transformed with recombinant DNA can be further enhanced with stacked traits, e.g. a crop plant having an enhanced trait resulting from expression of DNA disclosed herein in combination with herbicide and/or pest resistance traits. For example, genes of the current invention can be stacked with other traits of agronomic interest, such as a trait providing herbicide resistance, or insect resistance, such as using a gene from Bacillus thuringensis to provide resistance against lepidopteran, coliopteran, homopteran, hemiopteran, and other insects. Herbicides for which transgenic plant tolerance has been demonstrated and the method of the present invention can be applied include, but are not limited to, glyphosate, dicamba, glufosinate, sulfonylurea, bromoxynil and norflurazon herbicides. Polynucleotide molecules encoding proteins involved in herbicide tolerance are well-known in the art and include, but are not limited to, a polynucleotide molecule encoding 5-enolpyruvylshikimate-3-phosphate synthase (EPSPS) disclosed in U.S. Pat. Nos. 5,094,945; 5,627,061; 5,633,435 and 6,040,497 for imparting glyphosate tolerance; polynucleotide molecules encoding a glyphosate oxidoreductase (GOX) disclosed in U.S. Pat. No. 5,463,175 and a glyphosate-N-acetyl transferase (GAT) disclosed in U.S. Patent Application publication 2003/0083480 A1 also for imparting glyphosate tolerance; dicamba monooxygenase disclosed in U.S. Patent Application publication 2003/0135879 A1 for imparting dicamba tolerance; a polynucleotide molecule encoding bromoxynil nitrilase (Bxn) disclosed in U.S. Pat. No. 4,810,648 for imparting bromoxynil tolerance; a polynucleotide molecule encoding phytoene desaturase (crtl) described in Misawa et al, (1993) Plant J. 4:833-840 and Misawa et al, (1994) Plant J. 6:481-489 for norflurazon tolerance; a polynucleotide molecule encoding acetohydroxyacid synthase (AHAS, aka ALS) described in Sathasiivan et al. (1990) Nucl. Acids Res. 18:2188-2193 for imparting tolerance to sulfonylurea herbicides; polynucleotide molecules known as bar genes disclosed in DeBlock, et al. (1987) EMBO J. 6:2513-2519 for imparting glufosinate and bialaphos tolerance; polynucleotide molecules disclosed in U.S. Patent Application Publication 2003/010609 A1 for imparting N-amino methyl phosphonic acid tolerance; polynucleotide molecules disclosed in U.S. Pat. No. 6,107,549 for imparting pyridine herbicide resistance; molecules and methods for imparting tolerance to multiple herbicides such as glyphosate, atrazine, ALS inhibitors, isoxaflutole and glufosinate herbicides are disclosed in U.S. Pat. No. 6,376,754 and U.S. Patent Application Publication 2002/0112260, all of said U.S. patents and Patent Application Publications are incorporated herein by reference. Molecules and methods for imparting insect/nematode/virus resistance is disclosed in U.S. Pat. Nos. 5,250,515; 5,880,275; 6,506,599; 5,986,175 and U.S. Patent Application Publication 2003/0150017 A1, all of which are incorporated herein by reference.

### Plant Cell Transformation Methods

[0052] Numerous methods for transforming plant cells with recombinant DNA are known in the art and may be used in the present invention. Two commonly used methods for plant transformation are Agrobacterium-mediated transformation and microprojectile bombardment. Microprojectile bombardment methods are illustrated in U.S. Pat. Nos. 5,015,580 (soybean); 5,550,318 (corn); 5,538,880 (corn); 5,914,451 (soybean); 6,160,208 (corn); 6,399,861 (corn); 6,153,812 (wheat) and 6,365,807 (rice) and Agrobacterium-mediated transformation is described in U.S. Pat. Nos. 5,159,135 (cotton); 5,824,877 (soybean); 5,463,174 (canola); 5,591,616 (corn); 6,384,301 (soybean), 7,026,528 (wheat) and 6329571 (rice), all of which are incorporated herein by reference. For Agrobacterium tumefaciens based plant transformation systems, additional elements present on transformation constructs will include T-DNA left and right border sequences to facilitate incorporation of the recombinant polynucleotide into the plant genome.

[0053] In general it is useful to introduce recombinant DNA randomly, i.e. at a non-specific location, in the genome of a target plant line. In special cases it may be useful to target recombinant DNA insertion in order to achieve site-specific integration, for example, to replace an existing gene in the genome, to use an existing promoter in the plant genome, or to insert a recombinant polynucleotide at a predetermined site known to be active for gene expression. Several site specific recombination systems exist which are known to function in plants including cre-lox as disclosed in U.S. Pat. No. 4,959,317 and FLP-FRT as disclosed in U.S. Pat. No. 5,527,695, both incorporated herein by reference.

[0054] Transformation methods of this invention are preferably practiced in tissue culture on media and in a controlled environment. “Media” refers to the numerous nutrient mixtures that are used to grow cells in vitro, that is, outside of the intact living organism. Recipient cell targets include, but are not limited to, meristem cells, hypocotyls, calli, immature embryos and gametic cells such as microspores, pollen, sperm and egg cells. It is contemplated that any cell from which a fertile plant may be regenerated is useful as a recipient cell. Callus may be initiated from tissue sources including, but not limited to, immature embryos, hypocotyls, seedling apical meristems, microspores and the like. Cells capable of proliferating as callus are also recipient cells for genetic transformation. Practical transformation methods and materials for making transgenic plants of this invention, for example various media and recipient target cells, transformation of immature embryo cells and subsequent regeneration of fertile transgenic plants are disclosed in U.S. Pat. Nos. 6,194,636 and 6,232,526, which are incorporated herein by reference.

[0055] The seeds of transgenic plants can be harvested from fertile transgenic plants and be used to grow progeny generations of transformed plants of this invention including hybrid plants line for selection of plants having an enhanced trait. In addition to direct transformation of a plant with a recombinant DNA, transgenic plants can be prepared by crossing a first plant having a recombinant DNA with a second plant lacking the DNA. For example, recombinant DNA can be introduced into a first plant line that is amenable to transformation to produce a transgenic plant which can be crossed with a second plant line to introgress the recombinant DNA into the second plant line. A transgenic plant with recombinant DNA providing an enhanced trait, e.g. enhanced yield, can be crossed with transgenic plant line having other recombinant DNA that confers another trait, for example herbicide resistance or pest resistance, to produce progeny plants having recombinant DNA that confers both traits. Typically, in such breeding for combining traits the transgenic plant donating the additional trait is a male line and the transgenic plant carrying the base traits is the female line. The progeny of this cross will segregate such that some of the plants will carry the DNA for both parental traits and some will carry DNA for one parental trait; such plants can be identified by markers associated with parental recombinant DNA, e.g. marker identification by analysis for recombinant DNA or, in the case where a selectable marker is linked to the recombinant, by application of the selecting agent such as a herbicide for use with a herbicide tolerance marker, or by selection for the enhanced trait. Progeny plants carrying DNA for both parental traits can be crossed back into the female parent line multiple times, for example usually 6 to 8 generations, to produce a progeny plant with substantially the same genotype as one original transgenic parental line but for the recombinant DNA of the other transgenic parental line

[0056] In the practice of transformation DNA is typically introduced into only a small percentage of target plant cells in any one transformation experiment. Marker genes are used to provide an efficient system for identification of those cells that are stably transformed by receiving and integrating a recombinant DNA molecule into their genomes. Preferred marker genes provide selective markers which confer resistance to a selective agent, such as an antibiotic or a herbicide. Any of the herbicides to which plants of this invention may be resistant are useful agents for selective markers. Potentially transformed cells are exposed to the selective agent. In the population of surviving cells will be those cells where, generally, the resistance-conferring gene is integrated and expressed at sufficient levels to permit cell survival. Cells may be tested further to confirm stable integration of the exogenous DNA. Commonly used selective marker genes include those conferring resistance to antibiotics such as kanamycin and paromomycin (nptII), hygromycin B (aph IV), spectinomycin (aadA) and gentamycin (aac3 and aacC4) or resistance to herbicides such as glufosinate (bar or pat), dicamba (DMO) and glyphosate (aroA or EPSPS). Examples of such selectable markers are illustrated in U.S. Pat. Nos. 5,550,318; 5,633,435; 5,780,708 and 6,118,047, all of which are incorporated herein by reference. Selectable markers which provide an ability to visually identify transformants can also be employed, for example, a gene expressing a colored or fluorescent protein such as a luciferase or green fluorescent protein (GFP) or a gene expressing a beta-glucuronidase or uidA gene (GUS) for which various chromogenic substrates are known.

[0057] Plant cells that survive exposure to the selective agent, or plant cells that have been scored positive in a screening assay, may be cultured in regeneration media and allowed to mature into plants. Developing plantlets regenerated from transformed plant cells can be transferred to plant growth mix, and hardened off, for example, in an environmentally controlled chamber at about 85% relative humidity, 600 ppm CO₂, and 25-250 microeinsteins m⁻² s⁻¹ of light, prior to transfer to a greenhouse or growth chamber for maturation. Plants are regenerated from about 6 weeks to 10 months after a transformant is identified, depending on the initial tissue, and plant species. Plants may be pollinated using conventional plant breeding methods known to those of skill in the art and seed produced, for example self-pollination is commonly used with transgenic corn. The regenerated transformed plant or its progeny seed or plants can be tested for expression of the recombinant DNA and selected for the presence of enhanced agronomic trait.

### Transgenic Plants and Seeds

[0058] Transgenic plants derived from the plant cells of this invention are grown to generate transgenic plants having an enhanced trait as compared to a control plant and produce transgenic seed and haploid pollen of this invention. Such plants with enhanced traits are identified by selection of transformed plants or progeny seed for the enhanced trait. For efficiency a selection method is designed to evaluate multiple transgenic plants (events) comprising the recombinant DNA, for example multiple plants from 2 to 20 or more transgenic events. Transgenic plants grown from transgenic seed provided herein demonstrate improved agronomic traits that contribute to increased yield or other trait that provides increased plant value, including, for example, improved seed quality. Of particular interest are plants having enhanced water use efficiency, enhanced cold tolerance, increased yield, enhanced nitrogen use efficiency, enhanced seed protein and enhanced seed oil.

[0059] Table 2 provides a list of protein encoding DNA (“genes”) that are useful as recombinant DNA for production of transgenic plants with enhanced agronomic trait, the elements of Table 2 are described by reference to:

“PEP SEQ ID NO” identifies an amino acid sequence from SEQ ID NO: 359 to 716.
“NUC SEQ ID NO” identifies a DNA sequence from SEQ ID NO:1 to 358.
“BV id” is a reference to the identifying number in Table 4 of base vectors used for construction of the transformation vectors of the recombinant DNA. Construction of plant transformation constructs is illustrated in Example 1.
“Gene Name” which is a common name for protein encoded by the recombinant DNA.
“Annotation” refers to a description of the top hit protein obtained from an amino acid sequence query of each PEP SEQ ID NO to GenBank database of the National Center for Biotechnology Information (ncbi). More particularly, “gi” is the GenBank ID number for the top BLAST hit;
“description” refers to the description of the top BLAST hit;
“% id” refers to the percentage of identically matched amino acid residues along the length of the portion of the sequences which is aligned by BLAST (—F T) between the sequence of interest provided herein and the hit sequence in GenBank;

TABLE 2

| nuc | | | | | | | |
|---|---|---|---|---|---|---|---|
| seq | pep | | | | | | |
| ID | seq | | | | Annotation | | |
| NO | ID NO | Gene ID | BV id | Gene Name | % id | GenBank id | desciption |
| 1 | 359 | PHE0001295_7469 | 4 | rice cryptochrome 1- | 95 | gi\|50909767\| | ref\|XP_466372.1\|cryptochrome |
| | | | | AB073546 | | | 1a [Oryza sativa |
| | | | | | | | (japonica cultivar-group)] |
| 2 | 360 | PHE0002129_8308 | 16 | Nostoc sp. PCC 7120 | 93 | gi\|17133998\| | ref\|NP_488901.1\| |
| | | | | phosphoenolpyruvate | | | phosphoenolpyruvate |
| | | | | carboxylase | | | carboxylase [Nostoc sp. |
| | | | | | | | PCC 7120] |
| 3 | 361 | PHE0002132_4965 | 4 | maize | 80 | gi\|59803710\| | gb\|AAX07936.1\|phosphoenolpyruvate |
| | | | | phosphoenolpyruvate | | | carboxylase |
| | | | | carboxylase kinase 2 | | | kinase 2 [Zea mays] |
| 4 | 362 | PHE0002132_8653 | 19 | maize | 80 | gi\|59803710\| | gb\|AAX07936.1\|phosphoenolpyruvate |
| | | | | phosphoenolpyruvate | | | carboxylase |
| | | | | carboxylase kinase 2 | | | kinase 2 [Zea mays] |
| 5 | 363 | PHE0002133_7497 | 4 | maize | 82 | gi\|59803708\| | gb\|AAX07935.1\|phosphoenolpyruvate |
| | | | | phosphoenopyruvate | | | carboxylase |
| | | | | carboxylase kinase 3 | | | kinase 1 [Zea mays] |
| 6 | 364 | PHE0002693_8516 | 17 | wheat geranylgeranyl | 93 | gi\|23397035\| | gb\|AAN31803.1\|putative |
| | | | | reductase like 1 | | | geranylgeranyl reductase |
| | | | | sequence | | | [Arabidopsis thaliana] |
| 7 | 365 | PHE0002777_7490 | 4 | maize ferrochelatase-I | 85 | gi\|50725080\| | dbj\|BAD33213.1\|putative |
| | | | | like 2 sequence | | | ferrochelatase [Oryza |
| | | | | | | | sativa (japonica cultivar- |
| | | | | | | | group)] |
| 8 | 366 | PHE0002777_8472 | 6 | maize ferrochelatase-I | 85 | gi\|50725080\| | dbj\|BAD33213.1\|putative |
| | | | | like 2 sequence | | | ferrochelatase [Oryza |
| | | | | | | | sativa (japonica cultivar- |
| | | | | | | | group)] |
| 9 | 367 | PHE0002777_8726 | 19 | maize ferrochelatase-I | 85 | gi\|50725080\| | dbj\|BAD33213.1\|putative |
| | | | | like 2 sequence | | | ferrochelatase [Oryza |
| | | | | | | | sativa (japonica cultivar- |
| | | | | | | | group)] |
| 10 | 368 | PHE0002779_7478 | 4 | soybean | 89 | gi\|6272281\| | emb\|CAB60127.1\|cytosolic |
| | | | | phosphoglucomutase | | | phosphoglucomutase |
| | | | | like 1 sequence | | | [Pisum sativum] |
| 11 | 369 | PHE0002810_5803 | 9 | maize cytochrome | 92 | gi\|1870201\| | emb\|CAA72208.1\|cytochrome |
| | | | | P450 monooxygenase | | | p450 [Zea mays] |
| | | | | (CYP71B3) like 4 | | | emb\|CAA57423.1\| |
| | | | | sequence | | | cytochrome P450 [Zea |
| | | | | | | | mays] |
| 12 | 370 | PHE0002857_7502 | 4 | Zea Mays putative low | 61 | gi\|50934635\| | ref\|XP_476845.1\|putative |
| | | | | molecular early light- | | | low molecular mass early |
| | | | | inducible protein | | | light-induced |
| | | | | | | | protein, chloroplast |
| | | | | | | | precursor (ELIP) [Oryza |
| | | | | | | | sativa (japonica cultivar- |
| | | | | | | | group)] |
| 13 | 371 | PHE0002860_7494 | 4 | Zea Mays Unknown | 25 | gi\|15237638\| | ref\|NP_201222.1\|unknown |
| | | | | protein | | | protein [Arabidopsis |
| | | | | | | | thaliana] |
| 14 | 372 | PHE0002860_8694 | 19 | Zea Mays Unknown | 25 | gi\|15237638\| | ref\|NP_201222.1\|unknown |
| | | | | protein | | | protein [Arabidopsis |
| | | | | | | | thaliana] |
| 15 | 373 | PHE0003814_7802 | 17 | rice PsbS like | 85 | gi\|34908652\| | ref\|NP_915673.1\|putative |
| | | | | | | | photosystem II subunit |
| | | | | | | | (22 KDa) precursor [Oryza |
| | | | | | | | sativa (japonica cultivar- |
| | | | | | | | group)] |
| 16 | 374 | PHE0003838_5934 | 1 | soy G2604 like 1 | 79 | gi\|18398482\| | \|AAQ55219.1\|LSD1-like |
| | | | | | | | [Arabidopsis thaliana] |
| 17 | 375 | PHE0003845_5806 | 11 | Arabidopsis DWF4 | 88 | gi\|15229822\| | emb\|CAB62435.1\|steroid |
| | | | | | | | 22-alpha-hydroxylase |
| | | | | | | | (DWF4) [Arabidopsis |
| | | | | | | | thaliana] |
| 18 | 376 | PHE0003845_7028 | 17 | Arabidopsis DWF4 | 88 | gi\|15229822\| | ref\|NP_190635.1\|DWF4 |
| | | | | | | | (DWARF 4) [Arabidopsis |
| | | | | | | | thaliana] |
| 19 | 377 | PHE0003845_7413 | 2 | Arabidopsis DWF4 | 88 | gi\|15229822\| | ref\|NP_190635.1\|DWF4 |
| | | | | | | | (DWARF 4) [Arabidopsis |
| | | | | | | | thaliana] |
| 20 | 378 | PHE0004013_9281 | 9 | ARGOS-like | 68 | gi\|62734659\| | gb\|AAX96768.1\|expressed |
| | | | | | | | protein [Oryza sativa |
| | | | | | | | (japonica cultivar-group)] g |
| 21 | 379 | PHE0004021_4654 | 10 | Galdieria sulphuraria | 45 | gi\|83769256\| | dbj\|BAE59393.1\|unnamed |
| | | | | asparagine synthetase | | | protein product |
| | | | | | | | [Aspergillus oryzae] |
| 22 | 380 | PHE0004143_7850 | 1 | Arabidopsis putative | 100 | gi\|7267860\| | emb\|CAB78203.1\|phospholipid |
| | | | | glutathione peroxidase | | | hydroperoxide |
| | | | | | | | glutathione peroxidase |
| | | | | | | | [Arabidopsis thaliana] |
| 23 | 381 | PHE0004143_8160 | 19 | Arabidopsis putative | 92 | gi\|30681827\| | ref\|NP_192897.2\|ATGPX6 |
| | | | | glutathione peroxidase | | | (GLUTATHIONE |
| | | | | | | | PEROXIDASE 6); |
| | | | | | | | glutathione peroxidase |
| | | | | | | | [Arabidopsis thaliana] |
| 24 | 382 | PHE0004311_5022 | 1 | Arabidopsis | 99 | gi\|24209881\| | gb\|AAN41402.1\|aminopeptidase |
| | | | | aminopeptidase P | | | P [Arabidopsis |
| | | | | | | | thaliana] |
| 25 | 383 | PHE0004398_5136 | 4 | rice NPK1 kinase | 95 | gi\|50900060\| | ref\|XP_450818.1\|putative |
| | | | | domain only | | | protein kinase [Oryza |
| | | | | | | | sativa (japonica cultivar- |
| | | | | | | | group)] |
| 26 | 384 | PHE0004398_5757 | 13 | rice NPK1 kinase | 95 | gi\|50900060\| | ref\|XP_450818.1\|putative |
| | | | | domain only | | | protein kinase [Oryza |
| | | | | | | | sativa (japonica cultivar- |
| | | | | | | | group)] |
| 27 | 385 | PHE0004473_5214 | 4 | Arabidopsis putative | 69 | gi\|15241016\| | ref\|NP_198119.1\|DNA |
| | | | | histone H2A | | | binding [Arabidopsis |
| | | | | | | | thaliana] |
| 28 | 386 | PHE0004473_8803 | 19 | Arabidopsis putative | 69 | gi\|15241016\| | ref\|NP_198119.1\|DNA |
| | | | | histone H2A | | | binding [Arabidopsis |
| | | | | | | | thaliana] |
| 29 | 387 | PHE0004503_5244 | 4 | Arabidopsis nodulin | 100 | gi\|15240040\| | emb\|CAC05445.1\| |
| | | | | MtN3 family protein | | | senescence-associated |
| | | | | | | | protein (SAG29) |
| | | | | | | | [Arabidopsis thaliana] |
| 30 | 388 | PHE0004503_8801 | 19 | Arabidopsis nodulin | 100 | gi\|15240040\| | emb\|CAC05445.1\| |
| | | | | MtN3 family protein | | | senescence-associated |
| | | | | | | | protein (SAG29) |
| | | | | | | | [Arabidopsis thaliana] |
| 31 | 389 | PHE0004641_5519 | 9 | corn photosynthetic | 90 | gi\|126737\| | gb\|AAA33487.1\|NADP- |
| | | | | NADP-dependent | | | dependent malic enzyme |
| | | | | malic enzyme | | | (EC 1.1.1.40) |
| 32 | 390 | PHE0004642_5520 | 9 | corn non- | 85 | gi\|37147841\| | gb\|AAQ88396.1\|non- |
| | | | | photosynthetic NADP- | | | photosynthetic NADP- |
| | | | | dependent malic | | | malic enzyme [Zea mays] |
| | | | | enzyme | | | |
| 33 | 391 | PHE0004670_6044 | 9 | Arabidopsis putative | 100 | gi\|15225103\| | ref\|NP_180715.1\|ATGPX2 |
| | | | | glutathione peroxidase | | | (GLUTATHIONE |
| | | | | | | | PEROXIDASE 2); |
| | | | | | | | glutathione peroxidase |
| 34 | 392 | PHE0004683_8693 | 19 | Arabidopsis SUMO | 100 | gi\|18416454\| | gb\|AAN15413.1\| |
| | | | | activating enzyme 1a | | | ubiquitin activating |
| | | | | | | | enzyme-like protein |
| 35 | 393 | PHE0004742_5691 | 13 | rice putative | 67 | gi\|50948187\| | ref\|XP_483621.1\|putative |
| | | | | CRT/DRE binding | | | CRT/DRE binding factor |
| | | | | factor | | | [Oryza sativa (japonica |
| | | | | | | | cultivar-group)] |
| 36 | 394 | PHE0004747_5708 | 16 | Xenorhabdus | 75 | gi\|87120270\| | ref\|ZP_01076165.1\|methylmalonate- |
| | | | | nematophilus | | | semialdehydedehydrogenase |
| | | | | MMSDH-like | | | [Marinomonas sp. |
| | | | | | | | MED121] |
| 37 | 395 | PHE0004761_5728 | 4 | Arabidopsis | 92 | gi\|15218889\| | ref\|NP_174226.1\|nucleotide |
| | | | | transducin family | | | binding [Arabidopsis |
| | | | | protein/WD-40 | | | thaliana] |
| | | | | repeat family protein | | | |
| 38 | 396 | PHE0004762_5729 | 4 | Arabidopsis F-box | 89 | gi\|56790216\| | dbj\|BAB09749.1\| |
| | | | | family protein | | | unnamed protein product |
| | | | | | | | [Arabidopsis thaliana] |
| 39 | 397 | PHE0004762_7997 | 19 | Arabidopsis F-box | 89 | gi\|56790216\| | dbj\|BAB09749.1\| |
| | | | | family protein | | | unnamed protein product |
| | | | | | | | [Arabidopsis thaliana] |
| 40 | 398 | PHE0004766_5733 | 4 | soy ATP-binding- | 76 | gi\|15234447\| | gb\|AAD03441.1\|contains |
| | | | | cassette transporter | | | similarity to Guillardia |
| | | | | | | | theta ABC transporter |
| | | | | | | | (GB: AF041468) |
| | | | | | | | [Arabidopsis thaliana] |
| 41 | 399 | PHE0004779_5749 | 4 | Arabidopsis | 89 | gi\|15230092\| | ref\|NP_189073.1\|ATAMT1; |
| | | | | ammonium transporter | | | 3; ammonium |
| | | | | | | | transporter [Arabidopsis |
| | | | | | | | thaliana] |
| 42 | 400 | PHE0004779_8394 | 1 | Arabidopsis | 89 | gi\|15230092\| | ref\|NP_189073.1\|ATAMT1; |
| | | | | ammonium transporter | | | 3; ammonium |
| | | | | | | | transporter [Arabidopsis |
| | | | | | | | thaliana] |
| 43 | 401 | PHE0004780_5752 | 4 | Arabidopsis expressed | 92 | gi\|21536499\| | gb\|AAM60831.1\|unknown |
| | | | | protein | | | [Arabidopsis thaliana] |
| 44 | 402 | PHE0004782_5754 | 4 | Arabidopsis | 65 | gi\|18404589\| | ref\|NP_565874.1\|EMB1513; |
| | | | | hypothetical protein | | | copper ion transporter |
| | | | | | | | [Arabidopsis thaliana] |
| 45 | 403 | PHE0004784_5760 | 1 | soy S- | 72 | gi\|21239731\| | gb\|AAM44307.1\|S- |
| | | | | adenosylmethionine | | | adenosylmethionine |
| | | | | decarboxylase | | | decarboxylase [x |
| | | | | | | | Citrofortunella mitis] |
| 46 | 404 | PHE0004787_7988 | 19 | rice Nitrogen | 73 | gi\|50878396\| | gb\|AAT85171.1\|putative |
| | | | | regulatory protein P-II | | | P-II nitrogen sensing |
| | | | | | | | protein |
| 47 | 405 | PHE0004791_5771 | 4 | Xenorhabdus | 73 | gi\|36786606\| | emb\|CAE15666.1\|Flavohemoprotein |
| | | | | nematophila | | | (hemoglobin- |
| | | | | Flavohemoprotein | | | like protein) |
| | | | | | | | (flavohemoglobin) |
| | | | | | | | (dihydropteridine |
| | | | | | | | reductase) |
| | | | | | | | (ferrisiderophore |
| | | | | | | | reductase B) (nitric oxide |
| | | | | | | | dioxygenase) (NOD) |
| | | | | | | | [Photorhabdus |
| | | | | | | | luminescens subsp. |
| | | | | | | | laumondii TTO1] |
| 48 | 406 | PHE0004805_5791 | 17 | corn hypothetical | 51 | gi\|50509855\| | dbj\|BAD32027.1\|unknown |
| | | | | protein | | | protein [Oryza sativa |
| | | | | | | | (japonica cultivar-group)] |
| 49 | 407 | PHE0004806_5792 | 17 | rice OTU-like cysteine | 90 | gi\|50915926\| | ref\|XP_468427.1\|OTU- |
| | | | | protease-like | | | like cysteine protease-like |
| | | | | | | | [Oryza sativa (japonica |
| | | | | | | | cultivar-group)] |
| 50 | 408 | PHE0004807_5793 | 17 | corn cleavage | 97 | gi\|62733690\| | gb\|AAX95801.1\|RNA |
| | | | | stimulation factor 64 | | | recognition motif. (a.k.a. |
| | | | | | | | RRM, RBD, or RNP |
| | | | | | | | domain), putative [Oryza |
| | | | | | | | sativa (japonica cultivar- |
| | | | | | | | group)] |
| 51 | 409 | PHE0004808_5794 | 17 | corn cysteine | 63 | gi\|2224810\| | emb\|CAB09698.1\|cysteine |
| | | | | proteinase | | | proteinase [Hordeum |
| | | | | | | | vulgare subsp. vulgare] |
| 52 | 410 | PHE0004809_5795 | 17 | corn | 71 | gi\|34898886\| | ref\|NP_910789.1\|putative |
| | | | | MRT4577_261462 | | | protein phosphatase 2C |
| | | | | putative protein | | | (PP2C) [Oryza sativa |
| | | | | phosphatase 2C | | | (japonica cultivar-group)] |
| 53 | 411 | PHE0004810_5796 | 17 | rice MRT4577_41500 | 90 | gi\|50948089\| | ref\|XP_483572.1\|putative |
| | | | | putative calcium- | | | calcium-dependent |
| | | | | dependent protein | | | protein kinase [Oryza |
| | | | | kinase | | | sativa (japonica cultivar- |
| | | | | | | | group)] |
| 54 | 412 | PHE0004811_5798 | 17 | rice MRT4577_35987 | 78 | gi\|50911677\| | ref\|XP_467246.1\|zinc |
| | | | | C3HC4-type RING | | | finger (C3HC4-type |
| | | | | finger | | | RING finger)-like [Oryza |
| | | | | | | | sativa (japonica cultivar- |
| | | | | | | | group)] |
| 55 | 413 | PHE0004812_5799 | 17 | rice | 80 | gi\|30698518\| | dbj\|BAC76607.1\|plastid |
| | | | | MRT4577_148933 | | | sigma factor SIG5 [Oryza |
| | | | | plastid sigma factor | | | sativa (japonica cultivar- |
| | | | | SIG5 | | | group)] |
| 56 | 414 | PHE0004813_5800 | 17 | corn putative zinc | 85 | gi\|57900442\| | sp\|Q5JLB5\|ZFNL2_ORYSA |
| | | | | finger protein | | | Zinc finger CCCH |
| | | | | | | | type domain containing |
| | | | | | | | protein ZFN-like 2 |
| 57 | 415 | PHE0004815_5802 | 17 | corn protein kinase | 51 | gi\|15237684\| | ref\|NP_200660.1\|ATP |
| | | | | family protein | | | binding/kinase/protein |
| | | | | | | | kinase/protein |
| | | | | | | | serine/threonine kinase/ |
| | | | | | | | protein-tyrosine kinase |
| | | | | | | | [Arabidopsis thaliana] |
| 58 | 416 | PHE0004827_5825 | 4 | corn phosphate- | 74 | gi\|50912943\| | ref\|XP_467879.1\|putative |
| | | | | induced protein 1-like | | | phi-1 [Oryza sativa |
| | | | | (EXORDIUM) | | | (japonica cultivar-group)] |
| 59 | 417 | PHE0004830_5828 | 4 | Arabidopsis putative | 91 | gi\|15231772\| | ref\|NP_188021.1\|RSH2 |
| | | | | RelA/SpoT protein | | | (RELA-SPOT |
| | | | | | | | HOMOLOG); catalytic |
| | | | | | | | [Arabidopsis thaliana] |
| | | | | | | | dbj\|BAB02337-1\| |
| | | | | | | | unnamed protein product |
| | | | | | | | [Arabidopsis thaliana] |
| 60 | 418 | PHE0004845_5852 | 4 | Arabidopsis Beta | 96 | gi\|15235959\| | ref\|NP_194300.1\|BETA- |
| | | | | carotene hydroxilase | | | OHASE 1 (BETA- |
| | | | | | | | HYDROXYLASE 1);] |
| 61 | 419 | PHE0004856_7855 | 1 | Arabidopsis | 93 | gi\|22331730\| | ref\|NP_190653.2\|protein |
| | | | | phototropic-responsive | | | binding/signal |
| | | | | NPH3 family protein | | | transducer [Arabidopsis |
| | | | | | | | thaliana] |
| 62 | 420 | PHE0004859_5896 | 4 | Arabidopsis thaliana | 77 | gi\|15236062\| | ref\|NP_194901.1\|GDU1 |
| | | | | Glutamine dumper 1 | | | (GLUTAMINE |
| | | | | | | | DUMPER 1) |
| | | | | | | | [Arabidopsis thaliana] |
| 63 | 421 | PHE0004859_5917 | 8 | Arabidopsis thaliana | 77 | gi\|15236062\| | ref\|NP_194901.1\|GDU1 |
| | | | | Glutamine dumper 1 | | | (GLUTAMINE |
| | | | | | | | DUMPER 1) |
| | | | | | | | [Arabidopsis thaliana] |
| 64 | 422 | PHE0004883_5935 | 1 | Arabidopsis | 89 | gi\|15240864\| | ref\|NP_198641.1\|ATP |
| | | | | serine/threonine | | | binding/kinase/protein |
| | | | | protein kinase | | | kinase/protein |
| | | | | | | | serine/threonine kinase/ |
| | | | | | | | protein-tyrosine kinase |
| | | | | | | | [Arabidopsis thaliana] |
| 65 | 423 | PHE0004886_5938 | 4 | Arabidopsis thaliana | 94 | gi\|4406770\| | gb\|AAD20081.1\|unknown |
| | | | | GEK1 | | | protein [Arabidopsis |
| | | | | | | | thaliana] |
| 66 | 424 | PHE0004887_5939 | 4 | Zea mays GEK1-like | 74 | gi\|50944457\| | ref\|XP_481756.1\|putative |
| | | | | | | | GEKO1 [Oryza sativa |
| | | | | | | | (japonica cultivar-group)] |
| 67 | 425 | PHE0004887_5940 | 16 | Zea mays GEK1-like | 74 | gi\|50944457\| | ref\|XP_481756.1\|putative |
| | | | | | | | GEKO1 [Oryza sativa |
| | | | | | | | (japonica cultivar-group)] |
| 68 | 426 | PHE0004887_8704 | 19 | Zea mays GEK1-like | 74 | gi\|50944457\| | ref\|XP_481756.1\|putative |
| | | | | | | | GEKO1 [Oryza sativa |
| | | | | | | | (japonica cultivar-group)] |
| 69 | 427 | PHE0004889_7961 | 19 | Corn OsRAA1-like | 75 | gi\|34902924\| | dbj\|BAB07982.1\|FPF1 |
| | | | | | | | protein-like [Oryza sativa |
| | | | | | | | (japonica cultivar-group)] |
| 70 | 428 | PHE0004894_5948 | 17 | corn plastid division | 79 | gi\|50929441\| | gb\|AAK64282.1\|plastid |
| | | | | protein FtsZ | | | division protein FtsZ |
| | | | | | | | [Oryza sativa] |
| 71 | 429 | PHE0004894_5950 | 10 | corn plastid division | 79 | gi\|50929441\| | gb\|AAK64282.1\|plastid |
| | | | | protein FtsZ | | | division protein FtsZ |
| | | | | | | | [Oryza sativa] |
| 72 | 430 | PHE0004894_5951 | 4 | corn plastid division | 79 | gi\|50929441\| | gb\|AAK64282.1\|plastid |
| | | | | protein FtsZ | | | division protein FtsZ |
| | | | | | | | [Oryza sativa] |
| 73 | 431 | PHE0004895_5952 | 4 | corn deoxyhypusine | 79 | gi\|1019423\| | gb\|AAC49075.1\|deoxyhypusine |
| | | | | synthase 3 | | | synthase |
| 74 | 432 | PHE0004895_7135 | 15 | corn deoxyhypusine | 79 | gi\|1019423\| | gb\|AAC49075.1\|deoxyhypusine |
| | | | | synthase 3 | | | synthase |
| 75 | 433 | PHE0004895_7137 | 17 | corn deoxyhypusine | 79 | gi\|1019423\| | gb\|AAC49075.1\|deoxyhypusine |
| | | | | synthase 3 | | | synthase |
| 76 | 434 | PHE0004895_8610 | 19 | corn deoxyhypusine | 79 | gi\|1019423\| | gb\|AAC49075.1\|deoxyhypusine |
| | | | | synthase 3 | | | synthase |
| 77 | 435 | PHE0004902_5959 | 4 | Glycine max soy type- | 59 | gi\|33330864\| | gb\|AAQ10675.1\|type-A |
| | | | | A response regulator | | | response regulator |
| | | | | | | | [Catharanthus roseus] |
| 78 | 436 | PHE0004903_5960 | 4 | Arabidopsis | 82 | gi\|18412607\| | ref\|NP_565228.1\|unknown |
| | | | | expressed protein | | | protein [Arabidopsis |
| | | | | | | | thaliana] |
| 79 | 437 | PHE0004905_5962 | 4 | Arabidopsis calcium- | 86 | gi\|15236560\| | ref\|NP_194096.1\|CDPK6 |
| | | | | dependent protein | | | (CALCIUM- |
| | | | | kinase | | | DEPENDENT PROTEIN |
| | | | | | | | KINASE 6); |
| 80 | 438 | PHE0004909_5966 | 4 | Arabidopsis protein | 83 | gi\|42561860\| | ref\|NP_172415.2\|ATP |
| | | | | kinase family protein | | | binding/kinase/protein |
| | | | | | | | kinase/protein |
| | | | | | | | serine/threonine kinase/ |
| | | | | | | | protein-tyrosine kinase |
| | | | | | | | [Arabidopsis thaliana] |
| 81 | 439 | PHE0004911_5968 | 4 | Arabidopsis | 91 | gi\|15235475\| | ref\|NP_195437.1\|HCF164; |
| | | | | thioredoxin family | | | thiol-disulfide exchange |
| | | | | protein | | | intermediate [Arabidopsis |
| | | | | | | | thaliana] |
| 82 | 440 | PHE0004912_5969 | 4 | Arabidopsis putative | 87 | gi\|15235432\| | ref\|NP_192172.1\|ATP |
| | | | | serine/threonine | | | binding/kinase/protein |
| | | | | protein kinase | | | kinase/protein |
| | | | | | | | serine/threonine kinase/ |
| | | | | | | | protein-tyrosine kinase |
| | | | | | | | [Arabidopsis thaliana] |
| 83 | 441 | PHE0004918_5975 | 4 | Arabidopsis expressed | 90 | gi\|42571697\| | ref\|NP_973939.1\|unknown |
| | | | | protein | | | protein [Arabidopsis |
| | | | | | | | thaliana] |
| 84 | 442 | PHE0004921_5979 | 4 | corn hypothetical | 80 | gi\|50917557\| | ref\|XP_469175.1\|hypothetical |
| | | | | protein | | | protein [Oryza sativa |
| | | | | | | | (japonica cultivar-group)] |
| 85 | 443 | PHE0004928_5986 | 4 | Arabidopsis putative | 100 | gi\|15227956\| | gb\|AAL07163.1\|putative |
| | | | | peptidyl-prolyl cis- | | | peptidyl-prolyl cis-trans |
| | | | | trans isomerase | | | isomerase [Arabidopsis |
| | | | | | | | thaliana] |
| 86 | 444 | PHE0004932_6045 | 9 | Arabidopsis PUR | 92 | gi\|30685174\| | ref\|NP_850182.1\|PUR |
| | | | | alpha-1 protein | | | ALPHA-1; nucleic acid |
| | | | | | | | binding [Arabidopsis |
| | | | | | | | thaliana]] |
| 87 | 445 | PHE0004941_5997 | 4 | Arabidopsis dehydrin | 42 | gi\|30693389\| | sp\|P25863\|XERO1_ARATH |
| | | | | | | | Dehydrin Xero 1 |
| | | | | | | | gb\|AAB00375.1\|dehydrin |
| 88 | 446 | PHE0004948_6003 | 9 | corn PUR alpha-1 | 97 | gi\|34902984\| | ref\|NP_912839.1\|unnamed |
| | | | | protein | | | protein product [Oryza |
| | | | | | | | sativa (japonica cultivar- |
| | | | | | | | group)] |
| 89 | 447 | PHE0004966_6028 | 4 | Arabidopsis sugar | 97 | gi\|56381949\| | ref\|NP_200733.2\| |
| | | | | transporter family | | | carbohydrate transporter/ |
| | | | | protein | | | sugar porter [Arabidopsis |
| | | | | | | | thaliana] |
| 90 | 448 | PHE0004968_6030 | 4 | Arabidopsis RNase L | 100 | gi\|22328793\| | gb\|AAN15617.1\|RNase L |
| | | | | inhibitor-like protein | | | inhibitor-like protein |
| | | | | | | | [Arabidopsis thaliana] |
| 91 | 449 | PHE0004977_6043 | 9 | Mortierella | 95 | gi\|15099959\| | gb\|AAK84179.1\|diacylglycerol |
| | | | | ramanniana | | | acyltransferase type |
| | | | | diacylglycerol | | | 2A [Mortierella |
| | | | | acyltransferase type | | | ramanniana] |
| | | | | 2A | | | |
| 92 | 450 | PHE0004979_6047 | 3 | yeast SUC2 | 100 | gi\|50554053\| | ref\|XP_504435.1\|YIXPR2: |
| | | | | | | | SUC2 [Yarrowia |
| | | | | | | | lipolytica] |
| 93 | 451 | PHE0004984_7235 | 4 | Arabidopsis putative | 100 | gi\|15232838\| | ref\|NP_186851.1\|amino |
| | | | | aspartate kinase | | | acid binding/aspartate |
| | | | | | | | kinase [Arabidopsis |
| | | | | | | | thaliana] |
| 94 | 452 | PHE0004984_8782 | 19 | Arabidopsis putative | 100 | gi\|15232838\| | ref\|NP_186851.1\|amino |
| | | | | aspartate kinase | | | acid binding/aspartate |
| | | | | | | | kinase [Arabidopsis |
| | | | | | | | thaliana] |
| 95 | 453 | PHE0004989_8115 | 19 | Arabidopsis CBS | 96 | gi\|42569036\| | ref\|NP_179058.3\|unknown |
| | | | | domain-containing | | | protein [Arabidopsis |
| | | | | protein | | | thaliana] |
| 96 | 454 | PHE0004991_8092 | 19 | Arabidopsis auxin- | 77 | gi\|15241259\| | ref\|NP_199889.1\|unknown |
| | | | | responsive family | | | protein [Arabidopsis |
| | | | | protein | | | thaliana] |
| 97 | 455 | PHE0004993_6062 | 4 | soy putative protein | 50 | gi\|18423511\| | ref\|NP_568793.1\|unknown |
| | | | | | | | protein [Arabidopsis |
| | | | | | | | thaliana] |
| 98 | 456 | PHE0004993_8014 | 19 | soy putative protein | 50 | gi\|18423511\| | ref\|NP_568793.1\|unknown |
| | | | | | | | protein [Arabidopsis |
| | | | | | | | thaliana] |
| 99 | 457 | PHE0004993_8682 | 19 | soy putative protein | 50 | gi\|18423511\| | ref\|NP_568793.1\|unknown |
| | | | | | | | protein [Arabidopsis |
| | | | | | | | thaliana] |
| 100 | 458 | PHE0005002_6071 | 4 | corn putative | 79 | gi\|33321009\| | gb\|AAQ06256.1\|putative |
| | | | | magnesium- | | | magnesium- |
| | | | | protoporphyrin IX | | | protoporphyrin IX |
| | | | | methyltransferase | | | methyltransferase |
| | | | | | | | [Sorghum bicolor] |
| 101 | 459 | PHE0005003_7032 | 4 | corn putative | 83 | gi\|50905547\| | ref\|XP_464262.1\|putative |
| | | | | porphobilinogen | | | porphobilinogen |
| | | | | deaminase | | | deaminase [Oryza sativa |
| | | | | | | | (japonica cultivar-group)] |
| 102 | 460 | PHE0005008_6077 | 4 | Arabidopsis two- | 91 | gi\|30679083\| | ref\|NP_850511.1\|ARR22 |
| | | | | component responsive | | | (ARABIDOPSIS |
| | | | | regulator family | | | RESPONSE |
| | | | | protein | | | REGULATOR 22); two- |
| | | | | | | | component response |
| | | | | | | | regulator [Arabidopsis |
| | | | | | | | thaliana] |
| 103 | 461 | PHE0005009_6078 | 4 | Arabidopsis ubiquitin- | 100 | gi\|22331064\| | ref\|NP_566459.2\|FUS9 |
| | | | | conjugating enzyme | | | (FUSCA 9); ubiquitin |
| | | | | | | | conjugating enzyme |
| | | | | | | | [Arabidopsis thaliana] |
| 104 | 462 | PHE0005010_6079 | 4 | corn ETCHED1 | 94 | gi\|48596293\| | emb\|CAD45039.1\|ETCHED1 |
| | | | | protein | | | protein [Zea mays] |
| 105 | 463 | PHE0006003_7195 | 13 | rice OSISAP1 | 71 | gi\|37548823\| | gb\|AAN15744.1\|multiple |
| | | | | | | | stress-associated zinc- |
| | | | | | | | finger protein |
| 106 | 464 | PHE0006003_7205 | 1 | rice OSISAP1 | 71 | gi\|37548823\| | gb\|AAN15744.1\|multiple |
| | | | | | | | stress-associated zinc- |
| | | | | | | | finger protein |
| 107 | 465 | PHE0006018_7098 | 4 | corn translational | 90 | gi\|11181616\| | gb\|AAG32661.1\|translational |
| | | | | elongation factor EF- | | | elongation factor EF- |
| | | | | TuM | | | TuM [Zea mays] |
| 108 | 466 | PHE0006021_7077 | 4 | rice root specific | 100 | gi\|38678114\| | dbj\|BAD03969.1\|root |
| | | | | pathogenesis-related | | | specific pathogenesis- |
| | | | | protein 10 | | | related protein 10 [Oryza |
| | | | | | | | sativa (japonica cultivar- |
| | | | | | | | group)] |
| 109 | 467 | PHE0006021_8737 | 19 | rice root specific | 100 | gi\|38678114\| | dbj\|BAD03969.1\|root |
| | | | | pathogenesis-related | | | specific pathogenesis- |
| | | | | protein 10 | | | related protein 10 |
| 110 | 468 | PHE0006043_7080 | 4 | Arabidopsis glycosyl | 100 | gi\|18409445\| | ref\|NP_564983.1\|transferase, |
| | | | | transferase family 8 | | | transferring glycosyl |
| | | | | protein | | | groups/transferase, |
| | | | | | | | transferring hexosyl |
| | | | | | | | groups |
| 111 | 469 | PHE0006043_8788 | 19 | Arabidopsis glycosyl | 100 | gi\|18409445\| | ref\|NP_564983.1\|transferase, |
| | | | | transferase family 8 | | | transferring glycosyl |
| | | | | protein | | | groups/transferase, |
| | | | | | | | transferring hexosyl |
| | | | | | | | groups |
| 112 | 470 | PHE0006047_7234 | 4 | soy hydroperoxide | 69 | gi\|5830465\| | emb\|CAB54847.1\|hydroperoxide |
| | | | | lyase | | | lyase [Medicago |
| | | | | | | | sativa] |
| 113 | 471 | PHE0006047_8766 | 19 | soy hydroperoxide | 69 | gi\|5830465\| | emb\|CAB54847.1\|hydroperoxide |
| | | | | lyase | | | lyase [Medicago |
| | | | | | | | sativa] |
| 114 | 472 | PHE0006048_7094 | 4 | soy | 90 | gi\|13124865\| | gb\|AAK11734.1\|serine/threonine/ |
| | | | | serine/threonine/tyrosine | | | tyrosine kinase |
| | | | | kinase | | | [Arachis hypogaea] |
| 115 | 473 | PHE0006048_8785 | 19 | soy | 90 | gi\|13124865\| | gb\|AAK11734.1\|serine/threonine/ |
| | | | | serine/threonine/tyrosine | | | tyrosine kinase |
| | | | | kinase | | | [Arachis hypogaea] |
| 116 | 474 | PHE0006049_7107 | 4 | soy putative non-green | 42 | gi\|18404784\| | gb\|AAC67363.2\|putative |
| | | | | plastid inner envelope | | | non-green plastid inner |
| | | | | membrane protein | | | envelope membrane |
| | | | | | | | protein [Arabidopsis |
| | | | | | | | thaliana] |
| 117 | 475 | PHE0006051_7097 | 4 | Arabidopsis ubiquitin | 91 | gi\|15238468\| | ref\|NP_201348.1\|cysteine- |
| | | | | carboxyl-terminal | | | type endopeptidase/ |
| | | | | hydrolase family | | | ubiquitin thiolesterase |
| | | | | protein | | | [Arabidopsis thaliana] |
| 118 | 476 | PHE0006054_7095 | 4 | Arabidopsis GTP- | 92 | gi\|30680751\| | dbj\|BAB11522.1\|GTP- |
| | | | | binding protein | | | binding protein |
| | | | | | | | [Arabidopsis thaliana] |
| 119 | 477 | PHE0006054_8779 | 19 | Arabidopsis GTP- | 92 | gi\|30680751\| | dbj\|BAB11522.1\|GTP- |
| | | | | binding protein | | | binding protein |
| | | | | | | | [Arabidopsis thaliana] |
| 120 | 478 | PHE0006059_7042 | 4 | corn heat-shock | 74 | gi\|51964000\| | ref\|XP_465165.1\|putative |
| | | | | protein | | | DnaJ-like protein [Oryza |
| | | | | | | | sativa (japonica cultivar- |
| | | | | | | | group)] |
| 121 | 479 | PHE0006061_7051 | 4 | corn calcineurin-like | 94 | gi\|50251955\| | dbj\|BAD27890.1\|putative |
| | | | | phosphoesterase | | | vacuolar protein sorting; |
| | | | | family protein | | | Vps29p [Oryza sativa |
| | | | | | | | (japonica cultivar-group)] |
| 122 | 480 | PHE0006062_7058 | 4 | corn putative ATP | 70 | gi\|50905037\| | ref\|XP_464007.1\|putative |
| | | | | synthase | | | ATP synthase [Oryza |
| | | | | | | | sativa (japonica cultivar- |
| | | | | | | | group)] |
| 123 | 481 | PHE0006063_7049 | 4 | corn putative pyruvate | 85 | gi\|77557068\| | gb\|ABA99864.1\|pyruvate |
| | | | | dehydrogenase E1 | | | dehydrogenase E1 beta |
| | | | | beta subunit | | | subunit [Oryza sativa |
| | | | | | | | (japonica cultivar-group)] |
| 124 | 482 | PHE0006068_7064 | 4 | corn protein kinase | 80 | gi\|50924460\| | ref\|XP_472590.1\|OSJNBa0006B20.13 |
| | | | | family protein | | | [Oryza sativa |
| | | | | | | | (japonica cultivar-group)] |
| 125 | 483 | PHE0006069_7065 | 4 | corn unknown protein | 75 | gi\|50924572\| | ref\|XP_472645.1\|OSJNBa0027P08.10 |
| | | | | | | | [Oryza sativa |
| | | | | | | | (japonica cultivar-group)] |
| 126 | 484 | PHE0006071_7068 | 4 | corn pentatricopeptide | 44 | gi\|50905575\| | ref\|XP_464276.1\|putative |
| | | | | (PPR) repeat- | | | pentatricopeptide (PPR) |
| | | | | containing protein | | | repeat-containing protein |
| | | | | | | | [Oryza sativa (japonica |
| | | | | | | | cultivar-group)] |
| 127 | 485 | PHE0006072_7071 | 4 | corn unknown protein | 53 | gi\|77554714\| | gb\|ABA97510.1\|transposon |
| | | | | | | | protein, putative, |
| | | | | | | | CACTA, En/Spm sub- |
| | | | | | | | class [Oryza sativa |
| | | | | | | | (japonica cultivar-group)] |
| 128 | 486 | PHE0006074_7060 | 4 | corn putative | 44 | gi\|18568267\| | gb\|AAL75999.1\|putative |
| | | | | polyprotein | | | polyprotein [Zea mays] |
| 129 | 487 | PHE0006076_7052 | 4 | Arabidopsis Clavata3/ | 100 | gi\|18390629\| | ref\|NP_563763.1\|CLE3 |
| | | | | ESR-Related-3 | | | (CLAVATA3/ESR- |
| | | | | | | | RELATED 3); receptor |
| | | | | | | | binding [Arabidopsis |
| | | | | | | | thaliana] |
| 130 | 488 | PHE0006076_7331 | 1 | Arabidopsis Clavata3/ | 100 | gi\|18390629\| | ref\|NP_563763.1\|CLE3 |
| | | | | ESR-Related-3 | | | (CLAVATA3/ESR- |
| | | | | | | | RELATED 3); receptor |
| | | | | | | | binding [Arabidopsis |
| | | | | | | | thaliana] |
| 131 | 489 | PHE0006077_7045 | 4 | Arabidopsis | 100 | gi\|15242249\| | sp\|P46690\|GASA4_ARATH |
| | | | | gibberellin-regulated | | | Gibberellin-regulated |
| | | | | protein 4 | | | protein 4 precursor |
| 132 | 490 | PHE0006077_7343 | 1 | Arabidopsis | 100 | gi\|15242249\| | emb\|CAA66909.1\| |
| | | | | gibberellin-regulated | | | GASA4 [Arabidopsis |
| | | | | protein 4 | | | thaliana] |
| | | | | | | | sp\|P46690\|GASA4_ARATH |
| | | | | | | | Gibberellin-regulated |
| | | | | | | | protein 4 precursor |
| 133 | 491 | PHE0006079_7044 | 4 | Arabidopsis sucrose- | 100 | gi\|18409555\| | ref\|NP_566964.1\|SPP2 |
| | | | | phosphatase | | | (sucrose-phosphatase 2); |
| | | | | | | | catalytic/sucrose- |
| | | | | | | | phosphatase [Arabidopsis |
| | | | | | | | thaliana] |
| 134 | 492 | PHE0006079_7337 | 1 | Arabidopsis sucrose- | 100 | gi\|18409555\| | ref\|NP_566964.1\|SPP2 |
| | | | | phosphatase | | | (sucrose-phosphatase 2); |
| | | | | | | | catalytic/sucrose- |
| | | | | | | | phosphatase [Arabidopsis |
| | | | | | | | thaliana] |
| 135 | 493 | PHE0006082_7330 | 1 | soy stress-induced | 66 | gi\|79325071\| | emb\|CAB78283.1\|stress- |
| | | | | protein sti1-like | | | induced protein sti1-like |
| | | | | protein | | | protein [Arabidopsis |
| | | | | | | | thaliana] |
| 136 | 494 | PHE0006088_7063 | 14 | CTP-RtACL | 70 | gi\|71004972\| | ref\|XP_757152.1\|hypothetical |
| | | | | | | | protein UM01005.1 |
| | | | | | | | [Ustilago maydis 521] |
| 137 | 495 | PHE0006089_7061 | 4 | Arabidopsis brix | 94 | gi\|18404250\| | ref\|NP_564618.1\|unknown |
| | | | | domain-containing | | | protein [Arabidopsis |
| | | | | protein | | | thaliana] |
| 138 | 496 | PHE0006089_7334 | 1 | Arabidopsis brix | 94 | gi\|18404250\| | ref\|NP_564618.1\|unknown |
| | | | | domain-containing | | | protein [Arabidopsis |
| | | | | protein | | | thaliana] |
| 139 | 497 | PHE0006091_7074 | 4 | Arabidopsis putative | 94 | gi\|15224901\| | ref\|NP_181390.1\|DNA |
| | | | | elongation factor | | | binding/transcription |
| | | | | | | | factor [Arabidopsis |
| | | | | | | | thaliana] |
| 140 | 498 | PHE0006091_7341 | 1 | Arabidopsis putative | 94 | gi\|15224901\| | ref\|NP_181390.1\|DNA |
| | | | | elongation factor | | | binding/transcription |
| | | | | | | | factor [Arabidopsis |
| | | | | | | | thaliana] |
| 141 | 499 | PHE0006092_7062 | 4 | Arabidopsis | 90 | gi\|30695647\| | ref\|NP_849806.1\|mRNA |
| | | | | oligouridylate-binding | | | 3′-UTR binding |
| | | | | protein | | | [Arabidopsis thaliana] |
| 142 | 500 | PHE0006092_7336 | 1 | Arabidopsis | 90 | gi\|30695647\| | ref\|NP_849806.1\|mRNA |
| | | | | oligouridylate-binding | | | 3′-UTR binding |
| | | | | protein | | | [Arabidopsis thaliana] |
| 143 | 501 | PHE0006093_7066 | 4 | Arabidopsis putative | 84 | gi\|2583121\| | gb\|AAB82630.1\|unknown |
| | | | | tRNA | | | protein [Arabidopsis |
| | | | | 2″phosphotransferase | | | thaliana] |
| 144 | 502 | PHE0006093_7327 | 1 | Arabidopsis putative | 84 | gi\|2583121\| | gb\|AAB82630.1\|unknown |
| | | | | tRNA | | | protein [Arabidopsis |
| | | | | 2″phosphotransferase | | | thaliana] |
| 145 | 503 | PHE0006094_7231 | 4 | Arabidopsis chalcone | 100 | gi\|15233190\| | ref\|NP_191072.1\|TT5 |
| | | | | flavanone isomerase | | | (TRANSPARENT |
| | | | | | | | TESTA 5); chalcone |
| | | | | | | | isomerase [Arabidopsis |
| | | | | | | | thaliana] |
| 146 | 504 | PHE0006094_7333 | 1 | Arabidopsis chalcone | 100 | gi\|15233190\| | ref\|NP_191072.1\|TT5 |
| | | | | flavanone isomerase | | | (TRANSPARENT |
| | | | | | | | TESTA 5); chalcone |
| | | | | | | | isomerase [Arabidopsis |
| | | | | | | | thaliana] |
| 147 | 505 | PHE0006154_7204 | 14 | E. coli ATP-dependent | 100 | gi\|85675091\| | dbj\|BAA15500.2\|6- |
| | | | | phosphofructokinase | | | phosphofructokinase II |
| | | | | B (pfkB) | | | [Escherichia coli W3110] |
| 148 | 506 | PHE0006160_7265 | 14 | pyrophosphate- | 92 | gi\|1346693\| | sp\|P29495\|PFP_PROFRPyrophosphate-- |
| | | | | dependent | | | fructose 6- |
| | | | | phosphofructokinase | | | phosphate 1- |
| | | | | (PPi-PFK) | | | phosphotransferase |
| 149 | 507 | PHE0006160_7286 | 9 | pyrophosphate- | 92 | gi\|1346693\| | gb\|AAA25675.1\| |
| | | | | dependent | | | pyrophosphate-frustose 6- |
| | | | | phosphofructokinase | | | phosphate 1- |
| | | | | (PPi-PFK) | | | phosphotransferase |
| 150 | 508 | PHE0006160_8851 | 14 | pyrophosphate- | 92 | gi\|1346693\| | sp\|P29495\|PFP_PROFRPyrophosphate-- |
| | | | | dependent | | | fructose 6- |
| | | | | phosphofructokinase | | | phosphate 1- |
| | | | | (PPi-PFK) | | | phosphotransferase |
| 151 | 509 | PHE0006161_7215 | 9 | ATP-dependent | 96 | gi\|2956754\| | sp\|O42938\|K6PF_SCHPO |
| | | | | phosphofructokinase 1 | | | 6-phosphofructokinase |
| | | | | (Pfk-1) | | | (Phosphofructokinase) |
| | | | | | | | (Phosphohexokinase) |
| | | | | | | | (6PF-1-K) |
| 152 | 510 | PHE0006161_7221 | 14 | ATP-dependent | 97 | gi\|2956754\| | sp\|O42938\|K6PF_SCHPO |
| | | | | phosphofructokinase 1 | | | 6-phosphofructokinase |
| | | | | (Pfk-1) | | | (Phosphofructokinase) |
| | | | | | | | (Phosphohexokinase) |
| | | | | | | | (6PF-1-K) |
| 153 | 511 | PHE0006173_7211 | 12 | Glycine max | 81 | gi\|44662864\| | gb\|AAS47511.1\|ribosomal |
| | | | | ribosomal protein S6 | | | protein S6 [Glycine |
| | | | | | | | max] |
| 154 | 512 | PHE0006174_7208 | 12 | Yeast NSR1 | 62 | gi\|1323271\| | ref\|NP_011675.1\| |
| | | | | | | | Nucleolar protein that |
| | | | | | | | binds nuclear localization |
| | | | | | | | sequences, required for |
| | | | | | | | pre-rRNA processing and |
| | | | | | | | ribosome biogenesis; |
| | | | | | | | Nsr1p [Saccharomyces |
| | | | | | | | cerevisiae] |
| 155 | 513 | PHE0006175_7210 | 4 | Corn eIF-5A-2 | 87 | gi\|34915268\| | ref\|NP_919091.1\|putative |
| | | | | | | | translation initiation |
| | | | | | | | factor 5A [Oryza sativa |
| | | | | | | | (japonica cultivar-group)] |
| 156 | 514 | PHE0006176_7147 | 9 | EEM1 | | | |
| 157 | 515 | PHE0006178_7139 | 4 | Corn eIF-5A-3 | 63 | gi\|4204352\| | gb\|AAD10697.1\|eIF-5A |
| | | | | | | | [Candida albicans] |
| 158 | 516 | PHE0006178_8626 | 19 | Corn eIF-5A-3 | 63 | gi\|4204352\| | gb\|AAD10697.1\|eIF-5A |
| | | | | | | | [Candida albicans] |
| | | | | | | | sp\|O94083\|IF5A_CANAL |
| | | | | | | | Eukaryotic translation |
| | | | | | | | initiation factor 5A (eIF- |
| | | | | | | | 5A) (eIF-4D) |
| 159 | 517 | PHE0006184_7245 | 9 | EEM11 | 58 | gi\|50924850\| | ref\|XP_472770.1\|B1358B12.19 |
| | | | | | | | [Oryza sativa |
| | | | | | | | (japonica cultivar-group)] |
| 160 | 518 | PHE0006201_7184 | 14 | ZmKASICTP-AtKAS | 94 | gi\|22325473\| | ref\|NP_178533.2\|catalytic/ |
| | | | | | | | fatty-acid synthase |
| | | | | | | | [Arabidopsis thaliana] |
| 161 | 519 | PHE0006201_7187 | 14 | ZmKASICTP-AtKAS | 94 | gi\|22325473\| | ref\|NP_178533.2\|catalytic/ |
| | | | | | | | fatty-acid synthase |
| | | | | | | | [Arabidopsis thaliana] |
| 162 | 520 | PHE0006202_7182 | 4 | MAML-4 | 94 | gi\|42562149\| | ref\|NP_173285.2\|2- |
| | | | | (At1g18500) | | | isopropylmalate synthase/ |
| | | | | | | | catalytic/transferase, |
| | | | | | | | transferring acyl groups, |
| | | | | | | | acyl groups converted |
| | | | | | | | into alkyl on transfer |
| | | | | | | | [Arabidopsis thaliana] |
| 163 | 521 | PHE0006204_7183 | 17 | soy Cyclin D | 45 | gi\|15236274\| | ref\|NP_192236.1\|CYCD6; |
| | | | | | | | 1; cyclin-dependent |
| | | | | | | | protein kinase |
| | | | | | | | [Arabidopsis thaliana] |
| 164 | 522 | PHE0006204_7189 | 4 | soy Cyclin D | 45 | gi\|15236274\| | ref\|NP_192236.1\|CYCD6; |
| | | | | | | | 1; cyclin-dependent |
| | | | | | | | protein kinase |
| | | | | | | | [Arabidopsis thaliana] |
| 165 | 523 | PHE0006204_8634 | 19 | soy Cyclin D | 45 | gi\|15236274\| | ref\|NP_192236.1\|CYCD6; |
| | | | | | | | 1; cyclin-dependent |
| | | | | | | | protein kinase |
| | | | | | | | [Arabidopsis thaliana] |
| 166 | 524 | PHE0006208_7223 | 4 | rice Microtubule- | 92 | gi\|50929089\| | ref\|XP_474072.1\|OSJNBb0079B02.14 |
| | | | | associated EB1 | | | [Oryza sativa |
| | | | | | | | (japonica cultivar-group)] |
| 167 | 525 | PHE0006209_7991 | 19 | rice 2-isopropylmalate | 96 | gi\|77548611\| | gb\|ABA91408.1\|2- |
| | | | | synthase | | | isopropylmalate synthase |
| | | | | | | | [Oryza sativa (japonica |
| | | | | | | | cultivar-group)] |
| 168 | 526 | PHE0006212_7196 | 4 | corn Heme oxygenase- | 89 | gi\|51090890\| | dbj\|BAD35463.1\|putative |
| | | | | like | | | heme oxygenase 1 [Oryza |
| | | | | | | | sativa (japonica cultivar- |
| | | | | | | | group)] |
| 169 | 527 | PHE0006213_7198 | 4 | corn ATG4a-like | 69 | gi\|50929729\| | gb\|ABB77259.1\| |
| | | | | | | | autophagy 4 [Oryza sativa |
| | | | | | | | (indica cultivar-group)] |
| 170 | 528 | PHE0006214_7213 | 17 | corn Cyclin D | 61 | gi\|50508578\| | dbj\|BAD30903.1\|putative |
| | | | | | | | cyclin D1 [Oryza sativa |
| | | | | | | | (japonica cultivar-group)] |
| 171 | 529 | PHE0006214_7219 | 4 | corn Cyclin D | 61 | gi\|50508578\| | dbj\|BAD30903.1\|putative |
| | | | | | | | cyclin D1 [Oryza sativa |
| | | | | | | | (japonica cultivar-group)] |
| 172 | 530 | PHE0006215_7280 | 9 | ATP-dependent | 92 | gi\|396136\| | emb\|CAA50526.1\|6- |
| | | | | phosphofructokinase 1 | | | phosphofructokinase |
| | | | | (Pfk-1) | | | [Lactobacillus |
| | | | | | | | delbrueckii] |
| 173 | 531 | PHE0006221_7201 | 13 | OsNTRC | 94 | gi\|34576294\| | emb\|CAE46765.1\|NADPH |
| | | | | | | | thioredoxin reductase |
| | | | | | | | [Oryza sativa (japonica |
| | | | | | | | cultivar-group)] |
| 174 | 532 | PHE0006221_7241 | 5 | OsNTRC | 94 | gi\|34576294\| | emb\|CAE46765.1\|NADPH |
| | | | | | | | thioredoxin reductase |
| | | | | | | | [Oryza sativa (japonica |
| | | | | | | | cultivar-group)] |
| 175 | 533 | PHE0006221_7937 | 19 | OsNTRC | 94 | gi\|34576294\| | emb\|CAE46765.1\|NADPH |
| | | | | | | | thioredoxin reductase |
| | | | | | | | [Oryza sativa (japonica |
| | | | | | | | cultivar-group)] |
| 176 | 534 | PHE0006227_7282 | 1 | ADR1 | 100 | gi\|30692890\| | emb\|CAE46486.1\|CC- |
| | | | | | | | NBS-LRR disease |
| | | | | | | | resistance protein |
| | | | | | | | [Arabidopsis thaliana] |
| 177 | 535 | PHE0006232_7454 | 4 | rice Kinase | 95 | gi\|34896978\| | ref\|NP_909835.1\|putative |
| | | | | | | | receptor-like kinase |
| | | | | | | | [Oryza sativa (japonica |
| | | | | | | | cultivar-group)] |
| 178 | 536 | PHE0006232_8756 | 19 | rice Kinase | 95 | gi\|34896978\| | ref\|NP_909835.1\|putative |
| | | | | | | | receptor-like kinase |
| | | | | | | | [Oryza sativa (japonica |
| | | | | | | | cultivar-group)] |
| 179 | 537 | PHE0006233_7220 | 4 | corn bchI | 88 | gi\|70905055\| | gb\|AAZ14053.1\|magnesium |
| | | | | | | | chelatase subunit I |
| | | | | | | | precursor [Zea mays] |
| 180 | 538 | PHE0006234_7281 | 4 | bchD-Mg Chelatase | 87 | gi\|30680676\| | ref\|NP_563821.2\|PDE166; |
| | | | | | | | magnesium chelatase/ |
| | | | | | | | nucleoside- |
| | | | | | | | triphosphatase/nucleotide |
| | | | | | | | binding [Arabidopsis |
| | | | | | | | thaliana] |
| 181 | 539 | PHE0006254_7312 | 1 | glycosyl hydroxylase | 90 | gi\|15238600\| | ref\|NP_198423.1\|unknown |
| | | | | | | | protein [Arabidopsis |
| | | | | | | | thaliana] |
| 182 | 540 | PHE0006263_7271 | 9 | OsDGAT2 | 95 | gi\|50912089\| | ref\|XP_467452.1\|putative |
| | | | | | | | mono- or diacylglycerol |
| | | | | | | | acyltransferase [Oryza |
| | | | | | | | sativa (japonica cultivar- |
| | | | | | | | group)] |
| 183 | 541 | PHE0006264_7285 | 9 | NcDGAT2 | 100 | gi\|38567182\| | emb\|CAE76475.1\|related |
| | | | | | | | to diacylglycerol |
| | | | | | | | acyltransferase type 2a |
| | | | | | | | [Neurospora crassa] |
| 184 | 542 | PHE0006265_7990 | 19 | Arabidopsis thaliana | 100 | gi\|15225771\| | ref\|NP_180235.1\|HY1 |
| | | | | cultivar Col-0 heme | | | (HEME OXYGENASE 1) |
| | | | | oxygenase 1 (HO1) | | | [Arabidopsis thaliana] |
| | | | | gene, | | | |
| 185 | 543 | PHE0006281_7526 | 7 | AtETR | 95 | gi\|30697334\| | ref\|NP_176808.3\|ETR1 |
| | | | | | | | (ETHYLENE |
| | | | | | | | RESPONSE 1); two- |
| | | | | | | | component response |
| | | | | | | | regulator [Arabidopsis |
| | | | | | | | thaliana] |
| 186 | 544 | PHE0006286_7314 | 1 | Arabidopsis allene | 97 | gi\|15239032\| | ref\|NP_199079.1\|AOS |
| | | | | oxide synthase (AOS)/ | | | (ALLENE OXIDE |
| | | | | hydroperoxide | | | SYNTHASE); hydro- |
| | | | | dehydrase/cyt | | | lyase/oxygen binding |
| | | | | | | | [Arabidopsis thaliana] |
| 187 | 545 | PHE0006286_8011 | 19 | Arabidopsis allene | 97 | gi\|15239032\| | ref\|NP_199079.1\|AOS |
| | | | | oxide synthase (AOS)/ | | | (ALLENE OXIDE |
| | | | | hydroperoxide | | | SYNTHASE); hydro- |
| | | | | dehydrase/cyt | | | lyase/oxygen binding |
| | | | | | | | [Arabidopsis thaliana] |
| 188 | 546 | PHE0006288_7310 | 1 | Arabidopsis unknown | 80 | gi\|15219363\| | ref\|NP_173123.1\|unknown |
| | | | | protein | | | protein [Arabidopsis |
| | | | | | | | thaliana] |
| 189 | 547 | PHE0006288_8023 | 19 | Arabidopsis unknown | 80 | gi\|15219363\| | ref\|NP_173123.1\|unknown |
| | | | | protein | | | protein [Arabidopsis |
| | | | | | | | thaliana] |
| 190 | 548 | PHE0006296_7515 | 9 | EEM9 | 87 | gi\|63087722\| | emb\|CAI93176.1\|glycosyl |
| | | | | | | | transferase [Zea mays] |
| 191 | 549 | PHE0006309_7570 | 4 | E. coli Glyoxalase I | 100 | gi\|24052010\| | gb\|AAN43259.1\|lactoylglutathione |
| | | | | | | | lyase [Shigella |
| | | | | | | | flexneri 2a str. 301] |
| 192 | 550 | PHE0006309_8148 | 19 | E. coli Glyoxalase I | 100 | gi\|24052010\| | gb\|AAN43259.1\|lactoylglutathione |
| | | | | | | | lyase [Shigella |
| | | | | | | | flexneri 2a str. 301] |
| | | | | | | | dbj\|BAE76494.1\| |
| | | | | | | | glyoxalase I, Ni- |
| | | | | | | | dependent [Escherichia |
| | | | | | | | coli W3110] |
| 193 | 551 | PHE0006309_8620 | 19 | E. coli Glyoxalase I | 100 | gi\|24052010\| | gb\|AAN43259.1\|lactoylglutathione |
| | | | | | | | lyase [Shigella |
| | | | | | | | flexneri 2a str. 301] |
| | | | | | | | dbj\|BAE76494-1\| |
| | | | | | | | glyoxalase I, Ni- |
| | | | | | | | dependent [Escherichia |
| | | | | | | | coli W3110] |
| 194 | 552 | PHE0006310_7574 | 12 | rice BWMK1 | 95 | gi\|6689924\| | gb\|AAF23902.1\|MAP |
| | | | | | | | kinase homolog [Oryza |
| | | | | | | | sativa] |
| 195 | 553 | PHE0006311_7976 | 19 | AtRrp4p | 96 | gi\|15218790\| | ref\|NP_171835.1\|RNA |
| | | | | | | | binding/exonuclease |
| | | | | | | | [Arabidopsis thaliana] |
| 196 | 554 | PHE0006312_7579 | 4 | yeast Nip7p | 100 | gi\|45270008\| | relNP_015113.1\| |
| | | | | | | | Nucleolar protein required |
| | | | | | | | for 60S ribosome subunit |
| | | | | | | | biogenesis, constituent of |
| | | | | | | | 66S pre-ribosomal |
| | | | | | | | particles; physically |
| | | | | | | | interacts with Nop8p and |
| | | | | | | | the exosome subunit |
| | | | | | | | Rrp43p; Nip7p |
| | | | | | | | [Saccharomyces |
| | | | | | | | cerevisiae] |
| 197 | 555 | PHE0006312_8644 | 19 | yeast Nip7p | 100 | gi\|45270008\| | ref\|NP_015113.1\| |
| | | | | | | | Nucleolar protein required |
| | | | | | | | for 60S ribosome subunit |
| | | | | | | | biogenesis, constituent of |
| | | | | | | | 66S pre-ribosomal |
| | | | | | | | particles; physically |
| | | | | | | | interacts with Nop8p and |
| | | | | | | | the exosome subunit |
| | | | | | | | Rrp43p; Nip7p |
| | | | | | | | [Saccharomyces |
| | | | | | | | cerevisiae] |
| 198 | 556 | PHE0006342_8182 | 19 | 1 | 91 | gi\|6320905\| | ref\|NP_010984.1\|One of |
| | | | | | | | two redundant DL- |
| | | | | | | | glycerol-3-phosphatases |
| | | | | | | | (RHR2/GPP1 encodes the |
| | | | | | | | other) involved in |
| | | | | | | | glycerol biosynthesis; |
| | | | | | | | induced in response to |
| | | | | | | | hyperosmotic stress and |
| | | | | | | | oxidative stress, and |
| | | | | | | | during the diauxic |
| | | | | | | | transition; Hor2p |
| | | | | | | | [Saccharomyces |
| | | | | | | | cerevisiae] |
| 199 | 557 | PHE0006344_8188 | 19 | SIB1 (SIGMA | 89 | gi\|15228994\| | ref\|NP_191230.1\|SIB1 |
| | | | | FACTOR BINDING | | | (SIGMA FACTOR |
| | | | | PROTEIN 1); binding | | | BINDING PROTEIN 1); |
| | | | | | | | binding [Arabidopsis |
| | | | | | | | thaliana] |
| 200 | 558 | PHE0006346_8132 | 19 | | 100 | gi\|18410491\| | ref\|NP_565076.1\|unknown |
| | | | | | | | protein [Arabidopsis |
| | | | | | | | thaliana] |
| 201 | 559 | PHE0006348_8203 | 19 | antiporter/glucose-6- | 92 | gi\|18407336\| | ref\|NP_564785.1\|antiporter/ |
| | | | | phosphate transporte | | | glucose-6-phosphate |
| | | | | | | | transporter [Arabidopsis |
| | | | | | | | thaliana] |
| 202 | 560 | PHE0006349_8204 | 19 | | 100 | gi\|45270642\| | sp\|P40001\|YEA8_YEAST |
| | | | | | | | Hypothetical 14.0 kDa |
| | | | | | | | protein in GCN4-WBP1 |
| | | | | | | | intergenic region |
| 203 | 561 | PHE0006351_8200 | 19 | rice hypothetical | 58 | gi\|34897644\| | ref\|NP_910168.1\|hypothetical |
| | | | | protein | | | protein [Oryza sativa] |
| 204 | 562 | PHE0006353_8098 | 19 | | 91 | gi\|18418660\| | ref\|NP_567982.1\|unknown |
| | | | | | | | protein [Arabidopsis |
| | | | | | | | thaliana] |
| 205 | 563 | PHE0006355_8084 | 19 | Arabidopsis unknown | 84 | gi\|18403871\| | ref\|NP_564601.1\|unknown |
| | | | | protein | | | protein [Arabidopsis |
| | | | | | | | thaliana] |
| 206 | 564 | PHE0006356_8103 | 19 | | 78 | gi\|15240413\| | ref\|NP_198048.1\|unknown |
| | | | | | | | protein [Arabidopsis |
| | | | | | | | thaliana] |
| 207 | 565 | PHE0006377_7592 | 4 | Saccharomyces | 91 | gi\|14588945\| | emb\|CAC42984.1\|rRNA |
| | | | | cerevisiae Rrp44p | | | processing protein |
| | | | | | | | [Saccharomyces |
| | | | | | | | cerevisiae] |
| 208 | 566 | PHE0006377_8683 | 19 | Saccharomyces | 91 | gi\|14588945\| | sp\|P25359\|RRP43_YEAST |
| | | | | cerevisiae Rrp44p | | | Exosome complex |
| | | | | | | | exonuclease RRP43 |
| | | | | | | | (Ribosomal RNA- |
| | | | | | | | processing protein 43) |
| 209 | 567 | PHE0006378_7667 | 4 | Saccharomyces | 94 | gi\|51013303\| | gb\|AAT92945.1\|YOL142W |
| | | | | cerevisiae Rrp40p | | | [Saccharomyces |
| | | | | | | | cerevisiae] |
| 210 | 568 | PHE0006378_8715 | 19 | Saccharomyces | 94 | gi\|51013303\| | gb\|AAT92945.1\|YOL142W |
| | | | | cerevisiae Rrp40p | | | [Saccharomyces |
| | | | | | | | cerevisiae] |
| 211 | 569 | PHE0006380_7658 | 4 | Saccharomyces | 100 | gi\|1323143\| | sp\|P53256\|RRP46_YEAST |
| | | | | cerevisiae Rrp46p | | | Exosome complex |
| | | | | | | | exonuclease RRP46 |
| | | | | | | | (Ribosomal RNA- |
| | | | | | | | processing protein 46) |
| 212 | 570 | PHE0006380_8719 | 19 | Saccharomyces | 100 | gi\|1323143\| | sp\|P53256\|RRP46_YEAST |
| | | | | cerevisiae Rrp46p | | | Exosome complex |
| | | | | | | | exonuclease RRP46 |
| | | | | | | | (Ribosomal RNA- |
| | | | | | | | processing protein 46) |
| 213 | 571 | PHE0006381_7655 | 4 | Saccharomyces | 88 | gi\|1045263\| | ref\|NP_011674.1\|3′5′ |
| | | | | cerevisiae mtr3p | | | exoribonuclease, exosome |
| | | | | | | | subunit; nucleolar protein |
| | | | | | | | involved in export of |
| | | | | | | | mRNA and ribosomal |
| | | | | | | | subunits; homologous to |
| | | | | | | | the E. coli exonuclease |
| | | | | | | | RNase PH; Mtr3p |
| | | | | | | | [Saccharomyces |
| | | | | | | | cerevisiae] |
| 214 | 572 | PHE0006381_8695 | 19 | Saccharomyces | 88 | gi\|1045263\| | ref\|NP_011674.1\|3′5′ |
| | | | | cerevisiae mtr3p | | | exoribonuclease, exosome |
| | | | | | | | subunit; nucleolar protein |
| | | | | | | | involved in export of |
| | | | | | | | mRNA and ribosomal |
| | | | | | | | subunits; homologous to |
| | | | | | | | the E. coli exonuclease |
| | | | | | | | RNase PH; Mtr3p |
| | | | | | | | [Saccharomyces |
| | | | | | | | cerevisiae] |
| 215 | 573 | PHE0006382_7652 | 4 | PHE0006382_Saccharomyces | 100 | gi\|6321225\| | ref\|NP_011302.1\|Protein |
| | | | | cerevisiae | | | involved in exosome |
| | | | | SKI8 | | | mediated 3′ to 5′ mRNA |
| | | | | | | | degradation and |
| | | | | | | | translation inhibition of |
| | | | | | | | non-poly(A) mRNAs as |
| | | | | | | | well as double-strand |
| | | | | | | | break formation during |
| | | | | | | | meiotic recombination; |
| | | | | | | | required for repressing |
| | | | | | | | propagation of dsRNA |
| | | | | | | | viruses; Ski8p |
| | | | | | | | [Saccharomyces |
| | | | | | | | cerevisiae] |
| 216 | 574 | PHE0006382_8678 | 19 | Saccharomyces | 100 | gi\|6321225\| | ref\|NP_011302.1\|Protein |
| | | | | cerevisiae SKI8 | | | involved in exosome |
| | | | | | | | mediated 3′ to 5′ mRNA |
| | | | | | | | degradation and |
| | | | | | | | translation inhibition of |
| | | | | | | | non-poly(A) mRNAs as |
| | | | | | | | well as double-strand |
| | | | | | | | break formation during |
| | | | | | | | meiotic recombination; |
| | | | | | | | required for repressing |
| | | | | | | | propagation of dsRNA |
| | | | | | | | viruses; Ski8p |
| | | | | | | | [Saccharomyces |
| | | | | | | | cerevisiae] |
| 217 | 575 | PHE0006425_7646 | 4 | corn CAT2 | 86 | gi\|77556625\| | gb\|ABA99421.1\|Amino |
| | | | | | | | acid permease [Oryza |
| | | | | | | | sativa (japonica cultivar- |
| | | | | | | | group)] |
| 218 | 576 | PHE0006426_8056 | 19 | corn CAT5 | 76 | gi\|50881438\| | gb\|AAT85283.1\|amino |
| | | | | | | | acid permease domain |
| | | | | | | | containing protein [Oryza |
| | | | | | | | sativa (japonica cultivar- |
| | | | | | | | group)] |
| 219 | 577 | PHE0006428_7651 | 4 | Oryza sativa | 100 | gi\|34902308\| | ref\|NP_912500.1\|Putative |
| | | | | hemoglobin 2 | | | non-symbiotic |
| | | | | | | | hemoglobin 2 (rHb2) |
| | | | | | | | [Oryza sativa (japonica |
| | | | | | | | cultivar-group)] |
| 220 | 578 | PHE0006429_7671 | 4 | Oryza sativa | 100 | gi\|50920543\| | ref\|XP_470632.1\|Putative |
| | | | | hemoglobin 1 | | | Non-symbiotic |
| | | | | | | | hemoglobin 1 [Oryza |
| | | | | | | | sativa (japonica cultivar- |
| | | | | | | | group)] |
| 221 | 579 | PHE0006433_8307 | 19 | Pseudouridine | 90 | gi\|56744228\| | ref\|NP_190794.2\|RNA |
| | | | | synthase | | | binding/pseudouridine |
| | | | | | | | synthase/pseudouridylate |
| | | | | | | | synthase [Arabidopsis |
| | | | | | | | thaliana] |
| 222 | 580 | PHE0006439_8108 | 19 | corn putative RNA- | 56 | gi\|15231311\| | ref\|NP_190188.1\|RNA |
| | | | | binding protein | | | binding/nucleic acid |
| | | | | | | | binding [Arabidopsis |
| | | | | | | | thaliana] |
| 223 | 581 | PHE0006449_7865 | 1 | dihydrolipoamide | 90 | gi\|17741871\| | ref\|NP_533968.1\| |
| | | | | acetyltransferase | | | dihydrolipoamide |
| | | | | | | | acetyltransferase |
| | | | | | | | [Agrobacterium |
| | | | | | | | tumefaciens str. C58] |
| 224 | 582 | PHE0006449_8165 | 19 | lipoamide | 90 | gi\|17741871\| | gb\|AAL44284.1\|lipoamide |
| | | | | acyltransferase | | | acyltransferase |
| | | | | component of | | | component of branched- |
| | | | | branched-chain alpha- | | | chain alpha-keto acid |
| | | | | keto acid | | | dehydrogenase complex |
| | | | | dehydrogenase | | | E2 [Agrobacterium |
| | | | | complex E2 | | | tumefaciens str. C58] |
| 225 | 583 | PHE0006450_7624 | 1 | FtsZ1 | 83 | gi\|7672161\| | emb\|CAB89287.1\|chloroplast |
| | | | | | | | FtsZ-like protein |
| | | | | | | | [Nicotiana tabacum] |
| 226 | 584 | PHE0006464_8089 | 19 | corn unnamed protein | 56 | gi\|34904362\| | dbj\|BAA96588.1\|plasma |
| | | | | product | | | membrane polypeptide - |
| | | | | | | | like [Oryza sativa |
| | | | | | | | (japonica cultivar-group)] |
| | | | | | | | sp\|P83649\|SRS1_ORYSA |
| | | | | | | | Salt-stress root protein |
| | | | | | | | RS1 |
| 227 | 585 | PHE0006468_7903 | 1 | | 100 | gi\|18401231\| | ref\|NP_566558.1\|unknown |
| | | | | | | | protein [Arabidopsis |
| | | | | | | | thaliana] |
| 228 | 586 | PHE0006477_7809 | 17 | AtPsbR | 81 | gi\|15219268\| | sp\|P27202\|PSBR_ARATH |
| | | | | | | | Photosystem II 10 kDa |
| | | | | | | | polypeptide, chloroplast |
| | | | | | | | precursor |
| 229 | 587 | PHE0006478_8190 | 19 | adenosylmethionine:2- | 94 | gi\|34910724\| | ref\|NP_916709.1\|S- |
| | | | | demethylmenaquinone | | | adenosylmethionine:2- |
| | | | | methyltransferase-like | | | demethylmenaquinone |
| | | | | protein | | | methyltransferase-like |
| | | | | | | | protein [Oryza sativa |
| | | | | | | | (japonica cultivar-group)] |
| 230 | 588 | PHE0006497_8355 | 19 | Arabidopsis unknown | 72 | gi\|15238921\| | ref\|NP_196661.1\|unknown |
| | | | | protein | | | protein [Arabidopsis |
| | | | | | | | thaliana] |
| 231 | 589 | PHE0006498_7795 | 18 | soy Glutamate | 100 | gi\|32493114\| | gb\|AAP85548.1\|putative |
| | | | | Decarboxylase | | | glutamate decarboxylase |
| | | | | | | | [Glycine max] |
| 232 | 590 | PHE0006498_7796 | 2 | soy Glutamate | 100 | gi\|32493114\| | gb\|AAP85548.1\|putative |
| | | | | Decarboxylase | | | glutamate decarboxylase |
| | | | | | | | [Glycine max] |
| 233 | 591 | PHE0006505_7871 | 1 | soy Thioredoxin X | 68 | gi\|18403021\| | ref\|NP_564566.1\|ATHX; |
| | | | | | | | electron transporter/thiol- |
| | | | | | | | disulfide exchange |
| | | | | | | | intermediate [Arabidopsis |
| | | | | | | | thaliana] |
| 234 | 592 | PHE0006506_7818 | 1 | Arabidopsis SRK2C | 100 | gi\|42572557\| | ref\|NP_974374.1\|AKIN11; |
| | | | | like | | | protein kinase |
| | | | | | | | [Arabidopsis thaliana] |
| 235 | 593 | PHE0006514_7926 | 10 | Truncated Beta GDH | 99 | gi\|18273\| | emb\|CAA41636.1\|glutamate |
| | | | | | | | dehydrogenase |
| | | | | | | | (NADP+) [Chlorella |
| | | | | | | | sorokiniana] |
| 236 | 594 | PHE0006516_7866 | 17 | Corn Magnesium | 80 | gi\|78708975\| | gb\|ABB47950.1\|CorA- |
| | | | | transporter | | | like Mg2+ transporter |
| | | | | | | | protein, putative [Oryza |
| | | | | | | | sativa (japonica cultivar- |
| | | | | | | | group)] |
| 237 | 595 | PHE0006516_7882 | 8 | Corn Magnesium | 80 | gi\|78708975\| | gb\|ABB47950.1\|CorA- |
| | | | | transporter | | | like Mg2+ transporter |
| | | | | | | | protein, putative [Oryza |
| | | | | | | | sativa (japonica cultivar- |
| | | | | | | | group)] |
| 238 | 596 | PHE0006516_7887 | 16 | Corn Magnesium | 80 | gi\|78708975\| | gb\|ABB47950.1\|CorA- |
| | | | | transporter | | | like Mg2+ transporter |
| | | | | | | | protein, putative [Oryza |
| | | | | | | | sativa (japonica cultivar- |
| | | | | | | | group)] |
| 239 | 597 | PHE0006516_8363 | 19 | Corn Magnesium | 80 | gi\|78708975\| | gb\|ABB47950.1\|CorA- |
| | | | | transporter | | | like Mg2+ transporter |
| | | | | | | | protein, putative [Oryza |
| | | | | | | | sativa (japonica cultivar- |
| | | | | | | | group)] |
| 240 | 598 | PHE0006517_7858 | 16 | Rice Magnesium | 95 | gi\|78708975\| | gb\|ABB47950.1\|CorA- |
| | | | | transporter | | | like Mg2+ transporter |
| | | | | | | | protein, putative [Oryza |
| | | | | | | | sativa (japonica cultivar- |
| | | | | | | | group)] |
| 241 | 599 | PHE0006517_7879 | 17 | Rice Magnesium | 95 | gi\|78708975\| | gb\|ABB47950.1\|CorA- |
| | | | | transporter | | | like Mg2+ transporter |
| | | | | | | | protein, putative [Oryza |
| | | | | | | | sativa (japonica cultivar- |
| | | | | | | | group)] |
| 242 | 600 | PHE0006517_7897 | 8 | Rice Magnesium | 95 | gi\|78708975\| | gb\|ABB47950.1\|CorA- |
| | | | | transporter | | | like Mg2+ transporter |
| | | | | | | | protein, putative [Oryza |
| | | | | | | | sativa (japonica cultivar- |
| | | | | | | | group)] |
| 243 | 601 | PHE0006521_7840 | 15 | Anabaena SPP | 100 | gi\|14594809\| | emb\|CAC43285.1\|sucrose- |
| | | | | | | | phosphate phosphatase |
| | | | | | | | [Nostoc sp. PCC 7120] |
| 244 | 602 | PHE0006545_8320 | 9 | ARG1-like protein | 79 | gi\|51535811\| | dbj\|BAD37896.1\|ARG1- |
| | | | | | | | like protein [Oryza sativa |
| | | | | | | | (japonica cultivar-group)] |
| 245 | 603 | PHE0006549_8255 | 19 | methylenetetrahydrofolate | 83 | gi\|54291831\| | gb\|AAV32199.1\|unknown |
| | | | | dehydrogenase | | | protein [Oryza sativa |
| | | | | (NADP+) | | | (japonica cultivar-group)] |
| 246 | 604 | PHE0006555_8283 | 19 | G3PB_PEA | 84 | gi\|50948907\| | ref\|XP_493811.1\|ESTC74302 |
| | | | | Glyceraldehyde 3- | | | (E30840) |
| | | | | phosphate | | | corresponds to a region of |
| | | | | dehydrogenase B, | | | the predicted |
| | | | | chloroplast | | | gene.~similar to |
| | | | | | | | glyceraldehyde-3- |
| | | | | | | | phosphate dehydrogenase. |
| | | | | | | | (M64118) [Oryza sativa |
| | | | | | | | (japonica cultivar-group)] |
| 247 | 605 | PHE0006559_8227 | 16 | phosphoenolpyruvate | 98 | gi\|34904868\| | ref\|NP_913781.1\|phosphoenolpyruvate |
| | | | | carboxylase | | | carboxylase |
| | | | | | | | [Oryza sativa (japonica |
| | | | | | | | cultivar-group)] |
| 248 | 606 | PHE0006564_8298 | 17 | corn asparagine | 95 | gi\|28395526\| | gb\|AAO39048.1\|asparagine |
| | | | | synthetase 2 | | | synthetase 2 [Hordeum |
| | | | | | | | vulgare] |
| 249 | 607 | PHE0006565_8300 | 17 | corn glutamine- | 97 | gi\|53680379\| | gb\|AAU89392.1\|glutamine- |
| | | | | dependent asparagines | | | dependent asparagine |
| | | | | synthetase | | | synthetase [Triticum |
| | | | | | | | aestivum] |
| 250 | 608 | PHE0006571_8279 | 19 | Arabidopsis thaliana | 95 | gi\|15223870\| | gb\|AAN12902.1\|putative |
| | | | | phosphoenolpyruvate | | | calcium-dependent |
| | | | | carboxylase kinase | | | protein kinase |
| | | | | | | | [Arabidopsis thaliana] |
| 251 | 609 | PHE0006574_8224 | 19 | Glyoxalase I | 100 | gi\|984219\| | sp\|Q09751\|LGUL_SCHPO |
| | | | | | | | Lactoylglutathione |
| | | | | | | | lyase (Methylglyoxalase) |
| | | | | | | | (Aldoketomutase) |
| | | | | | | | (Glyoxalase I) |
| 252 | 610 | PHE0006586_8271 | 19 | Arabidopsis | 83 | gi\|51860727\| | gb\|AAU11485.1\|mitochondrial |
| | | | | mitochondrial | | | frataxin-like |
| | | | | frataxin-like | | | [Arabidopsis thaliana] |
| 253 | 611 | PHE0006587_8277 | 19 | Arabidopsis CP12 | 100 | gi\|15228752\| | gb\|AAM45071.1\| |
| | | | | domain-containing | | | putative CP12 protein |
| | | | | protein | | | precursor [Arabidopsis |
| | | | | | | | thaliana] |
| 254 | 612 | PHE0006590_8258 | 19 | Arabidopsis | 89 | gi\|30678634\| | ref\|NP_849585.1\|ATHM1; |
| | | | | thioredoxin M-type 1 | | | electron transporter/ |
| | | | | | | | thiol-disulfide exchange |
| | | | | | | | intermediate [Arabidopsis |
| | | | | | | | thaliana] |
| 255 | 613 | PHE0006591_8264 | 19 | Arabidopsis | 94 | gi\|15236327\| | ref\|NP_192261.1\|ATHM2; |
| | | | | thioredoxin M-type 2 | | | electron transporter/ |
| | | | | | | | thiol-disulfide exchange |
| | | | | | | | intermediate [Arabidopsis |
| | | | | | | | thaliana] |
| 256 | 614 | PHE0006592_8278 | 19 | thioredoxin M-type 4 | 80 | gi\|15232567\| | ref\|NP_188155.1\|ATHM4; |
| | | | | | | | electron transporter/ |
| | | | | | | | thiol-disulfide exchange |
| | | | | | | | intermediate [Arabidopsis |
| | | | | | | | thaliana] |
| 257 | 615 | PHE0006593_8245 | 1 | Arabidopsis putative | 100 | gi\|15236013\| | ref\|NP_193460.1\|unknown |
| | | | | protein | | | protein [Arabidopsis |
| | | | | | | | thaliana] |
| 258 | 616 | PHE0006593_8256 | 19 | Arabidopsis putative | 100 | gi\|15236013\| | ref\|NP_193460.1\|unknown |
| | | | | protein | | | protein [Arabidopsis |
| | | | | | | | thaliana] |
| 259 | 617 | PHE0006595_8250 | 1 | Arabidopsis unknown | 100 | gi\|18417658\| | ref\|NP_567853.1\|unknown |
| | | | | protein | | | protein [Arabidopsis |
| | | | | | | | thaliana] |
| 260 | 618 | PHE0006595_8265 | 19 | Arabidopsis unknown | 100 | gi\|18417658\| | ref\|NP_567853.1\|unknown |
| | | | | protein | | | protein [Arabidopsis |
| | | | | | | | thaliana] |
| 261 | 619 | PHE0006596_8236 | 1 | Arabidopsis | 93 | gi\|15224138\| | ref\|NP_179417.1\|nucleotidyltransferase |
| | | | | hypothetical protein | | | [Arabidopsis thaliana] |
| 262 | 620 | PHE0006596_8257 | 19 | Arabidopsis | 93 | gi\|15224138\| | ref\|NP_179417.1\|nucleotidyltransferase |
| | | | | hypothetical protein | | | [Arabidopsis thaliana] |
| 263 | 621 | PHE0006597_8242 | 1 | Arabidopsis putative | 94 | gi\|22330852\| | ref\|NP_187165.2\|ATP |
| | | | | serine/threonine | | | binding/kinase/protein |
| | | | | protein kinase | | | kinase/protein |
| | | | | | | | serine/threonine kinase/ |
| | | | | | | | protein-tyrosine kinase |
| | | | | | | | [Arabidopsis thaliana] |
| 264 | 622 | PHE0006598_8240 | 1 | Arabidopsis drought- | 77 | gi\|22137252\| | gb\|AAM91471.1\|AT3g06760/ |
| | | | | responsive family | | | F3E22_10 |
| | | | | protein | | | [Arabidopsis thaliana] |
| | | | | | | | gb\|AAL67123.1\| |
| | | | | | | | AT3g06760/F3E22_10 |
| | | | | | | | [Arabidopsis thaliana] |
| 265 | 623 | PHE0006598_8268 | 19 | Arabidopsis drought- | 77 | gi\|22137252\| | gb\|AAM91471.1\|AT3g06760/ |
| | | | | responsive family | | | F3E22_10 |
| | | | | protein | | | [Arabidopsis thaliana] |
| 266 | 624 | PHE0006599_8230 | 1 | Arabidopsis zinc | 79 | gi\|18410665\| | ref\|NP_565088.1\|transcription |
| | | | | finger homeobox | | | factor [Arabidopsis |
| | | | | family protein | | | thaliana] |
| 267 | 625 | PHE0006599_8262 | 19 | Arabidopsis zinc | 79 | gi\|18410665\| | ref\|NP_565088.1\|transcription |
| | | | | finger homeobox | | | factor [Arabidopsis |
| | | | | family protein | | | thaliana] |
| 268 | 626 | PHE0006600_8249 | 1 | Xenorhabdus putative | 83 | gi\|75208732\| | ref\|ZP_00709024.1\|COG0473: |
| | | | | tartrate dehydrogenase | | | Isocitrate/isopropylmalate |
| | | | | | | | dehydrogenase |
| | | | | | | | [Escherichia coli B171] |
| 269 | 627 | PHE0006607_8231 | 1 | Arabidopsis MADS- | 92 | gi\|15219825\| | ref\|NP_176285.1\|AGL56; |
| | | | | box family protein | | | DNA binding/ |
| | | | | | | | transcription factor |
| | | | | | | | [Arabidopsis thaliana] |
| 270 | 628 | PHE0006609_8234 | 1 | Soy Glutathione | 71 | gi\|18407538\| | ref\|NP_566128.1\|ATGPX4 |
| | | | | Peroxidase | | | (GLUTATHIONE |
| | | | | | | | PEROXIDASE 4); |
| | | | | | | | glutathione peroxidase |
| | | | | | | | [Arabidopsis thaliana] |
| 271 | 629 | PHE0006610_8239 | 1 | Soy Glutathione | 75 | gi\|2632109\| | emb\|CAA04142.1\|phospholipid |
| | | | | Peroxidase | | | glutathione |
| | | | | | | | peroxidase [Pisum |
| | | | | | | | sativum] |
| 272 | 630 | PHE0006613_8238 | 1 | Soy Glutathione | 64 | gi\|11544696\| | emb\|CAC17628.1\|putative |
| | | | | Peroxidase | | | phospholipid |
| | | | | | | | hydroperoxide glutathione |
| | | | | | | | peroxidase [Oryza sativa |
| | | | | | | | (japonica cultivar-group)] |
| 273 | 631 | PHE0006617_8463 | 19 | corn oxalate oxidase | 86 | gi\|6996619\| | gb\|AAF34811.1\|oxalate |
| | | | | | | | oxidase [Triticum |
| | | | | | | | aestivum] |
| 274 | 632 | PHE0006620_8462 | 19 | corn NADPH- | 96 | gi\|78172239\| | gb\|ABB29303.1\|NADPH- |
| | | | | dependent reductase | | | dependent reductase [Zea |
| | | | | | | | mays] |
| 275 | 633 | PHE0006648_8356 | 19 | corn putative protease | 44 | gi\|50919133\| | ref\|XP_469963.1\|putative |
| | | | | inhibitor | | | protease inhibitor [Oryza |
| | | | | | | | sativa (japonica cultivar- |
| | | | | | | | group)] |
| 276 | 634 | PHE0006666_8414 | 19 | corn putative plastidic | 93 | gi\|34895322\| | ref\|NP_909004.1\|putative |
| | | | | aldolase | | | plastidic aldolase [Oryza |
| | | | | | | | sativa (japonica cultivar- |
| | | | | | | | group)]] |
| 277 | 635 | PHE0006669_8357 | 14 | Schizosaccharomyces | 97 | gi\|2956754\| | sp\|O42938\|K6PF_SCHPO |
| | | | | pombe ATP-PFK | | | 6-phosphofructokinase |
| | | | | | | | (Phosphofructokinase) |
| | | | | | | | (Phosphohexokinase) |
| | | | | | | | (6PF-1-K) |
| 278 | 636 | PHE0006670_8346 | 21 | E. coli ATP-dependent | 100 | gi\|85675091\| | dbj\|BAA15500.2\|6- |
| | | | | phosphofructokinase | | | phosphofructokinase II |
| | | | | B with CTP2 | | | [Escherichia coli W3110] |
| 279 | 637 | PHE0006673_8992 | 17 | Arabidopsis peptide | 88 | gi\|18409391\| | ref\|NP_564979.1\|transporter |
| | | | | transporter | | | [Arabidopsis thaliana] |
| 280 | 638 | PHE0006676_8410 | 19 | corn pyruvate | 94 | gi\|3850999\| | gb\|AAC72192.1\|pyruvate |
| | | | | dehydrogenase E1 | | | dehydrogenase E1 beta |
| | | | | beta subunit | | | subunit isoform 1 [Zea |
| | | | | | | | mays] |
| 281 | 639 | PHE0006684_8413 | 19 | corn probable 60S | 88 | gi\|77548268\| | gb\|ABA91065.1\|ribosomal |
| | | | | acidic ribosomal | | | protein L10, putative |
| | | | | protein | | | [Oryza sativa (japonica |
| | | | | | | | cultivar-group)] |
| 282 | 640 | PHE0006685_8415 | 19 | corn Ribosomal | 63 | gi\|50932757\| | ref\|XP_475906.1\|unknown |
| | | | | protein L1p/L10e | | | protein [Oryza sativa |
| | | | | family | | | (japonica cultivar-group)] |
| 283 | 641 | PHE0006686_8416 | 19 | corn ribosomal protein | 98 | gi\|3914685\| | sp\|O48557\|RL17_MAIZE |
| | | | | L17.2, cytosolic | | | 60S ribosomal protein |
| | | | | | | | L17 gb\|AAB88619.1\| |
| | | | | | | | ribosomal protein L17 |
| | | | | | | | [Zea mays] |
| 284 | 642 | PHE0006687_8471 | 19 | corn ribosomal protein | 98 | gi\|15236757\| | sp\|P49211\|RL32A_ARATH |
| | | | | L32-like protein | | | 60S ribosomal protein |
| | | | | | | | L32-1 |
| 285 | 643 | PHE0006706_8434 | 1 | soy PDH45 (DNA | 100 | gi\|15223841\| | ref\|NP_175549.1\|ATP |
| | | | | helicase 45) | | | binding/ATP-dependent |
| | | | | | | | helicase/helicase/nucleic |
| | | | | | | | acid binding [Arabidopsis |
| | | | | | | | thaliana] |
| 286 | 644 | PHE0006709_8432 | 1 | Corn protein similar to | 80 | gi\|34912462\| | ref\|NP_917578.1\|MtN3- |
| | | | | nodulin Mt N3 Protein | | | like protein [Oryza sativa |
| | | | | | | | (japonica cultivar-group)] |
| | | | | | | | dbj\|BAB92465.1\| |
| | | | | | | | senescence-associated |
| | | | | | | | protein-like [Oryza sativa |
| | | | | | | | (japonica cultivar-group)] |
| 287 | 645 | PHE0006715_8477 | 1 | AKIN beta2 | 100 | gi\|56744220\| | sp\|Q9SCY5\|KINB2_ARATH |
| | | | | | | | SNF1-related protein |
| | | | | | | | kinase regulatory beta |
| | | | | | | | subunit 2 (AKIN beta2) |
| | | | | | | | (AKINB2) |
| 288 | 646 | PHE0006716_8482 | 1 | putative nitrate- | 78 | gi\|20465673\| | gb\|AAM20305.1\|putative |
| | | | | induced NOI protein | | | nitrate-induced NOI |
| | | | | | | | protein [Arabidopsis |
| | | | | | | | thaliana] |
| 289 | 647 | PHE0006727_8435 | 1 | corn NADH- | 91 | gi\|50509945\| | dbj\|BAD30267.1\|NADH- |
| | | | | ubiquinone | | | ubiquinone |
| | | | | oxidoreductase- | | | oxidoreductase-related- |
| | | | | related-like protein | | | like protein [Oryza sativa |
| | | | | | | | (japonica cultivar-group)] |
| 290 | 648 | PHE0006727_8595 | 19 | NADH-ubiquinone | 91 | gi\|50509945\| | dbj\|BAD30267.1\|NADH- |
| | | | | oxidoreductase- | | | ubiquinone |
| | | | | related-like protein | | | oxidoreductase-related- |
| | | | | | | | like protein [Oryza sativa |
| | | | | | | | (japonica cultivar-group)] |
| 291 | 649 | PHE0006728_8430 | 1 | Arabidopsis RNA | 95 | gi\|15231193\| | ref\|NP_190149.1\|RNA |
| | | | | recognition motif | | | binding/nucleic acid |
| | | | | (RRM)-containing | | | binding/ubiquitin-protein |
| | | | | protein | | | ligase/zinc ion binding |
| | | | | | | | [Arabidopsis thaliana] |
| 292 | 650 | PHE0006729_8433 | 1 | corn DNAJ heat shock | 67 | gi\|51536221\| | dbj\|BAD38392.1\|DNAJ |
| | | | | N-terminal domain- | | | heat shock N-terminal |
| | | | | containing protein-like | | | domain-containing |
| | | | | | | | protein-like [Oryza sativa |
| | | | | | | | (japonica cultivar-group)] |
| 293 | 651 | PHE0006730_8428 | 1 | corn membrane | 77 | gi\|51091402\| | dbj\|BAD36145.1\|membrane |
| | | | | protein PTM1-like | | | protein PTM1-like |
| | | | | | | | [Oryza sativa (japonica |
| | | | | | | | cultivar-group)] |
| 294 | 652 | PHE0006737_8455 | 1 | Arabidopsis putative | 100 | gi\|15221544\| | gb\|AAK64077.1\|putative |
| | | | | oxidoreductase | | | oxidoreductase |
| | | | | | | | [Arabidopsis thaliana] |
| 295 | 653 | PHE0006737_8527 | 19 | Arabidopsis putative | 100 | gi\|15221544\| | gb\|AAK25895.1\|putative |
| | | | | oxidoreductase | | | oxidoreductase |
| | | | | | | | [Arabidopsis thaliana] |
| 296 | 654 | PHE0006740_8446 | 1 | corn unknown protein | 70 | gi\|50931847\| | ref\|XP_475451.1\|unknown |
| | | | | | | | protein [Oryza sativa |
| | | | | | | | (japonica cultivar-group)] |
| 297 | 655 | PHE0006740_8596 | 19 | corn unknown protein | 70 | gi\|50931847\| | ref\|XP_475451.1\|unknown |
| | | | | | | | protein [Oryza sativa |
| | | | | | | | (japonica cultivar-group)] |
| 298 | 656 | PHE0006741_8448 | 1 | Arabidopsis unknown | 90 | gi\|30678912\| | ref\|NP_566212.2\|ATBPM4; |
| | | | | protein | | | protein binding |
| | | | | | | | [Arabidopsis thaliana] |
| 299 | 657 | PHE0006741_8589 | 19 | Arabidopsis unknown | 90 | gi\|30678912\| | ref\|NP_566212.2\|ATBPM4; |
| | | | | protein | | | protein binding |
| | | | | | | | [Arabidopsis thaliana] |
| 300 | 658 | PHE0006742_8440 | 1 | Pseudomonas | 98 | gi\|77385037\| | ref\|YP_350541.1\| |
| | | | | fluorescens Glucose- | | | glucose-6-phosphate |
| | | | | 6-phosphate isomerase | | | isomerase [Pseudomonas |
| | | | | | | | fluorescens PfO-1] |
| 301 | 659 | PHE0006742_8591 | 19 | Pseudomonas | 98 | gi\|77385037\| | gb\|ABA76550.1\|Glucose- |
| | | | | fluorescensGlucose- | | | 6-phosphate isomerase |
| | | | | 6-phosphate isomerase | | | [Pseudomonas |
| | | | | | | | fluorescens PfO-1] |
| 302 | 660 | PHE0006744_8449 | 1 | Arabidopsis ribitol | 95 | gi\|18423110\| | ref\|NP_568721.1\|oxidoreductase |
| | | | | dehydrogenase-like | | | [Arabidopsis |
| | | | | | | | thaliana] |
| | | | | | | | gb\|AAM13036.1\|ribitol |
| | | | | | | | dehydrogenase-like |
| | | | | | | | [Arabidopsis thaliana] |
| 303 | 661 | PHE0006745_8590 | 19 | corn putative 28 kDa | 81 | gi\|50904959\| | ref\|XP_463968.1\|putative |
| | | | | Golgi SNARE protein | | | 28 kDa Golgi SNARE |
| | | | | | | | protein [Oryza sativa |
| | | | | | | | (japonica cultivar-group)] |
| 304 | 662 | PHE0006746_8453 | 1 | Arabidopsis | 93 | gi\|18421106\| | ref\|NP_568493.1\|SFP1 |
| | | | | CGPG6223 sugar- | | | (sugar-porter family |
| | | | | porter family protein 1 | | | protein 1); carbohydrate |
| | | | | | | | transporter/sugar porter |
| | | | | | | | [Arabidopsis thaliana] |
| 305 | 663 | PHE0006750_8523 | 12 | Arabidopsis Cop1 | 100 | gi\|15225760\| | ref\|NP_180854.1\|COP1 |
| | | | | | | | (CONSTITUTIVE |
| | | | | | | | PHOTOMORPHOGENIC |
| | | | | | | | 1) [Arabidopsis |
| | | | | | | | thaliana] |
| 306 | 664 | PHE0006757_8530 | 12 | Arabidopsis | 92 | gi\|18390661\| | ref\|NP_563768.1\|ATGPAT1/ |
| | | | | phospholipid/glycerol | | | GPAT1; 1- |
| | | | | acyltransferase family | | | acylglycerol-3-phosphate |
| | | | | protein | | | O-acyltransferase/ |
| | | | | | | | acyltransferase |
| | | | | | | | [Arabidopsis thaliana] |
| 307 | 665 | PHE0006760_8529 | 19 | Arabidopsis vacuolar | 100 | gi\|15237054\| | ref\|NP_192853.1\|TUF |
| | | | | ATP synthase subunit | | | (TUFF) [Arabidopsis |
| | | | | E/V-ATPase E | | | thaliana] |
| | | | | subunit/vacuolar prot | | | emb\|CAB81216.1\|H+- |
| | | | | | | | transporting ATPase |
| | | | | | | | chain E, vacuolar |
| | | | | | | | [Arabidopsis thaliana] |
| 308 | 666 | PHE0006765_8536 | 20 | Arabidopsis IMB1 | 92 | gi\|30686240\| | ref\|NP_181036.2\|IMB1 |
| | | | | | | | (IMBIBITION- |
| | | | | | | | INDUCIBLE 1); DNA |
| | | | | | | | binding [Arabidopsis |
| | | | | | | | thaliana] |
| 309 | 667 | PHE0006766_8867 | 9 | AGRtu.Isopentyl | 94 | gi\|15163474\| | gb\|AAK90970.1\|AGR_pTi_50p |
| | | | | transferase-0:2:1 | | | [Agrobacterium |
| | | | | | | | tumefaciens str. C58] |
| 310 | 668 | PHE0006769_8865 | 14 | Pyruvate oxidase | 97 | gi\|1651398\| | dbj\|BAA35585.1\|pyruvate |
| | | | | (POXB) | | | dehydrogenase (pyruvate |
| | | | | | | | oxidase), thiamin- |
| | | | | | | | dependent, FAD-binding |
| | | | | | | | [Escherichia coli W3110] |
| 311 | 669 | PHE0006770_8553 | 19 | corn PDH45 | 99 | gi\|84322402\| | gb\|ABC55720.1\|putative |
| | | | | | | | RH2 protein [Zea mays] |
| 312 | 670 | PHE0006770_8568 | 13 | corn PDH45 | 99 | gi\|84322402\| | gb\|ABC55720.1\|putative |
| | | | | | | | RH2 protein [Zea mays] |
| 313 | 671 | PHE0006771_8551 | 19 | Arabidopsis HIC | 94 | gi\|15226428\| | gb\|AAC69929.1\|putative |
| | | | | (High CO2) | | | beta-ketoacyl-CoA |
| | | | | | | | synthase [Arabidopsis |
| | | | | | | | thaliana] |
| 314 | 672 | PHE0006775_8548 | 19 | RabG3e/Rab7 | 100 | gi\|15222098\| | ref\|NP_175355.1\|GTP |
| | | | | | | | binding [Arabidopsis |
| | | | | | | | thaliana] |
| 315 | 673 | PHE0006775_8555 | 13 | RabG3e/Rab7 | 100 | gi\|15222098\| | ref\|NP_175355.1\|GTP |
| | | | | | | | binding [Arabidopsis |
| | | | | | | | thaliana] |
| 316 | 674 | PHE0006788_8581 | 13 | Lycopersicon | 72 | gi\|71360930\| | emb\|CAJ19706.1\|non- |
| | | | | esculentum non | | | specific lipid transfer |
| | | | | specific lipid transfer | | | protein [Lycopersicon |
| | | | | protein | | | esculentum] |
| 317 | 675 | PHE0006793_8580 | 13 | Arabidopsis | 97 | gi\|15236789\| | ref\|NP_191946.1\|CYP86A2; |
| | | | | cytochrome P450 | | | oxygen binding |
| | | | | | | | [Arabidopsis thaliana] |
| | | | | | | | emb\|CAB80794.1\| |
| | | | | | | | probable cytochrome |
| | | | | | | | P450 [Arabidopsis |
| | | | | | | | thaliana] |
| 318 | 676 | PHE0006794_8578 | 13 | Arabidopsis single- | 100 | gi\|30681642\| | ref\|NP_192844.2\|single- |
| | | | | strand-binding family | | | stranded DNA binding |
| | | | | protein | | | [Arabidopsis thaliana] |
| 319 | 677 | PHE0006805_8531 | 12 | E. coli yf1a | 100 | gi\|24053042\| | gb\|AAN44153.1\|putative |
| | | | | | | | yhbH sigma 54 modulator |
| | | | | | | | [Shigella flexneri 2a str. |
| | | | | | | | 301] |
| 320 | 678 | PHE0006811_8506 | 19 | Cyanoglobin | 91 | gi\|1653074\| | dbj\|BAA17991.1\|cyanoglobin |
| | | | | | | | [Synechocystis sp. |
| | | | | | | | PCC 6803] |
| 321 | 679 | PHE0006816_8560 | 19 | Corn HO2-Like | 71 | gi\|14485573\| | gb\|AAK63011.1\|heme |
| | | | | | | | oxygenase 2 [Sorghum |
| | | | | | | | bicolor] |
| 322 | 680 | PHE0006844_8839 | 22 | Arabidopsis RNA- | 100 | gi\|15232735\| | ref\|NP_190300.1\|ubiquitin- |
| | | | | binding protein-like | | | protein ligase/zinc ion |
| | | | | protein | | | binding [Arabidopsis |
| | | | | | | | thaliana] |
| 323 | 681 | PHE0006847_8860 | 19 | Agrobacterium 3,4- | 100 | gi\|17739122\| | gb\|AAL41769.1\|3,4- |
| | | | | dihydroxy-2- | | | dihydroxy-2-butanone-4- |
| | | | | butanone-4-phoshate | | | phoshate synthase/GTP |
| | | | | synthase/GTP | | | cyclohydrolase II |
| | | | | cyclohyd | | | [Agrobacterium |
| | | | | | | | tumefaciens str. C58] |
| 324 | 682 | PHE0006870_8846 | 19 | 60S ribosomal protein | 100 | gi\|18411538\| | gb\|AAM65721.1\|60S |
| | | | | L37a | | | ribosomal protein L37a |
| | | | | | | | [Arabidopsis thaliana] |
| 325 | 683 | PHE0006908_9016 | 19 | Thioredoxin_MON_ZM33301 | 67 | gi\|10178282\| | emb\|CAC08340.1\|putative |
| | | | | | | | protein [Arabidopsis |
| | | | | | | | thaliana] |
| 326 | 684 | PHE0006909_9003 | 19 | A1ZM000889_at_Cupin_3 | 75 | gi\|50924572\| | ref\|XP_472645.1\|OSJNBa0027P08.10 |
| | | | | | | | [Oryza sativa |
| | | | | | | | (japonica cultivar-group)] |
| 327 | 685 | PHE0006910_9019 | 19 | A1ZM009835_at_Mov34 | 75 | gi\|55773965\| | dbj\|BAD72492.1\|ALM |
| | | | | | | | beta-like [Oryza sativa |
| | | | | | | | (japonica cultivar-group)] |
| 328 | 686 | PHE0006912_9000 | 19 | A1ZM000998_a_at_putative | 79 | gi\|50911385\| | ref\|XP_467100.1\|putative |
| | | | | enoyl-CoA | | | enoyl-CoA hydratase |
| | | | | hydratase | | | [Oryza sativa (japonica |
| | | | | | | | cultivar-group)] |
| 329 | 687 | PHE0006919_9008 | 19 | putative mitochondrial | 76 | gi\|57899480\| | dbj\|BAD86941.1\|putative |
| | | | | processing peptidase | | | mitochondrial processing |
| | | | | alpha subuunit, mitoch | | | peptidase [Oryza sativa |
| | | | | | | | (japonica cultivar-group)] |
| 330 | 688 | PHE0006929_9151 | 22 | COP1-interacting | 46 | gi\|15238295\| | ref\|NP_201297.1\|CIP8 |
| | | | | protein CIP8 | | | (COP1-INTERACTING |
| | | | | | | | PROTEIN 8); protein |
| | | | | | | | binding/zinc ion binding |
| | | | | | | | [Arabidopsis thaliana] |
| 331 | 689 | PHE0006929_9185 | 19 | COP1-interacting | 46 | gi\|15238295\| | ref\|NP_201297.1\|CIP8 |
| | | | | protein CIP8 | | | (COP1-INTERACTING |
| | | | | | | | PROTEIN 8); protein |
| | | | | | | | binding/zinc ion binding |
| | | | | | | | [Arabidopsis thaliana] |
| 332 | 690 | PHE0006931_9148 | 22 | glycine dehydrogenase | 93 | gi\|10175436\| | dbj\|BAB06534.1\|glycine |
| | | | | subunit 1 | | | dehydrogenase subunit 1 |
| | | | | | | | [Bacillus halodurans C- |
| | | | | | | | 125] |
| 333 | 691 | PHE0006931_9168 | 19 | glycine dehydrogenase | 93 | gi\|10175436\| | dbj\|BAB06534.1\|glycine |
| | | | | subunit 1 | | | dehydrogenase subunit 1 |
| | | | | | | | [Bacillus halodurans C- |
| | | | | | | | 125] |
| 334 | 692 | PHE0006932_9147 | 22 | expressed protein | 100 | gi\|18406559\| | ref\|NP_566020.1\|unknown |
| | | | | | | | protein [Arabidopsis |
| | | | | | | | thaliana] |
| 335 | 693 | PHE0006932_9174 | 19 | Unknown protein | 100 | gi\|18406559\| | ref\|NP_566020.1\|unknown |
| | | | | | | | protein [Arabidopsis |
| | | | | | | | thaliana] |
| 336 | 694 | PHE0006933_9139 | 22 | short-chain | 92 | gi\|30686197\| | ref\|NP_849428.1\|oxidoreductase |
| | | | | dehydrogenase/reductase | | | [Arabidopsis |
| | | | | (SDR) family | | | thaliana] |
| | | | | protein_CGPG5025 | | | |
| 337 | 695 | PHE0006934_9145 | 22 | OsPol delta small | 91 | gi\|9188572\| | dbj\|BAA99574.1\|OsPol |
| | | | | subunit | | | delta small subunit [Oryza |
| | | | | | | | sativa (japonica cultivar- |
| | | | | | | | group)] |
| 338 | 696 | PHE0006937_9126 | 22 | putative leucine zipper | 77 | gi\|51535194\| | dbj\|BAD38167.1\|putative |
| | | | | protein | | | leucine zipper protein |
| | | | | | | | [Oryza sativa (japonica |
| | | | | | | | cultivar-group)] |
| 339 | 697 | PHE0006938_9149 | 22 | TPA: actin-related | 98 | gi\|30696705\| | ref\|NP_568836.2\|ATARP8 |
| | | | | protein 8B | | | (ACTIN-RELATED |
| | | | | | | | PROTEIN 8); structural |
| | | | | | | | constituent of |
| | | | | | | | cytoskeleton [Arabidopsis |
| | | | | | | | thaliana] |
| 340 | 698 | PHE0006940_9122 | 22 | NADP-dependent | 100 | gi\|10174856\| | dbj\|BAB05956.1\|NADP- |
| | | | | glyceraldehyde-3- | | | dependent |
| | | | | phosphate | | | glyceraldehyde-3- |
| | | | | dehydrogenase | | | phosphate dehydrogenase |
| | | | | | | | [Bacillus halodurans C- |
| | | | | | | | 125] |
| 341 | 699 | PHE0006941_9117 | 22 | Unknown protein | 90 | gi\|18401933\| | ref\|NP_564515.1\|unknown |
| | | | | | | | protein [Arabidopsis |
| | | | | | | | thaliana] |
| 342 | 700 | PHE0006943_9124 | 22 | amino acid | 94 | gi\|18395471\| | ref\|NP_564217.1\|AATL2 |
| | | | | transporter-like | | | (AMINO ACID |
| | | | | protein 2 | | | TRANSPORTER-LIKE |
| | | | | | | | PROTEIN 2); amino acid |
| | | | | | | | permease [Arabidopsis |
| | | | | | | | thaliana] |
| 343 | 701 | PHE0006948_9125 | 22 | Similar to glycine-rich | 100 | gi\|15221825\| | ref\|NP_173298.1\|RNA |
| | | | | RNA-binding proteins_CGPG4960 | | | binding/nucleic acid |
| | | | | | | | binding [Arabidopsis |
| | | | | | | | thaliana] |
| 344 | 702 | PHE0006948_9160 | 19 | glycine-rich RNA- | 100 | gi\|15221825\| | ref\|NP_173298.1\|RNA |
| | | | | binding proteins | | | binding/nucleic acid |
| | | | | | | | binding [Arabidopsis |
| | | | | | | | thaliana] |
| 345 | 703 | PHE0006949_9133 | 22 | PROBABLE | 97 | gi\|15072942\| | ref\|NP_384120.1\| |
| | | | | SUCCINATE- | | | PROBABLE |
| | | | | SEMIALDEHYDE | | | SUCCINATE- |
| | | | | DEHYDROGENASE | | | SEMIALDEHYDE |
| | | | | [NADP] PROTEIN | | | DEHYDROGENASE |
| | | | | | | | [NADP+] PROTEIN |
| | | | | | | | [Sinorhizobium meliloti |
| | | | | | | | 1021] |
| 346 | 704 | PHE0006949_9179 | 19 | PROBABLE | 97 | gi\|15072942\| | emb\|CAC41401.1\|PROBABLE |
| | | | | SUCCINATE- | | | SUCCINATE- |
| | | | | SEMIALDEHYDE | | | SEMIALDEHYDE |
| | | | | DEHYDROGENASE | | | DEHYDROGENASE |
| | | | | [NADP] PROTEIN | | | [NADP+] PROTEIN |
| | | | | | | | [Sinorhizobium meliloti] |
| 347 | 705 | PHE0006952_9233 | 22 | Gpm1p with ctp | 95 | gi\|407495\| | ref\|NP_012770.1\| |
| | | | | | | | Tetrameric |
| | | | | | | | phosphoglycerate mutase, |
| | | | | | | | [Saccharomyces |
| | | | | | | | cerevisiae] |
| 348 | 706 | PHE0006953_9121 | 22 | universal stress | 93 | gi\|30678807\| | ref\|NP_850506.1\|unknown |
| | | | | protein (USP) family | | | protein [Arabidopsis |
| | | | | protein | | | thaliana] |
| 349 | 707 | PHE0006954_9154 | 22 | unnamed protein | 80 | gi\|22327694\| | ref\|NP_680415.1\|unknown |
| | | | | product | | | protein [Arabidopsis |
| | | | | | | | thaliana] |
| 350 | 708 | PHE0006954_9161 | 19 | unnamed protein | 80 | gi\|22327694\| | ref\|NP_680415.1\|unknown |
| | | | | product | | | protein [Arabidopsis |
| | | | | | | | thaliana] |
| 351 | 709 | PHE0006962_9114 | 15 | nitrate reductase | 94 | gi\|85675313\| | dbj\|BAA15989.2\|nitrate |
| | | | | | | | reductase, periplasmic, |
| | | | | | | | large subunit [Escherichia |
| | | | | | | | coli W3110] |
| 352 | 710 | PHE0006963_9131 | 15 | nitrite reductase | 97 | gi\|85676675\| | dbj\|BAE77925.1\|nitrite |
| | | | | | | | reductase, large subunit, |
| | | | | | | | NAD(P)H-binding |
| | | | | | | | [Escherichia coli W3110] |
| 353 | 711 | PHE0006965_9119 | 17 | glutaminyl-tRNA | 86 | gi\|77554943\| | gb\|ABA97739.1\|prolyl- |
| | | | | synthetase | | | tRNA synthetase [Oryza |
| | | | | | | | sativa (japonica cultivar- |
| | | | | | | | group)] |
| 354 | 712 | PHE0006970_9141 | 19 | DNA binding/ | 100 | gi\|15242227\| | ref\|NP_197020.1\|DNA |
| | | | | transcription factor | | | binding/transcription |
| | | | | | | | factor [Arabidopsis |
| | | | | | | | thaliana] |
| 355 | 713 | PHE0006977_9163 | 19 | ribulose-phosphate 3- | 96 | gi\|15221735\| | ref\|NP_176518.1\|ribulose- |
| | | | | epimerase | | | phosphate 3-epimerase |
| | | | | | | | [Arabidopsis thaliana] |
| 356 | 714 | PHE0006986_9183 | 19 | Unknown protein | 82 | gi\|50932819\| | ref\|XP_475937.1\|unknown |
| | | | | | | | protein [Oryza sativa |
| | | | | | | | (japonica cultivar-group)] |
| 357 | 715 | PHE0006992_9140 | 22 | unknown protein | 93 | gi\|15234800\| | ref\|NP_194792.1\|unknown |
| | | | | | | | protein [Arabidopsis |
| | | | | | | | thaliana] |
| 358 | 716 | PHE0006992_9184 | 19 | Unknown protein | 93 | gi\|15234800\| | ref\|NP_194792.1\|unknown |
| | | | | | | | protein [Arabidopsis |
| | | | | | | | thaliana] |

Selection Methods for Transgenic Plants with Enhanced Agronomic Trait

[0060] Within a population of transgenic plants regenerated from plant cells transformed with the recombinant DNA many plants that survive to fertile transgenic plants that produce seeds and progeny plants will not exhibit an enhanced agronomic trait. Selection from the population is necessary to identify one or more transgenic plant cells that can provide plants with the enhanced trait. Transgenic plants having enhanced traits are selected from populations of plants regenerated or derived from plant cells transformed as described herein by evaluating the plants in a variety of assays to detect an enhanced trait, e.g. enhanced water use efficiency, enhanced cold tolerance, increased yield, enhanced nitrogen use efficiency, enhanced seed protein and enhanced seed oil. These assays also may take many forms including, but not limited to, direct screening for the trait in a greenhouse or field trial or by screening for a surrogate trait. Such analyses can be directed to detecting changes in the chemical composition, biomass, physiological properties, morphology of the plant. Changes in chemical compositions such as nutritional composition of grain can be detected by analysis of the seed composition and content of protein, free amino acids, oil, free fatty acids, starch or tocopherols. Changes in biomass characteristics can be made on greenhouse or field grown plants and can include plant height, stem diameter, root and shoot dry weights; and, for corn plants, ear length and diameter. Changes in physiological properties can be identified by evaluating responses to stress conditions, for example assays using imposed stress conditions such as water deficit, nitrogen deficiency, cold growing conditions, pathogen or insect attack or light deficiency, or increased plant density. Changes in morphology can be measured by visual observation of tendency of a transformed plant with an enhanced agronomic trait to also appear to be a normal plant as compared to changes toward bushy, taller, thicker, narrower leaves, striped leaves, knotted trait, chlorosis, albino, anthocyanin production, or altered tassels, ears or roots. Other selection properties include days to pollen shed, days to silking, leaf extension rate, chlorophyll content, leaf temperature, stand, seedling vigor, internode length, plant height, leaf number, leaf area, tillering, brace roots, stay green, stalk lodging, root lodging, plant health, barreness/prolificacy, green snap, and pest resistance. In addition, phenotypic characteristics of harvested grain may be evaluated, including number of kernels per row on the ear, number of rows of kernels on the ear, kernel abortion, kernel weight, kernel size, kernel density and physical grain quality. Although the plant cells and methods of this invention can be applied to any plant cell, plant, seed or pollen, e.g. any fruit, vegetable, grass, tree or ornamental plant, the various aspects of the invention are preferably applied to corn, soybean, cotton, canola, alfalfa, wheat and rice plants. In many cases the invention is applied to corn plants that are inherently resistant to disease from the Mal de Rio Cuarto virus or the Puccina sorghi fungus or both.

[0061] The following examples are included to demonstrate aspects of the invention, those of skill in the art should, in light of the present disclosure, appreciate that many changes can be made in the specific aspects which are disclosed and still obtain a like or similar results without departing from the spirit and scope of the invention.

### Example 1

### Plant Expression Constructs

[0062] This example illustrates the construction of plasmids for transferring recombinant DNA into plant cells which can be regenerated into transgenic plants of this invention

### A. Plant Expression Constructs for Corn Transformation

[0063] A base corn plant transformation vector pMON93039, as set forth in SEQ ID NO: 30329, illustrated in Table 3 and FIG. 2, was fabricated for use in preparing recombinant DNA for Agrobacterium-mediated transformation into corn tissue.

TABLE 3

| | | | Coordinates |
|---|---|---|---|
| | | | of |
| | | | SEQ ID NO: |
| function | name | annotation | 30329 |
| Agro | B-AGRtu.right border | Agro right border | 11364-11720 |
| transforamtion | | sequence, essential for transfer | |
| | | of T-DNA. | |
| Gene of | E-Os.Act1 | upstream promoter | 19-775 |
| interest | | region of the rice actin | |
| expression | | 1 gene | |
| cassette | E-CaMV.35S.2xA1-B3 | duplicated35S A1-B3 | 788-1120 |
| | | domain without TATA | |
| | | box | |
| | P-Os.Act1 | promoter region of the | 1125-1204 |
| | | rice actin 1 gene | |
| | L-Ta.Lhcb1 | 5′ untranslated leader | 1210-1270 |
| | | of wheat major | |
| | | chlorophyll a/b binding | |
| | | protein | |
| | I-Os.Act1 | first intron and flanking | 1287-1766 |
| | | UTR exon sequences | |
| | | from the rice actin 1 | |
| | | gene | |
| | T-St.Pis4 | 3′ non-translated region | 1838-2780 |
| | | of the potato proteinase | |
| | | inhibitor II gene which | |
| | | functions to direct | |
| | | polyadenylation of the | |
| | | mRNA | |
| Plant | P-Os.Act1 | Promoter from the rice | 2830-3670 |
| selectable | | actin 1 gene | |
| marker | L-Os.Act1 | first exon of the rice | 3671-3750 |
| expression | | actin 1 gene | |
| cassette | I-Os.Act1 | first intron and flanking | 3751-4228 |
| | | UTR exon sequences | |
| | | from the rice actin 1 | |
| | | gene | |
| | TS-At.ShkG-CTP2 | Transit peptide region | 4238-4465 |
| | | of Arabidopsis EPSPS | |
| | CR-AGRtu.aroA- | Synthetic CP4 coding | 4466-5833 |
| | CP4.nat | region with dicot | |
| | | preferred codon usage. | |
| | T-AGRtu.nos | A 3′ non-translated | 5849-6101 |
| | | region of the nopaline | |
| | | synthase gene of | |
| | | Agrobacterium | |
| | | tumefaciens Ti plasmid | |
| | | which functions to | |
| | | direct polyadenylation | |
| | | of the mRNA. | |
| Agro | B-AGRtu.left border | Agro left border | 6168-6609 |
| transformation | | sequence, essential for | |
| | | transfer of T-DNA. | |
| Maintenance | OR-Ec.oriV-RK2 | The vegetative origin of | 6696-7092 |
| in E. coli | | replication from | |
| | | plasmid RK2. | |
| | CR-Ec.rop | Coding region for | 8601-8792 |
| | | repressor of primer | |
| | | from the ColE1 | |
| | | plasmid. Expression of | |
| | | this gene product | |
| | | interferes with primer | |
| | | binding at the origin of | |
| | | replication, keeping | |
| | | plasmid copy number | |
| | | low. | |
| | OR-Ec.ori-ColE1 | The minimal origin of | 9220-9808 |
| | | replication from the E. | |
| | | coli plasmid ColE1. | |
| | P-Ec.aadA-SPC/STR | romoter for Tn7 | 10339-10380 |
| | | adenylyltransferase | |
| | | (AAD(3″)) | |
| | CR-Ec.aadA-SPC/STR | Coding region for Tn7 | 10381-11169 |
| | | adenylyltransferase | |
| | | (AAD(3″)) conferring | |
| | | spectinomycin and | |
| | | streptomycin resistance. | |
| | T-Ec.aadA-SPC/STR | 3′ UTR from the Tn7 | 11170-11227 |
| | | adenylyltransferase | |
| | | (AAD(3″)) gene of E. | |
| | | coli. | |

[0064] Another embodiment of corn plant transformation base vector is pMON92705, as set forth in SEQ ID NO: 30330, illustrated in Table 4 and FIG. 3, which was fabricated for use in preparing recombinant DNA for Agrobacterium-mediated transformation into corn tissue.

TABLE 4

| | | | Coordinates |
|---|---|---|---|
| | | | of SEQ ID |
| function | name | annotation | NO: 30330 |
| Agro | B-AGRtu.right border | Agro right border | 5206-5526 |
| transforamtion | | sequence, essential for | |
| | | transfer of T-DNA. | |
| Gene of | P-Os.Act1 | Promoter from the rice | 5580-6423 |
| interest | | actin 1 gene | |
| expression | L-Os.Act1 | 5′UTR of riceActl gene | 6424-6503 |
| cassette | I-Os.Act1 | Intron from the rice | 6504-6980 |
| | | actinl gene | |
| | T-St.Pis4 | 3′ non-translated region of | 7055-7997 |
| | | the potato proteinase | |
| | | inhibitor II gene which | |
| | | functions to direct | |
| | | polyadenylation of the | |
| | | mRNA | |
| Plant | P-Os.Act1 | Promoter from the rice | 8047-8887 |
| selectable | | actin 1 gene | |
| marker | L-Os.Act1 | first exon of the rice actin | 8888-8967 |
| expression | | 1 gene | |
| cassette | I-Os.Act1 | first intron and flanking | 8968-9445 |
| | | UTR exon sequences | |
| | | from the rice actin 1 gene | |
| | TS-At.ShkG-CTP2 | Transit peptide region of | 9455-9682 |
| | | Arabidopsis EPSPS | |
| | CR-AGRtu.aroA- | Synthetic CP4 coding | 9683-11050 |
| | CP4.nat | region with dicot | |
| | | preferred codon usage. | |
| | T-AGRtu.nos | A 3′ non-translated region | 11066-11318 |
| | | of the nopaline synthase | |
| | | gene of Agrobacterium | |
| | | tumefaciens Ti plasmid | |
| | | which functions to direct | |
| | | polyadenylation of the | |
| | | mRNA. | |
| Agro | B-AGRtu.left border | Agro left border | 10-451 |
| transformation | | sequence, essential for | |
| | | transfer of T-DNA. | |
| Maintenance | OR-Ec.oriV-RK2 | The vegetative origin of replication | 538-934 |
| in E. coli | | from plasmid | |
| | | RK2. | |
| | CR-Ec.rop | Coding region for | 2443-2634 |
| | | repressor of primer from | |
| | | the ColE1 plasmid. | |
| | | Expression of this gene | |
| | | product interferes with | |
| | | primer binding at the | |
| | | origin of replication, | |
| | | keeping plasmid copy | |
| | | number low. | |
| | OR-Ec.ori-ColE1 | The minimal origin of | 3062-3650 |
| | | replication from the E. | |
| | | coli plasmid ColE1. | |
| | P-Ec.aadA-SPC/STR | romoter for Tn7 | 4181-4222 |
| | | adenylyltransferase | |
| | | (AAD(3″)) | |
| | CR-Ec.aadA-SPC/STR | Coding region for Tn7 | 4223-5011 |
| | | adenylyltransferase | |
| | | (AAD(3″)) conferring | |
| | | spectinomycin and | |
| | | streptomycin resistance. | |
| | T-Ec.aadA-SPC/STR | 3′ UTR from the Tn7 | 5012-5562 |
| | | adenylyltransferase | |
| | | (AAD(3″)) gene of E. | |
| | | coli. | |

[0065] Other base vectors similar to those described above were also constructed as listed in Table 5. See Table 5 for a summary of base vector plasmids and base vector ID's which are referenced in Table 2. Also see Table 5 for a summary of regulatory elements used in the gene expression cassette for these base vectors and SEQ D NOs for elements.

[0066] Primers for PCR amplification of protein coding nucleotides of recombinant DNA are designed at or near the start and stop codons of the coding sequence, in order to eliminate most of the 5′ and 3′ untranslated regions. Each recombinant DNA coding for a protein identified in Table 2 is amplified by PCR prior to insertion into the insertion site within the gene of interest expression cassette of one of the base vectors as referenced in Table 2.

TABLE 5

| Base | |
|---|---|
| Vector | |
| ID | |
| | Base |
| | Vector for |
| | Corn |
| 4 | pMON92705 |
| 5 | pMON92708 |
| 6 | pMON92709 |
| 7 | pMON92713 |
| 8 | pMON92714 |
| 9 | pMON92715 |
| 10 | pMON92716 |
| 11 | pMON92717 |
| 12 | pMON92718 |
| 13 | pMON92719 |
| 14 | pMON92721 |
| 15 | pMON92722 |
| 16 | pMON92723 |
| 17 | pMON92724 |
| 19 | pMON93039 |
| 20 | pMON93043 |
| 21 | pMON94781 |
| | Base |
| | Vector for |
| | Soybean |
| 1 | pMON82053 |
| 2 | pMON92671 |
| 3 | pMON92672 |
| 18 | pMON93007 |
| 22 | pMON99006 |

TABLE 6

| | | SEQ ID | | SEQ | | SEQ ID |
|---|---|---|---|---|---|---|
| vector | promoter | NO | leader | ID NO | intron | NO |
| pMON82053 | P-CaMV.35S-enh | 30332 | NONE | / | NONE | / |
| pMON92671 | P-At.SAMS3 | 30333 | L-At.SAMS3 | 30352 | I-At.SAMS3 | 30371 |
| pMON92672 | P-At.Stm | 30334 | L-At.Stm | 30353 | NONE | / |
| pMON92705 | P-Os.Act1 | 30335 | L-Os.Act1 | 30354 | I-Os.Act1 | 30372 |
| pMON92708 | P-Zm.CA4H | 30336 | L-Zm.CA4H | 30355 | NONE | / |
| pMON92709 | P-Os.GT1 | 30337 | L-Os.GT1 | 30356 | I-Zm.DnaK | 30373 |
| pMON92713 | P-Zm.P39486 | 30338 | L-Zm.39486 | 30357 | I-Zm.DnaK | 30373 |
| pMON92714 | P-RTBV | 30339 | L-RTBV | 30358 | I-Zm.DnaK | 30373 |
| pMON92715 | P-Hv.Per1 | 30340 | L-Hv.Per1 | 30359 | I-Zm.DnaK | 30373 |
| pMON92716 | P-Zm.FDA | 30341 | L-Zm.FDA | 30360 | I-Zm.DnaK | 30373 |
| pMON92717 | P-At.SAMS3 | 30334 | L-At.SAMS3 | 30352 | I-At.SAMS3 | 30371 |
| pMON92718 | P-Zm.CLK1 | 30342 | L-Zm.Cik1 | 30361 | I-Zm.Cik1 | 30374 |
| pMON92719 | P-Zm.RAB17 | 30343 | L-Zm.RAB17 | 30362 | I-Zm.DnaK | 30373 |
| pMON92721 | P-Zm.SzeinC1 | 30344 | L-Zm.SzeinC1 | 30363 | I-Zm.DnaK | 30373 |
| pMON92722 | P-CaMV.35S-enh | 30345 | L-CaMV.35S | 30364 | I-Zm.DnaK | 30373 |
| pMON92723 | P-Zm.Nicotianamine | 30346 | L-Zm.NAS2 | 30365 | I-Zm.DnaK | 30373 |
| | Synthase | | | | | |
| pMON92724 | P-Zm.-636aldolase- | 30347 | L-Zm.PPDK | 30366 | I-Zm.DnaK | 30373 |
| | 0:1:2 + P-Zm.PPDK | | | | | |
| pMON93007 | P-At.rd29a | 30348 | L-At.rd29a | 30367 | NONE | / |
| pMON93039 | E-Os.Act1 + E- | 30349 | L-Ta.Lhcb1 | 30368 | I-Os.Act1 | 30375 |
| | CaMV.35S.2xA1-B3 + | | | | | |
| | P-Os.Act1 | | | | | |
| pMON93043 | P-Zm.EM | 30350 | L-Zm.EM | 30369 | I-Zm.DnaK | 30373 |
| pMON94781 | P-Zm.Brittle-2 | 30351 | L-Zm.Brittle-2 | 30370 | I-Zm.DnaK | 30373 |
| pMON99006 | P-CaMV.35S-enh | 30332 | NONE | / | NONE | / |

B. Plasmids for use in transformation of soybean were also prepared. Elements of an exemplary common expression vector plasmid pMON82053 are shown in Table 7 below and FIG. 4.

TABLE 7

| | | | Coordinates of |
|---|---|---|---|
| | | | SEQ ID NO: |
| function | name | annotation | 30331 |
| Agro | B-AGRtu.left | Agro left border sequence, essential | 6144-6585 |
| transforamtion | border | for transfer of T-DNA. | |
| Plant | P-At.Act7 | Promoter from the arabidopsis actin | |
| selectable | | 7 gene | |
| marker | L-At.Act7 | 5′UTR of Arabidopsis Act7 gene | |
| expression | I-At.Act7 | Intron from the Arabidopsis actin7 | 6624-7861 |
| cassette | | gene | |
| | TS-At.ShkG- | Transit peptide region of Arabidopsis | 7864-8091 |
| | CTP2 | EPSPS | |
| | CR-AGRtu.aroA- | Synthetic CP4 coding region with | 8092-9459 |
| | CP4.nno_At | dicot preferred codon usage. | |
| | T-AGRtu.nos | A 3′ non-translated region of the | 9466-9718 |
| | | nopaline synthase gene of | |
| | | Agrobacterium tumefaciens Ti | |
| | | plasmid which functions to direct | |
| | | polyadenylation of the mRNA. | |
| Gene of | P-CaMV.35S-enh | Promoter for 35S RNA from CaMV | 1-613 |
| interest | | containing a duplication of the −90 to | |
| expression | | −350 region. | |
| cassette | T-Gb.E6-3b | 3′ untranslated region from the fiber | 688-1002 |
| | | protein E6 gene of sea-island cotton; | |
| Agro | B-AGRtu.right | Agro right border sequence, essential | |
| transformation | border | for transfer of T-DNA. | 1033-1389 |
| | OR-Ec.oriV-RK2 | The vegetative origin of replication | 5661-6057 |
| | | from plasmid RK2. | |
| | CR-Ec.rop | Coding region for repressor of primer | 3961-4152 |
| | | from the ColE1 plasmid. Expression | |
| | | of this gene product interferes with | |
| | | primer binding at the origin of | |
| | | replication, keeping plasmid copy | |
| | | number low. | |
| | OR-Ec.ori-ColE1 | The minimal origin of replication | 2945-3533 |
| | | from the E. coli plasmid ColE1. | |
| | P-Ec.aadA- | romoter for Tn7 adenylyltransferase | 2373-2414 |
| | SPC/STR | (AAD(3″)) | |
| | CR-Ec.aadA- | Coding region for Tn7 | 1584-2372 |
| | SPC/STR | adenylyltransferase (AAD(3″)) | |
| | | conferring spectinomycin and | |
| | | streptomycin resistance. | |
| Maintenance | T-Ec.aadA- | 3′ UTR from the Tn7 | 1526-1583 |
| inE. coli | SPC/STR | adenylyltransferase (AAD(3″)) gene | |
| | | of E. coli. | |

[0067] Primers for PCR amplification of protein coding nucleotides of recombinant DNA are designed at or near the start and stop codons of the coding sequence, in order to eliminate most of the 5′ and 3′ untranslated regions. Each recombinant DNA coding for a protein identified in Table 2 is amplified by PCR prior to insertion into the insertion site within the gene of interest expression cassette of one of the base vectors as referenced in Table 2.

### C. Cotton Transformation Vector

[0068] Plasmids for use in transformation of cotton are also prepared. Elements of an exemplary common expression vector plasmid pMON99053 are shown in Table 8 below and FIG. 5. Primers for PCR amplification of protein coding nucleotides of recombinant DNA are designed at or near the start and stop codons of the coding sequence, in order to eliminate most of the 5′ and 3′ untranslated regions. Each recombinant DNA coding for a protein identified in Table 2 is amplified by PCR prior to insertion into the insertion site within the gene of interest expression cassette of one of the base vectors as referenced in Table 2.

TABLE 8

| | | | Coordinates of |
|---|---|---|---|
| | | | SEQ ID NO: |
| function | name | annotation | 30376 |
| Agro | B-AGRtu.right border | Agro right border sequence, | 11364-11720 |
| transforamtion | | essential for transfer of T- | |
| | | DNA. | |
| Gene of interest | Exp-CaMV.35S- | Enhanced version of the 35S | 7794-8497 |
| expression | enh + ph.DnaK | RNA promoter from CaMV | |
| cassette | | plus the petunia hsp70 5′ | |
| | | untranslated region | |
| | T-Ps.RbcS2-E9 | The 3′ non-translated region of | 67-699 |
| | | the pea RbcS2 gene which | |
| | | functions to direct | |
| | | polyadenylation of the mRNA. | |
| Plant selectable | Exp-CaMV.35S | Promoter from the rice actin 1 | 730-1053 |
| marker | | gene | |
| expression | CR-Ec.nptll-Tn5 | first exon of the rice actin 1 | 1087-1881 |
| cassette | | gene | |
| | T-AGRtu.nos | A 3′ non-translated region of | 1913-2165 |
| | | the nopaline synthase gene of | |
| | | Agrobacterium tumefaciens Ti | |
| | | plasmid which functions to | |
| | | direct polyadenylation of the | |
| | | mRNA. | |
| Agro | B-AGRtu.left border | Agro left border sequence, | 2211-2652 |
| transformation | | essential for transfer of T- | |
| | | DNA. | |
| Maintenance in | OR-Ec.oriV-RK2 | The vegetative origin of | 2739-3135 |
| E. coli | | replication from plasmid RK2. | |
| | CR-Ec.rop | Coding region for repressor of | 4644-4835 |
| | | primer from the ColE1 | |
| | | plasmid. Expression of this | |
| | | gene product interferes with | |
| | | primer binding at the origin of | |
| | | replication, keeping plasmid | |
| | | copy number low. | |
| | OR-Ec.ori-ColE1 | The minimal origin of | 5263-5851 |
| | | replication from the E. coli | |
| | | plasmid ColE1. | |
| | P-Ec.aadA-SPC/STR | romoter for Tn7 | 6382-6423 |
| | | adenylyltransferase | |
| | | (AAD(3″)) | |
| | CR-Ec.aadA-SPC/STR | Coding region for Tn7 | 6424-7212 |
| | | adenylyltransferase | |
| | | (AAD(3″)) conferring | |
| | | spectinomycin and | |
| | | streptomycin resistance. | |
| | T-Ec.aadA-SPC/STR | 3′ UTR from the Tn7 | 7213-7270 |
| | | adenylyltransferase | |
| | | (AAD(3″)) gene of E. coli. | |

### Example 2

### Corn Transformation

[0069] This example illustrates plant cell transformation methods useful in producing transgenic corn plant cells, plants, seeds and pollen of this invention and the production and identification of transgenic corn plants and seed with an enhanced trait, i.e. enhanced water use efficiency, enhanced cold tolerance, increased yield, enhanced nitrogen use efficiency, enhanced seed protein and enhanced seed oil. Plasmid vectors were prepared by cloning DNA identified in Table 2 in the identified base vectors for use in corn transformation of corn plant cells to produce transgenic corn plants and progeny plants, seed and pollen.

[0070] For Agrobacterium-mediated transformation of corn embryo cells corn plants of a readily transformable line (designated LH59) is grown in the greenhouse and ears harvested when the embryos are 1.5 to 2.0 mm in length. Ears are surface sterilized by spraying or soaking the ears in 80% ethanol, followed by air drying. Immature embryos are isolated from individual kernels on surface sterilized ears. Prior to inoculation of maize cells, Agrobacterium cells are grown overnight at room temperature. Immature maize embryo cells are inoculated with Agrobacterium shortly after excision, and incubated at room temperature with Agrobacterium for 5-20 minutes. Immature embryo plant cells are then co-cultured with Agrobacterium for 1 to 3 days at 23° C. in the dark. Co-cultured embryos are transferred to selection media and cultured for approximately two weeks to allow embryogenic callus to develop. Embryogenic callus is transferred to culture medium containing 100 mg/L paromomycin and subcultured at about two week intervals. Transformed plant cells are recovered 6 to 8 weeks after initiation of selection.

[0071] For Agrobacterium-mediated transformation of maize callus immature embryos are cultured for approximately 8-21 days after excision to allow callus to develop. Callus is then incubated for about 30 minutes at room temperature with the Agrobacterium suspension, followed by removal of the liquid by aspiration. The callus and Agrobacterium are co-cultured without selection for 3-6 days followed by selection on paromomycin for approximately 6 weeks, with biweekly transfers to fresh media, and paromomycin resistant callus identified as containing the recombinant DNA in an expression cassette.

[0072] For transformation by microprojectile bombardment immature maize embryos are isolated and cultured 3-4 days prior to bombardment. Prior to microprojectile bombardment, a suspension of gold particles is prepared onto which the desired recombinant DNA expression cassettes are precipitated. DNA is introduced into maize cells as described in U.S. Pat. Nos. 5,550,318 and 6,399,861 using the electric discharge particle acceleration gene delivery device. Following microprojectile bombardment, tissue is cultured in the dark at 27 degrees C. Additional transformation methods and materials for making transgenic plants of this invention, for example, various media and recipient target cells, transformation of immature embryos and subsequence regeneration of fertile transgenic plants are disclosed in U.S. Pat. Nos. 6,194,636 and 6,232,526 and U.S. patent application Ser. No. 09/757,089, which are incorporated herein by reference.

[0073] To regenerate transgenic corn plants a callus of transgenic plant cells resulting from transformation is placed on media to initiate shoot development in plantlets which are transferred to potting soil for initial growth in a growth chamber at 26 degrees C. followed by a mist bench before transplanting to 5 inch pots where plants are grown to maturity. The regenerated plants are self fertilized and seed is harvested for use in one or more methods to select seed, seedlings or progeny second generation transgenic plants (R2 plants) or hybrids, e.g. by selecting transgenic plants exhibiting an enhanced trait as compared to a control plant.

[0074] Transgenic corn plant cells are transformed with recombinant DNA from each of the genes identified in Table 2. Progeny transgenic plants and seed of the transformed plant cells are screened for enhanced water use efficiency, enhanced cold tolerance, increased yield, enhanced nitrogen use efficiency, enhanced seed protein and enhanced seed oil as reported in Example 7.

### Example 3

### Soybean Transformation

[0075] This example illustrates plant transformation useful in producing the transgenic soybean plants of this invention and the production and identification of transgenic seed for transgenic soybean having enhanced water use efficiency, enhanced cold tolerance, increased yield, enhanced nitrogen use efficiency, enhanced seed protein and enhanced seed oil.

[0076] For Agrobacterium mediated transformation, soybean seeds are germinated overnight and the meristem explants excised. The meristems and the explants are placed in a wounding vessel. Soybean explants and induced Agrobacterium cells from a strain containing plasmid DNA with the gene of interest cassette and a plant selectable marker cassette are mixed no later than 14 hours from the time of initiation of seed germination and wounded using sonication. Following wounding, explants are placed in co-culture for 2-5 days at which point they are transferred to selection media for 6-8 weeks to allow selection and growth of transgenic shoots. Trait positive shoots are harvested approximately 6-8 weeks and placed into selective rooting media for 2-3 weeks. Shoots producing roots are transferred to the greenhouse and potted in soil. Shoots that remain healthy on selection, but do not produce roots are transferred to non-selective rooting media for an additional two weeks. Roots from any shoots that produce roots off selection are tested for expression of the plant selectable marker before they are transferred to the greenhouse and potted in soil. Additionally, a DNA construct can be transferred into the genome of a soybean cell by particle bombardment and the cell regenerated into a fertile soybean plant as described in U.S. Pat. No. 5,015,580, herein incorporated by reference.

[0077] Transgenic soybean plant cells are transformed with recombinant DNA from each of the genes identified in Table 2. Progeny transgenic plants and seed of the transformed plant cells are screened for enhanced water use efficiency, enhanced cold tolerance, increased yield, enhanced nitrogen use efficiency, enhanced seed protein and enhanced seed oil as reported in Example 7.

### Example 4

### Cotton Transgenic Plants with Enhanced Agronomic Traits

[0078] Cotton transformation is performed as generally described in WO0036911 and in U.S. Pat. No. 5,846,797. Transgenic cotton plants containing each of the recombinant DNA having a sequence of SEQ ID NO: 1 through SEQ ID NO: 358 are obtained by transforming with recombinant DNA from each of the genes identified in Table 2. Progeny transgenic plants are selected from a population of transgenic cotton events under specified growing conditions and are compared with control cotton plants. Control cotton plants are substantially the same cotton genotype but without the recombinant DNA, for example, either a parental cotton plant of the same genotype that was not transformed with the identical recombinant DNA or a negative isoline of the transformed plant. Additionally, a commercial cotton cultivar adapted to the geographical region and cultivation conditions, i.e. cotton variety ST474, cotton variety FM 958, and cotton variety Siokra L-23, are used to compare the relative performance of the transgenic cotton plants containing the recombinant DNA. The specified culture conditions are growing a first set of transgenic and control plants under “wet” conditions, i.e. irrigated in the range of 85 to 100 percent of evapotranspiration to provide leaf water potential of −14 to −18 bars, and growing a second set of transgenic and control plants under “dry” conditions, i.e. irrigated in the range of 40 to 60 percent of evapotranspiration to provide a leaf water potential of −21 to −25 bars. Pest control, such as weed and insect control is applied equally to both wet and dry treatments as needed. Data gathered during the trial includes weather records throughout the growing season including detailed records of rainfall; soil characterization information; any herbicide or insecticide applications; any gross agronomic differences observed such as leaf morphology, branching habit, leaf color, time to flowering, and fruiting pattern; plant height at various points during the trial; stand density; node and fruit number including node above white flower and node above crack boll measurements; and visual wilt scoring. Cotton boll samples are taken and analyzed for lint fraction and fiber quality. The cotton is harvested at the normal harvest timeframe for the trial area. Enhanced water use efficiency is indicated by increased yield, improved relative water content, enhanced leaf water potential, increased biomass, enhanced leaf extension rates, and improved fiber parameters.

[0079] The transgenic cotton plants of this invention are identified from among the transgenic cotton plants by agronomic trait screening as having increased yield and enhanced water use efficiency.

### Example 5

### Canola Transformation

[0080] This example illustrates plant transformation useful in producing the transgenic canola plants of this invention and the production and identification of transgenic seed for transgenic canola having enhanced water use efficiency, enhanced cold tolerance, increased yield, enhanced nitrogen use efficiency, enhanced seed protein and enhanced seed oil.

[0081] Tissues from in vitro grown canola seedlings are prepared and inoculated with overnight-grown Agrobacterium cells containing plasmid DNA with the gene of interest cassette and a plant selectable marker cassette. Following co-cultivation with Agrobacterium, the infected tissues are allowed to grow on selection to promote growth of transgenic shoots, followed by growth of roots from the transgenic shoots. The selected plantlets are then transferred to the greenhouse and potted in soil. Molecular characterization are performed to confirm the presence of the gene of interest, and its expression in transgenic plants and progenies. Progeny transgenic plants are selected from a population of transgenic canola events under specified growing conditions and are compared with control canola plants. Control canola plants are substantially the same canola genotype but without the recombinant DNA, for example, either a parental canola plant of the same genotype that is not transformed with the identical recombinant DNA or a negative isoline of the transformed plant Transgenic canola plant cells are transformed with recombinant DNA from each of the genes identified in Table 2. Transgenic progeny plants and seed of the transformed plant cells are screened for enhanced water use efficiency, enhanced cold tolerance, increased yield, enhanced nitrogen use efficiency, enhanced seed protein and enhanced seed oil as reported in Example 7.

### Example 6

### Homolog Identification

[0082] This example illustrates the identification of homologs of proteins encoded by the DNA identified in Table 2 which is used to provide transgenic seed and plants having enhanced agronomic traits. From the sequence of the homologs, homologous DNA sequence can be identified for preparing additional transgenic seeds and plants of this invention with enhanced agronomic traits.

[0083] An “All Protein Database” was constructed of known protein sequences using a proprietary sequence database and the National Center for Biotechnology Information (NCBI) non-redundant amino acid database (nr.aa). For each organism from which a polynucleotide sequence provided herein was obtained, an “Organism Protein Database” was constructed of known protein sequences of the organism; it is a subset of the All Protein Database based on the NCBI taxonomy ID for the organism.

[0084] The All Protein Database was queried using amino acid sequences provided herein as SEQ ID NO: 359 through SEQ ID NO: 716 using NCBI “blastp” program with E-value cutoff of 1e-8. Up to 1000 top hits were kept, and separated by organism names. For each organism other than that of the query sequence, a list was kept for hits from the query organism itself with a more significant E-value than the best hit of the organism. The list contains likely duplicated genes of the polynucleotides provided herein, and is referred to as the Core List. Another list was kept for all the hits from each organism, sorted by E-value, and referred to as the Hit List.

[0085] The Organism Protein Database was queried using polypeptide sequences provided herein as SEQ ID NO: 359 through SEQ ID NO: 716 using NCBI “blastp” program with E-value cutoff of 1e-4. Up to 1000 top hits were kept. A BLAST searchable database was constructed based on these hits, and is referred to as “Subdb”. SubDB was queried with each sequence in the Hit List using NCBI “blastp” program with E-value cutoff of 1e-8. The hit with the best E-value was compared with the Core List from the corresponding organism. The hit is deemed a likely ortholog if it belongs to the Core List, otherwise it is deemed not a likely ortholog and there is no further search of sequences in the Hit List for the same organism. Homologs from a large number of distinct organisms were identified and are reported by amino acid sequences of SEQ ID NO: 717 through SEQ ID NO: 30327. These relationship of proteins of SEQ ID NO: 358 through 716 and homologs of SEQ ID NO: 717 through 30327 is identified in Table 9. The source organism for each homolog is found in the Sequence Listing.

### Example 7

### Selection of Transgenic Plants with Enhanced Agronomic Trait(s)

[0086] This example illustrates identification of plant cells of the invention by screening derived plants and seeds for enhanced trait. Transgenic corn seed and plants with recombinant DNA identified in Table 2 are prepared by plant cells transformed with DNA that is stably integrated into the genome of the corn cell. Transgenic corn plant cells are transformed with recombinant DNA from each of the genes identified in Table 1. Progeny transgenic plants and seed of the transformed plant cells are screened for enhanced water use efficiency, enhanced cold tolerance, increased yield, enhanced nitrogen use efficiency, enhanced seed protein and enhanced seed oil as compared to control plants.

### A. Selection for Enhanced Nitrogen Use Efficiency

[0087] The physiological efficacy of transgenic corn plants (tested as hybrids) can be tested for nitrogen use efficiency (NUE) traits in a high-throughput nitrogen (N) selection method. The collected data are compared to the measurements from wildtype controls using a statistical model to determine if the changes are due to the transgene. Raw data were analyzed by SAS software. Results shown herein are the comparison of transgenic plants relative to the wildtype controls.

### (1) Media Preparation for Planting a NUE Protocol

[0088] Planting materials used: Metro Mix 200 (vendor: Hummert) Cat. #10-0325, Scotts Micro Max Nutrients (vendor: Hummert) Cat. #07-6330, OS 4⅓″×3⅞″ pots (vendor: Hummert) Cat. #16-1415, OS trays (vendor: Hummert) Cat. #16-1515, Hoagland's macronutrients solution, Plastic 5″ stakes (vendor: Hummert) yellow Cat. #49-1569, white Cat. #49-1505, Labels with numbers indicating material contained in pots. Fill 500 pots to rim with Metro Mix 200 to a weight of ˜140 g/pot. Pots are filled uniformly by using a balancer. Add 0.4 g of Micro Max nutrients to each pot. Stir ingredients with spatula to a depth of 3 inches while preventing material loss.

### (2) Planting a NUE Selection in the Greenhouse

[0089] (a) Seed Germination—Each pot is lightly altered twice using reverse osmosis purified water. The first watering is scheduled to occur just before planting; and the second watering, after the seed has been planted in the pot. Ten Seeds of each entry (1 seed per pot) are planted to select eight healthy uniform seedlings. Additional wild type controls are planted for use as border rows. Alternatively, 15 seeds of each entry (1 seed per pot) are planted to select 12 healthy uniform seedlings (this larger number of plantings is used for the second, or confirmation, planting). Place pots on each of the 12 shelves in the Conviron growth chamber for seven days. This is done to allow more uniform germination and early seedling growth. The following growth chamber settings are 25° C./day and 22° C./night, 14 hours light and ten hours dark, humidity ˜80%, and light intensity ˜350 mmol/m²/s (at pot level). Watering is done via capillary matting similar to greenhouse benches with duration of ten minutes three times a day.

[0090] (b) Seedling transfer—After seven days, the best eight or 12 seedlings for the first or confirmation pass runs, respectively, are chosen and transferred to greenhouse benches. The pots are spaced eight inches apart (center to center) and are positioned on the benches using the spacing patterns printed on the capillary matting. The Vattex matting creates a 384-position grid, randomizing all range, row combinations. Additional pots of controls are placed along the outside of the experimental block to reduce border effects.

[0091] Plants are allowed to grow for 28 days under the low N run or for 23 days under the high N run. The macronutrients are dispensed in the form of a micronutrient solution (see composition below) containing precise amounts of N added (2 mM NH₄NO₃ for limiting N selection and 20 mM NH₄NO₃ for high N selection runs). Each pot is manually dispensed 100 ml of nutrient solution three times a week on alternate days starting at eight and ten days after planting for high N and low N runs, respectively. On the day of nutrient application, two 20 min waterings at 05:00 and 13:00 are skipped. The vattex matting should be changed every third run to avoid N accumulation and buildup of root matter. Table 10 shows the amount of nutrients in the nutrient solution for either the low or high nitrogen selection.

TABLE 10

| | 2 mM NH₄NO₃ | 20 mM NH₄NO₃ (high |
|---|---|---|
| | (Low Nitrogen Growth | Nitrogen Growth |
| | Condition, Low N) | Condition, High N) |
| Nutrient Stock | mL/L | mL/L |
| 1M NH₄NO₃ | 2 | 20 |
| 1M KH₂PO₄ | 0.5 | 0.5 |
| 1M MgSO₄•7H₂O | 2 | 2 |
| 1M CaCl₂ | 2.5 | 2.5 |
| 1M K₂SO₄ | 1 | 1 |

Note:
Adjust pH to 5.6 with HCl or KOH

[0092] (c) Harvest Measurements and Data Collection—After 28 days of plant growth for low N runs and 23 days of plant growth for high N runs, the following measurements are taken (phenocodes in parentheses): total shoot fresh mass (g) (SFM) measured by Sartorius electronic balance, V6 leaf chlorophyll measured by Minolta SPAD meter (relative units) (LC), V6 leaf area (cm²) (LA) measured by a Li-Cor leaf area meter, V6 leaf fresh mass (g) (LFM) measured by Sartorius electronic balance, and V6 leaf dry mass (g) (LDM) measured by Sartorius electronic balance. Raw data were analyzed by SAS software. Results shown are the comparison of transgenic plants relative to the wildtype controls.

[0093] To take a leaf reading, samples were excised from the V6 leaf. Since chlorophyll meter readings of corn leaves are affected by the part of the leaf and the position of the leaf on the plant that is sampled, SPAD meter readings were done on leaf six of the plants. Three measurements per leaf were taken, of which the first reading was taken from a point one-half the distance between the leaf tip and the collar and halfway from the leaf margin to the midrib while two were taken toward the leaf tip. The measurements were restricted in the area from ½ to ¾ of the total length of the leaf (from the base) with approximately equal spacing between them. The average of the three measurements was taken from the SPAD machine.

[0094] Leaf fresh mass is recorded for an excised V6 leaf, the leaf is placed into a paper bag. The paper bags containing the leaves are then placed into a forced air oven at 80° C. for 3 days. After 3 days, the paper bags are removed from the oven and the leaf dry mass measurements are taken.

[0095] From the collected data, two derived measurements are made: (1) Leaf chlorophyll area (LCA), which is a product of V6 relative chlorophyll content and its leaf area (relative units). Leaf chlorophyll area=leaf chlorophyll X leaf area. This parameter gives an indication of the spread of chlorophyll over the entire leaf area; (2) specific leaf area (LSA) is calculated as the ratio of V6 leaf area to its dry mass (cm²/g dry mass), a parameter also recognized as a measure of NUE.

### Nitrogen Use Field Efficacy Assay

[0096] Level I. Transgenic plants provided by the present invention are planted in field without any nitrogen source being applied. Transgenic plants and control plants are grouped by genotype and construct with controls arranged randomly within genotype blocks. Each type of transgenic plants are tested by 3 replications and across 5 locations. Nitrogen levels in the fields are analyzed in early April pre-planting by collecting 30 sample soil cores from 0-24″ and 24 to 48″ soil layer. Soil samples are analyzed for nitrate-nitrogen, phosphorus(P), Potassium(K), organic matter and pH to provide baseline values. P, K and micronutrients are applied based upon soil test recommendations.
Level II. Transgenic plants provided by the present invention are planted in field with three levels of nitrogen (N) fertilizer being applied, i.e. low level (0 N), medium level (80 lb/ac) and high level (180 lb/ac). Liquid 28% or 32% UAN (Urea, Ammonium Nitrogen) are used as the N source and apply by broadcast boom and incorporate with a field cultivator with rear rolling basket in the same direction as intended crop rows. Although there is no N applied to the 0 N treatment the soil should still be disturbed in the same fashion as the treated area. Transgenic plants and control plants are grouped by genotype and construct with controls arranged randomly within genotype blocks. Each type of transgenic plants is tested by 3 replications and across 4 locations. Nitrogen levels in the fields are analyzed in early April pre-planting by collecting 30 sample soil cores from 0-24″ and 24 to 48″ soil layer. Soil samples are analyzed for nitrate-nitrogen, phosphorus(P), Potassium(K), organic matter and pH to provide baseline values. P, K and micronutrients are applied based upon soil test recommendations.

### B. Selection for Increased Yield

[0097] Many transgenic plants of this invention exhibit improved yield as compared to a control plant. Improved yield can result from enhanced seed sink potential, i.e. the number and size of endosperm cells or kernels and/or enhanced sink strength, i.e. the rate of starch biosynthesis. Sink potential can be established very early during kernel development, as endosperm cell number and size are determined within the first few days after pollination.

[0098] Much of the increase in corn yield of the past several decades has resulted from an increase in planting density. During that period, corn yield has been increasing at a rate of 2.1 bushels/acre/year, but the planting density has increased at a rate of 250 plants/acre/year. A characteristic of modern hybrid corn is the ability of these varieties to be planted at high density. Many studies have shown that a higher than current planting density should result in more biomass production, but current germplasm does not perform. well at these higher densities. One approach to increasing yield is to increase harvest index (HI), the proportion of biomass that is allocated to the kernel compared to total biomass, in high density plantings.

[0099] Effective yield selection of enhanced yielding transgenic corn events uses hybrid progeny of the transgenic event over multiple locations with plants grown under optimal production management practices, and maximum pest control. A useful target for improved yield is a 5% to 10% increase in yield as compared to yield produced by plants grown from seed for a control plant. Selection methods may be applied in multiple and diverse geographic locations, for example up to 16 or more locations, over one or more plating seasons, for example at least two planting seasons to statistically distinguish yield improvement from natural environmental effects. It is to plant multiple transgenic plants, positive and negative control plants, and pollinator plants in standard plots, for example 2 row plots, 20 feet long by 5 feet wide with 30 inches distance between rows and a 3 foot alley between ranges. Transgenic events can be grouped by recombinant DNA constructs with groups randomly placed in the field. A pollinator plot of a high quality corn line is planted for every two plots to allow open pollination when using male sterile transgenic events. A useful planting density is about 30,000 plants/acre. High planting density is greater than 30,000 plants/acre, preferably about 40,000 plants/acre, more preferably about 42,000 plants/acre, most preferably about 45,000 plants/acre. Surrogate indicators for yield improvement include source capacity (biomass), source output (sucrose and photosynthesis), sink components (kernel size, ear size, starch in the seed), development (light response, height, density tolerance), maturity, early flowering trait and physiological responses to high density planting, for example at 45,000 plants per acre, for example as illustrated in Table 11 and 12.

TABLE 11

| Timing | Evaluation | Description | comments |
|---|---|---|---|
| V2-3 | Early stand | Can be taken any time after | |
| | | germination and prior to | |
| | | removal of any plants. | |
| Pollen shed | GDU to 50% shed | GDU to 50% plants shedding | |
| | | 50% tassel. | |
| Silking | GDU to 50% silk | GDU to 50% plants showing | |
| | | silks. | |
| Maturity | Plant height | Height from soil surface to | 10 plants per plot-Yield |
| | | flag leaf attachment (inches). | team assistance |
| Maturity | Ear height | Height from soil surface to | 10 plants per plot-Yield |
| | | primary ear attachment node. | team assistance |
| Maturity | Leaves above ear | visual scores: erect, size, | |
| | | rolling | |
| Maturity | Tassel size | Visual scores +/− vs. WT | |
| Pre-Harvest | Final Stand | Final stand count prior to | |
| | | harvest, exclude tillers | |
| Pre-Harvest | Stalk lodging | No. of stalks broken below | |
| | | the primary ear attachment. | |
| | | Exclude leaning tillers | |
| Pre-Harvest | Root lodging | No. of stalks leaning >45° | |
| | | angle from perpendicular. | |
| Pre-Harvest | Stay green | After physiological maturity | |
| | | and when differences among | |
| | | genotypes are evident: Scale | |
| | | 1 (90-100% tissue green)-9 | |
| | | (0-19% tissue green). | |
| Harvest | Grain Yield | Grain yield/plot (Shell weight) | |

TABLE 12

| Timing | Evaluation | Description |
|---|---|---|
| V8-V12 | Chlorophyll | |
| V12-VT | Ear leaf area | |
| V15-15DAP | Chl fluorescence | |
| V15-15DAP | CER | |
| 15-25 DAP | Carbohydrates | sucrose, starch |
| Pre-Harvest | 1st internode diameter | |
| Pre-Harvest | Base 3 internode diameter | |
| Pre-Harvest | Ear internode diameter | |
| Maturity | Ear traits | diameter, length, kernel |
| | | number, kernel weight |

[0100] Electron transport rates (ETR) and CO2 exchange rates (CER): ETR and CER are measured with Li6400LCF (Licor, Lincoln, Nebr.) around V9-R1 stages. Leaf chlorophyll fluorescence is a quick way to monitor the source activity and is reported to be highly correlated with CO₂ assimilation under varies conditions (Photosyn Research, 37: 89-102). The youngest fully expanded leaf or 2 leaves above the ear leaf is measured with actinic light 1500 (with 10% blue light) micromol m⁻² s⁻¹, CO2 levels 450 ppm. Ten plants are measured in each event. There are 2 readings for each plant.

[0101] A hand-held chlorophyll meter SPAD-502 (Minolta—Japan) is used to measure the total chlorophyll level on live transgenic plants and the wild type counterparts a. Three trifoliates from each plant are analyzed, and each trifoliate were analyzed three times. Then 9 data points are averaged to obtain the chlorophyll level. The number of analyzed plants of each genotype ranges from 5 to 8.

[0102] When selecting for yield improvement a useful statistical measurement approach comprises three components, i.e. modeling spatial autocorrelation of the test field separately for each location, adjusting traits of recombinant DNA events for spatial dependence for each location, and conducting an across location analysis. The first step in modeling spatial autocorrelation is estimating the covariance parameters of the semivariogram. A spherical covariance model is assumed to model the spatial autocorrelation. Because of the size and nature of the trial, it is likely that the spatial autocorrelation may change. Therefore, anisotropy is also assumed along with spherical covariance structure. The following set of equations describes the statistical form of the anisotropic spherical covariance model.

$$C ( h ; θ ) = vI ( h = 0 ) + {σ}^{2} ( 1 - \frac{3}{2} h + \frac{1}{2} {h}^{3} ) I ( h < 1 ) ,$$

[0103] where I(·) is the indicator function, h={square root over (\dot{x}²+\dot{y}\dot{y²}, and

\dot{x}=[cos(ρπ/180)(x₁−x₂)−sin(ρπ/180)(y₁−y₂)]/ωₓ

\dot{y}=[sin(ρπ/180)(x₁−x₂)−cos(ρπ/180)(y₁−y₂)]/ω_{y}

where s₁=(x₁, y₁) are the spatial coordinates of one location and s₂=(x₂, y₂) are the spatial coordinates of the second location. There are 5 covariance parameters, θ=(ν,ρ²,ρ, ωₙ,ωⱼ), where ν is the nugget effect, ρ² is the partial sill, ρ is a rotation in degrees clockwise from north, ωₙ is a scaling parameter for the minor axis and ωⱼ is a scaling parameter for the major axis of an anisotropical ellipse of equal covariance. The five covariance parameters that defines the spatial trend will then be estimated by using data from heavily replicated pollinator plots via restricted maximum likelihood approach. In a multi-location field trial, spatial trend are modeled separately for each location.

[0104] After obtaining the variance parameters of the model, a variance-covariance structure is generated for the data set to be analyzed. This variance-covariance structure contains spatial information required to adjust yield data for spatial dependence. In this case, a nested model that best represents the treatment and experimental design of the study is used along with the variance-covariance structure to adjust the yield data. During this process the nursery or the seed batch effects can also be modeled and estimated to adjust the yields for any yield parity caused by seed batch differences. After spatially adjusted data from different locations are generated, all adjusted data is combined and analyzed assuming locations as replications. In this analysis, intra and inter-location variances are combined to estimate the standard error of yield from transgenic plants and control plants. Relative mean comparisons are used to indicate statistically significant yield improvements.

### C. Selection for Enhanced Water Use Efficiency (WUE)

[0105] Described in this example is a high-throughput method for greenhouse selection of transgenic corn plants to wild type corn plants (tested as inbreds or hybrids) for water use efficiency. This selection process imposes 3 drought/re-water cycles on plants over a total period of 15 days after an initial stress free growth period of 11 days. Each cycle consists of 5 days, with no water being applied for the first four days and a water quenching on the 5th day of the cycle. The primary phenotypes analyzed by the selection method are the changes in plant growth rate as determined by height and biomass during a vegetative drought treatment. The hydration status of the shoot tissues following the drought is also measured. The plant height are measured at three time points. The first is taken just prior to the onset drought when the plant is 11 days old, which is the shoot initial height (SIH). The plant height is also measured halfway throughout the drought/re-water regimen, on day 18 after planting, to give rise to the shoot mid-drought height (SMH). Upon the completion of the final drought cycle on day 26 after planting, the shoot portion of the plant is harvested and measured for a final height, which is the shoot wilt height (SWH) and also measured for shoot wilted biomass (SWM). The shoot is placed in water at 40 degree Celsius in the dark. Three days later, the shoot is weighted to give rise to the shoot turgid weight (STM). After drying in an oven for four days, the shoots are weighted for shoot dry biomass (SDM). The shoot average height (SAH) is the mean plant height across the 3 height measurements. The procedure described above may be adjusted for +/−˜one day for each step given the situation.

[0106] To correct for slight differences between plants, a size corrected growth value is derived from SIB and SWH. This is the Relative Growth Rate (RGR). Relative Growth Rate (RGR) is calculated for each shoot using the formula [RGR %=(SWH−SIH)/((SWH+SIH)/2)*100]. Relative water content (RWC) is a measurement of how much (%) of the plant was water at harvest. Water Content (RWC) is calculated for each shoot using the formula [RWC %=(SWM−SDM)/(STM−SDM)*100]. Fully watered corn plants of this age run around 98% RWC.

### D. Selection for Growth Under Cold Stress

[0107] (1) Cold germination assay—Three sets of seeds are used for the assay. The first set consists of positive transgenic events (F1 hybrid) where the genes of the present invention are expressed in the seed. The second seed set is nontransgenic, wild-type negative control made from the same genotype as the transgenic events. The third set consisted of two cold tolerant and one cold sensitive commercial check lines of corn. All seeds are treated with a fungicide “Captan” (MAESTRO® 80DF Fungicide, Arvesta Corporation, San Francisco, Calif., USA). 0.43 mL Captan is applied per 45 g of corn seeds by mixing it well and drying the fungicide prior to the experiment.

[0108] Corn kernels are placed embryo side down on blotter paper within an individual cell (8.9×8.9 cm) of a germination tray (54×36 cm). Ten seeds from an event are placed into one cell of the germination tray. Each tray can hold 21 transgenic events and 3 replicates of wildtype (LH244SDms+LH59), which is randomized in a complete block design. For every event there are five replications (five trays). The trays are placed at 9.7 C for 24 days (no light) in a Convrion growth chamber (Conviron Model PGV36, Controlled Environments, Winnipeg, Canada). Two hundred and fifty millilters of deionized water are added to each germination tray. Germination counts are taken 10th, 11th, 12th, 13th, 14th, 17th, 19th, 21st, and 24th day after start date of the experiment. Seeds are considered germinated if the emerged radical size is 1 cm. From the germination counts germination index is calculated.

[0109] The germination index is calculated as per:

Germination index=(Σ([T+1−nᵢ]*[Pᵢ−Pᵢ₋₁]))/T

[0110] Where T is the total number of days for which the germination assay is performed. The number of days after planting is defined by n. “i” indicated the number of times the germination had been counted, including the current day. P is the percentage of seeds germinated during any given rating. Statistical differences are calculated between transgenic events and wild type control. After statistical analysis, the events that show a statistical significance at the p level of less than 0.1 relative to wild-type controls will advance to a secondary cold selection. The secondary cold screen is conducted in the same manner of the primary selection only increasing the number of repetitions to ten. Statistical analysis of the data from the secondary selection is conducted to identify the events that show a statistical significance at the p level of less than 0.05 relative to wild-type controls.

[0111] (2) Cold Shock assay—The experimental set-up for the cold shock assay is the same as described in the above cold germination assay except seeds were grown in potted media for the cold shock assay.

[0112] The desired numbers of 2.5″ square plastic pots are placed on flats (n=32, 4×8). Pots were filled with Metro Mix 200 soil-less media containing 19:6:12 fertilizer (6 lbs/cubic yard) (Metro Mix, Pots and Flat are obtained from Hummert International, Earth City, Mo.). After planting seeds, pots are placed in a growth chamber set at 23° C., relative humidity of 65% with 12 hour day and night photoperiod (300 uE/m2-min). Planted seeds are watered for 20 minute every other day by sub-irrigation and flats were rotated every third day in a growth chamber for growing corn seedlings.

[0113] On the 10^{th} day after planting the transgenic positive and wild-type negative (WT) plants are positioned in flats in an alternating pattern. Chlorophyll fluorescence of plants is measured on the 10^{th} day during the dark period of growth by using a PAM-2000 portable fluorometer as per the manufacturer's instructions (Walz, Germany). After chlorophyll measurements, leaf samples from each event are collected for confirming the expression of genes of the present invention. For expression analysis six V1 leaf tips from each selection are randomly harvested. The flats are moved to a growth chamber set at 5° C. All other conditions such as humidity, day/night cycle and light intensity are held constant in the growth chamber. The flats are sub-irrigated every day after transfer to the cold temperature. On the 4^{th} day chlorophyll fluorescence is measured. Plants are transferred to normal growth conditions after six days of cold shock treatment and allowed to recover for the next three days. During this recovery period the length of the V3 leaf is measured on the 1^{st} and 3^{rd} days. After two days of recovery V2 leaf damage is determined visually by estimating percent of green V2 leaf.

[0114] Statistical differences in V3 leaf growth, V2 leaf necrosis and fluorescence during pre-shock and cold shock can be used for estimation of cold shock damage on corn plants. (3) Early seedling growth assay—Three sets of seeds are used for the experiment. The first set consists of positive transgenic events (F1 hybrid) where the genes of the present invention are expressed in the seed. The second seed set is nontransgenic, wild-type negative control made from the same genotype as the transgenic events. The third seed set consists of two cold tolerant and two cold sensitive commercial check lines of corn. All seeds are treated with a fungicide “Captan”, (3a,4,7,a-tetrahydro-2-[(trichloromethly)thio]-1H-isoindole-1,3(2H)-dione, Drex Chemical Co. Memphis, Tenn.). Captan (0.43 mL) was applied per 45 g of corn seeds by mixing it well and drying the fungicide prior to the experiment.

[0115] Seeds are grown in germination paper for the early seedling growth assay. Three 12″×18″ pieces of germination paper (Anchor Paper #SD7606) are used for each entry in the test (three repetitions per transgenic event). The papers are wetted in a solution of 0.5% KNO₃ and 0.1% Thyram.

[0116] For each paper fifteen seeds are placed on the line evenly spaced down the length of the paper. The fifteen seeds are positioned on the paper such that the radical would grow downward, for example longer distance to the paper's edge. The wet paper is rolled up starting from one of the short ends. The paper is rolled evenly and tight enough to hold the seeds in place. The roll is secured into place with two large paper clips, one at the top and one at the bottom. The rolls are incubated in a growth chamber at 23° C. for three days in a randomized complete block design within an appropriate container. The chamber is set for 65% humidity with no light cycle. For the cold stress treatment the rolls are then incubated in a growth chamber at 12° C. for twelve days. The chamber is set for 65% humidity with no light cycle.

[0117] After the cold treatment the germination papers are unrolled and the seeds that did not germinate are discarded. The lengths of the radical and coleoptile for each seed are measured through an automated imaging program that automatically collects and processes the images. The imaging program automatically measures the shoot length, root length, and whole seedling length of every individual seedling and then calculates the average of each roll.

[0118] After statistical analysis, the events that show a statistical significance at the p level of less than 0.1 relative to wild-type controls will advance to a secondary cold selection. The secondary cold selection is conducted in the same manner of the primary selection only increasing the number of repetitions to five. Statistical analysis of the data from the secondary selection is conducted to identify the events that show a statistical significance at the p level of less than 0.05 relative to wild-type controls.

### 4. Cold Field Efficacy Trial

[0119] This example sets forth a cold field efficacy trial to identify gene constructs that confer enhanced cold vigor at germination and early seedling growth under early spring planting field conditions in conventional-till and simulated no-till environments. Seeds are planted into the ground around two weeks before local farmers are beginning to plant corn so that a significant cold stress is exerted onto the crop, named as cold treatment. Seeds also are planted under local optimal planting conditions such that the crop has little or no exposure to cold condition, named as normal treatment. The cold field efficacy trials are carried out in five locations, including Glyndon Minn., Mason Mich., Monmouth Ill., Dayton Iowa, Mystic Conn. At each location, seeds are planted under both cold and normal conditions with 3 repetitions per treatment, 20 kernels per row and single row per plot. Seeds are planted 1.5 to 2 inch deep into soil to avoid muddy conditions. Two temperature monitors are set up at each location to monitor both air and soil temperature daily.

[0120] Seed emergence is defined as the point when the growing shoot breaks the soil surface. The number of emerged seedling in each plot is counted everyday from the day the earliest plot begins to emerge until no significant changes in emergence occur. In addition, for each planting date, the latest date when emergence is 0 in all plots is also recorded. Seedling vigor is also rated at V3-V4 stage before the average of corn plant height reaches 10 inches, with 1=excellent early growth, 5=Average growth and 9=poor growth. Days to 50% emergence, maximum percent emergence and seedling vigor are calculated using SAS software for the data within each location or across all locations.

E. Screens for Transgenic Plant Seeds with Increased Protein and/or Oil Levels

[0121] This example sets forth a high-throughput selection for identifying plant seeds with improvement in seed composition using the Infratec 1200 series Grain Analyzer, which is a near-infrared transmittance spectrometer used to determine the composition of a bulk seed sample. Near infrared analysis is a non-destructive, high-throughput method that can analyze multiple traits in a single sample scan. An NIR calibration for the analytes of interest is used to predict the values of an unknown sample. The NIR spectrum is obtained for the sample and compared to the calibration using a complex chemometric software package that provides a predicted values as well as information on how well the sample fits in the calibration.

[0122] Infratec Model 1221, 1225, or 1227 with transport module by Foss North America is used with cuvette, item #1000-4033, Foss North America or for small samples with small cell cuvette, Foss standard cuvette modified by Leon Girard Co. Corn and soy check samples of varying composition maintained in check cell cuvettes are supplied by Leon Girard Co. NIT collection software is provided by Maximum Consulting Inc. Software. Calculations are performed automatically by the software. Seed samples are received in packets or containers with barcode labels from the customer. The seed is poured into the cuvettes and analyzed as received.

TABLE 13

| | |
|---|---|
| Typical sample(s): | Whole grain corn and soybean seeds |
| Analytical time to run method: | Less than 0.75 min per sample |
| Total elapsed time per run: | 1.5 minute per sample |
| Typical and minimum | Corn typical: 50cc; minimum 30cc |
| sample size: | Soybean typical: 50cc; minimum 5cc |
| Typical analytical range: | Determined in part by the specific |
| | calibration. |
| | Corn-moisture 5-15%, oil 5-20%, |
| | protein 5-30%, starch 50-75%, and |
| | density 1.0-1.3%. |
| | Soybean-moisture 5-15%, oil 15-25%, |
| | and protein 35-50%. |

### Example 8

### Consensus Sequence

[0123] This example illustrates the identification of consensus amino acid sequence for the proteins and homologs encoded by DNA that is used to prepare the transgenic seed and plants of this invention having enhanced agronomic traits.

[0124] ClustalW program was selected for multiple sequence alignments of the amino acid sequence of SEQ ID NO: 561 and its 10 homologs. Three major factors affecting the sequence alignments dramatically are (1) protein weight matrices; (2) gap open penalty; (3) gap extension penalty. Protein weight matrices available for ClustalW program include Blosum, Pam and Gonnet series. Those parameters with gap open penalty and gap extension penalty were extensively tested. On the basis of the test results, Blosum weight matrix, gap open penalty of 10 and gap extension penalty of 1 were chosen for multiple sequence alignment. FIG. 1 shows the sequences of SEQ ID NO: 561, its homologs and the consensus sequence (SEQ ID NO: 30328) at the end. The symbols for consensus sequence are (1) uppercase letters for 100% identity in all positions of multiple sequence alignment output; (2) lowercase letters for >=70% identity; symbol; (3) “X” indicated <70% identity; (4) dashes “-” meaning that gaps were in >=70% sequences.

[0125] The consensus amino acid sequence can be used to identify DNA corresponding to the full scope of this invention that is useful in providing transgenic plants, for example corn and soybean plants with enhanced agronomic traits, for example improved nitrogen use efficiency, improved yield, improved water use efficiency and/or improved growth under cold stress, due to the expression in the plants of DNA encoding a protein with amino acid sequence identical to the consensus amino acid sequence.

### Example 9

### Identification of Amino Acid Domain by Pfam Analysis

[0126] This example illustrates the identification of domain and domain module by Pfam analysis.

[0127] The amino acid sequence of the expressed proteins that were shown to be associated with an enhanced trait were analyzed for Pfam protein family against the current Pfam collection of multiple sequence alignments and hidden Markov models using the HMMER software in the appended computer listing. The Pfam domain modules and individual protein domain for the proteins of SEQ ID NO: 359 through 716 are shown in Table 14 and Table 15 respectively. The Hidden Markov model databases for the identified protein families are also in the appended computer listing allowing identification of other homologous proteins and their cognate encoding DNA to enable the full breadth of the invention for a person of ordinary skill in the art. Certain proteins are identified by a single Pfam domain and others by multiple Pfam domains. For instance, t For instance, the protein with amino acids of SEQ ID NO: 417 is characterized by two Pfam domains, i.e. HD and RelA_Spot.

[0128] In Table 15 “score” is the gathering score for the Hidden Markov Model of the domain which exceeds the gathering cutoff reported in Table 16.

TABLE 14

| PEP | | | |
|---|---|---|---|
| SEQ ID | | | |
| NO | Gene ID | Pfam domain module | domain coordinates |
| 591 | PHE0006505_7871.pep | Thioredoxin | 69-174 |
| 541 | PHE0006264_7285.pep | DAGAT | 48-349 |
| 359 | PHE0001295_7469.pep | DNA_photolyase::FAD_binding_7 | 18-190::223-501 |
| 665 | PHE0006760_8529.pep | vATP-synt_E | 16-225 |
| 639 | PHE0006684_8413.pep | Ribosomal_L10 | 19-123 |
| 645 | PHE0006715_8477.pep | AMPKBI | 197-287 |
| 626 | PHE0006600_8249.pep | Iso_dh | 6-355 |
| 484 | PHE0006071_7068.pep | PPR::PPR::PPR::PPR::PPR | 30-63::64-98::99- |
| | | | 132::138-172::173-207 |
| 417 | PHE0004830_5828.pep | HD::RelA_SpoT | 233-337::427-537 |
| 576 | PHE0006426_8056.pep | AA_permease | 2-454 |
| 571 | PHE0006381_7655.pep | RNase_PH | 42-186 |
| 570 | PHE0006380_8719.pep | RNase_PH::RNase_PH_C | 1-126::129-201 |
| 713 | PHE0006977_9163.pep | Ribul_P_3_epim | 7-207 |
| 466 | PHE0006021_7077.pep | Bet_v_I | 1-155 |
| 596 | PHE0006516_7887.pep | CorA | 90-474 |
| 632 | PHE0006620_8462.pep | Epimerase | 13-259 |
| 631 | PHE0006617_8463.pep | Cupin_1 | 65-215 |
| 585 | PHE0006468_7903.pep | F-box::FBA_1 | 2-49::209-387 |
| 424 | PHE0004887_5939.pep | DUF516 | 49-310 |
| 478 | PHE0006059_7042.pep | DnaJ::DnaJ_C | 4-67::222-344 |
| 671 | PHE0006771_8551.pep | FAE1_CUT1_RppA::ACP_syn_III_C | 52-341::356-439 |
| 606 | PHE0006564_8298.pep | GATase_2::Asn_synthase | 2-161::209-450 |
| 695 | PHE0006934_9145.pep | DNA_pol_E_B | 178-389 |
| 391 | PHE0004670_6044.pep | GSHPx | 9-117 |
| 647 | PHE0006727_8435.pep | ETC_C1_NDUFA4 | 54-156 |
| 441 | PHE0004918_5975.pep | DUF1365 | 44-255 |
| 704 | PHE0006949_9179.pep | Aldedh | 19-478 |
| 409 | PHE0004808_5794.pep | Peptidase_C1 | 8-205 |
| 582 | PHE0006449_8165.pep | Biotin_lipoyl::E3_binding::2- | 92-165::229-265::281- |
| | | oxoacid_dh | 512 |
| 538 | PHE0006234_7281.pep | Mg_chelatase::VWA | 85-295::559-754 |
| 383 | PHE0004398_5136.pep | Pkinase | 7-269 |
| 687 | PHE0006919_9008.pep | Peptidase_M16::Peptidase_M16_ C | 80-226::231-417 |
| 379 | PHE0004021_4654.pep | GATase_2::Asn_synthase | 2-173::227-460 |
| 387 | PHE0004503_5244.pep | MtN3_slv::MtN3_slv | 12-99::134-220 |
| 648 | PHE0006727_8595.pep | ETC_C1_NDUFA4 | 54-156 |
| 601 | PHE0006521_7840.pep | S6PP | 2-247 |
| 569 | PHE0006380_7658.pep | RNase_PH::RNase_PH_C | 1-126::129-201 |
| 525 | PHE0006209_7991.pep | HMGL-like:LeuA_dimer | 28-305::398-542 |
| 556 | PHE0006342_8182.pep | Hydrolase | 12-200 |
| 550 | PHE0006309_8148.pep | Glyoxalase | 2-123 |
| 515 | PHE0006178_7139.pep | elF-5a | 82-149 |
| 453 | PHE0004989_8115.pep | DUF21::CBS | 14-191::210-325 |
| 443 | PHE0004928_5986.pep | Rotamase | 11-119 |
| 681 | PHE0006847_8860.pep | DHBP_synthase::GTP_cyclohydro | 8-203::208-366 |
| | | 2 | |
| 510 | PHE0006161_7221.pep | PFK::PFK | 195-506::585-877 |
| 468 | PHE0006043_7080.pep | Glyco_transf_8 | 83-345 |
| 710 | PHE0006963_9131.pep | Pyr_redox 2::Fer2_BFD::NIR_SIR_fern::NIR:SIR | 5-287::422-474::556- |
| | | | 623::631-777 |
| 565 | PHE0006377_7592.pep | RNase_PH::RNase_PH_C | 48-244::322-384 |
| 535 | PHE0006232_7454.pep | B_lectin::S locus_glycop::PAN_2::Pkinase_Tyr | 74-187::201-327::344- |
| | | | 411::552-824 |
| 494 | PHE0006088_7063.pep | CoA_binding::Ligase_CoA | 634-743::784-929 |
| 438 | PHE0004909_5966.pep | Pkinase | 157-428 |
| 619 | PHE0006596_8236.pep | CTP_transf_2 | 19-159 |
| 536 | PHE0006232_8756.pep | B lectin::S_locus_glycop::PAN_2::Pkinase_Tyr | 74-187::201-327::344- |
| | | | 411::552-824 |
| 407 | PHE0004806_5792.pep | OTU | 156-268 |
| 502 | PHE0006093_7327.pep | PTS_2-RNA | 48-239 |
| 411 | PHE0004810_5796.pep | Pkinase::efhand::efhand::efhand::efhand | 77-358::405-433::441- |
| | | | 469::477-505::508-536 |
| 586 | PHE0006477_7809.pep | PsbR | 42-140 |
| 507 | PHE0006160_7286.pep | PFK | 3-309 |
| 362 | PHE0002132_8653.pep | Pkinase | 9-285 |
| 505 | PHE0006154_7204.pep | PfkB | 7-299 |
| 700 | PHE0006943_9124.pep | Aa_trans | 29-428 |
| 479 | PHE0006061_7051.pep | Metallophos | 2-120 |
| 492 | PHE0006079_7337.pep | S6PP::S6PP_C | 8-262::263-395 |
| 661 | PHE0006745_8590.pep | V-SNARE | 71-221 |
| 653 | PHE0006737_8527.pep | 2OG-Fell_Oxy | 217-317 |
| 688 | PHE0006929_9151.pep | zf-C3HC4 | 259-299 |
| 422 | PHE0004883_5935.pep | Pkinase | 314-581 |
| 686 | PHE0006912_9000.pep | ECH | 57-226 |
| 685 | PHE0006910_9019.pep | Mov34 | 92-201 |
| 674 | PHE0006788_8581.pep | Tryp_alpha_amyl | 27-110 |
| 599 | PHE0006517_7879.pep | CorA | 81-456 |
| 429 | PHE0004894_5950.pep | Tubulin::Tubulin_C | 52-245::247-369 |
| 439 | PHE0004911_5968.pep | Thioredoxin | 120-227 |
| 666 | PHE0006765_8536.pep | Bromodomain | 110-199 |
| 489 | PHE0006077_7045.pep | GASA | 5-106 |
| 590 | PHE0006498_7796.pep | Pyridoxal_deC | 34-381 |
| 396 | PHE0004762_5729.pep | F-box::LRR_2 | 62-108::314-340 |
| 369 | PHE0002810_5803.pep | p450 | 59-531 |
| 432 | PHE0004895_7135.pep | DS | 44-349 |
| 448 | PHE0004968_6030.pep | RLI::Fer4::ABC_tran::ABC_tran | 6-37::48-71::103- |
| | | | 292::374-544 |
| 477 | PHE0006054_8779.pep | AIG1 | 39-236 |
| 380 | PHE0004143_7850.pep | GSHPx | 21-129 |
| 491 | PHE0006079_7044.pep | S6PP::S6PP_C | 8-262::263-395 |
| 442 | PHE0004921_5979.pep | DUF1677 | 3-107 |
| 412 | PHE0004811_5798.pep | zf-C3HC4 | 164-205 |
| 469 | PHE0006043_8788.pep | Glyco_transf_8 | 83-345 |
| 435 | PHE0004902_5959.pep | Response_reg | 21-146 |
| 437 | PHE0004905_5962.pep | Pkinase | 78-336 |
| 635 | PHE0006669_8357.pep | PFK::PFK | 271-582::661-953 |
| 364 | PHE0002693_8516.pep | FAD_binding_3 | 55-374 |
| 454 | PHE0004991_8092.pep | Auxin_inducible | 19-119 |
| 460 | PHE0005008_6077.pep | Response_reg | 22-137 |
| 425 | PHE0004887_5940.pep | DUF516 | 49-310 |
| 467 | PHE0006021_8737.pep | Bet_v_I | 1-155 |
| 511 | PHE0006173_7211.pep | Ribosomal_S6e | 1-129 |
| 361 | PHE0002132_4965.pep | Pkinase | 9-285 |
| 587 | PHE0006478_8190.pep | Methyltransf_6 | 4-161 |
| 526 | PHE0006212_7196.pep | Heme_oxygenase | 74-278 |
| 431 | PHE0004895_5952.pep | DS | 44-349 |
| 709 | PHE0006962_9114.pep | Molybdop_Fe4S4::Molybdopterin:: | 39-93::96-568::714-822 |
| | | Molydop_binding | |
| 696 | PHE0006937_9126.pep | DUF298 | 127-242 |
| 610 | PHE0006586_8271.pep | Frataxin_Cyay | 76-187 |
| 385 | PHE0004473_5214.pep | Histone | 28-101 |
| 483 | PHE0006069_7065.pep | Cupin_3 | 62-137 |
| 659 | PHE0006742_8591.pep | PGI | 55-545 |
| 637 | PHE0006673_8992.pep | PTR2 | 123-530 |
| 604 | PHE0006555_8283.pep | Gp_dh_N::Gp_dh_C | 83-236::241-398 |
| 475 | PHE0006051_7097.pep | zf-MYND::UCH | 57-94::326-630 |
| 638 | PHE0006676_8410.pep | Transket_pyr:Transketolase_C | 39-215::232-354 |
| 612 | PHE0006590_8258.pep | Thioredoxin | 75-178 |
| 539 | PHE0006254_7312.pep | X8 | 29-115 |
| 513 | PHE0006175_7210.pep | KOW::eIF-5a | 27-63::85-154 |
| 428 | PHE0004894_5948.pep | Tubulin::Tubulin_C | 52-245::247-369 |
| 532 | PHE0006221_7241.pep | Pyr_redox_2::Glutaredoxin | 44-329::405-467 |
| 501 | PHE0006093_7066.pep | PTS_2-R NA | 48-239 |
| 609 | PHE0006574_8224.pep | Glyoxalase::Glyoxalase | 11-150::166-298 |
| 543 | PHE0006281_7526.pep | GAF::HisKA::HATPase_c::Respon | 158-307::343-408::455- |
| | | se_reg | 582::610-726 |
| 497 | PHE0006091_7074.pep | TFIIS_M::TFIIS_C | 206-327::338-376 |
| 520 | PHE0006202_7182.pep | HMG L-like:teuA_dimer | 97-374::467-612 |
| 462 | PHE0005010_6079.pep | zf-DNL | 96-159 |
| 373 | PHE0003814_7802.pep | Chloroa_b-bind | 66-217 |
| 530 | PHE0006215_7280.pep | PFK | 2-277 |
| 493 | PHE0006082_7330.pep | TPR_1::TPR_2::TPR_1::TPR_2::TPR_1::TPR_1:: | 2-35::36-69::70-103::257- |
| | | TPR_1::TPR_1::TPR_1 | 290::291-324::332- |
| | | | 369::396-429::430- |
| | | | 463::464-497 |
| 368 | PHE0002779_7478.pep | PGM_PMM _1::PGM_PMM_II::PGM_PMM_111:: | 16-165:1 99-314::316- |
| | | PGM_PMM_IV | 439::477-571 |
| 593 | PHE0006514_7926.pep | ELFV_dehydrog_N::ELFV_dehydrog | 57-187::202-447 |
| 548 | PHE0006296_7515.pep | Glyco_transf_43 | 89-312 |
| 691 | PHE0006931_9168.pep | GDC-P | 3-443 |
| 621 | PHE0006597_8242.pep | Pkinase | 143-409 |
| 628 | PHE0006609_8234.pep | GSHPx | 12-120 |
| 630 | PHE0006613_8238.pep | GSHPx | 12-120 |
| 504 | PHE0006094_7333.pep | Chalcone | 14-225 |
| 634 | PHE0006666_8414.pep | Glycolytic | 43-387 |
| 698 | PHE0006940_9122.pep | Aldedh | 18-477 |
| 617 | PHE0006595_8250.pep | DUF537 | 18-156 |
| 527 | PHE0006213_7198.pep | Peptidase_C54 | 142-436 |
| 399 | PHE0004779_5749.pep | Ammonium_transp | 47-471 |
| 419 | PHE0004856_7855.pep | NPH3 | 193-435 |
| 549 | PHE0006309_7570.pep | Glyoxalase | 2-123 |
| 451 | PHE0004984_7235.pep | AA_kinase::ACT::ACT | 83-366::403-478::479-546 |
| 588 | PHE0006497_8355.pep | DUF868 | 28-304 |
| 677 | PHE0006805_8531.pep | Ribosomal_S30AE | 2-95 |
| 574 | PHE0006382_8678.pep | WD40 | 282-319 |
| 705 | PHE0006952_9233.pep | PGAM | 91-277 |
| 652 | PHE0006737_8455.pep | 2OG-Fell_Oxy | 217-317 |
| 367 | PHE0002777_8726.pep | Ferrochelatase | 108-432 |
| 405 | PHE0004791_5771.pep | Globin::FAD_binding_6::NAD_binding_1 | 7-131::154-254::263-373 |
| 575 | PHE0006425_7646.pep | AA_permease | 36-537 |
| 578 | PHE0006429_7671.pep | Globin | 18-158 |
| 522 | PHE0006204_7189.pep | Cyclin_N::Cyclin_C | 18-151::153-284 |
| 684 | PHE0006909_9003.pep | Cupin_3 | 62-137 |
| 559 | PHE0006348_8203.pep | DUF6::TPT | 106-231::240-385 |
| 650 | PHE0006729_8433.pep | DnaJ::zf-CSL | 12-81::96-174 |
| 703 | PHE0006949_9133.pep | Aldedh | 19-478 |
| 533 | PHE0006221_7937.pep | Pyr_redox_2::Glutaredoxin | 44-329::405-467 |
| 458 | PHE0005002_6071.pep | Methyltransf_12::Mg-por_mtran_C | 155-252::223-319 |
| 690 | PHE0006931_9148.pep | GDC-P | 3-443 |
| 416 | PHE0004827_5825.pep | Phi_1 | 40-315 |
| 583 | PHE0006450_7624.pep | Tubulin::Tubulin_C | 57-250::252-369 |
| 605 | PHE0006559_8227.pep | PEPcase | 1-948 |
| 433 | PHE0004895_7137.pep | DS | 44-349 |
| 669 | PHE0006770_8553.pep | DEAD::Helicase_C | 58-224::292-368 |
| 667 | PHE0006766_8867.pep | IPT | 1-235 |
| 594 | PHE0006516_7866.pep | CorA | 90-474 |
| 473 | PHE0006048_8785.pep | Pkinase_Tyr | 135-389 |
| 374 | PHE0003838_5934.pep | zf-LSD1::zf-LSD1::zf-LSD1 | 28-52::67-91::105-129 |
| 464 | PHE0006003_7205.pep | zf-AN1 | 105-145 |
| 618 | PHE0006595_8265.pep | DUF537 | 18-156 |
| 365 | PHE0002777_7490.pep | Ferrochelatase | 108-432 |
| 629 | PHE0006610_8239.pep | GSHPx | 77-185 |
| 531 | PHE0006221_7201.pep | Pyr_redox_2::Glutaredoxin | 44-329::405-467 |
| 476 | PHE0006054_7095.pep | AIG1 | 39-236 |
| 393 | PHE0004742_5691.pep | AP2 | 43-108 |
| 404 | PHE0004787_7988.pep | P-II | 85-187 |
| 410 | PHE0004809_5795.pep | PP2C | 46-324 |
| 434 | PHE0004895_8610.pep | DS | 44-349 |
| 415 | PHE0004815_5802.pep | Pkinase_Tyr | 334-585 |
| 613 | PHE0006591_8264.pep | Thioredoxin | 81-184 |
| 455 | PHE0004993_6062.pep | CCT | 237-275 |
| 689 | PHE0006929_9185.pep | zf-C3HC4 | 259-299 |
| 375 | PHE0003845_5806.pep | p450 | 40-509 |
| 498 | PHE0006091_7341.pep | TFIIS_M::TFIIS_C | 206-327::338-376 |
| 592 | PHE0006506_7818.pep | Pkinase::UBA::KA1 | 20-272::294-333::463-511 |
| 384 | PHE0004398_5757.pep | Pkinase | 7-269 |
| 557 | PHE0006344_8188.pep | VQ | 44-74 |
| 702 | PHE0006948_9160.pep | RRM_1 | 38-109 |
| 682 | PHE0006870_8846.pep | Ribosomal_L37ae | 2-91 |
| 423 | PHE0004886_5938.pep | DUF516 | 49-313 |
| 589 | PHE0006498_7795.pep | Pyridoxal_deC | 34-381 |
| 602 | PHE0006545_8320.pep | DnaJ | 31-93 |
| 641 | PHE0006686_8416.pep | Ribosomal_L22 | 17-153 |
| 572 | PHE0006381_8695.pep | RNase_PH | 42-186 |
| 529 | PHE0006214_7219.pep | Cyclin_N::Cyclin_C | 32-158::160-289 |
| 581 | PHE0006449_7865.pep | Biotin_lipoyl::E3_binding::2-oxoacid_dh | 92-165::229-265::281-512 |
| 607 | PHE0006565_8300.pep | GATase_2::Asn_synthase | 2-161::209-450 |
| 664 | PHE0006757_8530.pep | Acyltransferase | 375-496 |
| 603 | PHE0006549_8255.pep | THF_DHG_CYH::THF_DHG_CYH_C | 3-120::123-290 |
| 658 | PHE0006742_8440.pep | PGI | 55-545 |
| 524 | PHE0006208_7223.pep | CH::EB1 | 19-120::204-251 |
| 657 | PHE0006741_8589.pep | MATH:: BTB | 53-182::206-328 |
| 408 | PHE0004807_5793.pep | RRM_1 | 13-84 |
| 456 | PHE0004993_8014.pep | CCT | 237-275 |
| 693 | PHE0006932_9174.pep | DUF498 | 56-164 |
| 414 | PHE0004813_5800.pep | zf-CCCH::zf-CCCH::zf-CCCH::zf-CCCH::zf-CCCH | 74-100::119-145::165- |
| | | | 191::317-343::363-389 |
| 512 | PHE0006174_7208.pep | RRM_1::RRM_1 | 170-241::269-340 |
| 670 | PHE0006770_8568.pep | DEAD:: Helicase_C | 58-224::292-368 |
| 506 | PHE0006160_7265.pep | PFK | 3-309 |
| 646 | PHE0006716_8482.pep | NOI | 1-72 |
| 392 | PHE0004683_8693.pep | ThiF | 30-167 |
| 500 | PHE0006092_7336.pep | RRM_1::RRM_1::RRM_1 | 65-132::150-225::275-343 |
| 388 | PHE0004503_8801.pep | MtN3_slv::MtN3_slv | 12-99::134-220 |
| 452 | PHE0004984_8782.pep | AA_kinase::ACT::ACT | 83-366::403-478::479-546 |
| 516 | PHE0006178_8626.pep | eIF-5a | 82-149 |
| 521 | PHE0006204_7183.pep | Cyclin_N::Cyclin_C | 18-151::153-284 |
| 636 | PHE0006670_8346.pep | PfkB | 83-375 |
| 366 | PHE0002777_8472.pep | Ferrochelatase | 108-432 |
| 376 | PHE0003845_7028.pep | p450 | 40-509 |
| 598 | PHE0006517_7858.pep | CorA | 81-456 |
| 651 | PHE0006730_8428.pep | Lung_7-TM_R | 168-423 |
| 381 | PHE0004143_8160.pep | GSHPx | 23-131 |
| 426 | PHE0004887_8704.pep | DUF516 | 49-310 |
| 440 | PHE0004912_5969.pep | Pkinase | 162-434 |
| 620 | PHE0006596_8257.pep | CTP_transf_2 | 19-159 |
| 692 | PHE0006932_9147.pep | DUF498 | 56-164 |
| 418 | PHE0004845_5852.pep | Carotene_hydrox | 136-295 |
| 406 | PHE0004805_5791.pep | DUF751 | 125-188 |
| 540 | PHE0006263_7271.pep | DAGAT | 48-324 |
| 398 | PHE0004766_5733.pep | UPF0051 | 275-515 |
| 643 | PHE0006706_8434.pep | DEAD::Helicase_C | 46-212::280-356 |
| 495 | PHE0006089_7061.pep | Brix | 60-255 |
| 519 | PHE0006201_7187.pep | ketoacyl-synt::Ketoacyl-synt_C | 47-309::317-477 |
| 447 | PHE0004966_6028.pep | Sugar_tr | 101-556 |
| 577 | PHE0006428_7651.pep | Globin | 21-161 |
| 449 | PHE0004977_6043.pep | DAGAT | 54-352 |
| 509 | PHE0006161_7215.pep | PFK::PFK | 195-506::585-877 |
| 706 | PHE0006953_9121.pep | Usp | 3-157 |
| 413 | PHE0004812_5799.pep | Sigma70_r2::Sigma70_r3::Sigma70_r4 | 267-340::343-424::436-489 |
| 389 | PHE0004641_5519.pep | malic::Malic_M | 162-350::352-605 |
| 668 | PHE0006769_8865.pep | TPP_enzyme_N::TPP_enzyme_M | 3-172::190-336::379-525 |
| | | ::TPP_enzyme_C | |
| 496 | PHE0006089_7334.pep | Brix | 60-255 |
| 649 | PHE0006728_8430.pep | RRM_1 | 111-190 |
| 663 | PHE0006750_8523.pep | zf-C3HC4::WD40::WD40::WD40 | 52-89::454-492::496- |
| | | | 534::540-576 |
| 463 | PHE0006003_7195.pep | zf-AN1 | 105-145 |
| 597 | PHE0006516_8363.pep | CorA | 90-474 |
| 461 | PHE0005009_6078.pep | UQ_con | 40-177 |
| 534 | PHE0006227_7282.pep | NB-ARC::LRR_1::LRR_1::LRR_1 | 152-421::652-674::676- |
| | | | 698::700-722 |
| 551 | PHE0006309_8620.pep | Glyoxalase | 2-123 |
| 554 | PHE0006312_7579.pep | UPF0113 | 1-175 |
| 608 | PHE0006571_8279.pep | Pkinase | 15-273 |
| 382 | PHE0004311_5022.pep | Peptidase_M24 | 354-577 |
| 472 | PHE0006048_7094.pep | Pkinase_Tyr | 135-389 |
| 397 | PHE0004762_7997.pep | F-box::LRR_2 | 62-108::314-340 |
| 390 | PHE0004642_5520.pep | malic::Malic_M | 170-358::360-613 |
| 518 | PHE0006201_7184.pep | ketoacyl-synt::Ketoacyl-synt_C | 47-309::317-477 |
| 662 | PHE0006746_8453.pep | Sugar_tr | 33-464 |
| 528 | PHE0006214_7213.pep | Cyclin_N::Cyclin_C | 32-158::160-289 |
| 503 | PHE0006094_7231.pep | Chalcone | 14-225 |
| 445 | PHE0004941_5997.pep | Dehydrin | 14-128 |
| 370 | PHE0002857_7502.pep | Chloroa_b-bind | 66-183 |
| 627 | PHE0006607_8231.pep | SRF-TF | 11-66 |
| 676 | PHE0006794_8578.pep | SSB | 71-182 |
| 600 | PHE0006517_7897.pep | CorA | 81-456 |
| 694 | PHE0006933_9139.pep | adh_short | 30-212 |
| 555 | PHE0006312_8644.pep | UPF0113 | 1-175 |
| 624 | PHE0006599_8230.pep | ZF-HD_dimer | 34-93 |
| 580 | PHE0006439_8108.pep | RRM_1 | 23-94 |
| 430 | PHE0004894_5951.pep | Tubulin::Tubulin_C | 52-245::247-369 |
| 377 | PHE0003845_7413.pep | p450 | 40-509 |
| 482 | PHE0006068_7064.pep | Pkinase | 2-222 |
| 656 | PHE0006741_8448.pep | MATH::BTB | 53-182::206-328 |
| 579 | PHE0006433_8307.pep | PseudoU_synth_2 | 105-284 |
| 675 | PHE0006793_8580.pep | p450 | 27-508 |
| 508 | PHE0006160_8851.pep | PFK | 3-309 |
| 595 | PHE0006516_7882.pep | CorA | 90-474 |
| 614 | PHE0006592_8278.pep | Thioredoxin | 87-190 |
| 633 | PHE0006648_8356.pep | Tryp_alpha_amyl | 36-114 |
| 678 | PHE0006811_8506.pep | Bac_globin | 3-122 |
| 672 | PHE0006775_8548.pep | Ras | 10-178 |
| 403 | PHE0004784_5760.pep | SAM_decarbox | 3-333 |
| 542 | PHE0006265_7990.pep | Heme_oxygenase | 88-279 |
| 566 | PHE0006377_8683.pep | RNase_PH::RNase_PH_C | 48-244::322-384 |
| 459 | PHE0005003_7032.pep | Porphobil_deam::Porphobil_deam | 47-263::271-347 |
| | | C | |
| 450 | PHE0004979_6047.pep | Glyco_hydro_32N::Glyco_hydro_32C | 32-342::395-492 |
| 363 | PHE0002133_7497.pep | Pkinase | 13-273 |
| 644 | PHE0006709_8432.pep | MtN3_slv::MtN3_slv | 9-98::132-218 |
| 490 | PHE0006077_7343.pep | GASA | 5-106 |
| 537 | PHE0006233_7220.pep | Mg_chelatase | 87-295 |
| 552 | PHE0006310_7574.pep | Pkinase | 13-304 |
| 623 | PHE0006598_8268.pep | Di19 | 11-219 |
| 564 | PHE0006356_8103.pep | F-box::Kelch_1::Kelch_1 | 42-89::180-225::227-282 |
| 673 | PHE0006775_8555.pep | Ras | 10-178 |
| 394 | PHE0004747_5708.pep | Aldedh | 99-565 |
| 523 | PHE0006204_8634.pep | Cyclin_N::Cyclin_C | 18-151::153-284 |
| 697 | PHE0006938_9149.pep | F-box | 41-88 |
| 465 | PHE0006018_7098.pep | GTP_EFTU::GTP_EFTU_D2::GTP_EFTU_D3 | 64-260::281-352::357-451 |
| 642 | PHE0006687_8471.pep | Ribosomal_L32e | 14-123 |
| 611 | PHE0006587_8277.pep | CP12 | 60-131 |
| 622 | PHE0006598_8240.pep | Di19 | 11-219 |
| 625 | PHE0006599_8262.pep | ZF-HD_dimer | 34-93 |
| 457 | PHE0004993_8682.pep | CCT | 237-275 |
| 584 | PHE0006464_8089.pep | DREPP | 2-203 |
| 573 | PHE0006382_7652.pep | WD40 | 282-319 |
| 701 | PHE0006948_9125.pep | RRM_1 | 38-109 |
| 499 | PHE0006092_7062.pep | RRM_1::RRM_1::RRM_1 | 65-132::150-225::275-343 |
| 481 | PHE0006063_7049.pep | Transket_pyr::Transketolase_C | 76-252::265-387 |
| 400 | PHE0004779_8394.pep | Ammonium_transp | 47-471 |
| 711 | PHE0006965_9119.pep | tRNA-synt_2b::HGTP_anticodon | 67-243::312-409 |
| 517 | PHE0006184_7245.pep | DUF125 | 34-247 |
| 360 | PHE0002129_8308.pep | PEPcase | 3-982 |
| 444 | PHE0004932_6045.pep | PurA | 28-275 |
| 386 | PHE0004473_8803.pep | Histone | 28-101 |
| 660 | PHE0006744_8449.pep | adh_short | 37-225 |

TABLE 15

| PEP | | | | | | |
|---|---|---|---|---|---|---|
| SEQ ID | | Pfam domain | | | | |
| NO | GENE ID | name | begin | stop | score | E-value |
| 359 | PHE0001295_7469.pep | DNA_photolyase | 18 | 190 | 254.3 | 2.30E−73 |
| 359 | PHE0001295_7469.pep | FAD_binding_7 | 223 | 501 | 503 | 3.20E−148 |
| 360 | PHE0002129_8308.pep | PEPcase | 3 | 982 | 425.8 | 5.30E−125 |
| 361 | PHE0002132_4965.pep | Pkinase | 9 | 285 | 234.9 | 1.60E−67 |
| 362 | PHE0002132_8653.pep | Pkinase | 9 | 285 | 234.9 | 1.60E−67 |
| 363 | PHE0002133_7497.pep | Pkinase | 13 | 273 | 288.2 | 1.40E−83 |
| 364 | PHE0002693_8516.pep | FAD_binding_3 | 55 | 374 | −131.4 | 0.0029 |
| 365 | PHE0002777_7490.pep | Ferrochelatase | 108 | 432 | 598.9 | 4.30E−177 |
| 366 | PHE0002777_8472.pep | Ferrochelatase | 108 | 432 | 598.9 | 4.30E−177 |
| 367 | PHE0002777_8726.pep | Ferrochelatase | 108 | 432 | 598.9 | 4.30E−177 |
| 368 | PHE0002779_7478.pep | PGM_PMM_I | 16 | 165 | 154.6 | 2.40E−43 |
| 368 | PHE0002779_7478.pep | PGM_PMM_II | 199 | 314 | 108.5 | 1.80E−29 |
| 368 | PHE0002779_7478.pep | PGM_PMM_III | 316 | 439 | 136.8 | 5.30E−38 |
| 368 | PHE0002779_7478.pep | PGM_PMM_IV | 477 | 571 | 77.3 | 4.30E−20 |
| 369 | PHE0002810_5803.pep | p450 | 59 | 531 | 323.8 | 2.80E−94 |
| 370 | PHE0002857_7502.pep | Chloroa_b-bind | 66 | 183 | −26.1 | 0.0016 |
| 373 | PHE0003814_7802.pep | Chloroa_b-bind | 66 | 217 | 66.4 | 8.20E−17 |
| 374 | PHE0003838_5934.pep | zf-LSD1 | 28 | 52 | 40.3 | 6.10E−09 |
| 374 | PHE0003838_5934.pep | zf-LSD1 | 67 | 91 | 54.8 | 2.60E−13 |
| 374 | PHE0003838_5934.pep | zf-LSD1 | 105 | 129 | 54.1 | 4.30E−13 |
| 375 | PHE0003845_5806.pep | p450 | 40 | 509 | 127.1 | 4.50E−35 |
| 376 | PHE0003845_7028.pep | p450 | 40 | 509 | 127.1 | 4.50E−35 |
| 377 | PHE0003845_7413.pep | p450 | 40 | 509 | 127.1 | 4.50E−35 |
| 379 | PHE0004021_4654.pep | GATase_2 | 2 | 173 | −29 | 7.60E−09 |
| 379 | PHE0004021_4654.pep | Asn_synthase | 227 | 460 | 295.7 | 7.70E−86 |
| 380 | PHE0004143_7850.pep | Redoxin | 12 | 176 | 4.9 | 0.0016 |
| 380 | PHE0004143_7850.pep | GSHPx | 21 | 129 | 246.5 | 5.10E−71 |
| 381 | PHE0004143_8160.pep | Redoxin | 14 | 178 | 4.9 | 0.0016 |
| 381 | PHE0004143_8160.pep | GSHPx | 23 | 131 | 246.5 | 5.10E−71 |
| 382 | PHE0004311_5022.pep | Peptidase_M24 | 354 | 577 | 12.2 | 3.20E−09 |
| 383 | PHE0004398_5136.pep | Pkinase | 7 | 269 | 341.5 | 1.30E−99 |
| 383 | PHE0004398_5136.pep | Pkinase_Tyr | 7 | 269 | 155.9 | 9.80E−44 |
| 384 | PHE0004398_5757.pep | Pkinase | 7 | 269 | 341.5 | 1.30E−99 |
| 384 | PHE0004398_5757.pep | Pkinase_Tyr | 7 | 269 | 155.9 | 9.80E−44 |
| 385 | PHE0004473_5214.pep | Histone | 28 | 101 | 104.2 | 3.60E−28 |
| 386 | PHE0004473_8803.pep | Histone | 28 | 101 | 104.2 | 3.60E−28 |
| 387 | PHE0004503_5244.pep | MtN3_slv | 12 | 99 | 135.1 | 1.80E−37 |
| 387 | PHE0004503_5244.pep | MtN3_slv | 134 | 220 | 135.4 | 1.40E−37 |
| 388 | PHE0004503_8801.pep | MtN3_slv | 12 | 99 | 135.1 | 1.80E−37 |
| 388 | PHE0004503_8801.pep | MtN3_slv | 134 | 220 | 135.4 | 1.40E−37 |
| 389 | PHE0004641_5519.pep | malic | 162 | 350 | 392.4 | 6.10E−115 |
| 389 | PHE0004641_5519.pep | Malic_M | 352 | 605 | 486.9 | 2.20E−143 |
| 390 | PHE0004642_5520.pep | malic | 170 | 358 | 402.6 | 5.40E−118 |
| 390 | PHE0004642_5520.pep | Malic_M | 360 | 613 | 483.8 | 1.90E−142 |
| 391 | PHE0004670_6044.pep | GSHPx | 9 | 117 | 230.9 | 2.60E−66 |
| 392 | PHE0004683_8693.pep | ThiF | 30 | 167 | −12.5 | 3.60E−05 |
| 393 | PHE0004742_5691.pep | AP2 | 43 | 108 | 93.1 | 7.50E−25 |
| 394 | PHE0004747_5708.pep | Aldedh | 99 | 565 | 568.6 | 5.60E−168 |
| 396 | PHE0004762_5729.pep | F-box | 62 | 108 | 15.1 | 0.22 |
| 396 | PHE0004762_5729.pep | LRR_2 | 314 | 340 | 17.1 | 0.058 |
| 397 | PHE0004762_7997.pep | F-box | 62 | 108 | 15.1 | 0.22 |
| 397 | PHE0004762_7997.pep | LRR_2 | 314 | 340 | 17.1 | 0.058 |
| 398 | PHE0004766_5733.pep | UPF0051 | 275 | 515 | 465.7 | 5.30E−137 |
| 399 | PHE0004779_5749.pep | Ammonium_transp | 47 | 471 | 644.8 | 6.60E−191 |
| 400 | PHE0004779_8394.pep | Ammonium_transp | 47 | 471 | 644.8 | 6.60E−191 |
| 403 | PHE0004784_5760.pep | SAM_decarbox | 3 | 333 | 694.5 | 7.10E−206 |
| 404 | PHE0004787_7988.pep | P-II | 85 | 187 | 176 | 8.50E−50 |
| 405 | PHE0004791_5771.pep | Globin | 7 | 131 | 80.7 | 4.20E−21 |
| 405 | PHE0004791_5771.pep | FAD_binding_6 | 154 | 254 | 44.1 | 4.20E−10 |
| 405 | PHE0004791_5771.pep | NAD_binding_1 | 263 | 373 | 45 | 2.40E−10 |
| 406 | PHE0004805_5791.pep | DUF751 | 125 | 188 | 62.4 | 1.40E−15 |
| 407 | PHE0004806_5792.pep | OTU | 156 | 268 | 141.1 | 2.60E−39 |
| 408 | PHE0004807_5793.pep | RRM_1 | 13 | 84 | 114.1 | 3.80E−31 |
| 409 | PHE0004808_5794.pep | Peptidase_C1 | 8 | 205 | 327.1 | 2.80E−95 |
| 410 | PHE0004809_5795.pep | PP2C | 46 | 324 | 111.1 | 3.00E−30 |
| 411 | PHE0004810_5796.pep | Pkinase | 77 | 358 | 332.4 | 7.00E−97 |
| 411 | PHE0004810_5796.pep | efhand | 405 | 433 | 26 | 0.00012 |
| 411 | PHE0004810_5796.pep | efhand | 441 | 469 | 26.3 | 9.80E−05 |
| 411 | PHE0004810_5796.pep | efhand | 477 | 505 | 21 | 0.0038 |
| 411 | PHE0004810_5796.pep | efhand | 508 | 536 | 34.1 | 4.40E−07 |
| 412 | PHE0004811_5798.pep | zf-C3HC4 | 164 | 205 | 37.6 | 3.90E−08 |
| 413 | PHE0004812_5799.pep | Sigma70_r2 | 267 | 340 | 49.2 | 1.30E−11 |
| 413 | PHE0004812_5799.pep | Sigma70_r3 | 343 | 424 | 52.3 | 1.50E−12 |
| 413 | PHE0004812_5799.pep | Sigma70_r4 | 436 | 489 | 66.5 | 7.70E−17 |
| 414 | PHE0004813_5800.pep | zf-CCCH | 74 | 100 | 42.6 | 1.20E−09 |
| 414 | PHE0004813_5800.pep | zf-CCCH | 119 | 145 | 42.4 | 1.40E−09 |
| 414 | PHE0004813_5800.pep | zf-CCCH | 165 | 191 | 38 | 2.90E−08 |
| 414 | PHE0004813_5800.pep | zf-CCCH | 317 | 343 | 46.8 | 6.70E−11 |
| 414 | PHE0004813_5800.pep | zf-CCCH | 363 | 389 | 48.2 | 2.60E−11 |
| 415 | PHE0004815_5802.pep | Pkinase | 334 | 585 | 35.3 | 4.90E−10 |
| 415 | PHE0004815_5802.pep | Pkinase_Tyr | 334 | 585 | 77.5 | 1.60E−20 |
| 416 | PHE0004827_5825.pep | Phi_1 | 40 | 315 | 567.5 | 1.20E−167 |
| 417 | PHE0004830_5828.pep | HD | 233 | 337 | 53.6 | 6.10E−13 |
| 417 | PHE0004830_5828.pep | RelA_SpoT | 427 | 537 | 165 | 1.80E−46 |
| 418 | PHE0004845_5852.pep | Carotene_hydrox | 136 | 295 | 339.2 | 6.30E−99 |
| 419 | PHE0004856_7855.pep | NPH3 | 193 | 435 | 469.9 | 2.90E−138 |
| 422 | PHE0004883_5935.pep | Pkinase | 314 | 581 | 148.8 | 1.30E−41 |
| 422 | PHE0004883_5935.pep | Pkinase_Tyr | 315 | 581 | 104 | 4.10E−28 |
| 423 | PHE0004886_5938.pep | DUF516 | 49 | 313 | 561.2 | 9.10E−166 |
| 424 | PHE0004887_5939.pep | DUF516 | 49 | 310 | 356.9 | 2.90E−104 |
| 425 | PHE0004887_5940.pep | DUF516 | 49 | 310 | 356.9 | 2.90E−104 |
| 426 | PHE0004887_8704.pep | DUF516 | 49 | 310 | 356.9 | 2.90E−104 |
| 428 | PHE0004894_5948.pep | Tubulin | 52 | 245 | 339.5 | 5.20E−99 |
| 428 | PHE0004894_5948.pep | Tubulin_C | 247 | 369 | 96.5 | 7.20E−26 |
| 429 | PHE0004894_5950.pep | Tubulin | 52 | 245 | 339.5 | 5.20E−99 |
| 429 | PHE0004894_5950.pep | Tubulin_C | 247 | 369 | 96.5 | 7.20E−26 |
| 430 | PHE0004894_5951.pep | Tubulin | 52 | 245 | 339.5 | 5.20E−99 |
| 430 | PHE0004894_5951.pep | Tubulin_C | 247 | 369 | 96.5 | 7.20E−26 |
| 431 | PHE0004895_5952.pep | DS | 44 | 349 | 713.1 | 1.80E−211 |
| 432 | PHE0004895_7135.pep | DS | 44 | 349 | 713.1 | 1.80E−211 |
| 433 | PHE0004895_7137.pep | DS | 44 | 349 | 713.1 | 1.80E−211 |
| 434 | PHE0004895_8610.pep | DS | 44 | 349 | 713.1 | 1.80E−211 |
| 435 | PHE0004902_5959.pep | Response_reg | 21 | 146 | 77.4 | 4.00E−20 |
| 437 | PHE0004905_5962.pep | Pkinase | 78 | 336 | 354.5 | 1.50E−103 |
| 438 | PHE0004909_5966.pep | Pkinase | 157 | 428 | 148.5 | 1.60E−41 |
| 438 | PHE0004909_5966.pep | Pkinase_Tyr | 157 | 428 | 139.3 | 9.50E−39 |
| 439 | PHE0004911_5968.pep | Thioredoxin | 120 | 227 | 56.1 | 1.10E−13 |
| 440 | PHE0004912_5969.pep | Pkinase | 162 | 434 | 125.2 | 1.70E−34 |
| 440 | PHE0004912_5969.pep | Pkinase_Tyr | 162 | 434 | 115.7 | 1.20E−31 |
| 441 | PHE0004918_5975.pep | DUF1365 | 44 | 255 | 407.9 | 1.30E−119 |
| 442 | PHE0004921_5979.pep | DUF1677 | 3 | 107 | 192.2 | 1.20E−54 |
| 443 | PHE0004928_5986.pep | Rotamase | 11 | 119 | 143.6 | 4.90E−40 |
| 444 | PHE0004932_6045.pep | PurA | 28 | 275 | 44.4 | 5.80E−12 |
| 445 | PHE0004941_5997.pep | Dehydrin | 14 | 128 | 165.3 | 1.40E−46 |
| 447 | PHE0004966_6028.pep | Sugar_tr | 101 | 556 | 315.4 | 9.20E−92 |
| 447 | PHE0004966_6028.pep | MFS_1 | 105 | 515 | 81.2 | 2.90E−21 |
| 448 | PHE0004968_6030.pep | RLI | 6 | 37 | 55.4 | 1.70E−13 |
| 448 | PHE0004968_6030.pep | Fer4 | 48 | 71 | 39.3 | 1.20E−08 |
| 448 | PHE0004968_6030.pep | ABC_tran | 103 | 292 | 96.8 | 5.90E−26 |
| 448 | PHE0004968_6030.pep | ABC_tran | 374 | 544 | 85.8 | 1.30E−22 |
| 449 | PHE0004977_6043.pep | DAGAT | 54 | 352 | 405.8 | 5.80E−119 |
| 450 | PHE0004979_6047.pep | Glyco_hydro_32N | 32 | 342 | 430.7 | 1.80E−126 |
| 450 | PHE0004979_6047.pep | Glyco_hydro_32C | 395 | 492 | 42.6 | 1.20E−09 |
| 451 | PHE0004984_7235.pep | AA_kinase | 83 | 366 | 224.7 | 1.80E−64 |
| 451 | PHE0004984_7235.pep | ACT | 403 | 478 | 28.1 | 2.80E−05 |
| 451 | PHE0004984_7235.pep | ACT | 479 | 546 | 24 | 0.0005 |
| 452 | PHE0004984_8782.pep | AA_kinase | 83 | 366 | 224.7 | 1.80E−64 |
| 452 | PHE0004984_8782.pep | ACT | 403 | 478 | 28.1 | 2.80E−05 |
| 452 | PHE0004984_8782.pep | ACT | 479 | 546 | 24 | 0.0005 |
| 453 | PHE0004989_8115.pep | DUF21 | 14 | 191 | 174.7 | 2.10E−49 |
| 453 | PHE0004989_8115.pep | CBS | 210 | 325 | 33.9 | 5.30E−07 |
| 454 | PHE0004991_8092.pep | Auxin_inducible | 19 | 119 | 55.4 | 1.70E−13 |
| 455 | PHE0004993_6062.pep | CCT | 237 | 275 | 74 | 4.40E−19 |
| 456 | PHE0004993_8014.pep | CCT | 237 | 275 | 74 | 4.40E−19 |
| 457 | PHE0004993_8682.pep | CCT | 237 | 275 | 74 | 4.40E−19 |
| 458 | PHE0005002_6071.pep | Methyltransf_11 | 155 | 252 | 44.7 | 3.00E−10 |
| 458 | PHE0005002_6071.pep | Methyltransf_12 | 155 | 252 | 59.7 | 8.50E−15 |
| 458 | PHE0005002_6071.pep | Mg-por_mtran_C | 223 | 319 | 198.4 | 1.50E−56 |
| 459 | PHE0005003_7032.pep | Porphobil_deam | 47 | 263 | 451.7 | 8.90E−133 |
| 459 | PHE0005003_7032.pep | Porphobil_deamC | 271 | 347 | 100.4 | 4.80E−27 |
| 460 | PHE0005008_6077.pep | Response_reg | 22 | 137 | 70.4 | 5.10E−18 |
| 461 | PHE0005009_6078.pep | UQ_con | 40 | 177 | 216.1 | 7.20E−62 |
| 462 | PHE0005010_6079.pep | zf-DNL | 96 | 159 | 102.2 | 1.40E−27 |
| 463 | PHE0006003_7195.pep | zf-AN1 | 105 | 145 | 73.2 | 7.60E−19 |
| 464 | PHE0006003_7205.pep | zf-AN1 | 105 | 145 | 73.2 | 7.60E−19 |
| 465 | PHE0006018_7098.pep | GTP_EFTU | 64 | 260 | 334.6 | 1.60E−97 |
| 465 | PHE0006018_7098.pep | GTP_EFTU_D2 | 281 | 352 | 87 | 5.30E−23 |
| 465 | PHE0006018_7098.pep | GTP_EFTU_D3 | 357 | 451 | 186.5 | 5.80E−53 |
| 466 | PHE0006021_7077.pep | Bet_v_I | 1 | 155 | 11.1 | 6.70E−07 |
| 467 | PHE0006021_8737.pep | Bet_v_I | 1 | 155 | 11.1 | 6.70E−07 |
| 468 | PHE0006043_7080.pep | Glyco_transf_8 | 83 | 345 | 341.2 | 1.60E−99 |
| 469 | PHE0006043_8788.pep | Glyco_transf_8 | 83 | 345 | 341.2 | 1.60E−99 |
| 472 | PHE0006048_7094.pep | Pkinase | 135 | 389 | 219.6 | 6.60E−63 |
| 472 | PHE0006048_7094.pep | Pkinase_Tyr | 135 | 389 | 257.1 | 3.40E−74 |
| 473 | PHE0006048_8785.pep | Pkinase | 135 | 389 | 219.6 | 6.60E−63 |
| 473 | PHE0006048_8785.pep | Pkinase_Tyr | 135 | 389 | 257.1 | 3.40E−74 |
| 475 | PHE0006051_7097.pep | zf-MYND | 57 | 94 | 50.2 | 6.20E−12 |
| 475 | PHE0006051_7097.pep | UCH | 326 | 630 | 176.1 | 8.20E−50 |
| 476 | PHE0006054_7095.pep | AIG1 | 39 | 236 | 212.9 | 6.60E−61 |
| 476 | PHE0006054_7095.pep | MMR_HSR1 | 39 | 154 | 31.5 | 1.20E−06 |
| 477 | PHE0006054_8779.pep | AIG1 | 39 | 236 | 212.9 | 6.60E−61 |
| 477 | PHE0006054_8779.pep | MMR_HSR1 | 39 | 154 | 31.5 | 1.20E−06 |
| 478 | PHE0006059_7042.pep | DnaJ | 4 | 67 | 144.7 | 2.20E−40 |
| 478 | PHE0006059_7042.pep | DnaJ_C | 222 | 344 | 47 | 5.90E−11 |
| 479 | PHE0006061_7051.pep | Metallophos | 2 | 120 | 28.2 | 2.60E−05 |
| 481 | PHE0006063_7049.pep | Transket_pyr | 76 | 252 | 249.7 | 5.40E−72 |
| 481 | PHE0006063_7049.pep | Transketolase_C | 265 | 387 | 161.6 | 1.80E−45 |
| 482 | PHE0006068_7064.pep | Pkinase_Tyr | 1 | 222 | 68.5 | 7.00E−20 |
| 482 | PHE0006068_7064.pep | Pkinase | 2 | 222 | 219.7 | 5.90E−63 |
| 483 | PHE0006069_7065.pep | Cupin_3 | 62 | 137 | 130 | 6.10E−36 |
| 484 | PHE0006071_7068.pep | PPR | 30 | 63 | 4.4 | 2.1 |
| 484 | PHE0006071_7068.pep | PPR | 64 | 98 | 19.6 | 0.011 |
| 484 | PHE0006071_7068.pep | PPR | 99 | 132 | 18.3 | 0.025 |
| 484 | PHE0006071_7068.pep | PPR | 138 | 172 | 29.2 | 1.40E−05 |
| 484 | PHE0006071_7068.pep | PPR | 173 | 207 | 39.2 | 1.30E−08 |
| 489 | PHE0006077_7045.pep | GASA | 5 | 106 | 226.6 | 5.10E−65 |
| 490 | PHE0006077_7343.pep | GASA | 5 | 106 | 226.6 | 5.10E−65 |
| 491 | PHE0006079_7044.pep | S6PP | 8 | 262 | 519.2 | 4.00E−153 |
| 491 | PHE0006079_7044.pep | Hydrolase_3 | 12 | 257 | −20.6 | 5.00E−06 |
| 491 | PHE0006079_7044.pep | S6PP_C | 263 | 395 | 320.8 | 2.20E−93 |
| 492 | PHE0006079_7337.pep | S6PP | 8 | 262 | 519.2 | 4.00E−153 |
| 492 | PHE0006079_7337.pep | Hydrolase_3 | 12 | 257 | −20.6 | 5.00E−06 |
| 492 | PHE0006079_7337.pep | S6PP_C | 263 | 395 | 320.8 | 2.20E−93 |
| 493 | PHE0006082_7330.pep | TPR_1 | 2 | 35 | 28.1 | 2.80E−05 |
| 493 | PHE0006082_7330.pep | TPR_2 | 2 | 35 | 27.1 | 5.70E−05 |
| 493 | PHE0006082_7330.pep | TPR_2 | 36 | 69 | 22.3 | 0.0016 |
| 493 | PHE0006082_7330.pep | TPR_1 | 36 | 69 | 15.7 | 0.066 |
| 493 | PHE0006082_7330.pep | TPR_1 | 70 | 103 | 40.8 | 4.40E−09 |
| 493 | PHE0006082_7330.pep | TPR_2 | 70 | 103 | 32.2 | 1.70E−06 |
| 493 | PHE0006082_7330.pep | TPR_1 | 255 | 290 | 25.7 | 0.00015 |
| 493 | PHE0006082_7330.pep | TPR_2 | 257 | 290 | 26 | 0.00013 |
| 493 | PHE0006082_7330.pep | TPR_1 | 291 | 324 | 30.4 | 5.90E−06 |
| 493 | PHE0006082_7330.pep | TPR_2 | 291 | 324 | 21.2 | 0.0034 |
| 493 | PHE0006082_7330.pep | TPR_1 | 332 | 369 | 19.6 | 0.01 |
| 493 | PHE0006082_7330.pep | TPR_1 | 396 | 429 | 26.1 | 0.00012 |
| 493 | PHE0006082_7330.pep | TPR_2 | 396 | 429 | 20.9 | 0.0042 |
| 493 | PHE0006082_7330.pep | TPR_1 | 430 | 463 | 35.5 | 1.70E−07 |
| 493 | PHE0006082_7330.pep | TPR_2 | 430 | 463 | 23.6 | 0.00062 |
| 493 | PHE0006082_7330.pep | TPR_3 | 461 | 497 | 16.6 | 0.066 |
| 493 | PHE0006082_7330.pep | TPR_1 | 464 | 497 | 33.3 | 7.70E−07 |
| 493 | PHE0006082_7330.pep | TPR_2 | 464 | 497 | 24.5 | 0.00034 |
| 494 | PHE0006088_7063.pep | CoA_binding | 634 | 743 | 52.5 | 1.30E−12 |
| 494 | PHE0006088_7063.pep | Ligase_CoA | 784 | 929 | 149.1 | 1.10E−41 |
| 495 | PHE0006089_7061.pep | Brix | 60 | 255 | 136.1 | 8.50E−38 |
| 496 | PHE0006089_7334.pep | Brix | 60 | 255 | 136.1 | 8.50E−38 |
| 497 | PHE0006091_7074.pep | TFIIS_M | 206 | 327 | 203.5 | 4.50E−58 |
| 497 | PHE0006091_7074.pep | TFIIS_C | 338 | 376 | 83.3 | 7.00E−22 |
| 498 | PHE0006091_7341.pep | TFIIS_M | 206 | 327 | 203.5 | 4.50E−58 |
| 498 | PHE0006091_7341.pep | TFIIS_C | 338 | 376 | 83.3 | 7.00E−22 |
| 499 | PHE0006092_7062.pep | RRM_1 | 65 | 132 | 43 | 9.10E−10 |
| 499 | PHE0006092_7062.pep | RRM_1 | 150 | 225 | 83.8 | 4.80E−22 |
| 499 | PHE0006092_7062.pep | RRM_1 | 275 | 343 | 53.1 | 8.60E−13 |
| 500 | PHE0006092_7336.pep | RRM_1 | 65 | 132 | 43 | 9.10E−10 |
| 500 | PHE0006092_7336.pep | RRM_1 | 150 | 225 | 83.8 | 4.80E−22 |
| 500 | PHE0006092_7336.pep | RRM_1 | 275 | 343 | 53.1 | 8.60E−13 |
| 501 | PHE0006093_7066.pep | PTS_2-RNA | 48 | 239 | 409.9 | 3.30E−120 |
| 502 | PHE0006093_7327.pep | PTS_2-RNA | 48 | 239 | 409.9 | 3.30E−120 |
| 503 | PHE0006094_7231.pep | Chalcone | 14 | 225 | 498.4 | 7.50E−147 |
| 504 | PHE0006094_7333.pep | Chalcone | 14 | 225 | 498.4 | 7.50E−147 |
| 505 | PHE0006154_7204.pep | PfkB | 7 | 299 | 260.8 | 2.50E−75 |
| 506 | PHE0006160_7265.pep | PFK | 3 | 309 | −70.5 | 1.40E−08 |
| 507 | PHE0006160_7286.pep | PFK | 3 | 309 | −70.5 | 1.40E−08 |
| 508 | PHE0006160_8851.pep | PFK | 3 | 309 | −70.5 | 1.40E−08 |
| 509 | PHE0006161_7215.pep | PFK | 195 | 506 | 618.8 | 4.20E−183 |
| 509 | PHE0006161_7215.pep | PFK | 585 | 877 | 69.6 | 9.40E−18 |
| 510 | PHE0006161_7221.pep | PFK | 195 | 506 | 621.1 | 8.90E−184 |
| 510 | PHE0006161_7221.pep | PFK | 585 | 877 | 69.6 | 9.40E−18 |
| 511 | PHE0006173_7211.pep | Ribosomal_S6e | 1 | 129 | 266.2 | 6.00E−77 |
| 512 | PHE0006174_7208.pep | RRM_1 | 170 | 241 | 103.1 | 7.30E−28 |
| 512 | PHE0006174_7208.pep | RRM_1 | 269 | 340 | 101.6 | 2.10E−27 |
| 513 | PHE0006175_7210.pep | KOW | 27 | 63 | 31.3 | 3.10E−06 |
| 513 | PHE0006175_7210.pep | eIF-5a | 85 | 154 | 122.5 | 1.10E−33 |
| 515 | PHE0006178_7139.pep | eIF-5a | 82 | 149 | 97.8 | 3.00E−26 |
| 516 | PHE0006178_8626.pep | eIF-5a | 82 | 149 | 97.8 | 3.00E−26 |
| 517 | PHE0006184_7245.pep | DUF125 | 34 | 247 | 255.9 | 7.60E−74 |
| 518 | PHE0006201_7184.pep | ketoacyl-synt | 47 | 309 | 215.6 | 1.00E−61 |
| 518 | PHE0006201_7184.pep | Ketoacyl-synt_C | 317 | 477 | 227.3 | 3.00E−65 |
| 519 | PHE0006201_7187.pep | ketoacyl-synt | 47 | 309 | 215.6 | 1.00E−61 |
| 519 | PHE0006201_7187.pep | Ketoacyl-synt_C | 317 | 477 | 227.3 | 3.00E−65 |
| 520 | PHE0006202_7182.pep | HMGL-like | 97 | 374 | 377.5 | 1.90E−110 |
| 520 | PHE0006202_7182.pep | LeuA_dimer | 467 | 612 | 180.7 | 3.20E−51 |
| 521 | PHE0006204_7183.pep | Cyclin_N | 18 | 151 | 53.6 | 6.20E−13 |
| 521 | PHE0006204_7183.pep | Cyclin_C | 153 | 284 | 17.1 | 0.00056 |
| 522 | PHE0006204_7189.pep | Cyclin_N | 18 | 151 | 53.6 | 6.20E−13 |
| 522 | PHE0006204_7189.pep | Cyclin_C | 153 | 284 | 17.1 | 0.00056 |
| 523 | PHE0006204_8634.pep | Cyclin_N | 18 | 151 | 53.6 | 6.20E−13 |
| 523 | PHE0006204_8634.pep | Cyclin_C | 153 | 284 | 17.1 | 0.00056 |
| 524 | PHE0006208_7223.pep | CH | 19 | 120 | 54.8 | 2.50E−13 |
| 524 | PHE0006208_7223.pep | EB1 | 204 | 251 | 79.3 | 1.10E−20 |
| 525 | PHE0006209_7991.pep | HMGL-like | 28 | 305 | 371.7 | 1.00E−108 |
| 525 | PHE0006209_7991.pep | LeuA_dimer | 398 | 542 | 165.2 | 1.50E−46 |
| 526 | PHE0006212_7196.pep | Heme_oxygenase | 74 | 278 | −13.8 | 4.40E−06 |
| 527 | PHE0006213_7198.pep | Peptidase_C54 | 142 | 436 | 555.2 | 6.10E−164 |
| 528 | PHE0006214_7213.pep | Cyclin_N | 32 | 158 | 43.2 | 7.80E−10 |
| 528 | PHE0006214_7213.pep | Cyclin_C | 160 | 289 | −2.8 | 0.029 |
| 529 | PHE0006214_7219.pep | Cyclin_N | 32 | 158 | 43.2 | 7.80E−10 |
| 529 | PHE0006214_7219.pep | Cyclin_C | 160 | 289 | −2.8 | 0.029 |
| 530 | PHE0006215_7280.pep | PFK | 2 | 277 | 650.2 | 1.50E−192 |
| 531 | PHE0006221_7201.pep | Pyr_redox_2 | 44 | 329 | 169.5 | 7.60E−48 |
| 531 | PHE0006221_7201.pep | Pyr_redox | 190 | 284 | 94.9 | 2.20E−25 |
| 531 | PHE0006221_7201.pep | Thioredoxin | 384 | 487 | 22.9 | 2.10E−06 |
| 531 | PHE0006221_7201.pep | Glutaredoxin | 405 | 467 | 35 | 2.40E−07 |
| 532 | PHE0006221_7241.pep | Pyr_redox_2 | 44 | 329 | 169.5 | 7.60E−48 |
| 532 | PHE0006221_7241.pep | Pyr_redox | 190 | 284 | 94.9 | 2.20E−25 |
| 532 | PHE0006221_7241.pep | Thioredoxin | 384 | 487 | 22.9 | 2.10E−06 |
| 532 | PHE0006221_7241.pep | Glutaredoxin | 405 | 467 | 35 | 2.40E−07 |
| 533 | PHE0006221_7937.pep | Pyr_redox_2 | 44 | 329 | 169.5 | 7.60E−48 |
| 533 | PHE0006221_7937.pep | Pyr_redox | 190 | 284 | 94.9 | 2.20E−25 |
| 533 | PHE0006221_7937.pep | Thioredoxin | 384 | 487 | 22.9 | 2.10E−06 |
| 533 | PHE0006221_7937.pep | Glutaredoxin | 405 | 467 | 35 | 2.40E−07 |
| 534 | PHE0006227_7282.pep | NB-ARC | 152 | 421 | 72.5 | 1.20E−18 |
| 534 | PHE0006227_7282.pep | LRR_1 | 652 | 674 | 9.6 | 4.2 |
| 534 | PHE0006227_7282.pep | LRR_1 | 676 | 698 | 8.1 | 7.8 |
| 534 | PHE0006227_7282.pep | LRR_1 | 700 | 722 | 10.3 | 3 |
| 535 | PHE0006232_7454.pep | B_lectin | 74 | 187 | 129.9 | 6.60E−36 |
| 535 | PHE0006232_7454.pep | S_locus_glycop | 201 | 327 | 180.6 | 3.60E−51 |
| 535 | PHE0006232_7454.pep | PAN_2 | 344 | 411 | 108.4 | 2.00E−29 |
| 535 | PHE0006232_7454.pep | Pkinase | 552 | 823 | 142.3 | 1.20E−39 |
| 535 | PHE0006232_7454.pep | Pkinase_Tyr | 552 | 824 | 143.8 | 4.30E−40 |
| 536 | PHE0006232_8756.pep | B_lectin | 74 | 187 | 129.9 | 6.60E−36 |
| 536 | PHE0006232_8756.pep | S_locus_glycop | 201 | 327 | 180.6 | 3.60E−51 |
| 536 | PHE0006232_8756.pep | PAN_2 | 344 | 411 | 108.4 | 2.00E−29 |
| 536 | PHE0006232_8756.pep | Pkinase_Tyr | 552 | 824 | 143.8 | 4.30E−40 |
| 536 | PHE0006232_8756.pep | Pkinase | 552 | 823 | 142.3 | 1.20E−39 |
| 537 | PHE0006233_7220.pep | Mg_chelatase | 87 | 295 | −123 | 0.00014 |
| 538 | PHE0006234_7281.pep | Mg_chelatase | 85 | 295 | −105.3 | 5.10E−06 |
| 538 | PHE0006234_7281.pep | VWA | 559 | 754 | −2.7 | 0.0079 |
| 539 | PHE0006254_7312.pep | X8 | 29 | 115 | 168.4 | 1.70E−47 |
| 540 | PHE0006263_7271.pep | DAGAT | 48 | 324 | 279.6 | 5.70E−81 |
| 541 | PHE0006264_7285.pep | DAGAT | 48 | 349 | 391.3 | 1.30E−114 |
| 542 | PHE0006265_7990.pep | Heme_oxygenase | 88 | 279 | −46.8 | 0.00098 |
| 543 | PHE0006281_7526.pep | GAF | 158 | 307 | 83.2 | 7.40E−22 |
| 543 | PHE0006281_7526.pep | HisKA | 343 | 408 | 84.2 | 3.60E−22 |
| 543 | PHE0006281_7526.pep | HATPase_c | 455 | 582 | 126.8 | 5.50E−35 |
| 543 | PHE0006281_7526.pep | Response_reg | 610 | 726 | 51.5 | 2.60E−12 |
| 548 | PHE0006296_7515.pep | Glyco_transf_43 | 89 | 312 | 227.4 | 2.90E−65 |
| 549 | PHE0006309_7570.pep | Glyoxalase | 2 | 123 | 153.5 | 4.90E−43 |
| 550 | PHE0006309_8148.pep | Glyoxalase | 2 | 123 | 153.5 | 4.90E−43 |
| 551 | PHE0006309_8620.pep | Glyoxalase | 2 | 123 | 153.5 | 4.90E−43 |
| 552 | PHE0006310_7574.pep | Pkinase | 13 | 304 | 294.9 | 1.40E−85 |
| 554 | PHE0006312_7579.pep | UPF0113 | 1 | 175 | 14.8 | 1.10E−06 |
| 555 | PHE0006312_8644.pep | UPF0113 | 1 | 175 | 14.8 | 1.10E−06 |
| 556 | PHE0006342_8182.pep | Hydrolase | 12 | 200 | 106.3 | 8.10E−29 |
| 557 | PHE0006344_8188.pep | VQ | 44 | 74 | 46 | 1.10E−10 |
| 559 | PHE0006348_8203.pep | UAA | 97 | 388 | −141.8 | 0.0019 |
| 559 | PHE0006348_8203.pep | DUF6 | 106 | 231 | 27.4 | 4.60E−05 |
| 559 | PHE0006348_8203.pep | TPT | 240 | 385 | 193.4 | 5.10E−55 |
| 564 | PHE0006356_8103.pep | F-box | 42 | 89 | 41.3 | 3.00E−09 |
| 564 | PHE0006356_8103.pep | Kelch_1 | 180 | 225 | 43.1 | 8.70E−10 |
| 564 | PHE0006356_8103.pep | Kelch_2 | 180 | 225 | 22.6 | 0.0012 |
| 564 | PHE0006356_8103.pep | Kelch_1 | 227 | 282 | 21.5 | 0.0027 |
| 565 | PHE0006377_7592.pep | RNase_PH | 48 | 244 | 131.7 | 1.80E−36 |
| 565 | PHE0006377_7592.pep | RNase_PH_C | 322 | 384 | 36.2 | 1.00E−07 |
| 566 | PHE0006377_8683.pep | RNase_PH | 48 | 244 | 131.7 | 1.80E−36 |
| 566 | PHE0006377_8683.pep | RNase_PH_C | 322 | 384 | 36.2 | 1.00E−07 |
| 569 | PHE0006380_7658.pep | RNase_PH | 1 | 126 | 104.2 | 3.60E−28 |
| 569 | PHE0006380_7658.pep | RNase_PH_C | 129 | 201 | 61.5 | 2.40E−15 |
| 570 | PHE0006380_8719.pep | RNase_PH | 1 | 126 | 104.2 | 3.60E−28 |
| 570 | PHE0006380_8719.pep | RNase_PH_C | 129 | 201 | 61.5 | 2.40E−15 |
| 571 | PHE0006381_7655.pep | RNase_PH | 42 | 186 | 112.2 | 1.40E−30 |
| 572 | PHE0006381_8695.pep | RNase_PH | 42 | 186 | 112.2 | 1.40E−30 |
| 573 | PHE0006382_7652.pep | WD40 | 282 | 319 | 33.7 | 5.70E−07 |
| 574 | PHE0006382_8678.pep | WD40 | 282 | 319 | 33.7 | 5.70E−07 |
| 575 | PHE0006425_7646.pep | AA_permease | 36 | 537 | 76.4 | 8.40E−20 |
| 576 | PHE0006426_8056.pep | AA_permease | 2 | 454 | −41.6 | 2.20E−05 |
| 577 | PHE0006428_7651.pep | Globin | 21 | 161 | 110.6 | 4.10E−30 |
| 578 | PHE0006429_7671.pep | Globin | 18 | 158 | 110.2 | 5.60E−30 |
| 579 | PHE0006433_8307.pep | PseudoU_synth_2 | 105 | 284 | 150.2 | 5.00E−42 |
| 580 | PHE0006439_8108.pep | RRM_1 | 23 | 94 | 105.3 | 1.70E−28 |
| 581 | PHE0006449_7865.pep | Biotin_lipoyl | 92 | 165 | 76.9 | 6.00E−20 |
| 581 | PHE0006449_7865.pep | E3_binding | 229 | 265 | 50.4 | 5.70E−12 |
| 581 | PHE0006449_7865.pep | 2-oxoacid_dh | 281 | 512 | 373.8 | 2.40E−109 |
| 582 | PHE0006449_8165.pep | Biotin_lipoyl | 92 | 165 | 76.9 | 6.00E−20 |
| 582 | PHE0006449_8165.pep | E3_binding | 229 | 265 | 50.4 | 5.70E−12 |
| 582 | PHE0006449_8165.pep | 2-oxoacid_dh | 281 | 512 | 373.8 | 2.40E−109 |
| 583 | PHE0006450_7624.pep | Tubulin | 57 | 250 | 351.6 | 1.20E−102 |
| 583 | PHE0006450_7624.pep | Tubulin_C | 252 | 369 | 102.7 | 9.80E−28 |
| 584 | PHE0006464_8089.pep | DREPP | 2 | 203 | 280.3 | 3.30E−81 |
| 585 | PHE0006468_7903.pep | F-box | 2 | 49 | 42.7 | 1.20E−09 |
| 585 | PHE0006468_7903.pep | FBA_1 | 209 | 387 | 311.9 | 1.00E−90 |
| 586 | PHE0006477_7809.pep | PsbR | 42 | 140 | 242.1 | 1.10E−69 |
| 587 | PHE0006478_8190.pep | Methyltransf_6 | 4 | 161 | 171.6 | 1.70E−48 |
| 588 | PHE0006497_8355.pep | DUF868 | 28 | 304 | 175.5 | 1.20E−49 |
| 589 | PHE0006498_7795.pep | Pyridoxal_deC | 34 | 381 | 515 | 7.40E−152 |
| 590 | PHE0006498_7796.pep | Pyridoxal_deC | 34 | 381 | 515 | 7.40E−152 |
| 591 | PHE0006505_7871.pep | Thioredoxin | 69 | 174 | 120.9 | 3.30E−33 |
| 592 | PHE0006506_7818.pep | Pkinase_Tyr | 20 | 270 | 87.1 | 4.90E−23 |
| 592 | PHE0006506_7818.pep | Pkinase | 20 | 272 | 381.9 | 9.00E−112 |
| 592 | PHE0006506_7818.pep | UBA | 294 | 333 | 35.7 | 1.50E−07 |
| 592 | PHE0006506_7818.pep | KA1 | 463 | 511 | 95.6 | 1.40E−25 |
| 593 | PHE0006514_7926.pep | ELFV_dehydrog_N | 57 | 187 | 298.9 | 8.40E−87 |
| 593 | PHE0006514_7926.pep | ELFV_dehydrog | 202 | 447 | 469.7 | 3.30E−138 |
| 594 | PHE0006516_7866.pep | CorA | 90 | 474 | 403.1 | 3.80E−118 |
| 595 | PHE0006516_7882.pep | CorA | 90 | 474 | 403.1 | 3.80E−118 |
| 596 | PHE0006516_7887.pep | CorA | 90 | 474 | 403.1 | 3.80E−118 |
| 597 | PHE0006516_8363.pep | CorA | 90 | 474 | 403.1 | 3.80E−118 |
| 598 | PHE0006517_7858.pep | CorA | 81 | 456 | 344 | 2.30E−100 |
| 599 | PHE0006517_7879.pep | CorA | 81 | 456 | 344 | 2.30E−100 |
| 600 | PHE0006517_7897.pep | CorA | 81 | 456 | 344 | 2.30E−100 |
| 601 | PHE0006521_7840.pep | S6PP | 2 | 247 | 493.5 | 2.30E−145 |
| 601 | PHE0006521_7840.pep | Hydrolase_3 | 6 | 242 | −20.7 | 5.00E−06 |
| 602 | PHE0006545_8320.pep | DnaJ | 31 | 93 | 128.9 | 1.30E−35 |
| 603 | PHE0006549_8255.pep | THF_DHG_CYH | 3 | 120 | 222.5 | 8.50E−64 |
| 603 | PHE0006549_8255.pep | THF_DHG_CYH_C | 123 | 290 | 366.5 | 3.90E−107 |
| 604 | PHE0006555_8283.pep | Gp_dh_N | 83 | 236 | 280.2 | 3.80E−81 |
| 604 | PHE0006555_8283.pep | Gp_dh_C | 241 | 398 | 333 | 4.80E−97 |
| 605 | PHE0006559_8227.pep | PEPcase | 1 | 948 | 2506 | 0 |
| 606 | PHE0006564_8298.pep | GATase_2 | 2 | 161 | 98.9 | 1.40E−26 |
| 606 | PHE0006564_8298.pep | Asn_synthase | 209 | 450 | 340.2 | 3.20E−99 |
| 607 | PHE0006565_8300.pep | GATase_2 | 2 | 161 | 102.1 | 1.50E−27 |
| 607 | PHE0006565_8300.pep | Asn_synthase | 209 | 450 | 325.3 | 9.70E−95 |
| 608 | PHE0006571_8279.pep | Pkinase | 15 | 273 | 308.5 | 1.10E−89 |
| 609 | PHE0006574_8224.pep | Glyoxalase | 11 | 150 | 144.4 | 2.80E−40 |
| 609 | PHE0006574_8224.pep | Glyoxalase | 166 | 298 | 109.9 | 6.70E−30 |
| 610 | PHE0006586_8271.pep | Frataxin_Cyay | 76 | 187 | 128.3 | 2.00E−35 |
| 611 | PHE0006587_8277.pep | CP12 | 60 | 131 | 155.6 | 1.20E−43 |
| 612 | PHE0006590_8258.pep | Thioredoxin | 75 | 178 | 170.4 | 4.10E−48 |
| 613 | PHE0006591_8264.pep | Thioredoxin | 81 | 184 | 162.9 | 7.80E−46 |
| 614 | PHE0006592_8278.pep | Thioredoxin | 87 | 190 | 157.4 | 3.50E−44 |
| 617 | PHE0006595_8250.pep | DUF537 | 18 | 156 | 206.9 | 4.30E−59 |
| 618 | PHE0006595_8265.pep | DUF537 | 18 | 156 | 206.9 | 4.30E−59 |
| 619 | PHE0006596_8236.pep | CTP_transf_2 | 19 | 159 | 48.1 | 2.80E−11 |
| 620 | PHE0006596_8257.pep | CTP_transf_2 | 19 | 159 | 48.1 | 2.80E−11 |
| 621 | PHE0006597_8242.pep | Pkinase | 143 | 409 | 98.7 | 1.60E−26 |
| 621 | PHE0006597_8242.pep | Pkinase_Tyr | 143 | 409 | 97.2 | 4.50E−26 |
| 622 | PHE0006598_8240.pep | Di19 | 11 | 219 | 487.1 | 1.90E−143 |
| 623 | PHE0006598_8268.pep | Di19 | 11 | 219 | 487.1 | 1.90E−143 |
| 624 | PHE0006599_8230.pep | ZF-HD_dimer | 34 | 93 | 141.6 | 2.00E−39 |
| 625 | PHE0006599_8262.pep | ZF-HD_dimer | 34 | 93 | 141.6 | 2.00E−39 |
| 626 | PHE0006600_8249.pep | Iso_dh | 6 | 355 | 346.2 | 4.90E−101 |
| 627 | PHE0006607_8231.pep | SRF-TF | 11 | 66 | 24.4 | 0.00036 |
| 628 | PHE0006609_8234.pep | GSHPx | 12 | 120 | 221.4 | 1.80E−63 |
| 629 | PHE0006610_8239.pep | GSHPx | 77 | 185 | 234.2 | 2.60E−67 |
| 630 | PHE0006613_8238.pep | GSHPx | 12 | 120 | 200.6 | 3.30E−57 |
| 631 | PHE0006617_8463.pep | Cupin_1 | 65 | 215 | 171.2 | 2.40E−48 |
| 631 | PHE0006617_8463.pep | Cupin_2 | 100 | 177 | 26.7 | 7.30E−05 |
| 632 | PHE0006620_8462.pep | Epimerase | 13 | 259 | 78.2 | 2.40E−20 |
| 632 | PHE0006620_8462.pep | NmrA | 13 | 313 | −88.1 | 0.004 |
| 632 | PHE0006620_8462.pep | 3Beta_HSD | 14 | 287 | −65.2 | 3.00E−08 |
| 632 | PHE0006620_8462.pep | NAD_binding_4 | 15 | 243 | −13.5 | 8.50E−08 |
| 633 | PHE0006648_8356.pep | Tryp_alpha_amyl | 36 | 114 | 56 | 1.20E−13 |
| 634 | PHE0006666_8414.pep | Glycolytic | 43 | 387 | 859 | 2.20E−255 |
| 635 | PHE0006669_8357.pep | PFK | 271 | 582 | 621.1 | 8.90E−184 |
| 635 | PHE0006669_8357.pep | PFK | 661 | 953 | 69.6 | 9.40E−18 |
| 636 | PHE0006670_8346.pep | PfkB | 83 | 375 | 260.8 | 2.50E−75 |
| 637 | PHE0006673_8992.pep | PTR2 | 123 | 530 | 305.8 | 7.40E−89 |
| 638 | PHE0006676_8410.pep | Transket_pyr | 39 | 215 | 267.6 | 2.30E−77 |
| 638 | PHE0006676_8410.pep | Transketolase_C | 232 | 354 | 203.9 | 3.50E−58 |
| 639 | PHE0006684_8413.pep | Ribosomal_L10 | 19 | 123 | 4.8 | 0.0008 |
| 641 | PHE0006686_8416.pep | Ribosomal_L22 | 17 | 153 | 267.2 | 3.00E−77 |
| 642 | PHE0006687_8471.pep | Ribosomal_L32e | 14 | 123 | 200.6 | 3.30E−57 |
| 643 | PHE0006706_8434.pep | DEAD | 46 | 212 | 190.3 | 4.20E−54 |
| 643 | PHE0006706_8434.pep | Helicase_C | 280 | 356 | 128.7 | 1.50E−35 |
| 644 | PHE0006709_8432.pep | MtN3_slv | 9 | 98 | 96.7 | 6.30E−26 |
| 644 | PHE0006709_8432.pep | MtN3_slv | 132 | 218 | 116.8 | 5.80E−32 |
| 645 | PHE0006715_8477.pep | AMPKBI | 197 | 287 | 161.8 | 1.60E−45 |
| 646 | PHE0006716_8482.pep | NOI | 1 | 72 | 159.7 | 7.10E−45 |
| 647 | PHE0006727_8435.pep | ETC_C1_NDUFA4 | 54 | 156 | 168.1 | 2.00E−47 |
| 648 | PHE0006727_8595.pep | ETC_C1_NDUFA4 | 54 | 156 | 168.1 | 2.00E−47 |
| 649 | PHE0006728_8430.pep | RRM_1 | 111 | 190 | 32.8 | 1.10E−06 |
| 650 | PHE0006729_8433.pep | DnaJ | 12 | 81 | 66.1 | 1.00E−16 |
| 650 | PHE0006729_8433.pep | zf-CSL | 96 | 174 | 25.2 | 0.00021 |
| 651 | PHE0006730_8428.pep | Lung_7-TM_R | 168 | 423 | 385.2 | 8.80E−113 |
| 652 | PHE0006737_8455.pep | 2OG-Fell_Oxy | 217 | 317 | 139.1 | 1.10E−38 |
| 653 | PHE0006737_8527.pep | 2OG-Fell_Oxy | 217 | 317 | 139.1 | 1.10E−38 |
| 656 | PHE0006741_8448.pep | MATH | 53 | 182 | 61.8 | 2.10E−15 |
| 656 | PHE0006741_8448.pep | BTB | 206 | 328 | 86.7 | 6.70E−23 |
| 657 | PHE0006741_8589.pep | MATH | 53 | 182 | 61.8 | 2.10E−15 |
| 657 | PHE0006741_8589.pep | BTB | 206 | 328 | 86.7 | 6.70E−23 |
| 658 | PHE0006742_8440.pep | PGI | 55 | 545 | 770.4 | 1.00E−228 |
| 659 | PHE0006742_8591.pep | PGI | 55 | 545 | 770.4 | 1.00E−228 |
| 660 | PHE0006744_8449.pep | adh_short | 37 | 225 | 8.4 | 1.00E−06 |
| 661 | PHE0006745_8590.pep | V-SNARE | 71 | 221 | 154.6 | 2.40E−43 |
| 662 | PHE0006746_8453.pep | Sugar_tr | 33 | 464 | 275.2 | 1.10E−79 |
| 662 | PHE0006746_8453.pep | MFS_1 | 38 | 424 | 80 | 6.90E−21 |
| 663 | PHE0006750_8523.pep | zf-C3HC4 | 52 | 89 | 35.8 | 1.40E−07 |
| 663 | PHE0006750_8523.pep | WD40 | 454 | 492 | 34 | 4.90E−07 |
| 663 | PHE0006750_8523.pep | WD40 | 496 | 534 | 22.1 | 0.0018 |
| 663 | PHE0006750_8523.pep | WD40 | 540 | 576 | 38.3 | 2.50E−08 |
| 664 | PHE0006757_8530.pep | Acyltransferase | 375 | 496 | 38.8 | 1.70E−08 |
| 665 | PHE0006760_8529.pep | vATP-synt_E | 16 | 225 | 389.4 | 4.90E−114 |
| 666 | PHE0006765_8536.pep | Bromodomain | 110 | 199 | 136.3 | 7.50E−38 |
| 667 | PHE0006766_8867.pep | IPT | 1 | 235 | 515.1 | 6.90E−152 |
| 668 | PHE0006769_8865.pep | TPP_enzyme_N | 3 | 172 | 280.5 | 2.90E−81 |
| 668 | PHE0006769_8865.pep | TPP_enzyme_M | 190 | 336 | 193 | 6.40E−55 |
| 668 | PHE0006769_8865.pep | TPP_enzyme_C | 379 | 525 | 201.8 | 1.50E−57 |
| 669 | PHE0006770_8553.pep | DEAD | 58 | 224 | 201.3 | 2.10E−57 |
| 669 | PHE0006770_8553.pep | Helicase_C | 292 | 368 | 128.3 | 2.00E−35 |
| 670 | PHE0006770_8568.pep | DEAD | 58 | 224 | 201.3 | 2.10E−57 |
| 670 | PHE0006770_8568.pep | Helicase_C | 292 | 368 | 128.3 | 2.00E−35 |
| 671 | PHE0006771_8551.pep | FAE1_CUT1_RppA | 52 | 341 | 682.1 | 3.70E−202 |
| 671 | PHE0006771_8551.pep | Chal_sti_synt_C | 298 | 441 | 13.6 | 0.00012 |
| 671 | PHE0006771_8551.pep | ACP_syn_III_C | 356 | 439 | 6 | 3.10E−06 |
| 672 | PHE0006775_8548.pep | Miro | 9 | 128 | 68.3 | 2.20E−17 |
| 672 | PHE0006775_8548.pep | Ras | 10 | 178 | 279.3 | 7.00E−81 |
| 673 | PHE0006775_8555.pep | Miro | 9 | 128 | 68.3 | 2.20E−17 |
| 673 | PHE0006775_8555.pep | Ras | 10 | 178 | 279.3 | 7.00E−81 |
| 674 | PHE0006788_8581.pep | Tryp_alpha_amyl | 27 | 110 | 118.8 | 1.50E−32 |
| 675 | PHE0006793_8580.pep | p450 | 27 | 508 | 156.6 | 5.80E−44 |
| 676 | PHE0006794_8578.pep | SSB | 71 | 182 | 121.5 | 2.20E−33 |
| 677 | PHE0006805_8531.pep | Ribosomal_S30AE | 2 | 95 | 173.7 | 4.20E−49 |
| 678 | PHE0006811_8506.pep | Bac_globin | 3 | 122 | 108.1 | 2.30E−29 |
| 681 | PHE0006847_8860.pep | DHBP_synthase | 8 | 203 | 370.6 | 2.20E−108 |
| 681 | PHE0006847_8860.pep | GTP_cyclohydro2 | 208 | 366 | −2.3 | 3.80E−10 |
| 682 | PHE0006870_8846.pep | Ribosomal_L37ae | 2 | 91 | 220.3 | 3.90E−63 |
| 684 | PHE0006909_9003.pep | Cupin_3 | 62 | 137 | 130 | 6.10E−36 |
| 685 | PHE0006910_9019.pep | Mov34 | 92 | 201 | 58 | 2.80E−14 |
| 686 | PHE0006912_9000.pep | ECH | 57 | 226 | 208.9 | 1.10E−59 |
| 687 | PHE0006919_9008.pep | Peptidase_M16 | 80 | 226 | 191.7 | 1.70E−54 |
| 687 | PHE0006919_9008.pep | Peptidase_M16_C | 231 | 417 | 152.9 | 7.70E−43 |
| 688 | PHE0006929_9151.pep | zf-C3HC4 | 259 | 299 | 47.2 | 5.00E−11 |
| 689 | PHE0006929_9185.pep | zf-C3HC4 | 259 | 299 | 47.2 | 5.00E−11 |
| 690 | PHE0006931_9148.pep | GDC-P | 3 | 443 | 700.9 | 8.30E−208 |
| 691 | PHE0006931_9168.pep | GDC-P | 3 | 443 | 700.9 | 8.30E−208 |
| 692 | PHE0006932_9147.pep | DUF498 | 56 | 164 | 153.1 | 6.90E−43 |
| 693 | PHE0006932_9174.pep | DUF498 | 56 | 164 | 153.1 | 6.90E−43 |
| 694 | PHE0006933_9139.pep | adh_short | 30 | 212 | 5.7 | 1.50E−06 |
| 695 | PHE0006934_9145.pep | DNA_pol_E_B | 178 | 389 | 249.9 | 5.00E−72 |
| 696 | PHE0006937_9126.pep | DUF298 | 127 | 242 | 222.4 | 9.20E−64 |
| 697 | PHE0006938_9149.pep | F-box | 41 | 88 | 34.3 | 3.80E−07 |
| 698 | PHE0006940_9122.pep | Aldedh | 18 | 477 | 674.3 | 8.70E−200 |
| 700 | PHE0006943_9124.pep | Aa_trans | 29 | 428 | 516.5 | 2.80E−152 |
| 701 | PHE0006948_9125.pep | RRM_1 | 38 | 109 | 98.5 | 1.80E−26 |
| 702 | PHE0006948_9160.pep | RRM_1 | 38 | 109 | 98.5 | 1.80E−26 |
| 703 | PHE0006949_9133.pep | Aldedh | 19 | 478 | 778.3 | 4.10E−231 |
| 704 | PHE0006949_9179.pep | Aldedh | 19 | 478 | 778.3 | 4.10E−231 |
| 705 | PHE0006952_9233.pep | PGAM | 91 | 277 | 153.2 | 6.30E−43 |
| 706 | PHE0006953_9121.pep | Usp | 3 | 157 | 85.3 | 1.80E−22 |
| 709 | PHE0006962_9114.pep | Molybdop_Fe4S4 | 39 | 93 | 88.2 | 2.40E−23 |
| 709 | PHE0006962_9114.pep | Molybdopterin | 96 | 568 | 478.2 | 9.20E−141 |
| 709 | PHE0006962_9114.pep | Molydop_binding | 714 | 822 | 121.4 | 2.40E−33 |
| 710 | PHE0006963_9131.pep | Pyr_redox_2 | 5 | 287 | 191.2 | 2.30E−54 |
| 710 | PHE0006963_9131.pep | Pyr_redox | 147 | 242 | 100.4 | 4.80E−27 |
| 710 | PHE0006963_9131.pep | Fer2_BFD | 422 | 474 | 92.1 | 1.50E−24 |
| 710 | PHE0006963_9131.pep | NIR_SIR_ferr | 556 | 623 | 82 | 1.70E−21 |
| 710 | PHE0006963_9131.pep | NIR_SIR | 631 | 777 | 166.4 | 6.70E−47 |
| 711 | PHE0006965_9119.pep | tRNA-synt_2b | 67 | 243 | 57.5 | 3.90E−14 |
| 711 | PHE0006965_9119.pep | HGTP_anticodon | 312 | 409 | 100 | 6.40E−27 |
| 713 | PHE0006977_9163.pep | Ribul_P_3_epim | 7 | 207 | 332.8 | 5.30E−97 |

TABLE 16

| | accession | gathering | |
|---|---|---|---|
| Pfam domain name | number | cutoff | domain description |
| 2-Hacid_dh | PF00389.18 | 13.2 | D-isomer specific 2-hydroxyacid |
| | | | dehydrogenase, catalytic domain |
| 2-Hacid_dh_C | PF02826.6 | −75.7 | D-isomer specific 2-hydroxyacid |
| | | | dehydrogenase, NAD binding domain |
| 3Beta_HSD | PF01073.8 | −135.9 | 3-beta hydroxysteroid |
| | | | dehydrogenase/isomerase family |
| 3_5_exonuc | PF01612.10 | −32 | 3′-5′exonuclease |
| AAA | PF00004.17 | 10 | ATPase family associated with various |
| | | | cellular activities (AAA) |
| AA_kinase | PF00696.16 | −40 | Amino acid kinase family |
| AA_permease | PF00324.10 | −120.8 | Amino acid permease |
| ABC 1 | PF03109.6 | −27.6 | ABC1 family |
| ABC_tran | PF00005.14 | 8.6 | ABC transporter |
| ADH_N | PF08240.1 | −14.5 | Alcohol dehydrogenase GroES-like |
| | | | domain |
| ADH_zinc_N | PF00107.15 | 23.8 | Zinc-binding dehydrogenase |
| AMP-binding | PF00501.15 | 0 | AMP-binding enzyme |
| AMPKBI | PF04739.4 | 25 | 5′-AMP-activated protein kinase, beta |
| | | | subunit, complex-interacting region |
| AP2 | PF00847.9 | 0 | AP2 domain |
| APS_kinase | PF01583.9 | 25 | Adenylylsulphate kinase |
| ARID | PF01388.10 | −8 | ARID/BRIGHT DNA binding domain |
| AT_hook | PF02178.7 | 14.2 | AT hook motif |
| AUX_IAA | PF02309.6 | −83 | AUX/IAA family |
| Aa_trans | PF01490.7 | −128.4 | Transmembrane amino acid transporter |
| | | | protein |
| Abhydrolase_1 | PF00561.9 | 5.5 | alpha/beta hydrolase fold |
| Acetyltransf_1 | PF00583.12 | 18.6 | Acetyltransferase (GNAT) family |
| Acyltransferase | PF01553.10 | 6 | Acyltransferase |
| Aldedh | PF00171.11 | −295 | Aldehyde dehydrogenase family |
| Aldo_ket_red | PF00248.10 | −97 | Aldo/keto reductase family |
| Alpha-amylase | PF00128.11 | −93 | Alpha amylase, catalytic domain |
| Alpha_adaptinC2 | PF02883.9 | −12 | Adaptin C-terminal domain |
| Aminotran_1_2 | PF00155.9 | −57.5 | Aminotransferase class I and II |
| Aminotran_3 | PF00202.10 | −207.6 | Aminotransferase class-III |
| Aminotran_5 | PF00266.8 | −92.9 | Aminotransferase class-V |
| Ammonium_transp | PF00909.10 | −144 | Ammonium Transporter Family |
| Ank | PF00023.17 | 21.6 | Ankyrin repeat |
| Annexin | PF00191.8 | 8 | Annexin |
| ArfGap | PF01412.8 | −17 | Putative GTPase activating protein for Arf |
| Asn_synthase | PF00733.10 | −52.8 | Asparagine synthase |
| Asp | PF00026.13 | −186.1 | Eukaryotic aspartyl protease |
| Auxin_inducible | PF02519.4 | −15 | Auxin responsive protein |
| Auxin_resp | PF06507.3 | 25 | Auxin response factor |
| B12D | PF06522.1 | 25 | B12D protein |
| B3 | PF02362.11 | 26.5 | B3 DNA binding domain |
| B56 | PF01603.8 | −210 | Protein phosphatase 2A regulatory B |
| | | | subunit (B56 family) |
| BAH | PF01426.6 | 7 | BAH domain |
| BRO1 | PF03097.6 | 25 | BRO1-like domain |
| BURP | PF03181.5 | −52 | BURP domain |
| Bromodomain | PF00439.13 | 8.9 | Bromodomain |
| CAF1 | PF04857.8 | −100.5 | CAF1 family ribonuclease |
| CBFD_NFYB_HMF | PF00808.12 | 18.4 | Histone-like transcription factor (CBF/NF- |
| | | | Y) and archaeal histone |
| CBS | PF00571.16 | 15.8 | CBS domain pair |
| CCT | PF06203.3 | 25 | CCT motif |
| CH | PF00307.18 | 22.5 | Calponin homology (CH) domain |
| CMAS | PF02353.9 | −177.9 | Cyclopropane-fatty-acyl-phospholipid |
| | | | synthase |
| CN_hydrolase | PF00795.11 | −13.9 | Carbon-nitrogen hydrolase |
| CTP_synth_N | PF06418.2 | 25 | CTP synthase N-terminus |
| CTP_transf_2 | PF01467.15 | −11.8 | Cytidylyltransferase |
| Carb_kinase | PF01256.7 | −66.3 | Carbohydrate kinase |
| Catalase | PF00199.8 | −229 | Catalase |
| Cation_efflux | PF01545.10 | −95.7 | Cation efflux family |
| Chal_sti_synt_C | PF02797.5 | −6.1 | Chalcone and stilbene synthases, C- |
| | | | terminal domain |
| Chromo | PF00385.11 | 27.5 | ‘chromo’ (CHRromatin Organisation |
| | | | MOdifier) domain |
| Citrate_synt | PF00285.10 | −101.5 | Citrate synthase |
| CobW_C | PF07683.3 | 18 | Cobalamin synthesis protein cobW C- |
| | | | terminal domain |
| ComA | PF02679.5 | 25 | (2R)-phospho-3-sulfolactate synthase |
| | | | (ComA) |
| CorA | PF01544.8 | −61.3 | CorA-like Mg2 + transporter protein |
| Cpn10 | PF00166.11 | −7.8 | Chaperonin 10 Kd subunit |
| Cpn60_TCP1 | PF00118.13 | −223.4 | TCP-1/cpn60 chaperonin family |
| Cu-oxidase | PF00394.11 | −18.9 | Multicopper oxidase |
| Cu-oxidase_2 | PF07731.3 | −5.8 | Multicopper oxidase |
| Cu-oxidase_3 | PF07732.4 | 10 | Multicopper oxidase |
| Cyclin_C | PF02984.7 | −13 | Cyclin, C-terminal domain |
| Cyclin_N | PF00134.12 | −14.7 | Cyclin, N-terminal domain |
| Cyclotide | PF03784.3 | 25 | Cyclotide family |
| Cys_Met_Meta_PP | PF01053.9 | −278.4 | Cys/Met metabolism PLP-dependent |
| | | | enzyme |
| Cystatin | PF00031.10 | 17.5 | Cystatin domain |
| DAO | PF01266.11 | −36.5 | FAD dependent oxidoreductase |
| DNA_photolyase | PF00875.7 | −10 | DNA photolyase |
| DSPc | PF00782.9 | −21.8 | Dual specificity phosphatase, catalytic |
| | | | domain |
| DUF125 | PF01988.8 | −10.1 | Integral membrane protein DUF125 |
| DUF1423 | PF07227.1 | 25 | Protein of unknown function (DUF1423) |
| DUF1530 | PF07060.1 | 25 | ProFAR isomerase associated |
| DUF1685 | PF07939.1 | 25 | Protein of unknown function (DUF1685) |
| DUF246 | PF03138.4 | −15 | Plant protein family |
| DUF250 | PF03151.6 | 125 | Domain of unknown function, DUF250 |
| DUF296 | PF03479.4 | −11 | Domain of unknown function (DUF296) |
| DUF393 | PF04134.2 | 25 | Protein of unknown function, DUF393 |
| DUF581 | PF04570.4 | −3.1 | Protein of unknown function (DUF581) |
| DUF6 | PF00892.9 | 30 | Integral membrane protein DUF6 |
| DUF641 | PF04859.2 | 25 | Plant protein of unknown function |
| | | | (DUF641) |
| DUF760 | PF05542.1 | 25 | Protein of unknown function (DUF760) |
| DUF788 | PF05620.1 | 25 | Protein of unknown function (DUF788) |
| Dehydrin | PF00257.8 | −4.4 | Dehydrin |
| Di19 | PF05605.2 | 25 | Drought induced 19 protein (Di19) |
| Dirigent | PF03018.4 | 25 | Dirigent-like protein |
| DnaJ | PF00226.18 | −8 | DnaJ domain |
| E1_dh | PF00676.9 | −90 | Dehydrogenase E1 component |
| E2F_TDP | PF02319.9 | 17 | E2F/DP family winged-helix DNA- |
| | | | binding domain |
| EB1 | PF03271.6 | 25 | EB1-like C-terminal motif |
| EF1_GNE | PF00736.8 | 20 | EF-1guanine nucleotide exchange domain |
| ELFV_dehydrog | PF00208.10 | −27 | Glutamate/Leucine/Phenylalanine/Valine |
| | | | dehydrogenase |
| ELFV_dehydrog_N | PF02812.7 | 31.8 | Glu/Leu/Phe/Val dehydrogenase, |
| | | | dimerisation domain |
| ERO1 | PF04137.5 | −179.5 | Endoplasmic Reticulum Oxidoreductin 1 |
| | | | (ERO1) |
| ERp29 | PF07749.2 | 10.5 | Endoplasmic reticulum protein ERp29, C- |
| | | | terminal domain |
| Epimerase | PF01370.10 | −46.3 | NAD dependent epimerase/dehydratase |
| | | | family |
| F-box | PF00646.20 | 12.4 | F-box domain |
| FAD_binding_3 | PF01494.8 | −136.6 | FAD binding domain |
| FAD_binding_4 | PF01565.12 | −8.1 | FAD binding domain |
| FAD_binding_7 | PF03441.3 | 25 | FAD binding domain of DNA photolyase |
| FAE_3-kCoA_syn1 | PF07168.1 | 25 | Fatty acid elongase 3-ketoacyl-CoA |
| | | | synthase 1 |
| FA_desaturase | PF00487.13 | −46 | Fatty acid desaturase |
| FBA_1 | PF07734.2 | −39.4 | F-box associated |
| FBPase | PF00316.9 | −170.3 | Fructose-1-6-bisphosphatase |
| FGGY_N | PF00370.10 | −104.7 | FGGY family of carbohydrate kinases, N- |
| | | | terminal domain |
| FHA | PF00498.13 | 25 | FHA domain |
| Fer4 | PF00037.14 | 8 | 4Fe-4S binding domain |
| GAF | PF01590.14 | 23 | GAF domain |
| GAT | PF03127.4 | −7 | GAT domain |
| GATA | PF00320.15 | 28.5 | GATA zinc finger |
| GATase | PF00117.15 | −38.1 | Glutamine amidotransferase class-I |
| GATase_2 | PF00310.10 | −106.2 | Glutamine amidotransferases class-II |
| GFO_IDH_MocA | PF01408.11 | −7.2 | Oxidoreductase family, NAD-binding |
| | | | Rossmann fold |
| GFO_IDH_MocA_C | PF02894.7 | 6 | Oxidoreductase family, C-terminal |
| | | | alpha/beta domain |
| GH3 | PF03321.3 | −336 | GH3 auxin-responsive promoter |
| GIDA | PF01134.11 | −226.7 | Glucose inhibited division protein A |
| GRAS | PF03514.4 | −78 | GRAS family transcription factor |
| GRIM-19 | PF06212.1 | 25 | GRIM-19 protein |
| GSHPx | PF00255.9 | −16 | Glutathione peroxidase |
| GST_C | PF00043.13 | 22.3 | Glutathione S-transferase, C-terminal |
| | | | domain |
| GST_N | PF02798.8 | 14.6 | Glutathione S-transferase, N-terminal |
| | | | domain |
| GTP_EFTU | PF00009.14 | 8 | Elongation factor Tu GTP binding domain |
| GTP_EFTU_D2 | PF03144.13 | 25 | Elongation factor Tu domain 2 |
| GTP_EFTU_D3 | PF03143.6 | 14.3 | Elongation factor Tu C-terminal domain |
| Gamma-thionin | PF00304.10 | 9.6 | Gamma-thionin family |
| Gln-synt_C | PF00120.13 | −124 | Glutamine synthetase, catalytic domain |
| Gln-synt_N | PF03951.8 | 9 | Glutamine synthetase, beta-Grasp domain |
| Globin | PF00042.11 | −8.8 | Globin |
| Glyco_hydro_1 | PF00232.8 | −301.8 | Glycosyl hydrolase family 1 |
| Glyco_hydro_14 | PF01373.7 | −231.4 | Glycosyl hydrolase family 14 |
| Glyco_hydro_16 | PF00722.9 | −65 | Glycosyl hydrolases family 16 |
| Glyco_hydro_38 | PF01074.11 | −125.3 | Glycosyl hydrolases family 38 N-terminal |
| | | | domain |
| Glyco_hydro_38C | PF07748.2 | −93.1 | Glycosyl hydrolases family 38 C-terminal |
| | | | domain |
| Glyco_transf_20 | PF00982.9 | −243.6 | Glycosyltransferase family 20 |
| Glycogen_syn | PF05693.2 | −492.3 | Glycogen synthase |
| Glycolytic | PF00274.8 | −158 | Fructose-bisphosphate aldolase class-I |
| Glycos_transf_1 | PF00534.9 | −7.3 | Glycosyl transferases group 1 |
| Glycos_transf_2 | PF00535.14 | 17.6 | Glycosyl transferase family 2 |
| Glyoxalase | PF00903.14 | 12.1 | Glyoxalase/Bleomycin resistance |
| | | | protein/Dioxygenase superfamily |
| Got1 | PF04178.2 | 25 | Got1 -like family |
| Gp_dh_C | PF02800.8 | −64.1 | Glyceraldehyde 3-phosphate |
| | | | dehydrogenase, C-terminal domain |
| Gp_dh_N | PF00044.11 | −74.2 | Glyceraldehyde 3-phosphate |
| | | | dehydrogenase, NAD binding domain |
| HALZ | PF02183.7 | 17 | Homeobox associated leucine zipper |
| HAMP | PF00672.13 | 17 | HAMP domain |
| HATPase_c | PF02518.13 | 22.4 | Histidine kinase-, DNA gyrase B-, and |
| | | | HSP90-like ATPase |
| HEAT | PF02985.9 | 17.6 | HEAT repea |
| HEM4 | PF02602.5 | −12 | Uroporphyrinogen-III synthase HemD |
| HGTP_anticodon | PF03129.9 | −2 | Anticodon binding domain |
| HI0933like | PF03486.4 | −255.8 | HI0933-like protein |
| HLH | PF00010.15 | 8.2 | Helix-loop-helix DNA-binding domain |
| HMA | PF00403.14 | 17.4 | Heavy-metal-associated domain |
| HMG_box | PF00505.8 | 4.1 | HMG (high mobility group) box |
| HSF_DNA-bind | PF00447.7 | −70 | HSF-type DNA-binding |
| HSP20 | PF00011.9 | 13 | Hsp20/alpha crystallin family |
| H_PPase | PF03030.5 | −377 | Inorganic H+ pyrophosphatase |
| Heme_oxygenase | PF01126.10 | −58 | Heme oxygenase |
| Hexapep | PF00132.11 | 20 | Bacterial transferase hexapeptide (three |
| | | | repeats) |
| Hexokinase_l | PF00349.10 | −110.3 | Hexokinase |
| Hexokinase_2 | PF03727.5 | −131.3 | Hexokinase |
| HisKA | PF00512.13 | 10.2 | His Kinase A (phosphoacceptor) domain |
| Hist_deacetyl | PF00850.9 | −71 | Histone deacetylase domain |
| Histone | PF00125.12 | 17.4 | Core histone H2A/H2B/H3/H4 |
| Homeobox | PF00046.17 | −4.1 | Homeobox domain |
| Hpt | PF01627.11 | 25 | Hpt domain |
| Hydrolase | PF00702.13 | 13.6 | haloacid dehalogenase-like hydrolase |
| ICL | PF00463.9 | −234 | Isocitrate lyase family |
| IF4E | PF01652.8 | −35 | Eukaryotic initiation factor 4E |
| IPK | PF03770.6 | 25 | Inositol polyphosphate kinase |
| IlvC | PF01450.8 | −33.8 | Acetohydroxy acid isomeroreductase, |
| | | | catalytic domain |
| IlvN | PF07991.1 | −75.8 | Acetohydroxy acid isomeroreductase, |
| | | | catalytic domain |
| Inhibitor_I29 | PF08246.1 | 4.9 | Cathepsin propeptide inhibitor domain |
| | | | (I29) |
| Ion_trans | PF00520.18 | −4.5 | Ion transport protein |
| Isoamylase_N | PF02922.7 | −6.5 | Isoamylase N-terminal domain |
| Jacalin | PF01419.6 | 20 | Jacalin-like lectin domain |
| JmjC | PF02373.11 | −8 | JmjC domain |
| JmjN | PF02375.6 | 25 | jmjN domain |
| K-box | PF01486.7 | 0 | K-box region |
| KA1 | PF02149.9 | 25 | Kinase associated domain 1 |
| KH_1 | PF00013.17 | 8.1 | KH domain |
| Kelch_1 | PF01344.13 | 20 | Kelch motif |
| Kelch_2 | PF07646.4 | 20 | Kelch motif |
| Ketoacyl-synt_C | PF02801.10 | −54.9 | Beta-ketoacyl synthase, C-terminal |
| | | | domain |
| Kunitz_legume | PF00197.8 | −32 | Trypsin and protease inhibitor |
| LEA_5 | PF00477.7 | 25 | Small hydrophilic plant seed protein |
| LIM | PF00412.10 | 0 | LIM domain |
| LRR_2 | PF07723.2 | 8.7 | Leucine Rich Repeat |
| Lactamase_B | PF00753.15 | 22.3 | Metallo-beta-lactamase superfamily |
| Ldh_1_C | PF02866.6 | −13 | lactate/malate dehydrogenase, alpha/beta |
| | | | C-terminal domain |
| Ldh_1_N | PF00056.11 | −31.3 | lactate/malate dehydrogenase, NAD |
| | | | binding domain |
| Lectin_legA | PF00138.7 | 19 | Legume lectins alpha domain |
| Lectin_legB | PF00139.9 | −77 | Legume lectins beta domain |
| Lig_chan | PF00060.16 | 8.2 | Ligand-gated ion channel |
| Lipase_GDSL | PF00657.11 | 10.9 | GDSL-like Lipase/Acylhydrolase |
| M20_dimer | PF07687.3 | 12 | Peptidase dimerisation domain |
| MAP1_LC3 | PF02991.5 | −18.8 | Microtubule associated protein 1A/1B, |
| | | | light chain 3 |
| MFMR | PF07777.1 | −46.7 | G-box binding protein MFMR |
| MFS_1 | PF07690.4 | 23.5 | Major Facilitator Superfamily |
| MIP | PF00230.8 | −62 | Major intrinsic protein |
| Malic_M | PF03949.4 | −143.9 | Malic enzyme, NAD binding domain |
| Math | PF01554.8 | 59.6 | Math |
| Metallophos | PF00149.16 | 22 | Calcineurin-like phosphoesterase |
| Metallothio_2 | PF01439.7 | −3 | Metallothionein |
| Meth_synt_1 | PF08267.1 | −167.8 | Cobalamin-independent synthase, N- |
| | | | terminal domain |
| Meth_synt_2 | PF01717.7 | −155 | Cobalamin-independent synthase, |
| | | | Catalytic domain |
| Methyltransf_11 | PF08241.1 | 17.1 | Methyltransferase domain |
| Methyltransf_12 | PF08242.1 | 21.4 | Methyltransferase domain |
| Methyltransf_2 | PF00891.7 | −103.8 | O-methyltransferase |
| Methyltransf_3 | PF01596.7 | −120.6 | O-methyltransferase |
| Mpv17_PMP22 | PF04117.2 | −5.4 | Mpv17 / PMP22 family |
| MtN3_slv | PF03083.5 | −0.8 | MtN3/saliva family |
| Myb_DNA-binding | PF00249.18 | 19.1 | Myb-like DNA-binding domain |
| NAC | PF01849.6 | 0 | NAC domain |
| NAD_binding_4 | PF07993.1 | −87.7 | Male sterility protein |
| NAF | PF03822.4 | 25 | NAF domain |
| NAM | PF02365.5 | −19 | No apical meristem (NAM) protein |
| NDK | PF00334.8 | −59.9 | Nucleoside diphosphate kinase |
| NIF | PF03031.7 | −81 | NLI interacting factor-like phosphatase |
| NPH3 | PF03000.4 | 25 | NPH3 family |
| NTF2 | PF02136.10 | 6 | Nuclear transport factor 2 (NTF2) domain |
| NTP_transferase | PF00483.12 | −90.5 | Nucleotidyl transferase |
| NUDIX | PF00293.16 | 0 | NUDIX domain |
| Na_Ca_ex | PF01699.12 | 25 | Sodium/calcium exchanger protein |
| NifU_N | PF01592.6 | −13 | NifU-like N terminal domain |
| NmrA | PF05368.2 | −90.6 | NmrA-like family |
| Orn_Arg_deC_N | PF02784.6 | −76 | Pyridoxal-dependent decarboxylase, |
| | | | pyridoxal binding domain |
| Orn_DAP_Arg_deC | PF00278.11 | −34.9 | Pyridoxal-dependent decarboxylase, C- |
| | | | terminal sheet domain |
| Oxidored_FMN | PF00724.8 | −147.7 | NADH:flavin oxidoreductase / NADH |
| | | | oxidase family |
| PA | PF02225.10 | 13 | PA domain |
| PAD_porph | PF04371.4 | −180.8 | Porphyromonas-type peptidyl-arginine |
| | | | deiminase |
| PARP | PF00644.9 | −55.5 | Poly(ADP-ribose) polymerase catalytic |
| | | | domain |
| PAS | PF00989.12 | 20 | PAS fold |
| PB1 | PF00564.12 | 12.1 | PB1 domain |
| PBD | PF00786.16 | 12.1 | P21-Rho-binding domain |
| PCI | PF01399.14 | 25 | PCI domain |
| PDZ | PF00595.11 | 12.1 | PDZ domain (Also known as DHR or |
| | | | GLGF) |
| PEP-utilizers | PF00391.12 | 10 | PEP-utilising enzyme, mobile domain |
| PEP-utilizers_C | PF02896.7 | −173 | PEP-utilising enzyme, TIM barrel domain |
| PEPcase | PF00311.7 | 25 | Phosphoenolpyruvate carboxylase |
| PGAM | PF00300.11 | −3 | Phosphoglycerate mutase family |
| PHD | PF00628.16 | 25.9 | PHD-finger |
| PK | PF00224.10 | −244 | Pyruvate kinase, barrel domain |
| PKC | PF02887.5 | −44 | Pyruvate kinase, alpha/beta domain |
| PMSR | PF01625.9 | −62 | Peptide methionine sulfoxide reductase |
| PP2C | PF00481.10 | −44 | Protein phosphatase 2C |
| PPDK_N | PF01326.8 | −87 | Pyruvate phosphate dikinase, |
| | | | PEP/pyruvate binding domain |
| PRA1 | PF03208.8 | 25 | PRA1 family protein |
| PSI_PsaF | PF02507.5 | 25 | Photosystem I reaction centre subunit III |
| PTR-2 | PF00854.11 | −50 | POT family |
| PUA | PF01472.8 | 2.2 | PUA domain |
| Peptidase_A22B | PF04258.3 | −137.3 | Signal peptide peptidase |
| Peptidase_C1 | PF00112.11 | −115.8 | Papain family cysteine protease |
| Peptidase_C15 | PF01470.7 | −100 | Pyroglutamyl peptidase |
| Peptidase_M20 | PF01546.16 | −14.4 | Peptidase family M20/M25/M40 |
| Peptidase_S10 | PF00450.11 | −198 | Serine carboxypeptidase |
| Peptidase_S41 | PF03572.7 | −25.8 | Peptidase family S41 |
| PfkB | PF00294.12 | −67.8 | pfkB family carbohydrate kinase |
| Phytochrome | PF00360.9 | 11 | Phytochrome region |
| Pkinase | PF00069.14 | −70.8 | Protein kinase domain |
| Pkinase_C | PF00433.11 | 14 | Protein kinase C terminal domain |
| Pkinase_Tyr | PF07714.4 | 65 | Protein tyrosine kinase |
| Polysacc_synt_2 | PF02719.5 | −176 | Polysaccharide biosynthesis protein |
| Pro_CA | PF00484.8 | −45 | Carbonic anhydrase |
| Pro_dh | PF01619.7 | −120.5 | Proline dehydrogenase |
| Pyr_redox | PF00070.16 | 5 | Pyridine nucleotide-disulphide |
| | | | oxidoreductase |
| Pyr_redox_2 | PF07992.2 | −20 | Pyridine nucleotide-disulphide |
| | | | oxidoreductase |
| Pyr_redox_dim | PF02852.11 | −13 | Pyridine nucleotide-disulphide |
| | | | oxidoreductase, dimerisation domain |
| Pyridoxal_deC | PF00282.8 | −158.6 | Pyridoxal-dependent decarboxylase |
| | | | conserved domain |
| RHD3 | PF05879.2 | 25 | Root hair defective 3 GTP-binding protein |
| | | | (RHD3) |
| RIO1 | PF01163.11 | −89.1 | RIO1 family |
| RRM_1 | PF00076.10 | 15.2 | RNA recognition motif. (a.k.a. RRM, |
| | | | RBD, or RNP domain) |
| RTC | PF01137.11 | −36.9 | RNA 3′-terminal phosphate cyclase |
| RTC_insert | PF05189.3 | 25 | RNA 3′-terminal phosphate cyclase |
| | | | (RTC), insert domain |
| RWP-RK | PF02042.5 | 25 | RWP-RK domain |
| Ran_BP1 | PF00638.8 | −38 | RanBPI domain |
| Ras | PF00071.11 | 18 | Ras family |
| Remorin_C | PF03763.3 | 25 | Remorin, C-terminal region |
| Response_reg | PF00072.11 | −14.4 | Response regulator receiver domain |
| Reticulon | PF02453.7 | −40 | Reticulon |
| Ribonuclease_T2 | PF00445.8 | −53 | Ribonuclease T2 family |
| Ribosomal_L1 | PF00687.10 | −101 | Ribosomal protein Llp/L10e family |
| Ribosomal_L10e | PF00826.7 | 25 | Ribosomal L10 |
| Ribosomal_L12 | PF00542.8 | 25 | Ribosomal protein L7/L12 C-terminal |
| | | | domain |
| Ribosomal_L19e | PF01280.9 | −28 | Ribosomal protein L19e |
| Ribosomal_L39 | PF00832.9 | 25 | Ribosomal L39 protein |
| Ribosomal_L7Ae | PF01248.13 | 6 | Ribosomal protein |
| | | | L7Ae/L30e/S12e/Gadd45 family |
| Ribosomal_S11 | PF00411.7 | −4 | Ribosomal protein S11 |
| Ribosomal_S17 | PF00366.9 | 1.7 | Ribosomal protein S17 |
| Ribosomal_S2 | PF00318.9 | −22 | Ribosomal protein S2 |
| Ribosomal_S27 | PF01599.8 | 50 | Ribosomal protein S27a |
| Rieske | PF00355.15 | −7 | Rieske [2Fe-2S] domain |
| RmlD_sub_bind | PF04321.6 | −171.8 | RmlD substrate binding domain |
| RuBisCO_small | PF00101.9 | −20.1 | Ribulose bisphosphate carboxylase, small |
| | | | chain |
| Rubrerythrin | PF02915.7 | −4.8 | Rubrerythrin |
| SAM_1 | PF00536.17 | 11.3 | SAM domain (Sterile alpha motif) |
| SAM_2 | PF07647.5 | 20 | SAM domain (Sterile alpha motif) |
| SPC25 | PF06703.1 | 25 | Microsomal signal peptidase 25 kDa |
| | | | subunit (SPC25) |
| SPX | PF03105.9 | −20 | SPX domain |
| SRF-TF | PF00319.8 | 11 | SRF-type transcription factor (DNA- |
| | | | binding and dimerisation domain) |
| START | PF01852.8 | 25 | START domain |
| SapB_1 | PF05184.4 | 20 | Saposin-like type B, region 1 |
| SapB_2 | PF03489.5 | 20 | Saposin-like type B, region 2 |
| SecY | PF00344.9 | −210 | eubacterial secY protein |
| SelR | PF01641.8 | −66.5 | Se1R domain |
| Sigma70_r1_2 | PF00140.9 | 25 | Sigma-70 factor, region 1.2 |
| Sigma70_r2 | PF04542.3 | 11 | Sigma-70 region 2 |
| Sigma70 r3 | PF04539.4 | 10 | Sigma-70 region 3 |
| Sigma70_r4 | PF04545.5 | 20.7 | Sigma-70, region 4 |
| Sina | PF03145.6 | −48.4 | Seven in absentia protein family |
| Steroid_dh | PF02544.6 | −44.7 | 3-oxo-5-alpha-steroid 4-dehydrogenase |
| Suc_Fer-like | PF06999.2 | −42.4 | Sucrase/ferredoxin-like |
| Succ_DH_flav_C | PF02910.9 | −42 | Fumarate reductase/succinate |
| | | | dehydrogenase flavoprotein C-terminal |
| | | | domain |
| Sucrose_synth | PF00862.9 | −134 | Sucrose synthase |
| Sugar_tr | PF00083.12 | −85 | Sugar (and other) transporter |
| Synaptobrevin | PF00957.9 | 25 | Synaptobrevin |
| TPP_enzyme_C | PF02775.9 | 19.7 | Thiamine pyrophosphate enzyme, C- |
| | | | terminal TPP binding domain |
| TPP_enzyme_M | PF00205.11 | −23.9 | Thiamine pyrophosphate enzyme, central |
| | | | domain |
| TPP_enzyme_N | PF02776.7 | −70 | Thiamine pyrophosphate enzyme, N- |
| | | | terminal TPP binding domain |
| Thiolase_C | PF02803.6 | −30.7 | Thiolase, C-terminal domain |
| Thiolase_N | PF00108.11 | −129.5 | Thiolase, N-terminal domain |
| Thioredoxin | PF00085.8 | −25.7 | Thioredoxin |
| Tic22 | PF04278.2 | 25 | Tic22-like family |
| Transaldolase | PF00923.8 | −49 | Transaldolase |
| Transferase | PF02458.5 | −161.2 | Transferase family |
| Transket_pyr | PF02779.12 | −50 | Transketolase, pyridine binding domain |
| Transketolase_C | PF02780.9 | −15.5 | Transketolase, C-terminal domain |
| Transketolase_N | PF00456.10 | −98 | Transketolase, thiamine diphosphate |
| | | | binding domain |
| Trehalase | PF01204.8 | 25 | Trehalase |
| Trehalase_Ca-bi | PF07492.1 | 20 | Neutral trehalase Ca2+ binding domain |
| Trehalose_PPase | PF02358.6 | −49.4 | Trehalose-phosphatase |
| Trp_Tyr_perm | PF03222.3 | −232.6 | Tryptophan/tyrosine permease family |
| Trp_syntA | PF00290.10 | −149.8 | Tryptophan synthase alpha chain |
| Trypsin | PF00089.13 | −33.2 | Trypsin |
| Tub | PF01167.7 | −98 | Tub family |
| Tubulin | PF00091.14 | −55.7 | Tubulin/FtsZ family, GTPase domain |
| Tubulin_C | PF03953.6 | −10 | Tubulin/FtsZ family, C-terminal domain |
| UBA | PF00627.18 | 20.5 | UBA/TS-N domain |
| UDPGP | PF01704.7 | −265.2 | UTP--glucose-l-phosphate |
| | | | uridylyltransferase |
| UDPGT | PF00201.8 | −151 | UDP-glucoronosyl and UDP-glucosyl |
| | | | transferase |
| UPF0057 | PF01679.7 | 25 | Uncharacterized protein family UPF0057 |
| UbiA | PF01040.8 | −45 | UbiA prenyltransferase family |
| Ubie_methyltran | PF01209.8 | −117 | ubiE/COQ5 methyltransferase family |
| Usp | PF00582.15 | 25.7 | Universal stress protein family |
| VHS | PF00790.8 | −13.2 | VHS domain |
| VQ | PF05678.3 | 25 | VQ motif |
| W2 | PF02020.7 | 25 | eIF4-gamma/eIF5/eIF2-epsilon |
| WD40 | PF00400.19 | 21.4 | WD domain, G-beta repeat |
| WHEP-TRS | PF00458.9 | 10 | WHEP-TRS domain |
| WRKY | PF03106.5 | 25 | WRKY DNA -binding domain |
| Wzy_C | PF04932.4 | 25 | O-Antigen Polymerase |
| XET_C | PF06955.2 | 11.4 | Xyloglucan endo-transglycosylase (XET) |
| | | | C-terminus |
| Xan_ur_permease | PF00860.10 | −151.2 | Permease family |
| YL1 | PF05764.3 | 25 | YL1 nuclear protein |
| YLl_C | PF08265.1 | 18.6 | YL1 nuclear protein C-terminal domain |
| YTH | PF04146.5 | 25 | YT521-B-like family |
| Yippee | PF03226.4 | 25 | Yippee putative zinc-binding protein |
| YjeF_N | PF03853.3 | 25 | YjeF-related protein N-terminus |
| ZF-HD_dimer | PF04770.2 | 25 | ZF-HD protein dimerisation region |
| Zip | PF02535.10 | −28 | ZIP Zinc transporter |
| adh short | PF00106.13 | −46.6 | short chain dehydrogenase |
| bZIP_1 | PF00170.10 | 16.5 | bZIP transcription factor |
| bZIP_2 | PF07716.4 | 15 | Basic region leucine zipper |
| cNMP_binding | PF00027.17 | 20.6 | Cyclic nucleotide-binding domain |
| cobW | PF02492.8 | −10 | CobW/HypB/UreG, nucleotide-binding |
| | | | domain |
| efhand | PF00036.19 | 17.5 | EF hand |
| ketoacyl-synt | PF00109.14 | −73.6 | Beta-ketoacyl synthase, N-terminal |
| | | | domain |
| malic | PF00390.8 | 25 | Malic enzyme, N-terminal domain |
| p450 | PF00067.11 | −105 | Cytochrome P450 |
| peroxidase | PF00141.12 | −10 | Peroxidase |
| | | | tRNA synthetase class II core domain (G, |
| tRNA-synt_2b | PF00587.14 | −40.5 | H, P, S and T) |
| ubiquitin | PF00240.12 | 19.4 | Ubiquitin family |
| zf-B_box | PF00643.13 | 11.1 | B-box zinc finger |
| zf-C2H2 | PF00096.14 | 19 | Zinc finger, C2H2 type |
| zf-C3HC4 | PF00097.12 | 16.9 | Zinc finger, C3HC4 type (RING finger) |
| zf-Dof | PF02701.5 | 25 | Dof domain, zinc finger |
| zf-LSD1 | PF06943.2 | 25 | LSD1 zinc finger |

### Example 10

### Selection of Transgenic Plants with Enhanced Agronomic Trait(s)

[0129] This example illustrates the preparation and identification by selection of transgenic seeds and plants derived from transgenic plant cells of this invention where the plants and seed are identified by screening a having an enhanced agronomic trait imparted by expression of a protein selected from the group including the homologous proteins identified in Example 6. Transgenic plant cells of corn, soybean, cotton, canola, wheat and rice are transformed with recombinant DNA for expressing each of the homologs identified in Example 6. Plants are regenerated from the transformed plant cells and used to produce progeny plants and seed that are screened for enhanced water use efficiency, enhanced cold tolerance, increased yield, enhanced nitrogen use efficiency, enhanced seed protein and enhanced seed oil. Plants are identified exhibiting enhanced traits imparted by expression of the homologous proteins.

The application's sequence listing, which the Patent Office published only in electronic form, follows.

SEQUENCE LISTING (30418 sequences)

SEQ ID NO: 1 - DNA, 2133 bp, Oryza sativa
atgtcagcgtcgccgtcgtcgatgagcggcgccggcgccggcgaggcgggggtgcggacggtggtgtggttcaggcgggacctgcgcgtggaggacaacccggcgctggcggcggcggcgcgggcggccggggaggtggtgccggtgtacgtgtgggcgccggaggaggacgggccgtactacccggggcgggtgtcccggtggtggctcagccagagcctcaagcacctggacgcctcgctccggcggctcggcgccagcaggctcgtcacccgccgctccgccgacgccgtcgtcgcgctcatcgagctcgtccgcagcatcggcgccacgcatctcttcttcaaccacctctacgacccgctgtcgctggtgagggaccaccgggtgaaggcgctgctgacggccgagggcatcgccgtgcagtcgttcaacgccgacctgctgtacgagccatgggaggtggtcgacgacgacggctgcccgttcaccatgttcgcgccgttctgggacaggtgcctgtgcatgcccgacccggcggcgccgctgctgccgcccaagaggatcgcgcccggcgagctgccggcgaggaggtgcccctccgacgagctggtgttcgaggacgagtccgagcgggggagcaacgcgctgctggcgagggcgtggtcgcccgggtggcagaacgccgacaaggcgctggccgcgttcctcaacgggccactcatggactactcggtgaaccggaagaaggccgacagcgccagcacgtcactgctgtcgccgtacctgcacttcggcgagctcagcgtacgcaaggtgttccaccaggtgaggatgaagcagctcatgtggagcaacgaggggaaccacgccggcgacgagagctgcgtcctcttcctccggtccatcggcctcagggagtactcgaggtacctcacgttcaaccacccgtgcagcctggagaagccactcctggcgcacctcaggttcttcccctgggtggtcgacgaggtgtacttcaaggtgtggaggcaggggaggacagggtaccctctcgtcgacgccgggatgcgcgagctctgggccaccggctggctgcacgaccggatacgcgtcgtcgtctccagcttcttcgtcaaggtgctccagcttccatggcgctgggggatgaagtacttctgggacaccctgctcgacgccgacctcgagagcgacgcgctcggctggcagtacatctccggctctctccccgatggccgtgagctcgaccgcatcgacaaccctcagcttgaaggatacaagtttgatccgcacggggagtatgtccggcgatggctgccggagctggcaaggctgccgacggagtggatacaccacccatgggacgcaccggagtcggtgctccaggctgcagggattgagctaggctccaactatcctctccccatcgtggagctggacgcggcgaagaccaggctgcaggatgcactgtcagagatgtgggagctcgaggccgcgtcacgcgcagcgatggagaacggaatggaggagggcctcggcgactcctccgacgtgccgccgatcgccttcccaccggagctgcagatggaagttgaccgagcaccggcccagcctactgttcacggaccgacaacggctggccggcgacgagaggatcagatggttcccagcatgacctcctcgctggtcagagctgaaacagaactttcagcggattttgacaacagcatggacagtaggccggaggtgccgtcgcaggtgctcttccagcctcggatggaaagggaagaaacagtggacggcggcggtggcggcggaatggtcggcaggagcaacggcggcggccaccaaggccaacaccagcagcaacagcacaactttcagactacaattcaccgggcacggggcgttgcgccgtctacgtcagaggcatcaagcaactggactgggagagaaggcggcgtggtgcccgtctggtcgcctccggcagcgtcaggcccctcagatcactacgctgccgatgaagctgacattaccagtagaagttatttggacaggcatccacagtcgcatacgttgatgaactggagtcagctctcgcagtcattgtag

SEQ ID NO: 2 - DNA, 2949 bp, Nostoc sp. PCC 7120
atggtggatttgttacggcagttgcgtgatttgtgttcaccagaagggcaagccacaaaagaccaagcagtttctgctgtcaagttaattgaacagttgaatattaatgaagccattcgggcagctagggcttttgctttgtattttcagctgatcaacatcatagagcaggaatatgagcaaaggcagcaattaactcgctattctgacttagaagcggaaacagcacccctaaatggttccgaaaacattacctcatcctctaaccacaacgaagatgatgttattttcaaccggggtttagggactgatttcttaggaaaaaattggactaatcgtggacaagggaaacaaaaaggtacttttgcagcgttatttcccttattgtctaaattgaatgtcccaccccaacaaattcaacgcctgatttcccaactagatgtccgtttggtattcactgcccacccaacggaaattgtccgccacaccattcgggacaaacaacggcaagtagtagatttgttgcaacaactcgatgaggtggaaaatcgagctaaggacggcggcggctatccttgggaagcgggggaaattcgggaaaaattgctagaagaaattcgcttgtggtggcgtacagacgaactccaccagtttaagcccactgtgctggatgaagtggattatgctttgcattacttccaagaagttttatttgatgggattccccaactgtataagcgtttcaaatacgccctaaatcaaactttctcctggttagaaccaccaagcaaagatttctgttcctttggttcttgggtaggttcagacagagatggtaatccatcggtaacaccggaaattacctggcagacagcttgttatcagcgcaaaatggtgctggaaagatatatcaagtctgtcacccaattgattgaattattaagtatctccatgcactggagtgacgttttaccagacttattggaatccttggagttagatcagtcccagttaagtgaagtatacgatgctctggcgctgagatatcgccaagaaccctatcgtctcaaactagcttacgtcctcaagcgcctggaaaatacccgcgatcgcaatttagctttatataaaggtgaaacccccacaaatgaagatagccccatgtatcgttcggggtcggaatttttggcggaactgcgattaattcagcataacttgacggaaacaggtttaagctgccgagaattggataatttgatctgtcaagtggaaatttttgactttaacctgacaaaattagacatccgtcaagaatccaccagacattcggacgcgttaaacgagattctcgactatctccaattattaccccagccatacaacgacctctccgaagaacagcgagttgcttggctaacaaccgaactgcaaacccgtcgcccattaatttcgtcagaactaccattctctgacaaaactaatgatgtcattaaaactttccgcgtagtgcgatcgctccaacaagaatttggcattaatatctgccaaacttacatcattagtatgtgtcgtcaagtcagcgatgtcttagaagttttgcttctagccaaagaagccagactttttgacccagcgatcgccgtcggtacaattcaggttgtaccattatttgagactgtcgaagatttacaacgttctcgcagcgtcatgcgacagttatttgaattacctctataccgcgctttgctagctggtggttacaaaaataccgaagtaaaagtaccgaatactgagctaacaccccaatccccagcccccagtccccagtccgtactcacccccgacttacaagaagtcatgctgggatattccgacagcaacaaagactccggcttcttgagtagcaattgggaaattcataaagcccaaaaatcattacagcaaatcgccgaagaatatggcgtaaatttgcggattttccacgggcgcggcggttctgtaggacgaggcggcggcccagcccacgaggcgattttggctcaaccaggacacagcatcaacgggcggattaaaattaccgaacaaggggaagtattagcctccaagtactccttgctagatttagccctgtacaacttggaaaccatcaccacggcggtgattcaagccagcctcctgcgaactgggtttgatgatatcgaaccttggaacgaaattatggaagaattagcagcgcgatcgcggcaacattatcgtggtttaatttacgaacagcctgatttcattgactttttccaccaagtcacacccattgaagaaatcagtcaactacaaattagttctcgtcccgcccgtcgtccttctggtaagaaagatttaagcagtctccgcgccattccttgggtatttagctggacacaaacacgattcttactaccttcttggtacggtgtcggtacagctttacaagaatttttcaacgaagaaccagaagaacatctcaaattgatgcgctacttttatgtcaagtggcctttcttcaagatggtgatttctaaagtagaaatgaccttggcgaaagtagatatgcaaatggctggtcactacgtacaagaattgtctgaccctgaagacaaaccccggtttgagaaagtatttgagcaaatcgccaacgaatattatctcaccagagatttagtcttaaaaatcaccgaccacggtcggcttttagatggtgatcctgtactccagcgttctgtacagttacgcaatggtacaatcgtcccactagggtttatccaagtttccctcctcaagcgcctacgccagtccaaaaataatactgcaacctctggtgtcattcactctcgttacagtaagggagaattattgcgcggcgcactgttaaccattaatggtattgccgcagggatgagaaatacaggttag

SEQ ID NO: 3 - DNA, 897 bp, Zea mays
atgagcgcggagctgaagagggactacgagatcggcgaggagatcgggcgcggccgcttcggggtggtccaccgctgcacgtcccgcgccaccggggaggcctacgccgtcaagtccgtggaccggtcgcggctgggcgacgacctggaccgcgagctcgcgcagctggagccgaagctggcacagctcgccggcgcgggcaacccgggcgtggtgcaggtgcacgcggcgtacgaggacgaggcgtggacgcacgtggtcatggacctgtgcccgggcccggacctgctggagtgggtgggccgccgccgcggcgcgcccgtgccggagcccgtggccgccgccatcgtcgcgcaggtcgcgcaggcgctcgcgctctgccaccgccgcggcgtcgcccaccgcgacgtgaagcccgagaacatcctcatcgacgccgccgccgggagcgacgacgacgaggaggacgaggccgaggcggcgccgcgcgcgcgcctggcggacttcgggtcggcggcgtgggtgggcgccggtgggctcgggcgcgccgagggccttgtggggacgccccactacgtggcgcccgaggtggtggccggcggcgagtacggcgccaaggcggacgtgtggagcgccggcgtggtgatgtacgcgctgctctccggcggcgcgctccccttcggcggcgacagcgccgcggaggtgctggcggccgtgctgcgcggcagcgcgcgcttcccgcccaggctcttcggcggggtgtcgcccgccgccaaggacctgatgcggcgcatgatctgccgcgacgagtggaggaggttcaccgccgagcaagtcctcgctcacccgtggatcgtgagtggcggaggagcccgggcaatggagcggccaacctag

SEQ ID NO: 4 - DNA, 897 bp, Zea mays; identical to SEQ ID NO: 3

SEQ ID NO: 5 - DNA, 885 bp, Zea mays
caagtacgagcatgggcggcgccgcggaggaggcgttgcggcgggagtacgtggtcggcgaggagatcgggcgcggccggttcgggacggtccgccgctgctacgccgccgccacgggggagccgttcgcgctcaagacgacgcccaaggcggcgctgcgggcggacccgctggacctggcgctggcggagcaggagcccaaggtgcaccacctggcgtctgccgccagccgccacgtggtcgcgctgcacgccgccttcgtggacgccgacgccgtgcacctggtgctggacctgtgcgcgggcggggacctgttcgcgctcgtctccgcgcggggcgcgctcccggagcccgaggcggcggagctgatggcgcagctcgccgacgcactcgccggctgccaccgccgcggggtcgcgcaccgcgacgtcaagcccgacaacctcctcttcgacgccgccgccggcggcgcgctcaggctcggggacttcggctccgccgcctggttcggggacggcaggcccatgacggggctggtcgggacgccctactacgtcgcgcccgaggtggtggccggcagggagtacaccgagaaggtggacgtctggagcgccggggtcgtgctctacatgatgctctccgggaccgtgcccttctccggcgccaccgcgggggagatcttccaggccgtgctccgcgggaacctgcgcttccctccgcgcgccttcgccgccgtctcgcccgaggccaaggacctcctgcgccgcatgctctgcagggacgtctggcgcaggctctccgccgagcaagtcctgagtcacccatggattgtgactcgcggcggaagtgtgcctggcggtagactggtttagatgctccgcgtag

SEQ ID NO: 6 - DNA, 1407 bp, Triticum aestivum
accatggcgacgacggttacactcaaatccttcaccggacttcgtcaatcatcaacggagcaaacaaacttcgtctctcatgtaccgtcatcactttctctccctcaacgacggacctctctccgagtaaccgcagccagagccactcccaaactctccaaccgtaaactccgtgtcgccgtcatcggtggtggaccagcaggcggggcagctgcagagactctagcacaaggaggaatcgagacgattctcatcgagcgtaagatggacaattgcaagccttgcggtggcgcgattcctctctgtatggtcggagaattcaacttgccgttggatattattgatcggagagtgacgaagatgaagatgatttcgccgtcgaacattgctgttgatattggtcgtacgcttaaggagcatgagtatataggtatggtgagaagagaagttcttgatgcttatctgagagagagagctgagaagagtggagccactgtgattaacggtctcttccttaagatggatcatccggagaattgggactcgccgtacactttgcattacactgagtacgatggtaaaactggagctacagggacgaagaaaacaatggaggttgatgctgtcattggagctgatggagctaactctagggttgctaaatctattgatgctggtgattacgactacgcaattgcatttcaggagaggattaggattcctgatgagaaaatgacttactatgaggatttagctgagatgtatgttggagatgatgtgtcgccggatttctatggttgggtgttccctaagtgcgaccatgtagctgttggaacaggtactgtgactcacaaaggtgacatcaagaagttccagctcgcgaccagaaacagagctaaggacaagattcttggagggaagatcatccgtgtggaggctcattcgattcctgaacatccgagaccacgtaggctctcgaaacgtgtggctcttgtaggtgatgctgcagggtatgtgactaaatgctctggtgaagggatctactttgctgctaagagtggaagaatgtgtgctgaagccattgtcgaaggttcacagaatggtaagaagatgattgacgaaggggacttgaggaagtacttggagaaatgggataagacatacttgcctacctacagggtacttgatgtgttgcagaaagtgttttacagatcaaatccggctagagaagcgtttgtggagatgtgtaatgatgagtatgttcagaagatgacattcgatagctatctgtacaagcgggttgcgccgggtagtcctttggaggatatcaagttggctgtgaacaccattggaagtttggttagggctaatgctctaaggagagagattgagaagcttagtgtttag

SEQ ID NO: 7 - DNA, 1455 bp, Zea mays
atgtcttcgtcgggcccctccccggcgacgggaatccacgcgtcgccgccgttgggccttttgccggcgacgggaacccatcacaccaggtcatggggcaaaacaacctccacaagttttactggttctaccaccaaacatgagcagagcttgcatggaaatgttaagccgttgcaattggcggcaaatgaatcctctcgtttggcttacagaagtccagcacttaaaaaccagtggaatcttcctgctagttcttcctccactaatgtggttaccacctttgatgataacgaacacgtgtcttccagtgttattgaagaaaaagttggagtactgttattaaaccttggtggtccagagacacttgacgatgttcaaccatttttattcaacctatttgctgatccagatatcattcgactccctaggctcttcaggtttcttcaaagaccactggccaaacttatttctacttttagagctcctaagagtaaagaagggtatgcttcaattggtggtgggtcgccgttaaggaaaattactgatgaacaggcgaatgctttgaagattgccctggaaaagaaaaaattgaacgcaaacatatatgttgggatgcggtattggtaccctttcacagaagaggccattgatcaaattaaaaaggataagattaccaagctcgttgttcttcccctttaccctcagtactccatatcaacaagtgggtcaagcattcgtgttctccaagacattgtcaaggaagattcatatttttctggtttgccaatttccattattgaatcatggtaccaacgagatggctatgtgaaatcaatgtctgacctaattgaaaaggagctctccgccttctccaatcctgaagaggttatgatattcttcagtgcacatggtgtgccacttacctatgttgaggatgctggagatccttacagagatcagatggaggattgtattgctttgatcatgggggagttaagatcaagaggaatcttaaatagtcacactttggcgtaccagagtcgggtggggccagttcaatggctgaagccatatactgatgaagttttagtagaacttggtcaaaagggtgtgaagagcctcctggctgttccagtaagctttgtgagtgagcacatcgagacattggaagaaattgacatggagtacaaggagttggctctggaatcaggcatcaagaactggggtcgggttcctgctcttggatgcacttcaacattcatctccgaccttgcagatgctgtcgtcgaagccctgccctctgcttcagcgctcgcgaccagaaagcctgacgacatcgattccagcatggacctgacgcattacctcaccaagatgctgtttggctcaatcttggcatttgtcctgctgctatcaccaaggctagtttccgccttccggagcaccatgctttag

SEQ ID NO: 8 - DNA, 1455 bp, Zea mays; identical to SEQ ID NO: 7

SEQ ID NO: 9 - DNA, 1455 bp, Zea mays; identical to SEQ ID NO: 7

SEQ ID NO: 10 - DNA, 1749 bp, Glycine max
atggtgctcttcaatgtttcacgcgtagagaccactcccttcgatggccagaagcctggaacctctggtctccgcaagaaggtgaaagtgttcgtgcaacctcattacctccataactttgttcagtcaacattcaatgcattaactgtggaaaaagttagaggtgcaacgctagttgtatctggtgatggtcgttatttttcaaaggaagctattcagattataactaaaatgtcagcagcaaatggagtaagacgtgtttggattggtcaaaatggattgctttcaactcctgcagtatctgctgttatacgtgaaagagttggagctgatggatccagggcaacaggtgcatttatactgacagcaagtcacaatcctggtggccctcatgaggattttggaattaaatataatatggaaaacggtggacctgcaccagagggaattactgacaagatatatgaaaacacaacaacaattaatgagtacttgattgcatcagatctgccagatgtggatatcaccacaacaggtgttacaagctttacaggccctgaaggaccatttgatgttgaggtttttgattcagcaagtgattatataaaattgatgaagtcaatttttgattttgaatctatcaggaaactgctgtcatctcctaaattcacattctgttatgatgcactacatggggttggtggagcatatgcaaagagtatatttgtggatgagcttggggcacaagaaagctctttactgaactgtacaccaaaggaagactttggaggaggacacccagaccccaatttgacatatgcaaaagagttggttgctcgtatgggattgggcaaatccgaaccacaagatgatcccccagagtttggtgctgcttctgatggtgatgcagatcgcaacatgatacttggtaaaaggttttttgtcactccttcagattccgtggccattatcgctgcaaatgccgttgaagctataccatacttttctgctggtttaaagggtgttgccaggagcatgccaacctctgctgccctggatgttgtagccaaacatctgaatttgaaattttttgaggtccccacgggttggaagttctttggtaatttaatggatgctggattatgttcagtctgtggtgaagaaagttttgggactggttctgaccatattcgtgagaaagatggaatctgggcagttttggcctggctatctatacttgcatataaaaataaagataaacttgaagacaagcttgtcactgttgaagacatagttcgccagcattgggctacttatgggcgccattattatactcgatatgactatgaaaatgtggatgcaggtgcagcaaaggaactgatggcatatttggtcaagctgcagtcctcactttcagaagtcaatcagattattaaggggataaggtcagatgtttcgaatgttgttcacggtgatgaatttgagtacaatgatcctgtggatggttccatctcatcacatcagggaatccgatatttgtttgaggatggatcacgattgattttccgcctatctggaactggatcagaaggtgcaacaattcgactatacattgagcaatatgagaaggatccatcaaagattgggagactttcaaatgaagcccttgctcctcttgtggaagttgcattgaaactttcgaagatggaagaattcactggtcgatccgctccaacagtcattacatag

SEQ ID NO: 11 - DNA, 1611 bp, Zea mays
atggcccttggagctgcgtaccatcactacctgcagctcgccggcgaccatggcaccgccacacacgcactgctcctcggcgtacttatcttcctcgtcatccgcctagtatccgcaaggcgaaccggcacaacctcagccaacaaacgtaagcagcaacagcggcttccgctcccgccttcgcccccgggcaagctgcccatcatcggccacctccacctcatcggcgccgagacccacatctcgatccgggacctggacgccaagcacgggcgcaacggcctgctgctcctccgcatcggcgccgtgcccaccctgttcgtgtcctcgcccagcgccgccgacgccgtcctgcgcacccaggaccacatcttcgcgtcgcggccgccgtccatggccgccgagatcatccgctacgggccctcggacgtcgcgttcgtgccctacggcgagtactggcggcagggcaggaaactcctcaccacgcacatgctcagcaccaagaaggtgcagtccttccgccatggccgacaggaagaggtgcggctcgtcatggacaagatccgcgcggctgccaccgccgcgccgccggcggcggtggacctgagcgatctcctgtccgggtacaccaacgacgtggtgtgccgcgcggtgctgggcgcgtcgcaccggaaccaaggccggaacaggctgttcagcgagctgacagagatcaacgtgtccctcctcggcgggttcaacctcgaggactacttccccccgaatatggccatggcggacgtgctcctccggctggtgtccgtcaaggcccggcggctcaaccagaggtggaacgacgtgttcgacgagctcatccaggaacacgtgcagagcaggccctccggcgagagcgaggagagcgaggcggacttcatacacgttctgctctccatacagcaagagtacggcctcactacggacaatctcaaggccatcttggtggacatgttcgaggcaggtatagagacatcttacctgacgctagagtacggcatggccgagctcatcaacaacaggcacgtcatggagaagctacagacggaggtgaggacgacgatgcgctcgccggacggcaagaagctggacatgctagcggaggaggacctcggcagcatgccctacctcaaggcgaccatcaaggagacgctgcgcctgcacccgccggcgccgttcctcctcccgcactactccaccgccgactccgagatcgacggctacttcgtcccagccgggacgcgcgtcctcgtcaacgcctgggcgctcgggagggaccgcacgacgtgggagaagccggaggagttcatgccggagcggttcgtgcaggaaccgggcgccgtggacgtccacatgaagggcaaggacctcaggttcatcccgttcggctccggccggaggatctgccccgggatgaacttcggattcgcgaccatggagatcatgctggccaatctcatgtaccattttgattgggaggttccgggctctgcagcaggggtgtccatggacgagtcctttgggctgacgcttcgccggaaggagaagcttctccttgttccaaggattgcttcctag

SEQ ID NO: 12 - DNA, 579 bp, Zea mays
atggcagcgacggtgatggcctccatgagccccctcgcctccgccaccccgggcgcgcgtcgcgctttccctgtacggctgctgctccaggcatctgcgctcgcgccgcgccggcgcgccttggccgtgaccgtgagggcccagagcgacgacgccgaggccgagccaaaggaggcggcggcggcggccaccaccccggcgccaaagtccaaggcggcggcggcggcgagccccgggctgtgggacgcgctggcgttcagcggcccggctcccgagcgcatcaacggccggctcgccatggtgggcttcgtgtcggcgctcgccgtcgaggcgtcccgcggcgggggcctcctctcgcaggccggcagcgggtccgggctcgcctggttcgcggccacggctgccgtgctgtccgtggcctcgctggtgccgctgctcaggggcgacagcgccgaggccaggagcggcgccgtcatgagcgccaacgccgagctctggaacggccgcttcgccatgctcggcctcgtcgcgctcgccttcactgagtacctcaccggcgcaccgttcatcaacgcgtag

SEQ ID NO: 13 - DNA, 1593 bp, Zea mays
atgcaagattggagggtgcgtgagttcgaaggtaaattcactgatgagtttgcccacagcagtagcaacgaacataaaggtggagttgaggcttctggtgtcattagtagtaagaagttgaagcatgcagttgctaatgagaaaatccaaggtgtcatccccggtacaaatagctcaggttcactgaaacgtaattcagagaacatccaacatgcgaacggggtattatcccagaatataagctgcgctggtgactacaaaaatggctccattgcctttcctttgagagaagaaaatacaataactgagaccagatgtccagatgataactggaactcctgtcagtttgcactgaacaatggttcgtccattctcaataaccacagtgctccccaggatagcctcacttatggagataatgatctaaactacatcgaatggcctggcattgacaattttgaggatgtcgatacattattcaggagttttgattcaacatatggtcagcagcagctggagaatgcagatgggttatcttggattccgtcttcagatgctgtttactctaccgatgttgctttgcaacaagggcttgattcgtcttattcagattatggtattctggatgatctctccgcattccaatgtgcagaagataaatcactacccttggttgatccttcatcagctttatgtgataatcaattcaatgatacctacctgttcagtgaacaaaagaatgtgaatgcatatggtgaacagatataccaagaggatttgatggagttgttgcccactgaccagatatgcagcggacatgaaaacattgatatggttggaaaccagtatccatctgaaaatgcaattcaaggtaccgaagataagaaattctctatagcgtcaacttcccagctgagttctcagaatttactgaatcaaagacaccacttagattccagttcaccaagcaatattacttcggagtcctatccaggaaagttcggtccatctagctgttcttctgcacaaagaaactcaaaagtgcagaagaaaactgtcaacatacaaccaagacagccagcaaatgataatgttatgaacacaagcagagcttcttacccttgtgagaactatgaaactgaaagaagaggattagggaaaagaactctgggggatcctcaagttacaatgggtagttcaatggtagtggatggctcatttgtatcatctatgtcctctgataactcagtcgaagaaagcagctttcaacaactgcaggatgctgttagtcagctggatgtgcaaaccaaattgtgcatcagggatggtttataccgattggcacgaagtgcgcaacatagacaagtttttccaaatacgatgaacagcaatggtggtagcgaggacggaaaggaactggagaacgcagaaacttcgtgcaagttcatggaccctcggagcatcgagacgcagacaaacccgatcgatcggtctatagctctgctacttttccgcgagtcatctggcggccatgtccatgtggctgtagcagccgacgatgcctcgtcactgaaatcccctgctggtgtatag

SEQ ID NO: 14 - DNA, 1593 bp, Zea mays; identical to SEQ ID NO: 13

SEQ ID NO: 15 - DNA, 807 bp, Oryza sativa
atggcgcagtcgatgctggtgtcgggagccaatggcacggtggccgccgcgagcaccagcaggctgcagcccgtgcggccgacgccgttctcgcggctcgtgctgtcgcagccgtcgtcgtcgctggggcgcgcggtgtccgtcaagacggtggcgctgttcggcaggtccaagaccaaggccgcgcccgcaagaaaggctgagccgaagccaaagttcaagaccgaggacggcatcttcggcacgtccggtgggatcggtttcaccaaggagaacgagctgttcgtcgggcgtgtcgccatgctcgggtttgccgcgtcgatcctgggtgaggccatcaccgggaagggaatcctggcgcagctgaacctggagacggggatcccgatctacgaggcggagcccctcctcctcttcttcatcctcttcaccctcctcggcgccatcggcgcgctcggcgaccgcggcagcttcgtcgacgaccagccggtgacgggcctcgacaaggccgtcatcgccccgggcaagggcttccgctccgcgctgggcctcagcgagggcggcccgctgttcggcttcaccaaggccaacgagctgttcgtcggccggctcgcgcagctcggcatcgccttctccatcatcggcgagatcatcaccggcaagggcgccctcgcgcagctcaacatcgagaccggcgtccccatcaacgagatcgagccgctcgtcctcttcaacgtcgtcttcttcttcatcgccgccatcaaccccggcaccggcaagttcgtcagcgacgacgacgaagagtag

SEQ ID NO: 16 - DNA, 438 bp, Glycine max
atgccagttccacttgccccatacccaacaccaccagctccatatacaccaccagctaatggtgtacagagtcaacttgtctgttctgggtgcagaaaccttctagtgttcccagttggagccacctctgtgtgctgtgctgtttgcaatgctgtcacagcagtaccacctcctggcacagaaatggcccagttagtatgtggaggttgccatactttactcatgtacatccggggcgcgacaagtgtgcaatgttcttgttgtcacactgtcaatctagctttggaagcaaatcaggtggcacatgtcaactgtggcaactgcaggatgctactcgcgtaccaatatggagcaagatccgtgaaatgtgcagtttgcaattttgtaacatcagttggggccacagcaagcaccactgagcagaagttcagcacttag

SEQ ID NO: 17 - DNA, 1542 bp, Arabidopsis thaliana
atgttcgaaacagagcatcatactctcttacctcttcttcttctcccatcgcttttgtctcttcttctcttcttgattctcttgaagagaagaaatagaaaaaccagattcaatctacctccgggtaaatccggttggccatttcttggtgaaaccatcggttatcttaaaccgtacaccgccacaacactcggtgacttcatgcaacaacatgtctccaagtatggtaagatatatagatcgaacttgtttggagaaccaacgatcgtatcagctgatgctggacttaatagattcatattacaaaacgaaggaaggctctttgaatgtagttatcctagaagtataggtgggattcttgggaaatggtcgatgcttgttcttgttggtgacatgcatagagatatgagaagtatctcgcttaacttcttaagtcacgcacgtcttagaactattctacttaaagatgttgagagacatactttgtttgttcttgattcttggcaacaaaactctattttctctgctcaagacgaggccaaaaagtttacgtttaatctaatggcgaagcatataatgagtatggatcctggagaagaagaaacagagcaattaaagaaagagtatgtaactttcatgaaaggagttgtctctgctcctctaaatctaccaggaactgcttatcataaagctcttcagtcacgagcaacgatattgaagttcattgagaggaaaatggaagagagaaaattggatatcaaggaagaagatcaagaagaagaagaagtgaaaacagaggatgaagcagagatgagtaagagtgatcatgttaggaaacaaagaacagacgatgatcttttgggatgggttttgaaacattcgaatttatcgacggagcaaattctcgatctcattcttagtttgttatttgccggacatgagacttcttctgtagccattgctctcgctatcttcttcttgcaagcttgccctaaagccgttgaagagcttagggaagagcatcttgagatcgcgagggccaagaaggaactaggagagtcagaattaaattgggatgattacaagaaaatggactttactcaatgtgttataaatgaaactcttcgattgggaaatgtagttaggtttttgcatcgcaaagcactcaaagatgttcggtacaaaggatacgatatccctagtgggtggaaagtgttaccggtgatctcagccgtacatttggataattctcgttatgaccaacctaatctctttaatccttggagatggcaacagcaaaacaacggagcgtcatcctcaggaagtggtagtttttcgacgtggggaaacaactacatgccgtttggaggagggccaaggctatgtgctggttcagagctagccaagttagaaatggcagtgtttattcatcatctagttcttaaattcaattgggaattagcagaagatgataaaccatttgcttttccttttgttgattttcctaacggtttgcctattagggtttctcgtattctgtag

SEQ ID NO: 18 - DNA, 1542 bp, Arabidopsis thaliana; identical to SEQ ID NO: 17

SEQ ID NO: 19 - DNA, 1542 bp, Arabidopsis thaliana; identical to SEQ ID NO: 17

SEQ ID NO: 20 - DNA, 318 bp, Oryza sativa
atggaaggtgtaggtgctaggcagaggaggaaccctctgatacccagaccaaacggttcaaagaggcatctgcagcatcagcatcagccaaatgctgccgagaagaagaccgccgcgacatcgaattacttcagtatcgaggcgttcctcgtgctcgtcttcctcaccatgtcattgctcatacttccattggtgcttcccccattgcctccgccgccatcgctgctgctgctgctgccagtctgcctgctcatcctgctggttgtgctggccttcatgccaacggatgtgcggagcatggcttcctcttacttgtag

SEQ ID NO: 21 - DNA, 1680 bp, Cyanidium caldarium
atgtgtgggattcttgcggtgttgggctcgtcgttaccggtcgaagagcttagagagttggttaaaagctgcaccaaaaaactatatcacagaggtccagatgaagaacaatatttcattagtgaagatgggtggtgtggtttaggctttgccaggttgaagattgttgatcctgagcacggtgtccagcctatgttcaacgaccaacggacagtttggagtgtcactaatggcgagctttacaaccatgaagagatccgaaaaacggaattgaacaatatgacactccattctcattctgactgcgaaataatgatacctttgtatgagaaatatgtttctagtcagcgttatgatcatgacattcaatatgtttataatcttctccgtggagtctttgcttcttgcctggttgatttgaaacgtggttttttcatggctggaagagatcctatcggggtccgagctcttttttatgggacaagtaaagatggtgctgtttggtttgcttcagaggcaaaagcaattgtggatgtttgtgattatgtgacagcattcataccaggtacctttgtgaaaggatacagaggccgcgaacaagcattttcttttacgagatattacgaaccagtgtactggcatgatcactggatgccggtttctccagttgactatcaacttttacatgacacctttgtgttgtcttgtaagcgtcgtttaatgtccgacgtgcctattggagtatttatctctggtggtttgggttcttctcttgtggcctccgtcgccaaacgcttactggatcccaactatgattttcattcttttgcttgtggtcttgaaggagcaccagatgttgctgcagcgcaaagagttgccgatttcttaggaacaaagcaccacgtattaacatttactgtggaggagggtatccaagcactagaccaagtaatatatcacttggaaacgtacgatgttaccacagttagagcatcgacgccgatgtatttgttatcaggtttgtgcaaaaagtatgtcaaagtagtgttatcaggtgaaggagcagatgaaatcttcggtggatatctctatttccacaatgcaccaaatgagattgcatttcatcaagaagttgttcgccgagtgaaacttttatacacagccgacgtattgcgtggagatagagcaacggcagcacaaagtttagaacttcgagttccgtttcttgatagagactttctggatgttgcaatgagtattcatccgcgtgaaaaggttacttctaagcatagaatcgagaaatatatcattcgctatgccttttccaaggagttttgtggtgaagagtatcttcctgacgatattctttggagacaaaaagaacagttttcggatggcgtgggctatagctggatcgatggtttaaaggcgtattgtgaaaaggccgtttccgatgcagacttgcaaaatgccgctcagcgttttccgcacgatactccaacaaccaaagaggcatatgtttaccgagctatattcgaaaaacattttgggaattgcaaggcagtacaaggtcttcgtgaatcagttgcaagatgggtacctatgtggagtgacagcacggatcctagcggtcgtgcacaaaaagttcatgtggctgcatattcaaatggaggagactag

SEQ ID NO: 22 - DNA, 510 bp, Arabidopsis thaliana
atggctgcttcttccgaacccaaatctctttacgatttcaccgtcaaggatgctaagggaaacgatgttgatctaagcatctacaaagggaaggttcttttgattgtgaacgttgcttctcaatgtggcttgactaattcgaattatactgagcttgcgcagctgtatgagaagtacaaaggccatggtttcgagattcttgcgtttccgtgtaaccagtttgggaatcaagagcctggtactaatgaagagattgttcagtttgcttgtactcgtttcaaggctgagtacccgatcttcgacaaggttgatgttaacggtgacaaagctgccccagtctacaagtttctgaaatcaagcaaaggcgggctctttggagacggcattaagtggaacttcgcaaagttcttggttgacaaagatggaaatgttgtcgatcgtttcgcaccaactacctcacctctcagcattgagaaggatgtgaagaagttgttgggagttactgcttag

SEQ ID NO: 23 - DNA, 510 bp, Arabidopsis thaliana; identical to SEQ ID NO: 22

SEQ ID NO: 24 - DNA, 1938 bp, Arabidopsis thaliana
atgtccgagattctctcttcgttgaggtcactaatggcctctcactctcctcctcttgatgctttggttgttccttccgaagactatcaccagagcgagtatgtttctgcacgagacaaacgccgtgagttcgtgtctggattcagtggaagtgcaggtttggcacttatcacgaagaaggaagcaagactttggacagatggtcgatacttcttgcaagcattgcaacagcttagcgatgagtggacactaatgcggatgggagaagatcctcttgttgaagtttggatgtctgataatctacctgaagaggcaaatataggtgttgattcatggtgtgtctcggtagacactgcgaatagatgggggaaatcgtttgccaagaagaatcagaaactaatcaccacaactactgatcttgtggatgaagtttggaagagtcgtccaccttctgagatgagtccggttgttgttcatcctttggagtttgctggccgttctgtttcccataaattcgaagatttgagggcaaagcttaagcaagagggtgctcgtggtttggtcatcgctgctcttgatgaggttgcttggctatataatatccgtggaactgatgttgcttattgtcccgttgttcatgcgtttgcaatccttaccaccgactctgcgtttctctatgttgacaaaaagaaagtgtctgatgaggcaaactcttatttcaatgggctcggtgtggaagtccgggaatacacagatgtgatctcagatgtggccttgcttgcttcggatcgacttatttcttcatttgcctctaaaactgtccaacatgaggctgcaaaggatatggagattgattctgaccagcctgatcggttatgggtggatcctgcttcgtgctgctatgcactttactccaaattggatgctgagaaggtccttctgcaaccatcccctatatccctctcaaaagccttgaagaacccggttgagctcgaagggatcaagaatgcacatgttcgtgatggtgctgctgttgtccagtaccttgtttggctcgacaatcagatgcaggagctctatggagcatctggatacttcttggaagcagaggcaagcaaaaagaaaccatcagaaacctctaagcttactgaagtgactgtgagcgataagctggaaagtcttcgagcttcaaaagagcattttagaggtttaagctttcctactatatcatcggttggttcaaacgctgctgttattcattattcaccagagccagaagcttgtgccgagatggaccccgacaaaatttacttatgtgattcaggagcacagtatctcgatggaacaactgatataacccgaacggttcactttggaaaaccttcagctcatgaaaaggaatgctatactgcggtcttcaagggtcatgttgcactaggaaatgctcggtttccaaagggaacaaacggctatacacttgatattcttgctcgagctcctttgtggaagtatgggttggattatcgacatggtactggtcatggagttggttcttacctttgtgttcatgaaggacctcaccaagttagtttcagaccgagtgccaggaatgtacctcttcaagctaccatgactgtaacagatgaacctggttactatgaagacgggaactttggtattaggttggagaatgttcttgttgtcaatgacgctgagactgaattcaattttggcgacaagggctacttgcaattcgagcatatcacttgggcaccatatcaagtgaaacttatcgatctagacgagttgacacgggaagagattgactggttaaacacatatcattcgaagtgcaaagacatcttagccccatttatgaaccagactgaaatggaatggctcaagaaagctaccgaacctgtaagtgtatccgcttag

SEQ ID NO: 25 - DNA, 813 bp, Oryza sativa
atgagcccgcagatccggtggcgtaagggcgagctgatcgggagcggcgcgttcgggcaggtctacctcgggatgaacctggacaccggagaactcctcgcagtaaagcaggttttgattgggagcaacaatgcgacgcgggagaaagcccaggcgcacataagagagctcgaggaagaagtgaagctacttaagaacctgtcacatcccaacattgttcggtaccttgggacagtccgggaggaagatactctgaatattttgctcgagttcgtgccaggaggttccattcagtctctccttgggaaactaggttcatttccggaggcagtcattagaaagtacacaaagcaaattttgcaagggttggagtatttgcataacaatgcaataatacatagagacataaagggagcgaacattcttgttgataacaaaggatgcattaaacttgctgattttggggcatctaagcaagtggcaaagttggctactatcacagccgctaaaacaatgaaagggacacctcactggatggcacctgaagtcattgttgggagtgggcataacttctctgcagacatctggagtgtgggatgcacagttattgaaatggctactggtaaaccaccatggagccagcagtaccaggaggttgcccttctatttcatgtcggaaccacaaagtcacacccgcctatacctgaacatctctcccccgaggccaaagattttctgctaaaatgcctgcagaaagaaccagagttgagatcgacagcatcagatttattgaagcacccatttgttacatag

SEQ ID NO: 26 - DNA, 813 bp, Oryza sativa; identical to SEQ ID NO: 25

SEQ ID NO: 27 - DNA, 453 bp, Arabidopsis thaliana
atggagtcatcacaagcaacgacgaagccaacgagaggagcaggaggaaggaaaggtggagataggaagaagagtgttagtaaatctgttaaagctggtcttcaatttcccgttggtcgtatcgctcgttacttgaagaaaggtcggtacgctctccgatacggttccggtgctccggtttacctcgccgccgttctcgaatacctagccgccgaggtacttgagctagctgggaacgcagcgagagataataagaagaacaggataaaccctaggcatctatgtttagcgataaggaacgatgaggaattggggagattgcttcatggagttactattgctagtggtggtgttcttccaaacattaatccagttcttcttcctaagaaatcaacagcttcttcttctcaagcggagaaagcttctgctaccaaatctcctaagaaggcttag

SEQ ID NO: 28 - DNA, 453 bp, Arabidopsis thaliana; identical to SEQ ID NO: 27

SEQ ID NO: 29 - DNA, 879 bp, Arabidopsis thaliana
atgggagtcatgatcaatcaccatttcctcgcttttatcttcggcatcttaggaaacgtgatatccttccttgtattcctcgctccagtgccaactttttatagaatatacaagagaaaatcgacggaaagtttccagtcgctaccgtaccaagtgtcgctatttagctgcatgctatggctctactacgcattgattaagaaagacgcttttctcctaattaccatcaactcctttggctgcgtcgtggagactctctacatagccatgttcttcgcttacgccaccagggagaaaaggatatcggctatgaagttgttcatagcaatgaacgttgccttcttctcgttgattctaatggtaacacatttcgtggttaaaactcctcccctccaagtctctgtactcggctggatttgtgttgccatttctgtttctgttttcgctgcccctctaatgatcgtggctcgtgtgataaagacaaagagtgtggagtacatgcccttcacgctttctttcttcctcactataagcgccgttatgtggttcgcttatggtttattcctcaatgacatatgcatagcgattccaaacgtggtgggattcgtactagggctgttgcaaatggttttgtacttggtttacaggaactcaaatgagaaaccagagaagattaattcgtcagaacaacaacttaagagtattgtcgtgatgagtccgttaggtgtgtcggaagtgcacccagttgtgacggaatcggtggacccactctctgaagccgttcatcatgaggatctgtccaaagttactaaagtggaggagccgtcaattgaaaacggcaagtgctacgtggaggctactcgtcctgaaaccgtttag

SEQ ID NO: 30 - DNA, 879 bp, Arabidopsis thaliana; identical to SEQ ID NO: 29

SEQ ID NO: 31 - DNA, 1911 bp, Zea mays
atgctgtccacgcgcaccgccgccgtcgccgcctccgcgtcccccgcctccccgtggaagctgggaggacggagcgagggcggcgccagctgcgacggatgccggacctacaggaacaccctgcggaggagggccgcgcccgccaaggtgcgcgccttgccgcccaggcgggtggacgcggtcgcgatggtctccaacgcggagacggagacggagaaggagcaggaggaggcggcggccgccagcgaggagctgcccgtcatgccctgggccacctccgtcgcaagcggttacacccttttgagggatccacaccacaacaagggtcttgctttcacagaggaggaaagggatggacactacttgcgtggactgcttcctccggcagtactatctcaggaactccaaattaagaagttcatgaacaccctgcggcagtaccagacccctttgcagcggtatatagctatgatgaaccttcaggaaacggacgagaggcttttctacaagcttttaattgataatgtggtggagctgcttccttttgtttacacaccaactgtaggtgaggcctgccagaagtatgggtccatctttggacgaccacagggtctgtatgtcagcctgaaggacaaggggaaggtcctagaagttctaaggaactggccacataggaacattcaagttatctgtgttactgatggtgagcgaatcttgggacttggagatttgggttgtcagggaatgggaattcctgtaggcaaacttgctctatacactgctctaggaggagttgacccatcagtttgcttgcctatcacaattgatgttggtacaaataacgagaaactgcttaatgatgagttctacattggactccggcaaaaacgtgcgactggcgaggagtatgatgagcttattgaagagttcatgtctgctgttaagcaattctatggtgagaaagtcctcattcagtttgaggactttgccaatcacaatgcctttgatttgcttgaaaaatatagcaagagccatcttgttttcaatgatgatatccagggcacagcatcagtggtccttgcaggtttgttagcagcactcaagatggttggtgggaccctggcagagcagacgtatttgttccttggtgctggggaggctggaactggtattgcagaacttattgctcttgagatttcgaaacagacgaatgctccaattgaagagtgccgcaagaaggtttggctggtggactcaaagggtttgattgttgactctcgtaaaggctcccttcagccattcaagaaaccttgggcgcatgagcacgagcccttgaaaaccttgtatgatgctgttcagtccatcaaacctacagttctgatcgggacatctggagttggaagaacattcacaaaagaaatcattgaggccatgtcttccttcaacgagaggcctatcatcttttcactgtcaaacccaacctcgcattctgaatgcactgctgaacaagcatatacatggagtcagggccgttcaatctttgccagtggcagtccatttgcccccgtggagtacgaaggaaagacttttgtgcctgggcagtcgaacaatgcctacattttccctggactcggcctcggtcttgtgatctctggagccgtccgtgtccacgaggacatgcttctcgccgcctcgaaagcgctagctgatcaggccacacaggacaacttcgagaagggctccatcttcccacccttcaccagcatcagaaagatctctgcgcacatcgctgcagccgtggctgcaaaagcctacgagctcggtctggcgacccgtctgcctccccccagcgacctggtgaaatatgcagagaactgcatgtacactcccgtctaccgcaactaccggtag

SEQ ID NO: 32 - DNA, 1935 bp, Zea mays
atgatctccgcgcgcaccgccgcagcttcccccgcttccctgtggaagcagggaggacgaagcgagggcggcggcagctgcgacggatgtcggacttacaggaacactttgcggagggccgcagcagcgaaggtgcgtgccttgccgtcgagggcggtggaggcggtcaaaatgggttccgccgcggagatggagcaggaggaggcggaggtggccgcggccgcggccggcgtcgtcgtcgaggaccactacggcgaggacagcgccaccgaggagctgcccatcctgccctgggccttctccgtcgcaagcggttacaccctcttgagggatccacatcacaacaagggtcttgctttcatggagaaggagagggatgcacaccacttgcgggggctgcttcctcctgcagttgtgcctcaagaactccaaattaagaagatcatgcacaacctgcggcagtaccaggtccctttgcagcgctatatggccatgatggaccttcaggagaggaacgagaggcttttctacaagcttttaattgataacgtggaggagctgcttcctgtggtttatacaccaactgtaggtgaggcctgccagaagtatgggtccatctttcgacaaccacagggtctgtatgtcagcttgagggacaaggggaaggtcctagaagttctaaggaactggccacataggaacattcaagttatctgtgttactgatggtgagcgaatcttgggacttggagatttgggttctcagggaatgggaattcctgtaggcaaacttgctctatacactgctcttggaggagttcgtccatcagcttgtttgcctatcacaatcgatgttggcacaaataatgagaaactgcttaatgatgagttttacattggactccggcaaaaacgtgcaactggcgaggagtatcatgagcttatggaagagttcatggctgctgttaagcaaatctacggcgagaaagtcctcattcagtttgaggacttcgcgaatcataatgcttttaatttgcttgcaaaatatagcaagagccatcttgttttcaatgatgacatccagggcacagcatcagtggtccttgcaggtttgttagcagcactcaaggtggttggtaggaccttggcagagcacacttatttattccttggtgctggggaggctggaactggtattgcagaactcattgctcttgagatttcaaaacagacgtcggctccaattgaagagtgccgcaagaagatttggttggtggactcaaagggtttgattgttgactctcgtaaaaactccgttcagtcattcaaaaaaccttgggcacatgagcatgagcccttgacaaccttgtacgatgctgttcagtccatcaaacctacagttctgattgggacgtctggagttggaagaacattcacaaaagaagttgttgaggccatggcttccttcaatgagaggcctatcatcttttcactgtcaaatccaacctctcattctgaatgtactgctgaagaagcatataactggactcagggtcgtgtaatatttgccagtggcagtccatttgaccctgtggagtacgatgggaaggtttttgtacctggacagtcgaacaacgcctacattttccctggatttggcctcggtcttgttatctctggagccatccgtgtccacgaggacatgcttcttgccgcctcggaagcactagctgctcaggccacacaggagaacttcgacaagggatcaatcttcccgcccttcaccaacattagaaagatctctgcgcgcattgccgcagccgtggctgcaaaagcttatgaactcggtttggcgacccgtctgcctcccccaagggacctggtgaaatatgcacagagctgcatgtacactcctgtctaccgtaactaccggtag

SEQ ID NO: 33 - DNA, 510 bp, Arabidopsis thaliana
atggcggatgaatctccaaagtctatctacgacttcaccgtcaaggatatcggaggtaacgatgtgagtttggaccaatacaaaggcaaaactcttttggttgtaaacgttgcttccaaatgtggtctgacggatgcgaactacaaggaactgaatgttctgtacgagaaatacaaggagcaagggttggagatattagcattcccgtgtaatcagttcttaggacaagaaccaggaaacaatgaagagattcaacaaactgtctgcaccaggttcaaagctgaattccccatctttgacaaggtggatgtgaacggtaagaacacggcaccattatacaagtacttgaaagcagagaaaggaggtttgctcattgatgctatcaaatggaacttcaccaaattcttggtttctcctgatggcaaggtcttacagagatattctcccagaacctctcctcttcaattcgagaaggacattcaaactgcgttgggacaggcctcttcttag

SEQ ID NO: 34 - DNA, 969 bp, Arabidopsis thaliana
atggacggagaagagcttaccgagcaggagactgccttgtacgaccgccagattagggtttggggcgctaatgctcagagaagattgaccaaagctcatatcttggtatctggaattaaggggactgttgctgagttttgcaagaacattgtgctggcaggagttggttcagtgactttaatggatgatcgtttagcaaacatggaggccttgaacgctaactttttgattccgcctgatgaaaatgtttacagtggcaaaactgtggctgagatttgtagtgattcactcaaggatttcaaccctatggtccgtgtttccgtagagaaaggtgatttgtcaatgcttggcactgatttttttgagcagtttgatgtcgtagttataggctatggttctcgtgctaccaaaaaatatgtcaatgaaaaatgtcggaagttaaagaaacgtgtcgcattctatacagtcgattgtagagactcatgtggtgaaatctttgtggacctccaagattacaagtacacaaagaaaaagcttgaagagatggtggaatgcgaactaaattttccaagttttcaggaagctatatcggtaccatggaaaccgattcctcggagaacagcaaagctctactttgctatgagagtaatagaagtgtttgaagagagtgaagggcgtaaacatggagaatgttcgctactcgatcttgccagagtcttggaaatcaaaaagcaactctgtgaggcaaactctgtgagcgagagccatataccagatattctcttggagagacttatcactggtactactgaattcccgccagtttgtgccattgtgggaggaatattagcacaggaggtgatcaaagcagtatcaggcaaaggagacccgttgaaaaacttcttctactatgatggtgaagatgggaaaggtgtgatggaagacatttccgactcttttacctcttag

SEQ ID NO: 35 - DNA, 711 bp, Oryza sativa
atggagaagaacaccaccgccatggggcaattgatgagctcctccgcgacgacggcggcgacggcgacggggccggcgtcgccgaagcggccggcggggcggaccaagttccaggagacgaggcacccggtgttccgcggggtgcggcggcgcgggcgcgcggggcggtgggtgtgcgaggtgcgcgtcccgggcagccgcggcgaccgcctgtgggtcggcacgttcgacaccgccgaggaggccgcgcgcgcgcacgacgccgccatgctcgccctgtgcggggcctccgccagcctcaacttcgccgactccgcctggctgctccacgtcccccgcgcccccgtcgcctccggccatgaccagctgcccgacgtgcagcgcgccgccagcgaggccgtcgccgagttccagcgccggggaagtactgccgccactgccaccgccacctccggcgacgccgcatccaccgctcctccgtcgtcgtcgcccgttctgtcacccaacgacgacaatgcctcgtcggcgtccactcctgcggtggcggcggcgttggaccacggcgacatgttcggtggcatgcgcaccgatctgtacttcgcgagcttggcgcagggtctgctcatcgagccgccgccgccgccgaccaccgctgagggtttctgcgacgacgaaggatgcggcggcgctgaaatggagctgtggagctag

SEQ ID NO: 36 - DNA, 1755 bp, Xenorhabdus nematophila
atggcttcctctatgctctcttccgctactatggttgcctctccggctcaggccactatggtcgctcctttcaacggacttaagtcctccgctgccttcccagccacccgcaaggctaacaacgacattacttccatcacaagcaacggcggaagagttaactgcatgcaggtgtggcctccgattggaaagaagaagtttgagactctctcttaccttcctgaccttaccgattccggtggtcgcgtcaactgcatgcaggccatgggtatcgtaggacattttattaacggcaaggttactgatatccattcacgcttacaggatatttataatcctgccactggcgaagtcagccgtcaggttgctattgcctccaaggctaccgctgaagaagcgattgcggcagcacaagcggctttccctgaatggcgtgatactccgccaataaagcgggcacgtattatgttccgttataagcaactgctggaagagcatgctgatgaaatttgtcgtttgattggtcaggagcatggcaagattattcatgatgcagcaggtgaactccaacgtggtatcgaaaatgttgagtatgcctgtggagcacctgaaatcttgaagggagagtttagtaaaaacgtagggccgggaatcaactcctggagcgacttccagccattgggtgttgttgcagggattaccccatttaacttcccggcgatggttcctctgtggatgtaccctctcgcactggtttgcggtaatacctttgtactgaaaccctcagaacgtgatccaagtgctcccctgtatattggccagttattaaaaaaagcggggctacccgatggtgtatttaacatcgtcaatggtgacaaagaagtggtggatacactactaactgacaaacgggtaaaagcagtcagttttgtgggatcaactcccgtcgcgcggtatatctacacgaccgctacagccaacggcaaacgttgccaagcacttggcggggctaaaaaccacgctatcgtcatgccagatgccgatatggagaatgtagtaaactcactcttaggggctgcatttggttcatcaggtgagcgttgtatggcactgtctgttgcagtggcaatcggtgatgaaattgctgatcagttggtcactcagctgcaagaacgcatgaagtccctgaccattggggttcatagtgataaaaataatgattttggccccgtcattacccgcgagcatcagcaaaaagtatgcggttatattacaagtgctgaacagcaaggcgccaaaattttggttgatggtcgtaacatgaaagtttctggttatgaaaatggcttctttgtcggtgccacattgattgatgatgtcactacagatatggatagctataaagcagaaatctttggccccgttttacaagtcgttcgcgttaaaaccatgcaggaagcgatggatattatcgatgaacacgaatatggcaacggcacttgtatctatacgcgtgatggagaggcagctaactattttgccgatcgtattcaggttggtatggttgggatcaatatcccgctgcccgtccctgtttcttaccatagctttggcggctggaaaaactcattgtttggtgatctctacgcctatggtcctgatggtgtgcggttctatactcgtcgtaaaactatcacgcaacgctggccatccgctaacctgcgtgaaggcgcagagttctcaatgccaacatag

SEQ ID NO: 37 - DNA, 1424 bp, Arabidopsis thaliana
aattaaatgcctcgagtcatccctccggagaatctcggttgcccaccattccgtgctttaacttttgactctctcggcttaataaaagtgactgaagctcgtggtcaagagagagggattccgactgtagtgaacacatggggagagatgaatgcatctagaagtgttcttgctgcttccattgatgaccggttaaggaatccgcttttggctgttgcaagaaaagatggcaatgttgaggttattaacccttgtaatggtgatcttcacttctcatactctgtatttggtgatgatggttgttcccctgaggataacgaaatttctgccctgcacttattcaggaaaaagatagatgatcagacagaaagatcttgcacattgcttacatgtacgaaaaagggagatgtgagtctcagatcagttaaatttccagatgcacatggtaattccacggatgatgcttctcctaaaacatggaaagcatgtggttctggtgaaatattggttggtaaagtggatgggagcgaaaacttcagcttatttggagggaaacgggttgaggccaatatatgggatcttgaacaatgtacaaagatctggagcgcgaaatgccctcctaagaacaatcttggaatcttcacgcctacctggttcactagtgctacgttcttgagcaaggatgatcaccgtaaatttgtcacaggaaccaagtctcaccaggtccgtctttatgacatttctactcaacgtagaccggtcctgtcctttgatttccgtgagaccgctattacatcaattgcggaagacccagacggtcatactatctatgtcgggaatgcttctgctgacctagcttcctttgatatacgaacaggaaagctgttgggaagctttttaggaaaatgctctggaagcataagatctgtggttagacatccacagcatcaagtgatagcttcttgcgggctggaccgatatttacgtgtttatgacgttaagacacgccagctcatttctgcggttttcttgaagcagcatcttacaggtcttgtattcgactcgggcttttctggagaagcagagacagctgtagcaaacacagtggctgaggctgccacagaggagaagatgacgatcatggaccaggaagatgatgaaacagagaaggctcctgtgaaaagaaagaagtcaaagaaagagaaacgcagtagagaaatagtctttgagggtgaagacgatgaggagaatgaagacgagattgagaaggctccggtcaaaacaaaaaagtcaaagaaagagaaacgcagtagagaaaaagtctctgaaggtgaagagaaagacgagctaagaagcaagaagacacgagagcacaagaagaagaccaagatagtgaaacacaatcaagaagactagggcgctag

SEQ ID NO: 38 - DNA, 1440 bp, Arabidopsis thaliana
atgacgtttagggagaaaatgccgacgagtcctaaatcgcctctgagaagacgacgttcgagctggaccggtacatggttaaaccatcagacgacgtcgtttaagcaagcagtctccgccgttattcaagctcaatcaccaagatccaggtttaaatccctatcttctgatttctccgacgtcgatcgaactctttcgttgtcagattctcttcttctcaagatccttgagaagcttcctgaatctcagaacgaagatgtttcactcgtgtgtaaacggtggttgagtgttcagggacggcgtttacggagtatgaaggtttttgattgggaatttttattgtctgggaggcttgtttcgaggtttcctaagcttacgagtgttgatttggttaacgcgtgtttcaatccgtcgagcaattcagggattttgctatgtcatacgtcgatttcgtttcatgtatcaaccgattcgtcgttgaatttgaattttgttgaggagagtctgttggataatgaaatggttgataaagggcttagggttttaggaagagggagttttgatttgattaagcttgtagtgattaatgctactgaattgggattgctgagtttagctgaggattgttcggatttgcaggagttagagttgcataagtgtagcgataatctcttgcgtggtattgctgcttgtgagaatctgaggggattgagattggttggaagtgttgatggattgtatagttcatcggtttctgatattggtttgacgattttagcacaagggtgtaagagattggtgaagcttgagcttagtggttgtgaaggtagttttgatgggattaaagcaattgggcaatgttgtgaagtgcttgaggagctgagtatttgtgatcatagaatggatgatggttggatagctgcgctttcgtattttgagagtttgaagactttgttgatttcgtcttgtagaaagatagattctagtcctggaccgggaaagttgctgggatcttgtccagctctggagagtttgcaactcaggaggtgttgtttgaatgacaaggaggggatgagagcgttgtttaaggtgtgtgatggagtaactaaggttaatattcaggattgttggggattggatgatgattctttcagcttggctaaagctttcaggagggtgcggtttttatctttggaaggatgctcaatcctaacaacaagcggtttagagtcagtaattctacactgggaagagcttgagagcatgagagtagtatcatgtaagaacataaaagacagcgaaatttcagccgcactctcgtctttgttctcccttctcaaagaactaacgtggagaccggacacaaggtctcatctctcatccagtcttgaaggtaccggaattggtaagagaggtagcaaattcttcaagaagagatag

SEQ ID NO: 39 - DNA, 1440 bp, Arabidopsis thaliana; identical to SEQ ID NO: 38

SEQ ID NO: 40 - DNA, 1635 bp, Glycine max
atggcttctcttctccgttgcaacggagtcttcctctcccccttacctccccaacccagacgcgaccccatccttcccaaattctttctcccccaatccccaaatcctaaaccgtcacgcctcctgacggtgcgcgcggaggtgaaagagacctcctccgccgccgccaccaccaccaccaccacttcctccgacgacaagatccgcgaaatcctccgcaaccgcgactacgacaagaaattcgggttcagcgtggacatcgagtctttgacaatcccaaaagggctctcgaaagaaaccatccgtctgatctcgtccctgaaagaggagccccagtggatgctcgaattccgcctcaaggccttcgagaaattcctgtccatgaaggaacccacctggtctgataacacttacccccccatcgacttccagaacatctgctactactccgctcccaagaataaaccctcactccaatccctcgacgacgccgaccccgagcttctccgctacttcgacaagctcggtgtccctctcaacgagcagaagcgcctcgccaacgtcgccgttgacgctgtcctcgacagcgtctccatcgccaccactcaccgcaaaaccctagaaaaagccggcgtcattttctgctccatctccgaggccattaaggagtatcctgatttggtgagaaagcatttgggaagagttgtcccctccgacgacaactactacgccgcgttgaacgccgccgtcttcagcgacgggtcgttttgctacattccgaaggacaccaagtgtcctatgcagatttcgacttacttcagaatcaacgcgttggagacagggcagtttgagaggactttgattgtcgccgatgatcggagctctgtggagtatctggaagggtgcactgcgccttcctatgaccggaatcagctccatgccgcggtggtggagttgtattgcggcgagggggcggagattaagtactccacggtgcagaattggtacgctggggatgaagaagggaagggtggggtttacaatttcgtgacgaagagagggctgtgtgctggtgccgggtcgaagatatcgtggacgcaggtggagacgggttcggcgatcacgtggaagtacccgagcgttgtgttggagggagatggcagtgtgggggagttttattctgtggctttgacgaataactatcaacaggccgatacagggacgaagatgatacacaaagggaagaacacaaggagtaggattatatcaaaggggatatcggtggggcattccaggaactgttatagagggctggttcaggttctgtccaaggccgagaatgcccgaaactcctcgcagtgtgactctatgctcattggtgacaatgcagctgcaaatacctatccttacattcaggtgaaaaatccaacagcaagaatcgaacatgaagctagtacgtccaaaattggtgaagatcaattgttttattttcagcaaaggggaatagactatgaaaaagcaatggctgctatgatctctggattttgccgtgatgtctttaatgagcttcctgatgaatttggttctgaggtgaaccaactcatgagcttgaagcttgagggatcagtaggttag

SEQ ID NO: 41 - DNA, 1494 bp, Arabidopsis thaliana
atgtcaggagcaataacatgctctgcggccgatctcgccaccctacttggccccaacgccacggcggcggccgactacatttgcggccaattaggcaccgttaacaacaagttcaccgatgcagccttcgccatagacaacacctacctcctcttctctgcctaccttgtcttcgccatgcagctcggcttcgctatgctttgtgctggttctgttagagccaagaatacgatgaacatcatgcttaccaatgtccttgacgctgcagccggaggacttttctactatctctttggttacgcctttgcctttggaggatcctccgaagggttcattggaagacacaactttgctcttagagactttccgactcccacagctgattactctttcttcctctaccaatgggcgttcgcaatcgcggccgctggaatcacaagtggttcgatcgcagagaggactcagttcgtggcttacttgatatactcttctttcttaaccggatttgtttacccggttgtctctcactggttttggtccccggatggatgggccagtccctttcgttcagcggatgatcgtttgtttagcaccggagccattgactttgctggctccggtgttgttcacatggttggtggcatagcaggtttatggggtgcttttattgaaggtcctcgtcgtggtcggttcgagaaaggtggtcgcgctattgctctgcgcggccactctgcctcgctagtagtcttaggaaccttcctcctatggtttggatggtatggtttcaaccccggttccttcactaagatactcgttccgtataattctggttccaactacggccaatggagcggaatcggccgtacagcggttaacaccacactctcaggatgcacagcagctctaaccacactctttggtaaacgtctcctatcaggccactggaacgtaacggacgtttgcaacgggttactcggtgggtttgcggccataaccgcaggttgctccgtcgtagagccatgggcagcgattgtgtgcggcttcatggcttctgtcgtccttatcggatgcaacaagctcgcggagcttgtacaatatgatgatccactcgaggcagcccaactacatggagggtgtggcgcgtgggggttgatattcgtaggattgtttgccaaagagaagtatctaaacgaggtttatggcgccaccccgggaaggccatatggactatttatgggcggaggagggaagctgttgggagcacaattggttcaaatacttgtgattgtaggatgggttaatgccacaatgggaacactcttcttcatcctcaaaaggctcaatctgcttaggatctcggagcagcatgaaatgcaagggatggatatgacacgtcacggtggctttgcttatatctaccatgatgatgatgagtctcatagagtggatcctggatctcctttccctcgatcagctactcctcctcgtgtttag

SEQ ID NO: 42 - DNA, 1494 bp, Arabidopsis thaliana; identical to SEQ ID NO: 41

SEQ ID NO: 43 - DNA, 345 bp, Arabidopsis thaliana
atgtttagagccatgagcacaaggaaagtccatggtggctacgaaaagctcggcgatgaagaagcgagactgaagagggtctctagcgttccggctagtgtttatggtcattcaagaaacccggttcaagaagtgaagaagacaccgacagcgaaaccaaccggtggttctgttcatcctttgtttagtttctttgacgttcattttcaaagaaagaagaagaagacgacgaagaagaagagtttagcaacggcgaaaccagagtttgctaggtatatggagtatgtgagagaaggaggtgtatgggatccgagttctaacgcaccagtgattcattacagatag

SEQ ID NO: 44 - DNA, 756 bp, Arabidopsis thaliana
atggcggcgacgatgatcggaattaacctctcctgcttcaaatcaacatcgttcttctcaccggacctcaattctctccaatcaaagctctctctcctatctctcaaaccctctccaacacagccacggaaatcaacagtcatccgtatgggcggtggtccgagaactttccccggcggtgtatcaaaatggcaatggaaaaggatgcaagcgaagaaacagaaacagcttctcaaagcaaggttatgcagagaacgtcagatctacgagatgcgaaaacgcgccgagctaaaagcggcggtggctgagctagaacgaccatgggaaccgattcataaaccaccgaatctattctcagtttgtgctgatgagcaagttaaagtactcgcggatcggtttcagaaacctggtggatttgatttatggactgatagagatggtcctcaattgtttgagagtgttgatgatttgccttctgctaggttttttcctaaaggtgttgttcatagtgttaaaccttatggtagattatcatctagctctgttgttgatgatggtgatgagagtgaggttaaagatgaagaaattgggaagaagttacgtggtcgtagggtgaggaagagaggtgatgatggaggtaagaggaggactgaaaatcgtggtaatggtgggagattgagaaatggagggtcttcttcttctcaggtgtatgatatgactttgcagaatgatgggagatatgaaattggatcttag

SEQ ID NO: 45 - DNA, 1080 bp, Glycine max
atggctggctcagctattggtttcgaaggctacgaaaaaagacttgagatatcattttttgaaaatggtgtgtttgctgaccccggaggattaggcctccgagcattgtccaaagaccaattggacgagattcttaaaccagcagagtgcactattgttgcatcactttcaaatgattatgttgactcttatgttctgtcagagtcaagcctgttcgtctatccttataaaattatcatcaaaacttgtgggactaccaaattgcttctgtccatccctgtcattctcaagttggctgatgctcttgacatagctgtgaaatctgtgaggtacactcgtggaagcttcattttccctggggcacagtcttttcctcaccgcagtttttccgaggaggtttctgttcttgacagctatttcagcaaccttggttctggtagcaaagcatatgttatgggtgacccttcaaagtcacagatttggcacatctactctgcaagtgcacagaccaaaggatcatctgaagctgtctatggcctagagatgtgcatgaccggtttagacaaggaaagtgcttctgtgtttttcaaggagaatacatcttcagcagcttcaatgaccgaaaattctggaattaggaagatccttccacagtctgatatatctgattttgaatttgacccttgcggatattcaatgaatggaatagaagggagtgctatatccaccatccatgtcactcctgaagatggtttcagttacgcaagttttgaagctgttggttatgactttaatgacatggctctaggtgaacttgtggaaaggattttagcttgcttttgtccagcagagttttctgttgctttgcacattgacatgcatggtgagaaacttaataaatttcccttagacatcaaaggatactactgtggtgagaggagcactgaagagcttggagtaggtggtgcagttgtgtaccaaacatttgttcaaggctgcgatggtagtgcatctcctaggtctattctgaaatgctgctggagtgaggacgagaacgaagatgaagtgagggagatatag

SEQ ID NO: 46 - DNA, 677 bp, Oryza sativa
atcgccgacggttcaatcatgtcgtcgccggcgaccgccgccgccgccgccgcgtcctgtggcgtcctccgccaccaccatcctccggcttccccgcggcctcctcccaccaccaccaccacctcccgcctcctcctcgcctcgcgctcgcggggcctccagcggccactccgagtcaaccacgcgccccctcgtcgcctcccgcccacggccgcgcgcgcccagagtgccgccgcagcagggtaccagccggagtcggagttctacaaggtggaggcaatcctgaggccatggagggtgccttatgtgtcatcgggtttgctgcaaatggggatcagaggcgtgacggtgtccgacgtgcggggtttcggcgcacagggcgggtcaactgagaggcatgaagggtcagaatttgcagaagatacatttattgataaagttaagatggaaatagtggtgtccaaggatcaggttgaagctgttgttgacaagataattgaaaaggcaagaacaggagaaattggtgatggaaaaatatttttgatacccgtgtcggacgtgatcagaatacgcaccggcgaacgaggggagcgagcggagaggatggccggagggctggcggacaagctgtcctcagcaatgccgatctcatgagagagcatgtttcctgtaggtag

SEQ ID NO: 47 - DNA, 1191 bp, Xenorhabdus nematophila
atgttggatagccaagttatcgctaccgtaaaatccaccatcccactgatcgtttctaccggcccaaaactgaccgcacatttttatgaacgtatgttcaaacacaatcctgaattgaaagatattttcaacatgagcaaccagctaaacggtgctcagcgtgaagcgcttttcaatgctctttgtgcttacgcttccaatatcgataatttacaggcgctattacctgccgtagaaaaaattgctcataaacataccagcctgaatattcagcctgagcattatcagattgttggcactcacccgctggcaacacttgatgagatgtttcatccaggcgatgaagtcctgaatgcatggggtaaggcttacgaggtattggcagatgtctttatcaatcgagaagaagatatttatcaaagaggtgaatctgaggaaggcggttggcgtggattacgtcaattccgtgtcaacaagaagcaaccgcagagtgacgttattaccagcttcgagtttgtgcccgctgatgggggtaaggtcatagattacaaagcagggcaatatttaggcatctacctggacactcccgtttttgaaaaccgagaaatacgtcagtattcactgacaacagcaccaaacaaccacagctaccaaatcgcgattaaacgtgaagcacaaggtaaagtatcaaactatatgcatgataatgtgcaggaaggcgataccatattactggcaccaccacgcggtgactttttccttgatgtccaatcagatacacccgttacactgatttctgctggtgtcgggctgactccgatgatgagtatgctgcaacatctgcataaccaacaccatgtcggtacagtgaattggttccatgccacagagcatggcggttatcatgctttcgcagataaagtgaatacgattacccaatccatgaccaatttacatactcaagtttggtatcgcgagccaagaaacgaagatcaacaaggcgcagattaccagcatatgggactcatggatttatctgtcgtgaaagattcaatcactgaggaaggaatgcaattctatttctgtggccccgtcgtattcatgcaatatatcgcccaacagctcttggcaatcggcattgataaacagcatattcattatgaatgttttggcccacataaagtactttag

SEQ ID NO: 48 - DNA, 591 bp, Zea mays
atgaaccagctctctcttctccaccgcgccttccacctgcatctcctctctcccgaacgcggtcatggcctcacagccgccgtcatccgagttcgactgtcctcctctcaacacaccccacgacagcacgcaaagcgcctcctcgcagtagcacctcacgaaagcatcgcggcagccacggaggagagcagccgtccgcgtcaagagctcgcggcggcgggcaataagaacgacggcggcggcggcggcggcaggacctgcgcgctgccgacgtgggcgctcatcggcggcatcacggcgggggtggccgtggcgctggccctgtccgcgggggccggccccgccctggcgctggggccggagggccccctggtggaggagttctgggacaacatgcggcgttacgcgctgtacgtggtgacggtgagcacaggggtggcgtatacggtgctgcagcccatagtggagctgctcaagaaccccatcacggcgctgctcatcgtggccgtcctcgccggcagcggcttcctcgtctcgcaggtgctcaatgccatggtcggcaactccgacttcatctacatgtacgagtag

SEQ ID NO: 49 - DNA, 903 bp, Oryza sativa
atgaacatgtgtgagaaagatcaaaatttccactggggttatgaccttttccgtgacccttttgctcctatcgggtactatggacctcctcatggttacggtgatggcaactattgtgacctccattatgctagagatgcatcacatctggatgagacgcacttgcattcttctgcactgacatatgatttgtacaacccatcagtaggcatctaccatcctggaaatgctggtgagcatgaccatgacacagtctatatagagccgactagttccaattcatgcccagacactgacgacagtttcccaatggatgaagaagtaggaaagaggttttaccccatggtgccagttccccatgttcctaaaattaatggagagatcccttcagtcgatgaagctaccatggaccatgaaaggctgacagaaaggttgaggttgtatgaactagttgagcacaaggtgaaaggagatggcaactgtcagtttcgggcactatcagatcaactgtatcaaagtcccgatcaccatgagtttgtgaggcagcagattatgagccagcttaaaagtaaccgtgatgcctacgatggatatgtccccatggcatatgacgattacttggagaaagtatcacaaaatggtgaatggggtgaccatgtgactctacaggctgctgctgacaagtatggagttaagattttcgtgatgacatcgttcaaggatacgtgctacattgagatccaaccaaaggttcagaagtccaacaaagtggtgctgttgagcttttgggcggaggttcactacaactccatatatccgcagaacgatgcgccgaggtcgcagacgacgaggaagaggagatggtggccgttctctcacaaccaccaccatcaccaccattag

SEQ ID NO: 50 - DNA, 393 bp, Zea mays
atggccgctgctcccgtgggcgctcagaatcgctgcgtcttcgttggcaacataccatacgatgcgacagaggagcagctcgtgcagatttgcgaagaggttggcccagtcgtatccttcaggttggtgattgacaaagagactggcaagccaaaaggttatggcttttgcgagtacaaggacgaggaaactgctctaagtgcacggcggaaccttcagggttacgagatcaatggtcgtcagttacgggttgattttgctgaaaatgggaggaacactgacagaaatagagaaaaggtcgacgatcctcaaatttttactgtagaagagcctttcctaccacctttggagttctctgttaatctgagaagttgtattgtcttcgttctgtag

SEQ ID NO: 51 - DNA, 618 bp, Zea mays
atgcacaacacgtcaacacacacgcacgcaggctgctgctgggcgttctcggcggtggcggcggtggaagggctgaacaagatccggacggggcggctggtgtcgctgtcggagcaggagctggtggactgtgacgtcagcggcgtggaccagggctgcgacggcggcctcatggacaacgccttccagttcgtcgcgcgccgcggcgggctggcctcggagtcgggctacccgtaccagggccgggacgggccctgccgctcgtccgccgccgccgcgcgggccgcgtccatccggggccacgaggacgtgccgcgcaacaacgaggccgcgctcgcggccgccgtggccaaccagcccgtgtccgtggccatcaacggcgaggacatggcgttccgcttctacgacagcggcgtgctgggcggggcctgcggcacggacctcaaccacgccatcacagccgtcgggtacggcacggcgaacgacggcacaaggtactggctgatgaagaactcctggggcgcgtcgtggggcgagggcggatacgtccggatccgccgcggcgtccgcggggagggcgtctgcggtctcgccaagttgccgtcttaccccgtctag

SEQ ID NO: 52 - DNA, 1052 bp, Zea mays
cgacgcaacgcaacgccgatggggtgcgcgcagggcaagtgctgcctacggcggcacccgaggaggggctccgccgctgccgccgttggcggcggcgccacgctcggccgcgccgcggtgcccggggccgggctggtactggagtacgccgcgctggctgtggcggggctgtacccggactccacagcccgggagtcccaggacgcgcaccttgtcgccacgcgcttcgcgggcgacccggacctccacctcttcgctgtcttcgacggtcatggcactgccggcaccgcctgcgctgggttcgcgcgggacgcgctcccgcgcctcctcgcgtcgctctctctcgccagcgccgccgaccccaccgcggcgttccgcgaggccatgctgggcgccaacgccgagatgcacgcggctcccgaggtcgacgactccatgagcgggaccaccgccgtggccgccctcgtctccggcggcgctctccacgtcgccaacgtcggcgactcgcgcgccgtcgccggggtctggcgcgccggccgcgtcgtcgccgaggacctctcctgggaccagactccgttccgcgccgacgagcgcgagcgcgtcagggcctgcggtgcccgggtcatgtccgtcgaacaggtggagggcatgcgcgatccggaggccgagcgttgggcgcccgacgagggggacccgccccgcgtctgggcgcgcgacggcctctaccccggcacagccttcacgcgcagcctcggtgacctcgccgccgaggccatcggggtcatcgccgagccggaggtcaagagcgtcgagatcactccatcgcacctcttcttcgttgtcgccagcgatggcgtgttcgagttcctctccagccaggaagttgttgacagggttgccacgtatcaagatcctcgagatgcctgctcagcaatcgctgcagagtcatacaaactatggctggagcacgaaaataggacagatgatataacgataatcattgtgcatatccgagacatggaaagtgtaggtgcaccaaaattttaaattag

SEQ ID NO: 53 - DNA, 1698 bp, Oryza sativa
atggggggctgctactccgcctacgcctcctcgcgcaagctgcgcggccgcatcagcaagatctccctcgtcatccccgacccggtccccgacgccgaggccgcctcgccgcgcaaggacggcgtcgatggcgacggcgacgacgtgaggggtggtggtggtggctgtgacgatggcggtgacgtcgtcgccatcgcgacgacgacggcggacgagttcgcgcggcggtacgtgctggggaaggagctggggcgcggggagttcggggtgacgcggcggtgcagcgacgcggcgaccggggaggcgctggcgtgcaagacgatccggaagcacaggcgcctggcgccgccgcgggtgaccgcggcgaaggcggcggccgcgcacggggaggacgtgaagagggaggtggccatcatgcggcgcatgtcgtcggcgtcgtcgtcgcgcgggggcggcgccgcgtcgtccgccgccgtggtgcggctccgcgaggcatgcgaggacgccgccgacggctccgtccacctcgtcatggagctctgcgagggcggcgagctgttcgaccgcatcgtggcgcgcggacactactccgagcgcgccgccgccaacatcttccgcaccatcgtcgacgtcgtccagctgtgccactcgaacggggtgatacaccgcgatctgaagccggagaacttcctgttcgcgaacaaatcggaggactcgccgctcaaggtcatcgacttcggcctctcggtgttcttcaagccaggcgaccggttcacggaggtggtggggagcgcgtactacatggcgccggaggtattgcggcggagctacgggccggaggtggacgtgtggagcgccggcgtcatcctctacatcctcctctgcggcgtccctccattctggggagacaacgacgagaagatcgcgcaggcgatcctccgcggcgccatcgacttcaacagggagccattgccgagggtctccgccaacgccaaggacctcgtcaggaggatgcttgatcctaacccatccacccgcctgacggccaaacaagttcttgagcatccatggctgaagaacgcggacacggcgccgaacgtgtcgctgggcgacgccgtgcgggcgaggctgcagcagttctccgccatgaacaagttcaagaagaaggctctcggagtggtggcgcggaacctgccgggggaggaggtggacaagtacgtgcagatgttccaccacatggacaaggacaagaacgggcacctgtcgctcgacgaactcttggaaggcctccacatcaacggccagcccgtccccgagcccgagatcaggatgctactcgaagccgcggacacggacgggaacgggacgctggactgcgacgagttcgtgacggtgtcggtgcacctgaagaagatgagcaacgacgagtacctggcggcggcgttcaactacttcgacaaggacggcagcgggttcatcgagctggacgagctgcgggaggaggtgggcccaaacgagcaggccatcctggagatcctccgcgacgtcgacaccgacaaggacggccgcatcagctaccaggagttcgagctcatgatgaagtccggcgccgactggaggaacgcctccaggcacttctccagggccaacttcagcaccctcagcaggaggctctgcaaggatactcttactccctag

SEQ ID NO: 54 - DNA, 1170 bp, Oryza sativa
atggcggcaatggcctcttctccccctacaacaccaaatctcggttcgcagcctacatgggtgccctatgagccaaccagggattgctcccagggcctctgcagcatgtactgcccgcagtggtgctacttcatcttcccgccaccgccgccggccttcgacatcaccggctccagctccgacgactcctccggcccaaccttctcgccgctcgtcatcgccatcatcggggtgctcgcgagcgccttcctcctcgtcagctactacaccatcatatccaagtactgcggcaccttcagctccctccggaacagactccttggctccagcgctcaccgcggcagcggcggcggcgccgacggcggagacaattccaggagccaggagccgtggagcgtcgcgctgtcggacgggatggacgagacgctgatcaacaagatcacagtgtgcaagtacaggcgcggcgacggcttcgtggacagcacggactgctccgtctgcctcggcgagttccgcgaaggcgagagcctccggctgctgcccaagtgcagccacgccttccacgtcccgtgcatcgacacctggctcaagtcccactccaactgcccgctctgccgctgcaacatcgcgttcgtcaccgtcgggatggtctcgccggagccggaggcccgcgttccacgggaggataggagagacaaccacgagctggtcctgacaattgacaacccggagcatgtgcgcgaggagccacagaacgtggtgaccggtgtcgccgtcggcaacggcggccgcaaccacgaggcgaaggatggtccggggaggtcggaagatgcaaatggcacagctgagatcagagaagacggcgccttgatgccgcccacaagggcgccgtcgtcgttgtcagacacgcaccgtgaaggccggatgtccattgccgatgtcctgcaggcgagcctggaagacgagctgatggtggccagggagagcggcctcctggcaggctcttcggggtcctcaagacggtgtcacggggagcacagcaaggacggcggcggccgcagtggccgggcattgccggacggcgcgaatatgaagagattggcgccggccgggagatcatgcttcagcagcaggagtggcagaggaaaggactccgttcttccaatgtag

SEQ ID NO: 55 - DNA, 1503 bp, Oryza sativa
atggcgtccactgtgacgacgccgagccggccggtatccgccgggtgccaccggcgctcgccgcggcggtcagcgcccgtcgtgctctccctcggcggcgggccgcggcggcgcacgccgtcgtccaccagctgctcggcgctcgcgtcgccggcgaagcagggcacggccaagctccctccgccgcagccgacggcgtcgaggaccgcggcggccgacgcggagcgggagcgggagcggacggactacaacgaggtggccgccgcgctggagagcatctacaagctgagccccgccgtggtcgaggagaaggacgccgacgaggaggacgagaagagcaaacagaccaagcggaagagaaaaggcagagtggggaggagccggaacgcgacggtgacggtgaggagcagccggaggaggaggcggggacagaggatggacctggggaagagggtggagatgaggaggagggaggaagaagagggcggcggcggcgccggcaaggtggaagacgaggagcgggggttcgaggagatgctgctccgggagcacgccgtgtccaccgacatgggcagcctcgactggaagcggatgaagatccctcccgtgctcacctccgcccagagcatccgcctcttcaggatcatgcagcccatgaaggcgatcatggaaatgaaggagaacctggagaacgaagtgcagagcgagccaaacgacgcacagctcgccgaggccatgaacatgtccgttcttcagatgaggcgccatctcgaggtcggccgagctgccaggaacaagctcatcaagcataatctccggctggtgctgtacacgatcaacaagtactacccggacatgtccaacgacgagaggttcgacgacatctgccaggcgggcgccaacggcttgatcacggcgatcgaccggttcgagcccaagcgcggcttccgcatctccacctacgccctcttctggatccgccactccatcgtccgcgccatcaccctctccaacttcacccgcttccccttcgccatggaatccgagaggcaggagatccacagggctcgggaggagctggcgttcgagctggggagggcgccgacggaggaggaggtgatgaagaaggtggggctgtctccggcgaggtaccgcgacgtggtgcggatgacgaggcccacctactccctccacgcgcgtaacagggtcacccaggaggagctcatcaacgaggtcaccgacgacgacgccatcggcgtcgacaccagcagccacaacaccctcctccgcctcgccatcgacgacctcctggattcgctgaagcccaaggagagcgtggtgatccggcagaggttcgggctggacgggagggggaagcggacgctgagcgagatcgccggaaacctcaacatctcgagggagatggtgcgcaagtacgagctcaaggcgctcatgaagctcaagcaccccacgcgagtggaatacctgcgcagatacatgtag

SEQ ID NO: 56 - DNA, 1194 bp, Zea mays
atggacgacgccggaaggccaccaccacacgctcccgtggcggtgaccgcctccgcctccgcctccgccaccgccgcgcccgcccctccccaaccctcagccactgctgccgtcgacaggtcctcccccgaccccgacgcgctctatgaagaggggatgtggcaacagatggccatggacagcggtgccactatgcaacctgggtcatatcctgagcgaccaggtgaacccgactgcacttactatctcaggactggattgtgtcgatttggcatgagctgccgattcaatcatcctcccgataggaatctggctattgcctctgccagaatgaagggagaatatcctgagagagcaggacagccagagtgtcagtattatctgaagactggaacatgcaagtttggccctacatgcaaatttcaccatcccagggaaaaggctggaattgcagggagggtgcagctaaacacatcaggatatccactccgcccgaatgaaaaggagtgtgcatattatttaaaaacaggacactgtaaatatgcaaatacttgtaaattccaccatccggaacttttcaatgtggtgccttcgtcacgtggttctcctatttatacctctgtacattcctctgcgagtgctggtccgcagtcctatactggaactatgccaagctgggctttcccacgagcttcttttataccaagccctaggtggcaaagtccttcaaattatgcgccgatgattgtacctcagggccttgttcaaatgccgagctggaattcatatactggtcagctgcagtcacctggggctcaacaaacttatggaagttcacaacaaggcgaagctagtacaggaaatcagggaatgctatcaccctacagatctagttcgtttcctgtgcctcaatatgcgctgcagagagagaatgtatttcctgagagacctgatgaaccagaatgccaatattacatgaagacaggagattgtaaattcggtgcagtgtgcaagttccatcatccccgggtgagatcactgccccctccagattgtgtcttaagtccaatgggtcttccactacgtccaggtgaagaactgtgcaaattctattctcgttacggcatctgcaagttcggcgccaactgtaaattcgaccatcctacagtggttgctccaatggtctatgcttag

SEQ ID NO: 57 - DNA, 1779 bp, Zea mays
atggcggcggcgctggagtgctggtcggggcggccgagcaccgacgaggagatggtggagcaggtcctcatgaagccccacggccgttcagacgactccctcccgacctgcgctgactctgcctccgccggcgagccgacgtcggcgcccgcgccgcccaaccccaagaagtggcagcggctgggccgcaactttgccggcgccatcgccgcgttcaagaacacgctgagcctggatggcggcggcctcccccgcgacccctcgcctcgggccgagaagccgccgccgctcctcctccgtggcctcgcgcagctctactcccgcggcgccgccgccaatcagcagctgccggagaagctcgtagctgacctccgccgccacttcgatgctctccccaacagctacgcacaggcaggatttgacatgaaagatgtcctcttgcatgcccgccttgtagagcaggcgaccggcgaggatcagcctgcggtgaacattgaggaagtccatggcagaggagctggtgatgaaggcactgttttccagctaacatttgcttgcactgccccgctctcgtggcagtcaatgtcaggatcactagacagcccttcgttctgctgcaagaagatccagatctttgagaagagaggtctgacacttggtgtcgtcatgatacttgtgcagactgggaacgagacgctcttcaagaaccgggttgagtctgcgctgaaatcggtagcaaagaagcaaaggaagaacagtggtggtggtgtgaagctgccattcgggctctgcggttgccaggaagaaggatcgagaaacttcgatgaggagtcgatgtttgatccggacgatggccaggtactcgacaatgagcctgcgcgcaggccacagctccccactcgcctaccgcagtcatcagtcttcgtctcagtagatgaatggcagaccatccgctctggtggcgaggagctcggtcgctggatgctgcgttccgaggagatcgagttcatcgattgggttggtgcgaattcgttcaggggtgtctatagaggaaagaaggtttgggtcaacaaattgaggggctgtgacatgggaagtgcttacgaagttgagattcgtcaggacttgctgcagttgatgagctgtggccagaggaacatcctgcaattccatggcatctgtttcaatggaaaccatgggctctgcatagtaaccaggatgatggaagggggatcagttcatgatattcttacgcagagaaacaagaggctgtccctccgggacacggtcaggatcgctcttgatgtcgccgacgctctggctttcatgaacagctacggcattgcgtaccgtgatctcaatgctcggaagatcctgctggataggcaagggaatgcttgcctcggggatatgggcattgttaccccttgtagtaatgttggtgaggtcactgagtatgagacgtctgggtaccgatggctggctccagagatcatcgctggagatcctgaaaccgtctccgagacctggatgagcaacgtctacagctacggaatggtgctctgggagatgatcaccggagaggaggcctactccgcctactctccggtgcaagcggccgtcggaatcgcagcctgcgggctgaggccggagatccccagagagtgtcctccttttctgaggtcactgatgaacaggtgctgggacaattcccctctgaagcgccctcagttctctgagatcatatccatcctacaaaggcagcagaacgttagatag

SEQ ID NO: 58 - DNA, 948 bp, Zea mays
atggcttgttccactgcatctttagcggcgacgctgctggcgttcgcgctgatgttccaggcctgcgtcgcggggaggaggaggctcaccgcgctcgtgcaggagccggccatcaccatgaagtaccacaagggcgcgctcctgtcgggccccatcgccgtcaacttcatctggtacggcgacttcacggcgccacagcgggcggtgatcaccgacttcgtctcgtcgctgtccgcggccccgcgggcggcggcgcagtcgcagccggagccgtccgtgtccacgtggttcaagacggcgcgcaagtactacgacacctccaaggcgcgtttcccggcgctgcgcctcggctcccacgccgtcgaccggaactgctccctcggcaggcggctcacggagcgggacctcctcaggctcgccgccaggggggcaccgagccgcgccatcaacctggtgctcacggccgccgacgtggccgtggacgggttctgcgcatcccggtgcggcacgcacggcgcgtccccacggtcccgcgccggccggttcgcgtacgtgtgggtgggcaacccggcgtcgcagtgccccggacagtgcgcgtggccgttccaccagcccgtctacggcccgcaggcgccgccgctcacgccccccaacggcgacgtcggggtcgacggcatggtgatctcgctggcgtccatgatcgtcggcaccgtcaccaacccgttcggcaacgggttctaccaggagggctcggccgacgcgccgctcgaggccgccacggcgtgcgccggcgtgtacggcaagggcgcgtaccccggctacgcgggggcgctgctggtggacccggccagcggcgccagcttcaacgccaacggggcccacgggagaaagtacctggtcccggcgctcgtggatccggacacgtcgtcgtgtgccaccttggggtag

SEQ ID NO: 59 - DNA, 2130 bp, Arabidopsis thaliana
atggtggtggcgacgactatagcactttacgcgagtccaccaagcagcgtttgttccacgccacatcagatctcatgtgatctcgatctcacctccaggagttcgtcaacatcctcttccatggcttcctcgccgcagaaaccaatcgttggaggtctctcttcacttttctccagcgcatcagtcaaatcttcatcttcttcctcttgctcatactcaaccggagtagatgagttctcttcactacgctatgatcggagtgatgatttgaaagatctgagctttagcagctcctttggttattctccggcgaaatttgtgaattcatttagacgagatcaccaaagccctatctctgtgcttcatggtccggtctcgtgtagttgtagccctccgatgagaatgtctcgtgatcggaatctagatggttcgtttcgtttaggagctagtggattgttcaatggtttcgttaggaaagctcttggatcatgtgttgattacgagttcggatcggattctgttctcgttgatgagctaacgtttcctatggaggttgatacgataaagccatatgctagggatttgctaagacgtgcacaattgagacacaagattttcaatgatgaatctgtgatcaaagctttttatgaagcagagaaagctcatagaggacaaatgagagctagtcgtgatccttaccttcagcattgtgttgagactgctatgttgttggctaatatcggagctaactcaactgttgttgttgctggccttcttcatgataccattgacgattctttcatgagctatgattatattctcagaaacttcggagcaggagttgctgatttggttgaaggggtttcgaagcttagccaattgagcaaactcgctagagagaacaatacggcgtgtaaaactgttgaagcagatcgtttgcacacaatgtttcttgcaatggcagatgcaagagctgttcttataaaactggctgatcgattacacaacatgaagacgctttacgctttgtccccagtgaagcagcagaggtttgctaaagagacgttggaaatatttgcacctttggctaatcgtttgggaatctctacctggaaagttcagcttgaaaatctttgtttcaaacatctttacccaaaccagcataatgagatgtcaaccatgctcgaggattcattcgatgaagccatgattacttctgcaatagagaaattggagcaagctcttaagaaagcaggcatttcttatcatgttctttgtggccggcacaagagcttgtatagtatttacagcaagatgttaaagaaaaagctaacagtggatgaaattcatgacattcatgggttatgtttgattgttgacaacgaaggagattgttacaaggccttaggagtagttcatagtttatggtctgaagttcctggaaagctgaaggattacataactcatcccaaattcaacgggtatcaatctttgcacacggtagtgatggacaatggaacagttccacttgaagtccaaatacgtacacaggagatgcatttgcaagcagaatttgggtttgcagctcattggagatacaaggaaggtggctgcaaatactcttcgtttgtgcttcagatggttgaatgggctcggtgggtcgtaacctggcattgcgaagcaatgagcaaagaccgatcttccataagttcttcagattccatcaaacccccttgcaagtttccgtctcactctgaggactgcccagcttcttacaagcctaacagtagccaggatggaccagtctatgtcattgtaatcgaaaatgataagatgtctgtgcaagaatttccagcgagttcaacagtctcggatctgctgagccgggcggggccagggagctcgaggtggtccatgtatggcataccagcaaaggaagaactaaggccaagactgaaccaaatacctgtaagtgacctcaagtggaagctgaagatgggtgatgtggtggagctgactccaacaattcctgatgagtctctgactgaatacagagaagagattcaacgcatgtatgatcgaggactcgcgttttcccgccccggaaccatggtcggatggggaagctag

SEQ ID NO: 60 - DNA, 933 bp, Arabidopsis thaliana
atggcggcaggactctcaaccgccgttacattcaaaccactccaccgctctttctcctcctcctctaccgatttccgactccgcctcccgaaatccttatccggattctctccgtctcttcgatttaaacgcttttctgtctgttacgtcgtcgaagaacggagacagaattctccgattgagaacgatgagagaccggagagcacgagctccacaaacgctatagacgctgagtatctggcgttgcgtttggcggagaaattggagaggaagaaatcggagaggtccacttatctaatcgctgctatgttgtcgagctttggtatcacttctatggctgttatggctgtttactacagattctcttggcaaatggagggaggtgagatctcaatgttggaaatgtttggtacatttgctctctctgttggtgctgctgttggtatggaattctgggcaagatgggctcatagagctctgtggcacgcttctctatggaatatgcatgagtcacatcacaaaccaagagaaggaccgtttgagctaaacgatgtttttgctatagtgaacgctggtccagcgattggtctcctctcttatggattcttcaataaaggactcgttcctggtctctgctttggcgccgggttaggcataacggtgtttggaatcgcctacatgtttgtccacgatggtctcgtgcacaagcgtttccctgtaggtcccatcgccgacgtcccttacctccgaaaggtcgccgccgctcaccagctacatcacacagacaagttcaatggtgtaccatatggactgtttcttggacccaaggaattggaagaagttggaggaaatgaagagttagataaggagattagtcggagaatcaaatcatacaaaaaggcctcgggctccgggtcgagttcgagttcttag

SEQ ID NO: 61 - DNA, 1710 bp, Arabidopsis thaliana
atggctaactccaagaagcaagcatggtttttttataccacaggcttaccaagtgacatagaaatcgaagttgatgatataacatttcatcttcataagtttcctctaatgtcaaaaagcaaaaaacttcaccaactaataacagagcaagaacagagtaaagtttattctcacatcaagctcgagaattttccaggaggttcagagattttcgagatggtgataaagataagctacggtttcaaagtcgacatctctgtttccacagctgttccactccgttgcgccgccgagtatctagaaatgacggaagagtactcaccggagaatctcatttcaaaaacagagaagtttctttcagagttcgtcttcactaacgtacaagaatccatcaaagcgttgaaagcttgtgaatcagtctcgtctttagctgaatcactctgtataacggaacagtgtatagactccatcgtcttccaagcttcctcaaccgatccgtcgtcgttttacggttggccaataaacaacggaggtatattcaccgttgaccggaagaaacagagcaaagattcgaaaacagagctttggttcgaagatctaacggagttgagttttccaatcttcagacgtgtgatcttatccatgaagtcgagtgtcctgagtcctgagattgtagagagatctctacttacttacgcgaagaaacacattccaggaatctcgcgttcatcgtcagcatcttcatcttcttcttcttcttccaccaccatagcttccgagaatcaacaaagagaattattagagacgataacttcagatcttccattaactgcgacgactacgagatctctcttcggtttgttacgagccgcgatcattctcaacgcctccgagaattgcaggaagtttctagagaaaaaaatcggatcgaatcttgagaaagctacgcttgatgatcttctcattccaagttactcgtatctcaacgaaacgttatacgatattgatttggtggagagactcttacgtcgttttctcgaaaacgtcgccgtgtcgtcgtcgtcattgacggtggttgggagattgatcgacggagttctcggtgaaattgcatcggacgctaatcttaaaccggaacagttttataatctggcggttttgcttccggttcaagcacgggtttacgatgatggactatacagagccgtcgatatatatttcaagactcattcatggatattggaggaagagaaggagaagatttgtagcgtgatggattgtagaaaactgactgttgaaggatgcacacacgcggcacaaaacgagcgtttaccactacgagccgtcgtacaagttctgtttttggagcagctacagctccggcaagtaatcactgggactttactgacggaggaagacggtgataaaacggtggtggacttgggtagatggaaggaagcggtgaaggagaatcaggtgcttcgtttggatatggatacgatgaggacacgagtgaaccagctagagaaagaatgcttgtacttgaagaaagtgatcgcgaagatcgacaaagaaagtttgttgaaggcgaagcatggggcggggaaatggtcaatcgggaagaagttcggatgcaaattttcggctcaagtttgtgattcacaggaggcaacgatggtcgatagaagatcacgacgttttcttagttag

SEQ ID NO: 62 - DNA, 477 bp, Arabidopsis thaliana
atgagaccattgagcgtacaatcgaagtttgaagatgtggcaacgtcaacctccgttaatcaccacggagtgacgccgcaatcaccgtggcactcgccggttccttacctcttcggcggtttagcggcgatgctaggactaatcgcctttgctcttctcatcctcgcttgctcttactggcgcctgtcttcctccggcgaagaagatggtcaaaacgtagatgaagagaaagagagccggtctggagataaggcggcgaacggagcttacgaggagaagtttcttgtcataatggccggagaagatttgccgaggtatctggcgacaccggcgatgaaaaagtgtacgtgtggtggtcacgagggtaaaatggtgatttctcaggaggaaagtgttgccaaagaggaagagaagatgagagaaggcgaagaagagaaagtgaaagataccggcgagacaactactacaagtcactag

SEQ ID NO: 63 - DNA, 477 bp, Arabidopsis thaliana; identical to SEQ ID NO: 62

SEQ ID NO: 64 - DNA, 1863 bp, Arabidopsis thaliana
atggattctttatcatccatgggatttcaaacagctagtttttttctgatcttgttattcttgttttatcatcttccttgtgttccaagccagcaagaacgaagtaggttatgtaaaccttttcagtgtggcgacatcaccgtcggttttcccttctggggagagaatcgccaaagtgattgcggtcacttttctctgaaactaaactgcaacaaaccctcaaacacaacctctcttacaatctcaggccacaactacagtgtcctccgtatagacaacaaatccaacattcttagcctatccagacaagatttctcaggtcctttctgttctgcttcattctcttccacacctttgcgttcagatctcttccagaatttgcaaccttacagaaacctcactgtgttctatatgtgtgaccctcgtcgccatttctttgggaatttcacatgtccagtgaaaggtcttggctctgtggttcagaactctacgtatcgtaaactttgtgataaaagttttagcgtcacagttcctacgagttatgttccagaggaagaagctctgaatttgacacatttggaaagtgttttgaggaaagggttagaggtgaagctgaagataagtgagatgtctggtcaagaatgtgtaaccactgatggaaactctggcttcacacggttttgctgcacgaacgtatcaggaccagaaatcagttgccttacttcaataactactatgaataatggaacttacagcgataatcgccctttcctggtaacaattggaacagttctagggtcaatactatgtgtatgtgtggtgctgtttctagcattttatcttaacgagagaagaatagcaaaggctgcgagaattcagcacctcgaggcgcttggaaccctgagagggtacaattataaacaaatcaagaaaattacaaaatcatttacagaagtagttggacgaggaggatttggaactgtatatagagggagattacgcgatggtcgaaaggttgccgtgaaggtcttgaaagattcaaagggaaactgtgaagatttcatcaacgaagtcgcaagcatgagccaaacatctcatgttaacattgtaactctgcttggtttctgctatgaaggatccaaaagggcgatcatatatgaatttctagagaatggatctctggatcagtcgttgaatcttgatgtgagtacactttatggaatcgcgctaggcgtggcacggggacttgagtacctgcactatggctgcaaaaccaggattgtgcattttgacattaaacctcagaatgtactgttagatgaaaatctcagacccaaagttgctgattttggactcgctaagctctgtgagaagcaagaaagcatcttatcattgcttgataccagaggaacaataggatacattgctccagagttgttttcaagaatgtacggaagcgtgtctcacaagtcagatgtgtacagctatgggatgttggttcttgagatgatcggagcaaggaacaaagaaagagtccaaaatgctgatccgaacaatagctcggcttactttccggattggatctacaaggatcttgaaaattttgataacacaaggcttcttggcgatggactaacccgagaggaagaaaaaaatgcgaaaaagatgatcttggtgggtctatggtgtgttcagttccgtccatcagaccgtccatcaatgaacaaagttgtagagatgatggaaggaagtttggattctcttgatccccctcctaagcctcttttgcatatgccaatgcaaaacaataatgcagaatcatctcagctatcagtggaaagctcaatttactccgaagtatag

SEQ ID NO: 65 - DNA, 954 bp, Arabidopsis thaliana
atggtaacactaatcgtggccaccaccgccgatccagcgtcgatcaaccctgcggcggcgcttctcgccatgcccggttggaccgccggacctatcttaccgccggacataaagagttttagtaacaagcaaacgagagtgattcaacacgatagatctatagtaaaagaagacgatctcgatttacgttgggaagaagctaccggtgaagttgttgatgaagtcatcttcctcagccgtcacaccgccgtctcaaatcgtcctgctttaactgttcatccgattggagtgcttcatctaaaggatggagaatcaccgccgcaaggaggaaagcctggatgggcggcgttgccaagcactagaattggtccatggtttcgtcttttgaagaaaatggctgaagctcatggtttagttcctgagtttgagataacattggaagctactcatcatggaccaataactaacaagccaacgatgtttttggagattggtagtaccgaggaatactggaagaggcaagacgcagctcaagtcatggctcttttaatgtgggaaggtcttgggctaggaggcagtgaagaagtagggaagtggaaaagtgaaaccggaaagaggaaagttcttttaggcattggaggtggacattatgctcctcgtcacatggatatagctttgaaagatgatatttgggtaggccatttgctttctggatactcattaccgatggaagatccaactcaaaccaaaacaacgcctggagagaattacattggtggaaattggagacaatcaattaaggcagcatttgaagctactaaagcatcattccccggaggcgagatcttggctcatcttgaccacaagagcttcaaaggatggcaaaagaaggccattacagagtttttagcagaagagagcatcaatgttgggaagccaaacgatttcacatag

SEQ ID NO: 66 - DNA, 945 bp, Zea mays
atggtggtgctggtggtggccacgacgtcagacccggcgtccattgggcccgccgccgccttcctcgccatgcccggatggtcccccggcccgcccatcgccgaggcgatggagagttttactaatgggaatgttcgattactgaagcatgagcgtagcattgtcgcagaggatgatcttgaccagcgatggcaggaagccactggagagtctgtttctgaggtcatattcctcagcaaacacactgcagtctccaaacgtccagcactcacagtgcatccaattggtgtgccacatctgaaggaggatgaaaccccaccccaaggaggaactcctggatgggcagcaattccaagtcctcgaattggaccttggctccggttgatgcaaaagatagctgtagaacaaggccttgttccagagtttgaggttacgcttgaggctactcaccatggaccagttaccagcacacccaccatgtttgttgagataggaagtacagaagaccactggggtcgacaagatgctgcacaggcaattgctctagttctatggaaaggtcttggtctggaggatggaaatgctgttggaacttggcagaggaattgtgaaaaggttctattaggtataggaggtggtcactatgttcctcgtcacatggatattgtcatcaaagatggtgtatgggtcggtcatttactctctggttactccttgccaatggacatgtcgtcgcaagtaaatgtaaagagttctgaagaggttgctggaatgtggaagcactccatcaaagtttcttatgaagcaacaaaggcagcatttcctggtggtgaagttatcgcgcatcttgatcacaagagcttcaagggctggcagaagaatgctgttacatgcttcttgcaggagcagaacatcaggataggaaagcctagcgatttcctgtag

SEQ ID NO: 67 - DNA, 945 bp, Zea mays; identical to SEQ ID NO: 66

SEQ ID NO: 68 - DNA, 945 bp, Zea mays; identical to SEQ ID NO: 66

SEQ ID NO: 69 - DNA, 327 bp, Zea mays
atgtcgggcgtgtgggtgttcaagaacggcgtggtgcgcctggtggagaacggcgcggcggtgggcggcgaggcggcggtgcggcggcggaaggcgctggtgcacacgccgagcgggcaggtggtgcggtcgtacgcggagctggaggcggagctgcgcgcgctgggctgggagcgctactacgaggacccggcgctgtaccagttccacaagcgcggctccctcgacctcatctccctccccgccgacttcgccaggttctcctccgtccacatgtacgacatcgtcatcaagaaccgcgactccttcagggtcgtcgacgtctag

SEQ ID NO: 70 - DNA, 1218 bp, Zea mays
atggcgtcatccgccgccgccgcctcctcggcttccgcgctcttccgcctcccggggtcgggtcacctgcgtgcaccgccacgaagcgggtggcgagaccacaggcggtcccgtcgcgcgaccgtgcggtgctcgttcgcgccggtggagacggcccggataaaggtggtgggcgttggcggaggcggcaacaacgccgtcaaccgtatgatcggcagcggcctccagggcatcgaattttatgctataaacaccgattcccaagcccttattaattcacaagcgcaatatcctctgcaaattggagagcagttgacccgcggcttaggtaccggtggaaatccgaatttgggagagcaggctgctgaggaatcaagagaaaccatagccactgccctgagggattcagatcttgtcttcataacagctgggatgggagggggtactggatctggtgctgctccagttgttgcccagatatcaaaggaagctggttatcttactgttggtgttgtcacctatccattcagtttcgagggccgtaagcgctctgtacaggcattggaagcactagagaagctggaaaagagtgtagacacacttattgtgattccaaatgataagttattagatgttgcggatgaaaacatgcccttgcaagatgcatttctccttgcagatgatgtccttcgtcagggtgttcaaggaatatcagacatcatcacaataccgggacttgtcaatgttgattttgctgatgtaaaagctgtcatgaaaaactctggaactgccatgctcggtgttggtgtttcttccagcaaaaatcgggcccaagaagctgctgaacaggcaacacttgctcctttgattggatcatccatcgaggcagctactggcgttgtgtataatattactggtgggaaggacatcactttgcaagaagtgaacaaggtgtcccagattgtgacaagcctagctgacccatctgcgaacataattttcggtgctgtcgttgatgaccgttacactggtgagatacatgtgacaatcattgcgacaggatttccacagtccttccagaaatcccttttggcggatccaaagggagcacgtatagtggaatccaaagagaaagcagcaaccctcgcccataaagcagcagcagctgcagttcaaccggtccctgcttctgcttggtctcgaagactcttctcctag

SEQ ID NO: 71 - DNA, 1218 bp, Zea mays; identical to SEQ ID NO: 70

SEQ ID NO: 72 - DNA, 1218 bp, Zea mays
atggcgtcatccgccgccgccgcctcctcggcttccgcgctcttccgcctcccggggtcgggtcacctgcgtgcaccgccacgaagcgggtggcgagaccacaggcggtcccgtcgcgcgaccgtgcggtgctcgttcgcgcccgtggagacggcccggataaaggtggtgggcgttggcggaggcggcaacaacgccgtcaaccgtatgatcggcagcggcctccagggcatcgaattttatgctataaacaccgattcccaagcccttattaattcacaagcgcaatatcctctgcaaattggagagcagttgacccgcggcttaggtaccggtggaaatccgaatttgggagagcaggctgctgaggaatcaagagaaaccatagccactgccctgagggattcagatcttgtcttcataacagctgggatgggagggggtactggatctggtgctgctccagttgttgcccagatatcaaaggaagctggttatcttactgttggtgttgtcacctatccattcagtttcgagggccgtaagcgctctgtacaggcattggaagcactagagaagctggaaaagagtgtagacacacttattgtgattccaaatgataagttattagatgttgcggatgaaaacatgcccttgcaagatgcatttctccttgcagatgatgtccttcgtcagggtgttcaaggaatatcagacatcatcacaataccgggacttgtcaatgttgattttgctgatgtaaaagctgtcatgaaaaactctggaactgccatgctcggtgttggtgtttcttccagcaaaaatcgggcccaagaagctgctgaacaggcaacacttgctcctttgattggatcatccatcgaggcagctactggcgttgtgtataatattactggtgggaaggacatcactttgcaagaagtgaacaaggtgtcccagattgtgacaagcctagctgacccatctgcgaacataattttcggtgctgtcgttgatgaccgttacactggtgagatacatgtgacaatcattgcgacaggatttccacagtccttccagaaatcccttttggcggatccaaagggagcacgtatagtggaatccaaagagaaagcagcaaccctcgcccataaagcagcagcagctgcagttcaaccggtccctgcttctgcttggtctcgaagactcttctcctag

SEQ ID NO: 73 - DNA, 1074 bp, Zea mays
atggcaagcacctcgtccgcacccgccggcgccacagatgccgtgctgaagccatccgagccggtgcctgagggtgtgcagcaggtgcagggcatcgacttcaaccagcatgcggcgcgccccatcaccgtcgacgagctcgtgagcggctatgccaccatgggcttccaggcgacgtcggtgggagcggctgtgcgaattatcaatgacatgcgcgcctggagagaccctgagacgggcgaccgcacaaccatctttctgggatacacgtccaatctcatctcgtcgggcctgcgcgaaacactgcgctacctcgtccagcacaaacatgtctcggccattgtcactaccgccggtggtgtcgaggaggactttatcaagtgtctcgcccccacctacctaggctccttctccacgcccggcgctggcctgcgcaaaaagggcatgaaccgcattggcaaccttgttgtccccaacagcaactactgcgccttcgaggactgggtcgtgcccattctcgacaagatgctcgaggagcaggaggccagcaacaagacggacgagccgctgcactggaccccgagcaaggtgatccaccgcctgggcaaggagatcaatgacgagcgatccgtctattactgggcatggaagaacgacatcccaatcttctgcccagcgctcacagacggaagtctaggcgacatgctgtactttcacacgttcaagtcatcaccagagcagctgcgtgtcgacattgtagaggacattcgcaagatcaacacgattgcagtccgagcaaagcggacaggcatgattgtcttgggcggcggactggtgaagcaccacatcgctaatgcgaacctgatgcgtaatggggccgagagcgccgtctacatcaacacggcgcaggaatttgatgggagcgatgcaggcgcgcggccagacgaggctgtcagctggggaaagatcaagctggatggagacagtgtcaaggtgtacgcagaggccacggtagtattcccgctcattgtggcggctacttttgcacgagtggccgccaaggcagaagactag

SEQ ID NO: 74 - DNA, 1074 bp, Zea mays; identical to SEQ ID NO: 73

SEQ ID NO: 75 - DNA, 1074 bp, Zea mays; identical to SEQ ID NO: 73

SEQ ID NO: 76 - DNA, 1074 bp, Zea mays; identical to SEQ ID NO: 73

SEQ ID NO: 77 - DNA, 663 bp, Glycine max
aaaaaagcaggctcctgcaggaccatggcttctgccggcgatgttttcaggcagggtttgccggaagtttgtgctgccgggaagttacacgtgcttgctgttgatgacagccacgtggaccgcaaggtcattgaacggttgctcaaaatctcgtcttgcaaagtgacggtggtggagagtggaagcagggctctgcagtatctggggttggatggagaaaaaagttccattggtcttgatagtgtgaaggttaatttgataatgacggattattccatgcccgggatgacaggatatgaattgctcaagaagataaaggagtcatctgtttttagagaggttccagtggtggttatgtcgtctgagaatatcttgaccagaattgatagttgcttggaggaaggagcagaggagtttctgttgaaacctgtcaagttgtcagatgtaaaacgcgtaacagatttcataatgagaggtgaagggatgaaaggagtaaaaatatctaaaaaaagaagccgatcagatgattgcattccatctctatcaactgcattctcatcagtttctcatccctgtgatatatcatcacctccatcgccatgtgtattgcaaccgaagaaatctagattgagcatatagctcgagacccagctttcttgttag

SEQ ID NO: 78 - DNA, 747 bp, Arabidopsis thaliana
atgtctgccgtatattgcggaaccaagagatcttacttcgacgataattcttctccgccctcttctaagaggttccgatgtttttcgccttccaattctccaatctggtcctctcctccttcctcatcgctcgatcagcttcactctgcgtttcctcatattgaactcacggttctcgtcaaggcactagaagataatggaagtgattttaatgctgctatgaagagcttatactctttcgcatcttctgaggagaagaaagctgaagaattggccgcaggaggtgctgctactcaggaaactgatgccgtttgtggtggaaaccccccgaccagtggtgatgactgggttgaattgttagtcagggaagtgttacaatcgtctggtacagatgatgcaaaagtacgtgcagcaagagtccttgaggccttagagaagatgttaagtgcacgtgctcgtgaagaagctggaaacaaattccaagaggagaaagtggcagtgcagcaacaggtggagaccttggtgaaggacaacacagtcctcaaacgtgctgttgctatccagcatgagcggcagaaggcattggaggatgcgaaccatcagctaggacttttgaagcaactggttcctcagtatcaggaaaagcttagaaatctggaggtgaacaattacgcgttgagaatgcagctgcagcaagtggaacatggcaactcaatgccagcaagattcaatccggacgtcttctag

SEQ ID NO: 79 - DNA, 1026 bp, Arabidopsis thaliana
atgggccacagacacagcaagtccaaatcctccgatccgccaccgtcctcctcctcctcttcctccggcaacgtagtccaccatgttaaacctgccggagaacgccgcggatcatccggttccggaaccgtcggatcgtcaggctccggaacaggcggatctcgttccaccacatctactcagcagaatggtcggatcttaggtcggccgatggaggaagtacggagaacctatgagtttggtcgtgagcttggtcgtggccagtttggtgtcacgtacctcgtaactcacaaagagacgaaacaacaggtcgcttgcaagtcaatccctacgcgccgccttgttcacaaagacgacattgaagatgttcgccgtgaagtccagattatgcaccatctcagcggtcaccggaacatagtggacttgaagggagcctacgaggacagacactctgtgaatctgataatggagttgtgtgaaggaggggaattgttcgataggatcatttctaaaggtctttactcagagagagctgctgcggatttgtgtaggcagatggtgatggttgtgcatagttgtcattctatgggtgtaatgcaccgagacttgaagcccgaaaactttctctttcttagtaaagatgagaactcaccattgaaagctacagactttggtctctctgtcttcttcaagccaggtgataagtttaaggatcttgttggaagtgcatactatgttgccccagaagttctaaaacggaactatggaccagaggctgatatctggagtgctggtgtgattctatacatccttctcagtggtgttccgcctttctggggagaaaatgaaacggggatctttgatgccattcttcaagggcaacttgatttttcagctgatccatggccagcactatcagatggtgccaaagatcttgtgaggaaaatgttaaaatatgaccctaaagatcggcttacagctgcggaagtgctaaatcatccgtggattagagaagatggggagtag

SEQ ID NO: 80 - DNA, 1401 bp, Arabidopsis thaliana
atggctggacttaagatctggcaagccatctttatcaccattgcactgatcatcattgtcgtactctctgttctttcattttgtctcatttggaaaaagaaatcaagaagatccaaaaccttaagtcttcccatcatacaaacccctgtggtgtcaaaggagatcaaggaagtcaggatcgagcatgttgtctcaacgagtagtaacttcgatcctcaggatgaaaacaacaatgaatctgacaaattcttgcttaatttggaaatggagaagaacagagagaatggtttgagtagtagccggtctggttcaggcaaagaaggttatttatgtgttgcaaaccggtctacttcatcattgtatgagatggctacaccatcaccatcacctctttctggtttacctgagtcacaccttggatggggtcattggtttactctgagagatcttgagatagcaacaaacagattctcaaaggaaaatgtgattggtgaaggaggctatggagttgtttaccgaggcgagttggtcaatgggagtcttgttgccgtgaaaaagatcctaaaccacttgggacaagcagagaaagagtttagagtagaggtagatgctataggtcatgtgcgtcacaagaacttggtacgtcttctaggatactgcattgaaggcacaaacaggatattggtttatgagtatatgaacaatgggaaccttgaagaatggcttcacggagcaatgaaacatcatggatatctaacttgggaagctcgaatgaaagttctcactggaacatccaaggctcttgcatatctacacgaggcaatcgaaccaaaagtggtgcatagagacatcaagtcgagcaacatcttgatcgatgatagattcaatgcaaagatttctgattttggccttgccaagttacttggagatgggaaaagccatgtgactactagagtcatgggaacatttgggtatgttgctcctgagtatgcgaataccggacttttgaatgaaaagagtgatgtgtacagctttggtgtcttggtcttagaagcaataaccggaagagatcctgtggattacgcgcggcctgctaatgaggtgaatttggttgagtggttgaagatgatggtaggatctaagagattagaagaagtcattgatccaaacatagcagttaggccagcgactagagcactgaaacgagtacttcttacagcacttagatgcattgatcctgattctgaaaagagacctaaaatgagtcaagttgtgcgtatgctggagtctgaggaatatcctgtaccaagagaggagcggagagtgcgcagaacgcaagaggaaagctcggataccgatagaagcagaccggtttcaagatcacagagcaagagactgtag

SEQ ID NO: 81 - DNA, 786 bp, Arabidopsis thaliana
atggctcgcttagtattttctttaaaccttccatctagtcatggattcaatctcagtcctcgaaatcttcaatctttcttcgttacccaaacaggagctccacgatttcgcgctgttcgttgcaaaccaaacccagaatcttccgaaaccaaacaggagaaattggtaatagataatggtgaaacttcatctgcatcgaaggaagtggaatcatcatcatctgttgctgactcttcttcttcttcttcttcgggattccctgaatctcccaataaggatatcaatagaagagttgcggctgttactgtaatcgcggctttgtcgttatttgtatcgacaaggctcgattttgggatttctttgaaggatttaaccgcttctgcgttgccttacgaggaggcgttatcgaatgggaagccgactgttgttgagttctatgcagattggtgtgaagtttgtcgagaactagctcctgatgtttataaaatcgagcagcaatacaaggacaaagttaactttgtgatgctaaatgtggacaacacgaaatgggagcaagagttggatgagtttggtgttgagggtattcctcatttcgccttcctcgatagagaagggaacgaagaaggtaatgtggtcgggaggctcccaagacagtatttagttgaaaatgtgaatgcgcttgcagccgggaaacaatcaattccttatgcccgagccgtgggacagtactcaagctcagagtctcgtaaggtgcatcaggttactgatcccttaagccatggatag

SEQ ID NO: 82 - DNA, 1479 bp, Arabidopsis thaliana
atggcggattctcactcagtcaacaatcagctctcgagacacacttccatttttggtttacgtttatgggttgttctcggcgtttgcgttggagccgcgatcgttcttttactcgttctcatctctctctggttcatttaccgacgaagcaacaagaacaaatctcttgagtcttcttctaaatctaaccatacgattgttcccgttgtttccaaggagattcaagagattcgacctccaattcaacccgacccaacaccggagccacaccaaaaccaacaaagagaagacgataacaaaattcacatcgaaattggtaaagatcatcggattgcgtacccggaacgaggaggttggactggttccgggtctgggtccgggtcgggtgatcagggtttacttatgttgtcgggtcctgaggtttctcatttaggttggggacattggtatacgttgagagagcttgaggtttctactaatggatttgctgacgagaatgtgattggacaaggaggttatgggattgtgtatagaggtgttcttgaggataaatcaatggtggctataaagaatctgctcaacaacagaggacaagctgagaaagaatttaaagtcgaagtcgaagctattggacgcgtaagacacaagaatctggtgagattgcttggttattgcgttgaaggagctcataggatgttagtttacgagtatgttgataatgggaatttagaacaatggattcatggtggtggtttggggtttaagagtcctcttacttgggagattaggatgaacattgttcttggaacagccaaagggttaatgtatttacacgaaggtcttgagcctaaagttgttcaccgagatattaaatcgagtaatatcttgcttgacaagcaatggaactcgaaagtttctgactttgggttagctaagctcttgggttcggagatgagctatgtgactactcgtgtgatgggtacgtttgggtatgtggctcctgaatacgcgagtaccggaatgttgaatgagaggagcgatgtttatagcttcggtgttcttgttatggagattatttcagggagaagtcctgtggattatagccgggctccgggagaagtgaatcttgtggaatggttgaagagattggtgacgaatcgagatgcggaaggagttttggatccgaggatggttgataaaccgtcgttaaggtcattgaagcgtacccttttggtagctttaagatgtgttgatcctaatgctcaaaagaggccaaaaatgggtcatatcattcatatgcttgaagctgaggacttggtctctaaagatgatcggagaaactctggaggaggaggaggaggaatagaacagggaaggtcaccgcggaggaagacaaatgtgaatgaatcagaggatgagagtggtaattctgttctgatcaacaatgaccaattagctttggagaataagcagaactag

SEQ ID NO: 83 - DNA, 936 bp, Arabidopsis thaliana
atggaattgctctttctcctctgttcaatcatctacacttcaatcacttccatcttcttctctcttctcctcccgtttcgcttccttctccaccgtctccttccttcacgcgccgccgtcgatcctaatgtctctttctacgaaggcacagtctggcacgaccgtctccgtcctgtccgccactctttccgttattccgttcgttacgcactctttgacctcgacaaagctattaacacaccgccggatcatttctccgccgacgaagctcgccgtgtttctcgtaccaccgggccaatatttctattgacaataccaccaagcgttggatatgaacaaaacccattgagtttatactattgctatgacttggaagggtcaagtaagcgcttaagtaaatgcattgctcaggttacaaatacgccgtggggggaacgagtgacatttgtatttgaccctgaatctgacttggttgctaaatcattacaagtcagtcctttcatggatatgcttgggaattggaaaatcagagctaatgaacctggagatgatttatctgtctccattgcatctcaacatcctcatttcggtaactatttctctgcgacattaaaggcgaaaaggatacccctatcgcgggtgtctgatcccgctgttttcttctggttgatgcctcataaggttgcgatatggatctattggcatgcacttcaactctggtggaagagtgtacctttcattcaacacccgagatactcgaacccatcatacagggaggaagcagcgaaacgcgatcaagaacttcgttgccccgggttagatgggtctgattctgataaaaccaacaaatttgatgggttaaaaggagatggttgtagtagtagttttggaggatgtcgctttgcgtggcgagatgcgaactggccttggtcatag

SEQ ID NO: 84 - DNA, 327 bp, Zea mays
atggagatagaatcggtcaagtgcgagtgctgtggcctgaaggaggactgcaccccgcactacattgccagcgtgagatcaggcttccatggccaatggttgtgtgggctgtgctgtgaggcggtcagagatgaagcatgcaggaggaaggctcaccatggagtagaggaggctgtgagggctcacatggcgttctgcaacatgttcaagttgaaccccgccgtccgcgtggccgacggcatgcgccagatgctccggaggcggtccggtgatatgtcaaagccagaatcggccaagaagtacgaatcatcagtgacactgtattag

SEQ ID NO: 85 - DNA, 360 bp, Arabidopsis thaliana
atggcgtcgagagaccaagttaaggcatcgcacattttgattaagcatcaaggttctcggaggaaagcgtcgtggaaggatccagaagggaagattattctgactaccactagagaagccgccgttgagcagcttaaatcgatccgtgaagatattgtctccggcaaggcgaatttcgaagaagtggcgactcgtgtttctgactgtagctctgctaaacgcggcggtgatcttggttcctttggtagaggtcaaatgcagaaaccatttgaggaagcaacttacgcgctcaaggttggagatataagcgacattgtcgatacagacagtggagtccacatcattaagagaacagcttag

SEQ ID NO: 86 - DNA, 888 bp, Arabidopsis thaliana
atggaagctaattcaggcggaggaggaggagctgaaggcggaagagcggtaaccggaggaggaggaggaggaggagggagcgatgtggaattggtgagcaagacgttgcaagtggagcataagctattctattttgatcttaaggagaatcctcgtggaaggtatctaaagatatcggagaagacgtcggcgacgaggtcaaccatcattgttccttcctccggcatctcttggttccttgatctcttcaactactatgtcaattctgaggaacacgagctttttagcaaagaattgcagcttgattccaaggtgttttacttcgatatcggtgagaacagaagaggacgcttcttgaaggtgtcagaagcatcggttagtagaaatcgaagtaccattattgttccagctggaagctctcctgatgaaggatgggcagctttcaggaatatattggctgagatacatgaagcatcaggactttttgtgatgccaaatcagaaaccttctgatggacaggaacacttggttgatgatgttggagctggttttatacctggacatggtagtcagcagccatcttcttcagaacataatgtggatcgaacaattgactcgccaggccaggaagaaaccggaatgactggtgtttctaaagtaatcagagctgaccagaaacggttcttctttgatcttgggaacaataacaggggccatttcttaaggatatctgaggtggcaggttctgacaggtcttccatcattctaccgttatcgggtcttaagcagtttcacgaagtaattggtcactttgtggagatcaccaaagataaaattgaaggtatgacaggcgcaaatgtcaggacagttgatcctcctcagagatag

SEQ ID NO: 87 - DNA, 387 bp, Arabidopsis thaliana
atggagtcttaccaaaaccagtccggagcgcagcagactcaccaacagcttgaccaatttggaaatccatttccagccaccaccggagcctatggaactgccggtggagctccagccgtggctgaaggtggtggtttaagtggcatgcttcaccgttctgggagtagctctagctctagctcggaggatgatggactaggtggaaggaggaggaagaagaagggaataacggagaagattaaagagaagctgccgggtcatcacgactccaacaagacttcttctttaggttctacaacgacggcctatgataccggcaccgttcaccacgagaagaaaggcatgatggagaagatcaaagagaagcttccgggtggtcatcattag

SEQ ID NO: 88 - DNA, 933 bp, Zea mays
atggacggcggaggcggtggtgtagggggaggcggagttggggcaggtgtcatggtgggcggcggagtcgggccgggcggcggcgttggcgttggcgttggcggcgacgtagagctcgtcagcaagacgctgcagttcgagcacaagctgttctacttcgatctgaaggagaacccgcgggggaggtacctcaagatctccgagaagacctcggccacgcgctccaccatcatcgtccccgtcgacggcgtggcctggttcctcgacctcttcgactactacatccgcaccgacgagcgcgacgccttcagcaaggagctgcgactccagaccaaggtgttctatttcgatatcggggagaacaagaggggccgattcctcaaggtttccgaggcctctgtcaaccgaaaccggagtaccataattgttccagctggcagctctggtgaagagggctgggaagcattcaggagtgtactgctggagataaataacgaggctaccagattgtatgtcctaccaaatcatccaaatcagcaacacatggagccgccagagcgtcttcctggtctgtccgatgatgtgggtgctggatttatagcaggacatggtagccagtctgcttctgggccagaggtagatgtcgaacgcttggttgatctgcctcctcaagaagaaattagtggcatgggtatgtctaaggtgattagggcagatcagaaaaggttcttcttcgacctgggcagcaacaacaggggccattatttgaggatttctgaggtggctggagctgatcgttcgtctattatcttgccgctctcgggtttgaagcaattccatgaaatggttggtcactttgtaggtataatgaaggacaggcttgaaggaatgacaggagctaacgtgcgcactgtcgagcccagccagagatag

SEQ ID NO: 89 - DNA, 1677 bp, Arabidopsis thaliana
atggctttcgctgtctcggttcagtcacatttcgcaatcagagcgttaaaacgagaccacttcaagaacccttctcctcgtactttctgctcgtgttttaaatcgaggcctgactcgtcttaccttagtttaaaggaacgtacttgcttcgtttccaaaccgggtttagtcactactagatacagacatatattccaggtcggagctgagacgggaggagagttcgccgacagtggagaagtagctgattcgcttgcttctgatgcaccagagtcattttcttggtcttctgtgatactcccgtttatcttcccggctttgggaggattattgtttgggtatgacattggggctacctccggtgctacgctctcacttcagtcacctgcgcttagcggaactacatggtttaacttctcacctgttcagctaggacttgtggttagcggatccttgtatggagcccttcttggctcaatttctgtctatggcgttgctgatttccttggaagaaggcgggaacttattatagctgctgttctctatctcctcgggtctctgatcactggctgtgcccctgatcttaatattctcttagttggaaggcttctctatggctttggtattggtttggcaatgcatggggctcccctctatattgctgagacatgcccatctcaaatccgtggaactttgatatctctgaaagaactcttcatcgtattgggaattttgttgggtttttctgttggaagcttccagattgatgtagttggagggtggcgttacatgtatggatttggtacgcctgttgctttgctgatgggactaggcatgtggagtctccctgcatctcctcgctggttgctgcttagagctgtccaaggtaaaggacaattacaagaatacaaagagaaggccatgcttgccctcagcaaattacgtggcagacctccaggtgataaaatctcagagaagttggtagatgatgcctatttatctgtgaaaacggcctatgaagatgagaaatctgggggaaacttcctggaagtattccaagggcctaatttgaaagctttgacaattggtggaggtttagtcctcttccaacagataactggacagcctagtgttctttattatgcgggttcgattcttcagactgctggattctctgctgctgctgatgcaactcgagtctctgttattattggtgttttcaagttactgatgacatgggtagctgttgcgaaagttgatgatctcggcagacgacctttactgattggaggtgtcagcggcattgcgttgtccttgtttctactgtcagcatactacaagtttctcggaggctttccccttgtcgctgttggtgcactgcttctctatgttggttgttaccagatctcatttggacccatcagctggctaatggtgtcagagattttcccgctccgcacaagagggagagggatcagtcttgcagttcttacaaactttggctccaatgctattgtgacatttgcattttcacctttaaaggaatttcttggagccgagaatcttttccttctctttgggggcatagcactggtatcactgctgtttgtaatactagtagttccagagaccaagggtctcagcttggaagaaattgaatcaaaaatcttgaagtag

SEQ ID NO: 90 - DNA, 1818 bp, Arabidopsis thaliana
atggcagatcgattgacacgtattgctattgtgagttcagaccgttgcaagccaaagaaatgtcgccaagagtgcaagaagagttgtcctgtggtcaagacaggaaaactttgtattgaggtgactgttggttccaagcttgcttttatctcagaggagttgtgtatcggttgcggtatttgtgtgaagaaatgcccgtttgaagctattcagattatcaatcttccaagagacttggagaaagatacgacccatcgttatggggcaaacacttttaagttacacaggctcccagttccaagaccagggcaggtgctagggttggttggaaccaatggtattggaaaatcaactgctctgaaaattttggctggaaagctcaaaccaaatttgggccgtttcactagtcctccagactggcaagaaatcttgactcacttccgtggttcagaacttcaaaactacttcacacgtattctagaagataatcttaaggccattataaagcctcaatatgtcgaccacatcccaagagcagttaaaggcaatgttggagaggtccttgaccagaaggatgagagagataagaaggcagagctctgtgctgatctggagctgaaccaggtcattgaccgtgatgttgagaatttatctggtggtgagctgcagaggtttgcaatcgctgttgttgccatacaaaatgcagagatttacatgtttgatgaaccatctagttacctcgatgttaagcaaagactcaaagctgctcaagttgttcgttctctcctgaggcctaatagctacgtcattgttgtggagcatgatctcagtgttcttgattacttgtcggatttcatttgctgtctgtatgggaaaccaggagcctatggtgtggtgactctccccttctctgtcagagaaggaatcaacattttcttggctggatttgttcctacagaaaatttacgttttagagatgaatctttgaccttcaaggttgctgagactccacaagaaagtgctgaagagatacagtcgtacgctaggtacaaataccccacgatgaccaaaactcaaggaaacttcaggttgagagtgtcggaaggtgaattcactgactctcagattattgtaatgcttggggagaatggtacagggaagacaacatttattcggatgctggccgggttgttgaaaccagacgacacagaaggaccagacagagagataccagaattcaatgtttcgtataagccacaaaagatcagcccaaagtttcagaattcagttaggcacctgctacatcaaaagattcgagattcttacatgcatccacaatttatgtcggatgtgatgaaaccacttcagattgagcagttgatggatcaagaagttgtcaatctctcaggaggagaattgcaaagggttgcattaactctgtgcctcggaaagcctgcggatatatacctgatcgatgagccaagtgcatatctcgattctgagcaacgtattgttgcttctaaagtcataaagcgatttattctccacgcaaagaaaactgcatttgtagtcgagcatgactttataatggcgacctatttggcagaccgggtcattgtgtatgaaggacaaccatccattgattgtactgcaaattgtcctcaatcactgctcagtggaatgaatctcttcttatctcatctgaacatcacattcagacgggatcccaccaatttcagaccaagaatcaacaaattggagtcgaccaaagacagggaacagaagtctgcaggctcatactactacttggatgattag

SEQ ID NO: 91 - DNA, 1068 bp, Umbelopsis ramanniana
atggctagcaaggaccagcacctccaacagaaggtgaagcacacccttgaggccatcccatcccctaggtatgctccactcagggtcccacttaggagaaggctccaaacccttgctgttctcctctggtgctccatgatgagcatctgcatgttcatcttcttcttcctctgcagcatccctgtgctcctttggttcccaattatcctctacttgacctggattttggtgtgggataaggcccctgagaacggaggcagacctatcaggtggctcaggaacgcagcttggtggaagctctttgctggatacttcccagctcatgttatcaaggaggctgaccttgacccatccaagaactacatctttggttaccacccacatggtatcatcagcatgggtagcttctgcaccttctccaccaacgctactggtttcgatgacctcttcccaggaatcaggccttccttgctcaccctcaccagcaacttcaacatcccactctacagggattacctcatggcctgtggactctgctcagtgtctaagacctcctgccagaacatcctcaccaagggtggtccaggaaggtccattgctattgtggtgggaggtgcctctgagtccttgaacgccagaccaggagtgatggaccttgtgttgaagaggaggtttggattcatcaagattgctgtgcagactggtgctagccttgtccctaccatctcctttggtgagaatgagctttatgagcagattgagagcaatgagaactctaagcttcacaggtggcagaagaagatccagcatgctcttggtttcaccatgccactcttccatggaaggggtgtgttcaactacgactttggtctcctcccacacaggcacccaatttacaccattgtgggtaagccaatcccagtcccatctatcaagtacggtcagaccaaggatgagatcatcagggagctccatgactcttacatgcacgctgtgcaggacctctatgacaggtacaaggacatctacgccaaggacagggtcaaggagcttgagtttgtggagtag

SEQ ID NO: 92 - DNA, 1600 bp, Saccharomyces cerevisiae
atgcttttgcaagctttccttttccttttggctggttttgcagccaaaatatctgcatcaatgacaaacgaaactagcgatagacctttggtccacttcacacccaacaagggctggatgaatgacccaaatgggttgtggtacgatgaaaaagatgccaaatggcatctgtactttcaatacaacccaaatgacaccgtatggggtacgccattgttttggggccatgctacttccgatgatttgactaattgggaagatcaacccattgctatcgctcccaagcgtaacgattcaggtgctttctctggctccatggtggttgattacaacaacacgagtgggtttttcaatgatactattgatccaagacaaagatgcgttgcgatttggacttataacactcctgaaagtgaagagcaatacattagctattctcttgatggtggttacacttttactgaataccaaaagaaccctgttttagctgccaactccactcaattcagagatccaaaggtgttctggtatgaaccttctcaaaaatggattatgacggctgccaaatcacaagactacaaaattgaaatttactcctctgatgacttgaagtcctggaagctagaatctgcatttgccaatgaaggtttcttaggctaccaatacgaatgtccaggtttgattgaagtcccaactgagcaagatccttccaaatcttattgggtcatgtttatttctatcaacccaggtgcacctgctggcggttccttcaaccaatattttgttggatccttcaatggtactcattttgaagcgtttgacaatcaatctagagtggtagattttggtaaggactactatgccttgcaaactttcttcaacactgacccaacctacggttcagcattaggtattgcctgggcttcaaactgggagtacagtgcctttgtcccaactaacccatggagatcatccatgtctttggtccgcaagttttctttgaacactgaatatcaagctaatccagagactgaattgatcaatttgaaagccgaaccaatattgaacattagtaatgctggtccctggtctcgttttgctactaacacaactctaactaaggccaattcttacaatgtcgatttgagcaactcgactggtaccctagagtttgagttggtttacgctgttaacaccacacaaaccatatccaaatccgtctttgccgacttatcactttggttcaagggtttagaagatcctgaagaatatttgagaatgggttttgaagtcagtgcttcttccttctttttggaccgtggtaactctaaggtcaagtttgtcaaggagaacccatatttcacaaacagaatgtctgtcaacaaccaaccattcaagtctgagaacgacctaagttactataaagtgtacggcctactggatcaaaacatcttggaattgtacttcaacgatggagatgtggtttctacaaatacctacttcatgaccaccggtaacgctctaggatctgtgaacatgaccactggtgtcgataatttgttctacattgacaagttccaagtaagggaagtaaaataga

SEQ ID NO: 93 - DNA, 1680 bp, Arabidopsis thaliana
atggcggcttcaatgcagttctacggagttaaaacaccagaacttgccttaaactcaaaaaggattgagtttagctcaaaggggctcaacttctcagcactcgtgtcctctgctcgtgtattctctagaaacgtagatcgttcttgtaagaacatcgctctgagagttacttgtgaagcgggaagagtggagctgctagagagaaaagcctcagagactttcaagttaaacaaaactgagaaaaaattgacctgtgtaatgaaattcggtggctcatcagtggcatcagcagaaaggatgatacaagttgccaaactcatactcagcttcccagatgagaagcctgttgttgtgctatcagcaatggcaaagaccaccaataagcttttgatggctggggagaaggctgtttgctgcggtgtcaccaacgtcgacactatcgaagagttgagctatataaaggaactccatataaggactgctcatgagcttggagtggaaacagcagttattgcagaacatctagaaggactggaacagcttcttaaaggcgtcgcaatgatgaaggaattaactttacgctcaagagactacttggtttcatttggagaatgcatgtccactaggctatttgctgcgtacctgaacaaaattgggcacaaagcacgacagtatgatgcatttgagatcgggattatcaccacagatgacttcactaatgctgatattcttgaggcaacatacccggcggtttcgaaaaagttacttggtgactggagcaaggaaaatgcactccccgttgtcacaggcttccttggaaagggatggagatcttgtgctgtaactacgcttggtagaggaggtagcgatttgactgcaacaacgatcgggaaggctttaggtttgcgggagatccaggtttggaaagatgtggatggagttttgacttgtgatcctaacatttactgcggagctcaacctgttccacacttgacatttgatgaggctgctgaacttgcttactttggtgcccaggtgttgcatccactttccatgcgcccagcgcgagaaggtaacattcctgtaagggttaagaactcttacaatcccactgctccaggaactgtcatcaccagatcaagagacatgagcaaggctgtattgaccagcatcgttctgaaacgtaatgtcaccatgttggacatcactagcacccgtatgctcggccaatatggtttccttgccaaggtgttttccacatttgaaaagttgggcatatctgtggatgttgttgcaaccagcgaagttagcatttctttgacattggatccttcaaagttctgtagcagagagttaattcaacacgagcttgatcaggtggtggaggaacttgagaagattgctgttgtaaatctgcttcgacacagatcaattatctctctcatcggaaatgttcagagatcatcattcatattagagaagggcttccgagtacttcgaaccaatgggattaatgtccagatgatctcccaaggtgcatctaaggtaaacatctcactgatagtgaatgatgatgaggcggagcattgtgtgaaggctctccactcggccttctttgagacagacacttgtgaagcagtctcagaatgcccgaccggctacatcgctgcctcttcgtag

SEQ ID NO: 94 - DNA, 1680 bp, Arabidopsis thaliana; identical to SEQ ID NO: 93

SEQ ID NO: 95 - DNA, 1272 bp, Arabidopsis thaliana
atggcggtggaatatgaatgctgcgggaccagcttcttcatacacatcgctgtgatagtgttactagtcttgttcgctggactaatgtctggtcttactttgggtcttatgtctatgagtctcgttgatcttgaggttcttgctaaatccggtactcccagagatcgtatccatgctgcaaagattttaccagttgtgaaaaatcagcatcttttgctttgtactttactgatatgtaatgcagctgctatggaggcgcttcctatatttcttgatgctcttgtgacggcttggggtgccattttgatttcagtgacgctaattcttctctttggtgagatcatacctcagtcagtctgttctcgtcatggtttagctattggtgcaacagtggctccatttgttcgtgttctagtttggatctgcttaccagttgcatggccgattagtaagctgctagactttctacttggtcatggtcgtgtagctcttttccgaagagctgagctgaaaacacttgtggatttgcatggaaatgaggctggtaaaggtggagaattgacacatgatgaaacaacaatcattgctggagctcttgaactatctgagaaaatggctaaagatgcaatgacaccaatttctgacacttttgtgattgatatcaatgccaaactagacagggatttgatgaatttgattcttgataaaggtcatagcagagtcccagtatactatgagcaacgtaccaacataattggacttgttttggtgaagaacttattgactatcaatccagatgaagaaatacaagtaaaaaatgtgactatacgaagaatcccaagagttccagaaacgttaccgttatatgatatattaaacgagttccagaaaggacatagccacatggctgttgttgtgagacagtgtgacaaaatccacccgttacagagtaatgatgctgcaaacgagactgtaaatgaagtcagagtggatgtggattatgagagatccccacaggaaacgaagttaaagagaaggagatcattacagaaatggaagagctttccaaaccgagcaaattcgttagggtcgaggagcaagaggtggtccaaagataatgatgctgatattctgcaacttaacgaacatccacttccaaagctagatgaggaggaagatgctgttggtatcattacaatggaagatgtcattgaagaacttttacaggaagagatattcgatgagacggatcatcattttgaagacttgtag

SEQ ID NO: 96 - DNA, 552 bp, Arabidopsis thaliana
atgaagaatccgatattgaagacatggagaaaagtgaagtcttttgggcatacgagctcttcgaccacaccctcgttcacgaagagcaagtcttgccatggctcttttcgtctcgaggatgctaagagcaacgaatcaaaaggaaagccgaagaaagagtcgccgtcacatggatttttcacggtttacgttggtcccacgaaacaaagaattgttgtgaagacaaaacttctgaaccatcctttgttcaagaacttgttagaagatgctgagactgagtatggatatagacgcgatggacccattgttcttccttgtgaggttgacttcttcttcaaggctttggcggatatgaagtctaatcctggtcatcatgatcatgatgatgattatgatgatgatgatggtttcacgaattccccgatttgcggatttgtctgtagtccctatagatcatacggtggtggtgttacggatcctctggccatgaaacggaacggctcatacaagcttcttcgatctccatctttgttcaagttgactagattttag

SEQ ID NO: 97 - DNA, 846 bp, Glycine max
atgtatgcagagactggtcttctcttcccatatttgaacaacatctctcacggccttcatcagctcgaggagtactgcaaaacccagaagtccaatgcttcaatggatgaccttgttcagtcttctgtcatgtcagagtatgatttggcagcagagggagatctgttcaaagctcctgaacctattattgaagagccaatcatggatatggatcccatgacagccaccatctccatgatatcttgtggggaagatgtctcctcacagggactaaaatccactgatattgatattcttcaaaatgatcagtttctgcatgaggtgttctatgaatgtgaaaaggatctcttagaaaaggcagcaatagagccaccattctctgagattctggaaatcaaggttcctcttctgaacattgatgagaacacaattcaagaaaacaagctgcttcctgacatgcaattagcaaagagtgtcagctcaggaagtttgagctcaatggactggatgcgtggagctgcaatgaagcctgctttcattgatatccctgcaatagatttcaatgcagattatggcatgcggagatcatttagcgaaggagatataaagactcttggtaatggtaacatgaacatcgtccaatcaccccttgagaggcccttgcttatcagcaactgcaccagtgaggaacgctttcaaaagctctcaagatacaggaataagaggacaaagaggaattttgggaggaaaatcaagtatgcttgcaggaaggctcttgctgacagtcagccaagaatccgtgggagatttgcaaggactgaagagtctgatgtcaagagggaatag

SEQ ID NO: 98 - DNA, 846 bp, Glycine max; identical to SEQ ID NO: 97

SEQ ID NO: 99 - DNA, 846 bp, Glycine max; identical to SEQ ID NO: 97

SEQ ID NO: 100 - DNA, 1004 bp, Zea mays
ctccgatcgggccatggcgcgcgccggcgtctctaccgcgccgctctcccgcactcacctcctcccaccacgtccttccctcctccacaacacgcagccccactccctcctcctccggccccagcgcaaggcgcccgccaccaccgcggcggcgctgccgccggccgcggacttcccggcgctgtccctcccggccgcggccgccgcggcggccgcgctggcggcggcggtgtcactttccgaccccgagcggcggcggcgctcgcaggccgaggcggccggcggcggggacaaggaggccgtccgcgcctacttcaactcgacggggttcgagcggtggcgcaagatctacgggtcggcaacggagggcgtgaaccgcgtgcagcttgacatccgcgagggccacgcgcagacggtggcggcggcgctggccatgctccgcgattccccgctggagctggcgggcgccaccgtgtgcgacgccggctgcgggacggggtcgctggccatcccgctcgcggcggcgggcgccgacgtcctggcctccgacatctcggcggccatggtgtcggaggcgcagcggcaggcggcggcgcagtcgtcgtcgtcgtcgttccggatgccgcggttcgaggtccgcgacctggagagcctggaggggcggtacgacgtggtggtgtgcctggacgtgctcatccactacccgcgggaggaggcgcgcgccatgatccgccacctcgcgtcgctggcggacaagcggctgctcatcagcttcgcgcccaggacgctctacttcgacttcctcaagcgcgtgggcgagctgttcccgggcccgtcaaaggccacgcgcgcctacctgcacgccgaggccgacatcgaggacgcgctccgccaggccggctggcgcgtcgctaaccgcggcttcatctccacgcagttctacttcgccaagctcttcgacgccgtgcccgtcggctcctcgacgtagccgtgtaggccgctag

SEQ ID NO: 101 - DNA, 1071 bp, Zea mays
atggtctcgctgcgatgcaccaccgcgcaccactccctcctcggctcgccgacctgcctcgcgcgcccgcggcggcggccgtgccccgtcgtgcgcgctgccgtcgccgtggaggccggcgctcaggccaaggtctcactcatccggattgggacgcgtgggagtcctctggctcttgcacaagcccatgaaactcgggaaaaactgaaagccgcacactctgagttagctgaggagggggctattgagatcgtcatcataaagaccacaggagacatgatcttggacaaaccccttgcagatattggaggcaagggtttattcaccaaggagatagatgatgcactcttgcagggaaggattgatatagctgtgcactctatgaaagatgttccaacatatctacctgaaggcacaatattgccctgtaacctcccacgagaagatgtaagagatgcattcatatgcttgactgcaaattcgctcgcggagcttcctgctggcagtgttgttggaagtgcttccttgcggagacaatctcagattctctacagatatccatcactgaaagtagttaacttcagaggaaatgttcagacacggttaaggaaactcaaggaaggagatgtgtctgctacattgttggcgctggctggattaaggcggctaaatatggcagaaaatgcaacagctgtactatcagtggaagaaatgcttccggcagttgcccaaggtgctattggaatcgcttgccgaagcaacgatgacaaaatgatggagtatctgtcctcgttgaaccacgaggataccagactagctgtcacatgcgaaagagaattcttggcagttcttgatggcaactgccgaactccaattgcggcctatgcttaccgtgacaaggacgggaactgctcattccggggcctactgtcttcaccagacggatctaaagtatttgagacggcaagaagtggaccgtactctttcgacgacatggtcttgatgggcaaagacgctggccacgagctgaaggcgaaggctgggcctggcttcttcgatagccttcaatag

SEQ ID NO: 102 - DNA, 429 bp, Arabidopsis thaliana
atggcaacaaaatccaccggaggtaccgagaaaaccaagtcgatagaagtgaagaagaaactaatcaacgtgttgatcgtcgatgatgatccattaaaccgtagactccacgagatgatcatcaaaacgatcggaggaatttctcagactgcaaagaatggcgaggaggcagtgatcctccaccgtgacggcgaagcatctttcgaccttattctaatggataaggaaatgcctgagagggatggagtttcgacaactaagaagctaagagaaatgaaagtgacgtcaatgatcgttggggtaacgtcagtagctgaccaagaagaagagcgtaaggcttttatggaagctgggctcaaccattgcttggaaaaacccttaaccaaggccaagatcttcccgctcattagccacctcttcgatgcttag

SEQ ID NO: 103 - DNA, 549 bp, Arabidopsis thaliana
atgatgacacctggcggaagcgggaggttgagaccgttaccgacggcgatgtacgccggatattcaggaacggcgtcgtcttgggtagcgaagacttcagtttctgcgtcagggaagaggatacagagggagatggctgagcttaacattgatccacctcctgattgctcagctggtccaaaaggagataatctctaccattggatcgccaccatcattggtccttcgggaactccctatgaaggagggatctttttcctggatataattttcccatctgattatccattcaagccacctaagttggtgttcaagactcggatttaccattgcaatgttgatactgcgggagatttaagtgtgaacattctaagagatagttggagtccagcccttacaatcactaaagtcttacaagccatcagatctatcttcttaaaacctgaaccctatagtccagctttaccggtgattgcacggctctacttgacagatagagaaaagcatgacgaggtagccaaagaatggacattgcgatttgccaagtag

SEQ ID NO: 104 - DNA, 501 bp, Zea mays
atgacgacgacggccgccgggtacggctgctgctgggcggggattccgcccttcgcgttgttgccgcggattctctcgacccgccgggagactcctcctcctcctcctcctcgcgcttcccttgtcgcctcctcctcgaagctcagggcgctggcaccacggctgagagtttcgaaccgtccaaggaggctcattgtctccgcttcctcctccggcgaggccaattcggacgcggcgccgtcgccaacggaagccgctattgatataaagcttcctagaagaagcttgcttgttcaatttacatgcaacgcatgtggcgaaaggaccaagcgcttgataaacagagtagcctatgaaagaggcacagtttttcttcagtgtgcagggtgccaggtgtaccataagtttgttgataatcttgggctagttgttgagtatgatctacgagaagaaaacgagctacaaggagaaaatgcggtggacaccagttctgaagattag

SEQ ID NO: 105 - DNA, 495 bp, Oryza sativa
atggcgcagcgcgacaagaaggatcaggagccgacggagctcagggcgccggagatcacgctgtgcgccaacagctgcggattcccgggcaacccggccacgcagaacctctgccagaactgcttcttggcggccacggcgtccacctcgtcgccgtcttctttgtcgtcaccggtgctcgacaagcagccgccgaggccggcggcgccgctggttgagcctcaggctcctctcccaccgcctgtggaggagatggcctccgcgctcgcgacggcgccggcgccggtcgccaagacgtcggcggtgaaccggtgctccaggtgccggaagcgtgtcggcctcaccgggttccggtgccggtgcggccacctgttctgcggcgagcaccggtactccgaccgccacggctgcagctacgactacaagtcggcggcgagggacgccatcgccagggacaacccggtggtgcgcgcggccaagatcgttaggttctag

SEQ ID NO: 106 - DNA, 495 bp, Oryza sativa; identical to SEQ ID NO: 105

SEQ ID NO: 107 - DNA, 1359 bp, Zea mays
atggcttccgccgcggtgctccggaacgccggctcccggcgcctcttctcctaccctactctccgcgccgctgcgatatatgtaccttctgcgctacccgatgcgcccgcggcggcggcagcgccggcccagccgccaccgatggccgggaccctctgggcgaggtccatggccaccttcacgcgcacgaagccccatgtgaacgtcggcaccattgggcacgtcgatcacggcaaaaccactctcactgctgccattaccaaggtcctggccgaggcagggaaggccaaagccgttgctttcgacgagatcgacaaggctccggaggagaaagccagaggaatcaccattgcgacagctcacgtcgagtatgagacggctaaaaggcattatgctcacgttgattgtccaggtcacgcagattatgtcaagaacatgatcactggagctgctcaaatggatggtggtattcttgtcgtgtcagctcctgatggcccgatgccacaaactaaggagcatattcttcttgcccgtcaggttggtgtaccttcccttgtgtgcttcttaaacaaagttgatgctgttgatgatccagagcttctggaacttgtagagatggagcttcgggagctcctcagtttctacaagttccccggtgatgagattccgatcatccgtgggtctgcgttgtctgctttgcaagggaacaatgatgagataggaaagaatgcaattttgaaattaatggacgcagttgatgagtacatccctgatcctgtgaggcagcttgataagcctttcttgatgccgatagaagatgtgttttctattcagggtcgtggaactgttgttactgggcgtgttgaacagggaacaatcaaaactggtgaagatgttgagatcttgggtttggcacagactggtcccttgaagactacagttactggtgttgagatgttcaaaaagatactggaccatggagaggctggtgacaacgttggccttcttctccgtggtcttaagcgtggtgatgttgagcgtggccaggtggtgtgcaaacctggtagtctgaagacatgcaaaaagttcgaggcggaaatatatgtcctgacaaaggatgaaggtggccggcacactgcctttgtcacaaattacagcccccaattctacttcaggacagctgatgtcactggaagggttgagctgcttggggagatgaagatggttttgcccggtgacaatgtaactgcgaattttgagttgatatcacctgttcctcttgaacctgggcaaagatttgcgattagggaaggaggaagaacggtcggtgctggagtcgtctccaaagttcttagctag

SEQ ID NO: 108 - DNA, 483 bp, Oryza sativa
atggctccggtcagcatctccgacgagcgcgccgtctcggtgtcggcggagcgggtgtggaaggtcttctccgacgcgcccgccatgcccaaggtttgtgccggcttcatcgacgccattgaggtcgagggggatggcggggcgggcactgtcaccaccatgaagctcaaccctgctgtggatgatggggggtcattcaaaacacgtgtggtggcacgtgacaacgcagctcacattatcaagtcagaggttctggatgtgccggccggaagtaaggtgggcaagctcaagtcgcacgtgacagagacgaagatcgaggccgccggtgccggctcttgcttggccaagataaacgtggagtatgagctcgaggacggcggctcactgtcgccggagaaggagaagctcatcctcgacggctacttcggcatgctcaagatgatcgaggactacctcgtcgctcaccctaccgagtatgcttag

SEQ ID NO: 109 - DNA, 483 bp, Oryza sativa; identical to SEQ ID NO: 108

SEQ ID NO: 110 - DNA, 1173 bp, Arabidopsis thaliana
atgcggttgcgttttccgatgaaatctgccgttttagcgtttgctatctttctggtgtttattccactgttttccgtcggtatacggatgattccgggaagactcaccgccgtatccgccaccgtcggaaatggctttgatctggggtcgttcgtggaagctccggagtacagaaacggcaaggagtgcgtgtctcaatcgttgaacagagaaaacttcgtgtcgtcttgcgacgcttcgttagttcatgtagctatgacgcttgactcggagtacttacgtggctcaatcgcagccgtacattcaatgctccgccacgcgtcgtgtccagaaaacgtcttcttccatctcatcgctgcagagtttgacccggcgagtccacgcgttctgagtcaactcgtccgatctactttcccgtcgctaaacttcaaagtctacattttccgggaagatacggtgatcaaccttatctcttcttcaatcagacaagctttagagaatccattgaactatgctcggaactacctcggagatattcttgatccatgcgtagacagagtcatttacctagactcggacatcatcgtcgtcgatgacataacaaagctttggaacacgagtttgacagggtcaagaatcatcggagctccggagtattgtcacgctaacttcacaaagtacttcacttcaggtttctggtccgacccggctttacccggtttcttctcgggtcgaaagccttgttatttcaacacgggtgtgatggtgatggatctagttagatggagagaaggaaactacagagaaaagcttgaaacttggatgcagatacagaagaagaagagaatctacgatttgggttctttgcctccgtttcttcttgtcttcgcagggaacgttgaagcaattgatcataggtggaaccaacatggtttaggaggagacaatgtacgaggaagttgtaggtctttgcataaaggaccagtgagtttgttgcattggagtggtaaaggtaagccatgggtgagacttgatgagaagagaccgtgtccgttggatcatttatgggaaccgtatgatttatatgagcataagattgaaagagctaaagatcagtctttgttcgggttctcttctttgtctgagttaacagaagattcaagctttttctag

SEQ ID NO: 111 - DNA, 1173 bp, Arabidopsis thaliana; identical to SEQ ID NO: 110

SEQ ID NO: 112 - DNA, 1425 bp, Glycine max
atgtcattgccaccgccgtcgctggtaacggcggcgactccgacggagcttccgatccggcagattccgggaagctacgggttcccgttgctgggccccatctcggatcggcttgactacttctggttccagaagccagagagcttcttcagaaagcgagtggagaaatacaagagcaccgtgttccgcaccaatgttcctccctccttccccttcttcgttaacgttaatcccaacgtaatcgcggttctcgacgtgaaatcattctcccacctcttcgacatggacctcgtcgacaagaaggatgttctcgtcggagactttgtccccagcgtcgccttcaccggaaacatgagagtcggcgtttaccaggacactaccgaacctcaacattccaaggtgaagaactacatcatggatattctgaaaagaagctcaggcatatgggtatcagaactagaatcaaacctagacacactgtgggacaacatcgaagcatcactctcgaaatcctcatcagtttcgtaccttttcccgttacaacagtttctcttcacgttcctctgcaaagtccttgccggtgcagaccctgcacgtgaccctaaaatcgcagagtcaggctattccatgcttaatagttggctcgctcttcagctgctccccacagtcagcgtgggcatccttcaacccctggaagaaatcttcctccactcctttgcctaccctttcttcctcgtcggtggaaactacaacaacctctacaacttcatcaagcaacaaggcaaggacactataaaccggggcgcaatcgggttcgggttaaccgaagaagaagccatccacaatttgctcttcgtgctgggcttcaactcctacggcggattctccatttttctcccctctctgatcgatgccatagccagcaactccgcattgcaggagaagcttaaaaaagaagcgagagaaaagggcgggtcaacgctgaccttcgactcggtcaaagagatggacctgatccaatccgtggtctacgaaacgctgcgcatgaaccctccggttccactccagtacggtcgagcccgaaaggacttccggttgagttcgcacgactcggtcttccacgtcaagaagggcgagttgctgtgcggctttcagaagctcgtcatgagggactccgttatattcgacgaaccggaccggttcaagccggaccggttcacccaagagaaaggggcccagttgttgaactacttgtattggtccaatgggcctcagaccgggtcgcccagtgtgtccaataaacagtgcgcgggtaaggacgttgtcacactcaccgcggctttgattgtggcgtacctttttcgcaggtatgattccatccaaggggatggcagttccatcactgcccttcaaaagaccaagtag

SEQ ID NO: 113 - DNA, 1425 bp, Glycine max; identical to SEQ ID NO: 112

SEQ ID NO: 114 - DNA, 1251 bp, Glycine max
atgttggaaggtggtgcgaaattcccgggaataatagatctcaacaagaataataacaactactatgatttctctcaaggcttttaccataagctgggggagggtaccaatatgtcaattgacagcgttgggagcttacagacaagtaacggcggaggatctgttgcgatgtctatcgataatagcagtgttgggtccaatgattcccatactcgcatgttggaccaccaagggttacggaggcgtgccaatgataactactctgttgcacatagtgccaatcgtcggggaagagtcacccatgctttgagtgatgatgctttagctcaagctctaatggacaatagttctccgactgaagggcttgacaattttgatgagtggacaattgatttgaggaaactgaatatgggtgagccttttgctcaaggagcttttgggaaactctacagaggtacttacaatggtgaagatgttgctattaaaatcttggagaggcctgaaaatgatccagcaaaggctcaattgatggagcaacagttccagcaggaggtcatgatgttggccacactaaagcatcctaacatagttcgtttcattggtgcgtgccgcaagccaatggtatggtgcattgtaactgagtatgccaaaggtggttcggttcgacaatttttaatgaagcgtcaaaaccgctcagttcccctcaaattggctgtcaaacaagctttggatgttgcaagggggatggcttatgttcatggccttttattgatccacagggacttgaaatctgataatcttttgatttttggtgacaagtcaattaaaattgctgactttggagttgctcgtattgaggtgcaaactgaaggaatgacacccgagactggaacataccgttggatggctccggagatgatccagcataggccttacacacaaaaagtggatgtatatagctttgggattgttctatgggaactcattaccggtatgcttccatttcagaacatgacagcagtacaggctgcatttgcagttgtcaacaaaaatgttcgtccaatcatacccaacgattgcctacctgttctccgtgacatcatgacaagatgctgggatcccaaccctgatgttaggccaccatttgctgaaattgtaggaatgcttgagaatgcagagaatgagatcatgacaacagttcggaaggcccggttcaggtgttgcatgactcaaccaatgactgctgactag

SEQ ID NO: 115 - DNA, 1251 bp, Glycine max; identical to SEQ ID NO: 114

SEQ ID NO: 116 - DNA, 951 bp, Glycine max
atgatgagtttcgccatggattcagtttcggtgttaaaccctaaactctcccactcccattcctctctcccattcagcaggttcccccattccctcaacttccaccccttactcaaaccccgcgcagttaacgccgccgtcccccgtaacggcctcgccgcctgcttcctcaccctccaccgacggaaaccgttaaccgtcgctttcacagcttctcaccaagactcggaacacagagagattgaagtggagaaggagcgtgacgtccatgcaggctctgaagaatctcaggaagcgtggaagcaggttctggagacgtttagggaacaggcagagaagtttcagggcgtttctcaagaggcttatgaggtgtattctaagaaggctgctgtcattctgacagatgccacggagcagttaaaggtgctggcagataagacaaagaacgagttgagtgtggcagcaaaggaaatcactgacgaagggaaagagtatttgtctgcagcggcggatagttcaccagaggtgaaggagattgtggaaacgtttacctcaccgcctgaggatattcagaaattgtctggagtgagggacttctatgttggtgtaccttatggtttgatgctttctcttggtggcttcctttcctttatggtaactggcaacactgcagcgataaggtttgggatgattttaggtggtgtcctcctggctttaagcattttaagtctgaaatcctacaaaaaaggacgcacctctcctctcgctttgaagggccaagctgctatagcaagtatattgtttctgcgggagataagctcaataggcaaaggatcatcttatttcactgccttgatcagtggtgcagtggtggcattctatatctatagaatagtactggaacgtaatcatcaaaagagctcaaacttggaaactgaaccaggaaactag

SEQ ID NO: 117 - DNA, 2213 bp, Arabidopsis thaliana
aattaaatgatgttggtttttcttctgattcgccggcaatggagatctgcttctgtgagaagagaagaggtgattcgtctcattgctttagccaccgaggaatcttatttggcggaggaagttcgtcccgccactgttgattacggcggagactcggtttctgatgtttaccgttgtgccgtttgtctataccctaccactactcgttgctctcagtgcaaatctgttcgttactgttcaagcaagtgtcaaattcttcactggcgacgaggtcataaggaagaatgtcgatcgcctgattatgatgaagaaaaggaggagtatgttcaatctgattatgatgctaaagagtctaatgtggattttccatctcgtgggactgcgtatgaatcatcatctaatgtgtctgttgatgttgcctgtgatatgtctacaagtaggcctagtattcataaagtgcaacctagatctgaagctgtggatttcactacttctttaaacataaaggataatctctatgagaccaggccactaagtaggaagaaatcacgtaatcgtacagacaaggttgagtcagccagtaattattccaaaggaaagactgatgcaaagctgcggaaacttggcaatcaaaattcacgtaggtcaggtgattcggctaatatgtcaatttcagatcaatttttgtcagttgggtttgaagaagaaatgaatgcacttaaacatgaaagaattacatctgaaccatctagtgcttctgctgcaatgtcttcgtcttcaactcttctcctaccttcaaaagctaacagtaagccaaaagtgtcacaagcttcaagtagtggattgaaaacatcggtgcagaaagttgttcagcattttagacctccacagtcgtccaaaaagtctcaaccttccagttctattgatgagatgagcttctcgtatgagttgtttgtgaaactttattgtgatagagtagaattacagccatttggccttgtgaacttagggaacagttgttatgcaaatgctgtccttcagtgcttggcattcactcggccactgatatcataccttattaggggattacactctaaaacatgtagaaagaagagttggtgttttgtttgtgagtttgaacacttaattttaaaggcaaggggaggagaatctcctctttcacctatcaagatcttatcaaaattacaaaagattgggaagcatcttggccctggaaaagaagaagacgcgcacgagtttttaaggtgtgctgttgatacaatgcaatctgtttttctcaaagaggctcctgcagctggtccgtttgctgaagaaactactttagtaggccttacgtttggtggatatcttcactccaagattaaatgcatggcatgcctccacaaatctgagcgaccggagctgatgatggatctaactgttgagattgatggggatataggaagcctcgaagaagcacttgctcaattcacagcatacgaagtcctagatggagagaaccggtatttctgtggcagatgtaaatcttaccagaaagccaaaaagaaattgatgatattggaaggacccaatattcttactgtcgtgctgaaacgttttcagtctgataactttgggaagctgagcaaacccatccattttcccgagcttctcgatattagcccgtatatgagtgacccaaatcatggggatcatccggtttatagtctctacgcagtggtggtccatttggatgctatgagcactttattttcaggtcattatgtttgctacataaaaacccttgatggagattggttcaaaattgatgacagcaatgttttcccggttcagttagagactgtgttactagaaggagcatacatgcttctttatgcaagggattctccgagaccggtgagcaagaacggtggtcggaaatcaaagcaaagaagaaatttggccgcaattccgtcaagaaagggcaacaagaaacagagagacggtgataataacagtttgttgccgcgtgtggactggtcgagtggaagcctgtcgtcaatgtttagctcatcggacacaacaagctcatgtagcacaaaagactcatcaggtattgagaatttatcagattacctgtttggtggagttgaaccggtttggaaatgggatcgtcataataaatctcaaacgtttgattgaggcgcgcctag

SEQ ID NO: 118 - DNA, 942 bp, Arabidopsis thaliana
atggcagctttgcaaacgcttcgtgaatggatcggtatccagcagttcccacctgctactcaatctaaattgctcgagatccttgggaagtataaagaagaggatgtgagctcgctaacggtccttgtaatggggaaaggtggtgttggaaagtcatcaactgtgaattcagttataggcgagaaagctgctgcagttagtactttccagtctgaaggactgaggcctaccttggtctctcgcacaagatcgggatttacattgaatatcatcgacactcctggtcttattgagggaggatatgtgaatgatcaagccatcaacattataaaacgatttctcctcaacatgactatagatgtgctactatacgtagaccgtttggatgtgtaccgggtggatgaccttgataggcaagttgtcggtgctataactgatgcatttggtaaagagatatggaagaagtctgctcttgttctcacccatgctcagttctctccaccagacgggttaaattataaccactttgtctccaaaagatctaatgctcttctaaaagttatccagacaggcgctcaactgaagaaacaggatttgcagggtttttctattcctgtcattcttgttgagaacagcggaagatgccataagaacgaaagcgatgaaaagattcttccatgcgggactagttggattcccaatctgttcaacaaaatcacagagatctcttttaatggcaacaaggcgattcatgttgacaagaaactggtcgaagggccaaacccaaacgaaagaggaaaaaaactgattcctttaatgtttgcattccaatacttgctggtgatgaagccattggttcgagcaatcaagtccgatgtttcgagagagagtaaaccggcgtgggagctgcgagactccggtttagcaagtcgaaggtcttag

SEQ ID NO: 119 - DNA, 942 bp, Arabidopsis thaliana; identical to SEQ ID NO: 118

SEQ ID NO: 120 - DNA, 1041 bp, Zea mays
atgggggtggactactacaaggtgctgcaggtggggcgcggcgcctctgacgacgagctcaagaaggcttaccggaagctggccatgaagtggcacccggacaagaaccccagcaacaagaaagaagcggaggccaagttcaaacagatctcagaggcatatgaggtgctaagtgattcccaaaagcgggcaatctatgatcaggccggcgaagaggggcttaaggctcaggtcccacctactggagcaggtggtcccagtgggtcttccttctatggagggaatgcatcgacattccagttcaaccctcgcagtgcagatgatatttttgctgagttttttgggttctcaagcccattctcaaccatgggtggcatgggcggaggtgctgagagaggcatgaggggctccaggtttgggatgttcggcgatgacatatttgggtcccaccctcagtttcctggtgaggcatcaatgcatgttccacagcggtctcagaaggttcctccaattgagaatcggttgccatgcaaccttgctgatttgtacaaaggtaccaccaagaaaatgaagatttcacgagaggttttagatgccagcgggagaactttggttgttgaggagatcttaacgatagatataaaacctggatggaagaaagggacaaaaataacatttcctgaaaagggtaatgaggctcctcatataattcctgcagatattgttttcataattgatgagaaaccccatgatgtattcacaagagatggtaatgatctggttatgactcagaagattactttggctgaagccttgacagaatgtactgttaatataacaacattagatggtcggaatctgacagtgcagataaataatatcatctaccctggctatgaggaggttgttccccgagagggaatgccgattcagaaggattcttcaaagaagggaaatcttaggatcaaatttagcattaaattcccctcgaggctgacctcggagcagaaagcagaaatcaagaggctactaggttcatag

SEQ ID NO: 121 - DNA, 567 bp, Zea mays
atggtgcttgtgcttgcgctgggggatctgcacatcccgcaccgggtgcccgacctgcccgccaaattcaagtccatgctcgtgcccggcaagatccaacacatcatctgctctggcaacctctgcatcaaggaagttcatgactacctgaaaagcctttgccctgatctccacattactggaggtgaatatgatgagtatgctcgatacccagagactaagacacttacaattggtcagtttaagcttgggctgtgccatggtcatcaggttgttccatggggcgacctggactccctggcgatgctccagcggcagctggacgtggacatcctggtgaccgggcacagccatcagttcaaggcatataagcacgagggaggcgtggtgatcaaccctggctctgccacgggcgcctacagcagcatcacttacgacgtgaacccaagctttgtgctgatggacatcgaaggactccgtgtggtggtatacgtctacgagctgattgacggcgaggtgaaggtggacaagatcgacttcaagaaagcagcgacgatgcaagcctag

SEQ ID NO: 122 - DNA, 297 bp, Zea mays
atgatggaagctcttgagaagattgagaaggacattaagaaaccacttttgaggagcgacaagaagaacatggccaccctcttggcagagtttgacaagattaacaaaaagcttggctttcggaaggaggatcttcccaagatcgaggaagagcttgaattggaaattgccaaaagtgagctgactgaacttaagaaggaatgcgttgaagcaatggagactcaactcaagagggaggagtttcaagatgaggagatgcctgatgtcaggaaattggacatcagaaacttcctgtag

SEQ ID NO: 123 - DNA, 1227 bp, Zea mays
ccgctcctcgacaagaccaatggcggctgctgcgtcctccgctctgcacgccgttggcgccgtcgcctccgccaagcctagatccgtcgcccccgcggtggcgacgaggaggagcgtgcgcgtggcgcccgcggccaagcgaggaccaggctcgggaggaggcaggctcgtggctcgcagcgccgttgcagccaaggcggatgaggcggccgcggcggcgggatccaagtcaggcggccatgagttgctgatgtttgaggcccttcgtgaagccttgatagaagagatgaatttggatccaacagtgtgcgtcatgggtgaagatgttggtcattatggaggttcatacaaggtgaccaaagggttggctgagatgttcggagatctccgggtccttgatacccctatcgccgagaactccttcactggcatgggagttggagcagcaatgaaggggctgaggcctgttgtggaaggcatgaacatgggtttccttctccttgcctacaaccagatctcgaacaactgcggcatgcttcactacacctcaggcggccagttcaagatcccggtcgtgatccgaggccccggcggtgtcggtcgccagctcggtgccgagcactcgcagcggctagagtcgtacttccagtcgattcctggccttcagatggttgcctgctccactccttacaacgcaaagggcctgatgaaggcggccataaggagcgagaaccccgtggtgctgtttgagcacgtcctcttgtacaacctgaaggagaaaatccccgacgaggagtacatctgctgcctggaggaggcggagatggtgcggccaggtgagcacgtgaccatcctcacgtactcccgcatgaggtaccacgtgatgcaggctgccaagacgctggtgaacaaggggtacgaccccgaggtcatcgacatcaggtcgctgaagccgttcgacctgcacacgatcgggaactcgatcaagaagacccaccgcgtgctgatcgtggaggagtgcatgcggacgggcggcatcggcgccagcctgcggtcggccatcatcgacaacttctgggactacctggacgcccccatcatgtgcctgtcgtcgcaggacgtgccgaccccgtacgccgcgacgctggaggacgccaccgtggtgcagcccgcgcagatcgtggccgccgtcgagcagatctgccaatgatcagtgatatcatgtag

SEQ ID NO: 124 - DNA, 1110 bp, Zea mays
atggatgatccacattcgaaggaacgactcaaacaattaaaccaggaaatagatatgcttagacaactctcccacccaaacatagtgcagtaccatggaagtgagctgagtgatgaatcactttccatttgtcttgagtatgtttcggggggttcaatccacaaattattaagagaatatggctcttttaaggaacctgtgattcgtaattacactgggcaaattcttgctggccttgcctacttacatgggcggaacactgtccacagagatatcaaaggagcaaacatactcgtgggtcctaatggtgaagtcaagctggctgactttggcatggctaagcatatatcatcttttgctgaaatacgttctttcaaaggaagtccttactggatggctcctgaggttataatgaactgtaaaggctacagtttatcagtggacatatggagtctgggctgtaccattattgaaatggcgacggcaagacctccttggcaccaatacgagggggtagcagcaatatttaagatcgcaaacagtaaagatatacctgaaatcccagacagtttctcagaggaagggaaaagtttcttgcagctttgcttgaaacgtaaccctgcatctcgtgcttctgcagtccagctgatggatcatccttttgttcaggatcaccctgcagtgagagctgcaaaatccagtgtattgagaaacacaccatcttctccagcagatggcagacacacaatgtccaacagggagttgccatctcggaaaattataactcctctgaaggatattggactgggcatgagagattttactggattttccactactgttccttcaccacacagtcctattcctggaagagcaaacatgtctacgccagtttcaccatgctcaagcccgctgcggcagtttaagcaatccaatgtgaggggcatgcgttctccacctcatccaatgctctcccctggtcttggcaacacagtaagttacacccaaaatcagacaagacgcaatccagctcctgccatttcagatccttggatggatgttggccagatgaaactccaaagccccaatatttcccccagaaggttctag

SEQ ID NO: 125 - DNA, 423 bp, Zea mays
atgacgagcccaatggtggccaccccggtccagttccacacaaccggccgcctcagcttctgctccttttcctttcccagcgcatcagggaggcggcgattcgcggcggtgagggcgtccgcggagacgatggcgacggagaagctgggcatcaaggtggagcgcaacccgcccgagtcccgtctctccgagctcggcgtccgccagtggcccaagtgggggtgcgagaagagcaagttcccgtggacctactccgccaaggagacgtgctacctgctgcaggggaaggtgaaggtgtaccccgaaggccacggggaggagttcgtggagatcggcgcgggagaccttgtcgtcttccccaagggcatgagctgcacctgggacgtcgccgaggccgtcgacaagcactacaacttcgagtag

SEQ ID NO: 126 - DNA, 732 bp, Zea mays
atggaagcttacagccgcgcagggctgccgcaaggggcgtcggagatcttctctttgatggaacacatggggtgcgagcctgatagagcctcttacaacatactggtggatgctttcggacgagctgggcttcaccaagcggaagcagcgttccaagagctgaagcagcagggcatgcggccgacgatgaagtcgcacatgctgctcctgtcggcgcacgccaggtccggcaacgtggcgaggtgcgaggaggtgatggcgcagctgcacaagtccgggctgcgcccggacaccttcgccctcaacgccatgctcaacgcgtacggccgggccgggcggctggacgacatggagcggctcttcgcggccatggagcgcggcgacggcgcgagcgccggcgccccggacaccagcacgtacaacgtgctggtgaacgcgtacgggcgcgcggggtatctggaccggatggaggcggcgttccgctccctggcggcgcggggcctcgccgccgacgtggtgacgtggacgtcccgcatcggcgcgtacgccaggaagaaggagtacgggcagtgcctgcgggtcttcgaggagatggtggacgccgggtgctacccagacgccggcaccgccaaggtgctgctcgccgcgtgctccgacgagcgtcaggtggagcaggtcacggccattgtcaggtccatgcacaaggacgccaagacgctctttgcattgtag

SEQ ID NO: 127 - DNA, 549 bp, Zea mays
atggcccctagtgacaagattatggaacatcgaaaggaaaaaattaggaaattcatgcaattacaacaaaaagaagacgatgaattattttttgtaatagttcctgccatacttcagtgccttaatgatgagaaaagaccagttcatacttctgaatatactggtgctaaaaagatgaaggaaattctagaggggcatgagagttggtgtaagtcagagtttcgtatggagccagagatttttaaggcaacgtgcaactatctaaggcgggaggggttgttgcgtgacacgcggagagttaccattgaggagcagctaggaatgtttctattcatgatttcacacaatgctagcaatgaaaggctgaagaaaacatttcaacatagtggggaaacagtccataggcacataaaggcgattttcaatataattccaactctcacccacaaatttttgaagcttcctagttccaaccaaactcaccccaagattgcaacagatcctcgattctggcctttttttaaggaagcattgctacaggtgatttag

SEQ ID NO: 128 - DNA, 732 bp, Zea mays
atgaagtttaaaaaagtaaggactgtgcagcaggccctcacctctcatttctgggttcaagatatccagaggaatctctctctggctgagattgagcaatatctacaattatgggaggtaattgaatcttttcagcttcaaaattcaaatgatcagcatgtgtggatatttagcaacgatggtctgtacacctccaaatctgcctataaagctttattcattggagcagaatcctttgagccctggaaaagaatttggaagagctgggcagcgcctaagtgtaagacctttgtttggctggccataaataacaaatgttggacagcggacagacttaaaaaaagggggcttcaacatcctgaaatttgtgttctatgtgaccaagaagacgaaactgtgcagcatattctatctaattgcgtcttcacaagacagttttggcataatattttaactcccattggtctctcttctgtgggtcctaagagaagagattcagtttttgctgaatggtggagaaaggcttcaaccaagattcccaagagcaaaaaaaaggggtttaatagtatgataatccttggggcttggagtatttggaagcagcgaaacaggtgtgtttttgaaggagctcgaccctgccttaataccttagaggatggatttaaagacgagatgagattgtgggtttctgctggagccaagaacttgcgctctctttttgaccctggatag

SEQ ID NO: 129 - DNA, 252 bp, Arabidopsis thaliana
atggcaagtctcaagttatgggtttgtttggtcctgcttctagtactcgaattgacatcggtgcacgaatgtcgaccattggttgccgaagagagattttctggttcaagtcgtttgaaaaagataagacgtgaactttttgagaggttaaaagagatgaaggggagatcagaaggcgaagagacgatccttggaaatactcttgactcaaagcggcttagtcccggtggtcctgacccgaggcatcactag

SEQ ID NO: 130 - DNA, 252 bp, Arabidopsis thaliana; identical to SEQ ID NO: 129

SEQ ID NO: 131 - DNA, 321 bp, Arabidopsis thaliana
atggctaagtcatatggagctatcttcctcttgaccctcattgtcctcttcatgcttcaaaccatggttatggcctcaagtggatctaatgtgaagtggagccagaaacgttatggaccaggaagcctgaaacgtacccaatgcccatcggaatgtgataggaggtgtaaaaagacacagtaccacaaggcttgcattacgttctgcaacaaatgctgcaggaagtgtctctgtgtgcctccgggttactatgggaacaaacaagtttgctcctgctacaacaactggaaaactcaagagggtggaccaaaatgcccttag

SEQ ID NO: 132 - DNA, 321 bp, Arabidopsis thaliana; identical to SEQ ID NO: 131

SEQ ID NO: 133 - DNA, 1272 bp, Arabidopsis thaliana
atggagcggctgatttctcatcctcctctcatgatcgtctcagaccttgatcacaccatggttgatcatcaagatcatgagaacctctctcttctcaggttcaattcattgtgggaatacgcttatcgccgtgactctcttcttgtcttctctacagcaagatcacctgttctttataaagaattgagaaaagagaaacctttgttgactcctgatatcattattacatcaataggaactgagatagcatttggtaactccatggttcctgatcatgcttgggttgaatccttgaacagctgtaaatggaaccgggaaatagtcttggaagaaactagcaagttccctgagttaactcttcagccaaaaactgagcagaggctacacaaggtcagcttttacattgatgaaggtaaaggtgaggcattgaccaaggaactatcacaattgctggagaaacgtggcttggatgtcaagataatttacagttggggaaagaatgtcgatgttataccgcgtggtgcaggaaaaggagaagcgcttgagtatcttctcaagaagctgcaggctgaaggaatattcccggtcaatactcttgcttgtggtgactctgaacatgatgctgaactatttagcattcctgatgttcacggtgttatggtgagcaattcccaagaagagctattgaagtggcgttctgaaaatgcgttgaacaaccttaaggttatacattcaaccgagaggtgtgctgatgggattattcaagccatcggacattttaatcttggtcccgatctatctccaagagatgtttcggaattcttggatcgtaagatggacaatgtgaatcctggtcacgaggttgtgagattctacttgttctacgagagattgagacgcggtgagatcaagaactatgagacatacatagccagcttcaaagattcatgtctccatgctgctgtcctttttcatccatcaggtgcagaaaaatctctgagagacaccattgatgagctgaagaagtgttatggtgacaaaagagggaagaagttttgggtttgggtagatcaggttctggtaacagacaccattcctggcaaatggatagtgaagtttgataagtgggagcaatgcgaggatgaaagccaatgctgcaaaacgactgtcgaatttacttcaaagggaggagatttggtgtgggagaaggtgaagcagatatggtcagaggaatcaaaggtgaaagatgataacagttcttggattctctag

SEQ ID NO: 134 - DNA, 1272 bp, Arabidopsis thaliana; identical to SEQ ID NO: 133

SEQ ID NO: 135 - DNA, 1758 bp, Glycine max
atggccgacgaagccaaagccaaaggcaacgcagccttctcctccggggactatcctgccgccatccaccacttctccgatgccatcgccctggctccctccaaccatgtcctctattccaaccgatccgccgcatacgcctccctcaaaaactacgcagatgcattagcggatgccaaaaagacagttgaactcaagcccgactggtccaagggttacagccgtctcggtgccgcgcatcttggcctttcccaatacgatgatgctatttcggcttacaaaaggggtctcgaaatcgaccctcacaacgagccccttaagtctggtttggctgatgcgcagaaggccttggccgcggcctccaggcctcgcccctcggcctctaaccccttcggtgatgctttctctgggcctgagatgtgggcccgtctcaccgcagaccccaccactagggcttacctccaacagcctgatttcgtgaagatgatgcaggatatccagagagatcctaataacctcaacttgcacttgaaggaccagagaatcatgcaggccctaggagttttgctcaacgtcaagattcaaacccctcccacgggggctgacaccgatatgccggattctccatcgccctctgcggcagcgtctgagaggaagagagctgcggaggccgagcctgctaagcagcccgagcctgaacctgagcccgagcccgtgcccatggaattgacgggggaggagaaggacgcaaagcagaagaaggctgaggctctgaaggaaaaggaagcgggcaatgcagcgtataagaagaaggattttgataccgcgattcaacattacaccaaggctttggagttggatgatgaggatatttcgtatctcactaaccgcgctgctgtctatttggaaatgggaaagtatgaggaatgcataaaagattgtgacaaggctgttgaaagaggaagagaactaagatcagattttaagatgatagcaagagctttgacaaggaaaggaaatgccttggtgaaaatggcgaagtgctcgaaggattacgagtctgccattgagacttatcagaaagcactcactgagcaccgcaaccctgacactttgaagaaacttaatgaagctgaaaaggcgaagaaagaactagaacagcaagaatattttgatccaaagttagctgatgatgagagagaaaaaggaaatgaattcttcaagcagcagaagtatcctgatgctgtgaagcattacacagagtctatacgaagaaatccaaaagatcctagggcttatagtaacagagcagcatgctacactaaattgggggcaatgcctgaagggttaaaggatgcagagaagtgcattgaacttgatccaacctttgtaaagggttatacccggaaaggtgcagtccagtatttcatgaaggaatacgacaaggctttggagacatatagggaggggttgaaatatgactctaacaaccaggagttgcttgaaggcatcagaacatgcatacaacaaattaacaaggctagccgtggagacttaagtcctgacgaattgaaggagagacaggccaaggcaatgcaggatccagaaattcagaacatccttcaagaccctgttatgagacaggtattgattgatttccaggaaaatcccaaggctgcacaggaacacacgaagaatccaatggtgatgaataagatccaaaagctggtcagtgctggaattgtccagatgaagtag

SEQ ID NO: 136 - DNA, 3750 bp, Zea mays
atgagtgcagcggcaacgtcgatgcaatcccttaaattctccaaccgtctggtcccacccagtcgccgtctgtctccggttccgaacaatgtcacctgcaataacctccccaagtctgcagctcccgtccggacagtcaaatgctgcgcttcttcctggaacagtaccatcaacggcgccgccgccacgaccaacggtgcgtccgccgccagtaacggcgcatccacgaccaccactacatatgttagtgatgcaaccagatttatcgactcttccatgtcggcaaagcctatccgcgagtacgacgccaagttgctcctcgcctaccacctcgcccgcgcaccgaccgccggctccaaggcagtcgcacgggacggcttccagtcccccgaagtcaaggttgcgcaggtctcgtgggaccccgagaccaaccaggtcacgcctgatgcggcgctgcctcactgggtcttcaccgagaagctcgtcgtcaagcccgaccagctcatcaagcgtcgtggaaaggccggtctcctcgcactgaacaagacgtgggccgagggcaagcagtggatcgctgagcgcgcgggcaagcaagttcaggtcgagaagacgacgggcacgctcaacaacttcatcgtcgagccgttctgccctcacccttcggacgccgagtactacatctgcatcaactcggtccgcgagggcgacgtgatcctgttcacccacgagggcggtgtcgacgtcggcgatgtcgacgccaaggcgctcacgctcctcgtccccgtcggcggcgagctcccctcgcgcgacgagatccgctcgcagctcctcaagcacgtcaccggcgccgaacgccaggaggccctcatcgactacatcatccgcctctactcggtctacgtcgacctccactttgcctacctcgagatcaacccgctcgtcgccgtcgagaacccctcgaccggcaagaccgacatcttctacctcgacatggccgccaagctcgaccagacggccgagtacgtcgtcggtcccaagtgggccatcgcgcgcgacccctccatcatcaaccccgccgccgcgcccatgtcgaacggcaagatctcggccgacaagggcccgcccatgttctggccccctccctttggtcgtgacctcacgaaggaggaggcctacatcgccaagctcgacggctcgaccggcgcctcgctcaagctcaccgtcttgaacgctgagggacgcatctggaccatggttgccggtggtggtgcttcggtcgtctactcggacgccatcgccgcgcacggattcgctcacgagctcgccaactacggcgaatactcgggcgcgcccacccagacccagacctacgagtacgccaagaccatcctcgacttgatgacccgcggcacgcccaacccgcagggcaagctcctcttcatcggcggcggtatcgccaacttcaccaacgtcgccgcgaccttcaagggcatcatcacggcgctcaaggagtaccagcaccgtcttcaggagcacaaggtccgcatctttgttcgccgcggcggccccaactaccaggagggcctcaaggccatgcgcctcctcggcgagaccctcggcgtcgagatccaggtctttggccccgagacccacatcacctcgatcgtcccgctcggactcggcttgatcaagtcggtcgacgacgctctcaaggtccccggcgcccgcgccgccgccgatgcgaccggcaccctcacccccgtcccgggctcgcccaagtcgcgcgccgcccagctcccgaccggcgcgtcgacgccctcgcgccagcagccccaggacaacatcgtcagcttctcggacaaggtccacgcgcccgactcgggtcgcccgtggtaccgcccctttgacgagacgacgcgctcgatcgtgtacggcctccagcctcgcgcgatccagggcatgctcgactttgactttgcctgcggacgcgagacgccctcggtcgcggccatggtctaccccttcggcggccaccacgtccagaagttctactggggaaccaaggagaccctcctccccgtcttcacctcgatgaaggaggccgtcgccaagtgccccgacgccgacgtcgtcgtcaactttgcgtcgtcgcgctcggtctaccagtcgaccctcgaggcgctcgagttccctcagatcaaggccatcgccctcatcgccgagggtgtccccgagcgccacgctcgcgagatcctccacctcgccaagaagaaggaggtcatcatcatcggtcccgcgaccgtcggcggcatcaagcccggctgcttccgtatcggcaacacgggcggcatgaacgagaacatcctctcgtccaagctgtaccgcgccggttccgtcggctacgtctccaagtccggaggcatgtcgaacgagctcaacaacatcctctcgctcacgaccgacggcgcgtacgagggcatcgccatcggcggtgaccgctacccgggcaccaccttcatcgaccacctcctccgctacgaggccgacccgaactgcaagatgctcgtcctcctcggagaggtcggtggcgtcgaggagtaccgcgtcatcgaggccgtcaagtcgggccagatcaagaagcccatcgtcgcgtgggccatcggcacctgcgccaagatgttcgccaccgacgtccagttcggccacgccggctcgatggccaactcggacctcgagacggccgaggccaagaacaacgccatgcgcgccgccggcttcatcgtgcccccgacgttcgaggagctcccgcaggtcctcgccgagacctaccagaagctcgtcggcgacggcacgatccagcccaagcccgaggttccccctcctcagatcccgatggactacaactgggcccagacgctcggcatggtccgcaagcccgccgccttcatctcgaccatctcggacgagcgcggccaggagctcctctacgccggcatgcccatctccaaggtctttgaggaggacatcggcatcggcggtgtcgtctcgctcctctggttcaagcgtcgcctccccgcctacgcgaccaagttcctcgagatggtcctcatgctcacggccgaccacggacccgccgtctcgggcgccatgaccaccgtcatcaccacccgtgccggcaaggacctcgtctcgtcgctcgtcgccggtctcctcaccatcggcgaccgcttcggtggcgcgctcgacggcgccgcgcaggagtttacgcgcgcgttcgaggctggcctcacgccccgcgagtttgtcgactcgatgcgcaaggccaacaagctcatccccggtatcggacacaaggtcaagtccaaggccaacccggacaagcgtgtcgagctcgtcaagaactacgtcttcaagcacttcccgtctgccaagctcctcgagtacgctctcgccgtcgaggacgtcacgagcgccaagaaggacacgctcatcctcaacgtcgacggagcaatcgcggtttctttcgtagatttacttaagaactccggcgcgttcaccgccgaggaggctgccgagtacatgaagatcggcaccttgaacggcttgttcgttctcggacgctccatcggcttcattgcccaccacctcgaccagaagcgcctcaagcagccgctctaccgtcacccggccgacgacatcttcatccagcccttcaacaccgaccgcatcctcgtccagcagcgccagtag

SEQ ID NO: 137 - DNA, 963 bp, Arabidopsis thaliana
atggggaggaagcggaagcacagtgagacggaagctccggcgccggtgaaaaagagcgatgagcctgctccggatagacccaaaaggactctattgggatggaaagataagagtgaaggtgaagctgagaaagctaaagctttgacttcatctggattcaagaacaaagagaaggttttggtgacttgttctcgtcgtatcagtttcaggtatcggagtttgatgttgaacattgtttcacttctaccacactgtaagaaagacagtaaagttgaagcaaagagtagcaaaggcgcgactttgaatgagctcattgagcttaagaattctaattcctgcttgttcttcgagtgtaggaaacataaagatctttacatgtggatggtcaaatcccctaatggaccatctgtgaagtttttggttaaagctgtgcacgcaatggaagagatgaaactcactggaaatcatctcaaagggtcacgtccacttttgacattctcatccaattttgataaagatgcgcactggaaactcttgaaggagatgcttactcaggtcttcggaattcctaaggaacacaggaaatctaagccttaccatgaccatgtatttgtcttttcaattgttgatgagcatatatggttccgaaattaccagatttcggttcctcacaatgagtcagataaaattgcaaaaggtggcctggataaaatgacccttatcgaggttggtccaaggttttgtctgaatccaatcaagatattcgcgggcagctttggaggtcctactctttatgagaacccgttatacgtatctccaaaccagattcgagcattggagaagagaaataaagctgggaaatttgctaagaagatcaaggcgaagacgaggaaaaagatgcatgagctctcaaacccgttggagcctgatgagtttgcagatatgtggaaagatgatgaatag

SEQ ID NO: 138 - DNA, 963 bp, Arabidopsis thaliana; identical to SEQ ID NO: 137

SEQ ID NO: 139 - DNA, 1137 bp, Arabidopsis thaliana
atggagagtgatttgattgatttgttcgagggagctaagaaggcagccgatgcggcggctcttgacggtgttacctcttcaggtcctgaggtttctcaatgtatcgatgcccttaaacagctcaagaagtttcctgtcacatacgataccctcgttgcgactcaggtgggaaagaagctgaggtctcttgcaaaacatcctgttgaagatatcaaaagcgtagctactgatctgcttgagatatggaagaaagttgtcattgaagagacagccaaagctaagaaaaccgaaggcactaacggttgtaaagaggctaaggtgaataagatggatgttgagaagccttcaaatcctgcccctgttaaagttcagaaacttcagaggggtgattcggctaagagtatcaaggttgagagaaaggaacctgacaataaagttgttaccggtgtcaagatagagagaaaggtacctgacatcaaagtcaccaatggaaccaagatagattatcgtggtcaggctgtgaaagatgaaaaggtctcaaaggacaaccaatcaagtatgaaagctccagctaaagcagctaatgctcctccaaaactaactgcaatgctcaaatgcaatgatcctgtgcgtgacaaaatccgtgagttgcttgtggaggcgttgtgcagggttgctggagaagctgatgactatgagagagagtcagtaaatgctagtgatcctttacgtgttgctgtctcagtggaatcactgatgtttgagaaattgggtcgctcaactggagctcagaagcttaagtacagatctataatgttcaacctgagggatagtaacaacccggacttaagaaggagggttctcactggggagatttcaccagagaaactcataacattgtctgccgaagatatggcaagtgacaagaggaaacaagagaacaaccagatcaaagagaaagccctgtttgattgtgagcgtggtcttgctgcaaaagcatctaccgaccagttcaagtgcgggcggtgtggtcagcgcaaatgcacctactatcagatgcaaacaagaagtgctgatgagccaatgacgacttatgttacatgtgttaactgtgacaaccactggaagttctgttag

SEQ ID NO: 140 - DNA, 1137 bp, Arabidopsis thaliana
atggagagtgatttgattgatttgttcgagggagctaagaaggcagccgatgcggcggctcttgacggtgttacctcttcaggtcctgaggtttctcaatgtatcgatgcccttaaacagctcaagaagtttcctgtcacatacgataccctcgttgcgactcaggtgggaaagaagctgaggtctcttgcaaaacatcctgttgaagatatcaaaagcgtagctactgatctgcttgagatatggaagaaagttgtcattgaagagacagccaaagctaagaaaaccgaaggcactaacggttgtaaagaggctaaggtgaataagatggatgttgagaagccttcaaatcctgctcctgttaaagttcagaaacttcagaggggtgattcggctaagagtatcaaggttgagagaaaggaacctgacaataaagttgttaccggtgtcaagatagagagaaaggtacctgacatcaaagtcaccaatggaaccaagatagattatcgtggtcaggctgtgaaagatgaaaaggtctcaaaggacaaccaatcaagtatgaaagctccagctaaagcagctaatgctcctccaaaactaactgcaatgctcaaatgcaatgatcctgtgcgtgacaaaatccgtgagttgcttgtggaggcgttgtgcagggttgctggagaagctgatgactatgagagagagtcagtaaatgctagtgatcctttacgtgttgctgtctcagtggaatcactgatgtttgagaaattgggtcgctcaactggagctcagaagcttaagtacagatctataatgttcaacctgagggatagtaacaacccggacttaagaaggagggttctcactggggagatttcaccagagaaactcataacattgtctgccgaagatatggcaagtgacaagaggaaacaagagaacaaccagatcaaagagaaagccctgtttgattgtgagcgtggtcttgctgcaaaagcatctaccgaccagttcaagtgcgggcggtgtggtcagcgcaaatgcacctactatcagatgcaaacaagaagtgctgatgagccaatgacgacttatgttacatgtgttaactgtgacaaccactggaagttctgttag

SEQ ID NO: 141 - DNA, 1293 bp, Arabidopsis thaliana
atgcagaatcaaaggcttattaagcaacaacaacaacaacaacaacagcaacatcaacaagctatgattcaacaagctatgatgcaacaacatccttctctttatcatcctggtgttatggctcctcctcagatggagcctttaccaagtggaaaccttcctcctggttttgatccaactacttgccgtagtgtgtatgctggaaacattcatacgcaggtcacagagattcttcttcaagagatttttgcaagtactggtcctattgaaagctgtaaactcatcagaaaggataagtcatcatatggatttgttcactactttgatcgaagatgtgctagtatggctataatgactcttaacggaaggcatatatttggacagcctatgaaagttaattgggcgtatgcaactggtcaaagggaagatacatcaagtcatttcaacatttttgttggagatcttagtccagaggttactgatgcagcattgtttgatagcttttctgcttttaacagctgctcttcttattatagggacgcaagagtaatgtgggaccagaaaactggacgctcaagaggctttggttttgtttccttccgtaatcagcaggatgctcaaactgccataaatgagatgaatggtaaatgggtaagtagcagacagatcagatgcaactgggcgacaaaaggtgctacttttggcgaggacaaacatagctctgatggaaaaagtgttgtagaacttactaacggatcttcagaggatggtagagagctgtcaaatgaagatgcccctgaaaacaatcctcaatttacaactgtctatgtaggaaatctctctccagaagtaactcagcttgatctacaccgtctattctatacccttggtgctggagtgatcgaagaggtccgtgtccagcgagacaaagggtttggttttgtgagatataacactcatgacgaggctgctcttgctattcagatgggcaacgctcagcctttcctctttagcagacagataaggtgttcctggggaaacaaaccaactccatcaggcacagcctcaaacccacttcccccaccagccccggcatcagtcccttctctgtctgcaatggacctcttagcctacgagaggcaactggctctagccaagatgcatcctcaggctcaacattctctgaggcaagcaggtcttggagtcaatgttgctggaggaactgcagctatgtatgatggtggctatcagaatgtagctgcggcccatcagcagctcatgtactatcagtag

SEQ ID NO: 142 - DNA, 1293 bp, Arabidopsis thaliana; identical to SEQ ID NO: 141

SEQ ID NO: 143 - DNA, 774 bp, Arabidopsis thaliana
atggatgcttcaaatcccaattcttctagaaaatctaatgtctcttccttcgctcagtccagtcgaagcggtggtagaggaggaggatatgagagagataacgatcgacggagacctcagggtcgtggcgacggtggaggcggaaaggatagaatcgatgcacttggacgactcttgacgagaatattgcgacatatggctactgagctgagattgaacatgagaggtgatggttttgttaaagttgaagatttacttaacctgaatttgaaaacttctgcaaatattcagttaaagtcacacacgattgatgaaattagagaggctgtgagaagggacaataagcaacggtttagtctcatcgatgagaatggagagctcttgattcgcgctaaccaaggccattcgatcacgacggttgagtcagagaagttacttaaaccaatactgtcaccagaagaagctccagtgtgtgtacatggaacttataggaagaatttggaatccatcttagcatcgggcttaaagcgtatgaatagaatgcatgttcacttctcttgtggattaccaacagatggtgaagtgattagtggcatgagaagaaatgtaaatgttatcatcttcctcgacatcaagaaagctcttgaagatgggattgcgttctacatatcagacaacaaagtgattttgactgaaggcattgatggtgtattgcctgtcgattacttccagaagatcgagtcttggcctgatcggcaatccatacctttctag

SEQ ID NO: 144 - DNA, 774 bp, Arabidopsis thaliana; identical to SEQ ID NO: 143

SEQ ID NO: 145 - DNA, 741 bp, Arabidopsis thaliana
atgtcttcatccaacgcctgcgcctctccgtcaccgttccccgccgtcacgaagcttcatgtagactccgtcacgtttgtaccgtccgtcaagtcaccggcctcctccaatccattattcctcggcggcgccggtgtccgaggccttgatatccaaggtaaattcgtgatcttcaccgtcattggagtatacctagagggtaacgccgttccttctctatctgtcaagtggaagggaaaaactacggaggagctaacagaatctatcccgttcttccgtgaaatagtcaccggtgcgtttgagaagtttatcaaggtgacaatgaaactgccgttaacgggacaacaatattcggagaaagtgacggagaattgtgtggctatatggaaacaattagggctttatacggactgtgaagctaaagctgtggagaagttcttggagatcttcaaggaagaaacattccctcccggttcatcgatcctcttcgctctctcccctaccggctctcttacggttgcgttttcgaaagatgatagtatccctgaaaccgggatcgctgtgatcgagaacaaattgttggcggaggcggttctggaatctatcatcgggaagaacggtgtgtcacctggcactaggttaagtgttgcagaaagattatctcagctaatgatgaagaacaaggacgaaaaggaagttagtgatcactctgttgaggaaaaactagccaaagagaactag

SEQ ID NO: 146 - DNA, 741 bp, Arabidopsis thaliana; identical to SEQ ID NO: 145

SEQ ID NO: 147 - DNA, 930 bp, Escherichia coli
atggtacgtatctatacgttgacacttgcgccctctctcgatagcgcaacaattaccccgcaaatttatcccgaaggaaaactgcgctgtaccgcaccggtgttcgaacccgggggcggcggcatcaacgtcgcccgcgccattgcccatcttggaggcagtgccacagcgatcttcccggcgggtggcgcgaccggcgaacacctggtttcactgttggcggatgaaaatgtccccgtcgctactgtagaagccaaagactggacccggcagaatttacacgtacatgtggaagcaagcggtgagcagtatcgttttgttatgccaggcgcggcattaaatgaagatgagtttcgccagcttgaagagcaagttctggaaattgaatccggggccatcctggtcataagcggaagcctgccgccaggtgtgaagctggaaaaattaacccaactgatttccgctgcgcaaaaacaagggatccgctgcatcgtcgacagttctggcgaagcgttaagtgcagcactggcaattggtaacatcgagttggttaagcctaaccaaaaagaactcagtgcgctggtgaatcgcgaactcacccagccggacgatgtccgcaaagccgcgcaggaaatcgttaatagcggcaaggccaaacgggttgtcgtttccctgggtccacaaggagcgctgggtgttgatagtgaaaactgtattcaggtggtgccaccaccggtgaaaagccagagtaccgttggcgctggtgacagcatggtcggcgcgatgacactgaaactggcagaaaatgcctctcttgaagagatggttcgttttggcgtagctgcggggagtgcagccacactcaatcagggaacacgtctgtgctcccatgacgatacgcaaaaaatttacgcttacctttcccgctag

SEQ ID NO: 148 - DNA, 1215 bp, Propionibacterium freudenreichii
atggtgaaaaaggtcgctctgctgaccgctggtggcttcgccccctgtctttcctcggccatcgctgagctcatcaagcgctataccgaggtatcacccgaaacgaccctcatcggctatcgctatggctatgagggcctgctcaagggcgattccctcgagttctcccctgccgtgcgcgcacactacgaccggctcttcagcttcggcgggtcaccgatcgggaactcccgggtcaagctcaccaatgtgaaggacctggttgcgcggggcctggttgcttccggcgatgatcccctcaaggttgccgccgatcagctgattgccgacggggtcgacgtgctgcacacgatcgggggcgacgacaccaacaccacggccgccgacctggccgcctacctggcacagcatgactacccgctgacggttgtggggctgcccaagacgatcgacaacgacatcgtgcccatccgccagtcgctgggtgcctggacggccgccgacgagggggcccgcttcgcggcgaatgtgatcgccgagcacaatgctgctccgcgcgaactcatcatccacgagatcatgggccgcaactgcggctatctggcggccgagacctcgcggcgttacgtggcctggctcgacgcgcagcagtggctcccggaggccggtctcgaccgacgtggctgggatatccacgccctgtacgtgccggaggccacgatcgacctggacgccgaggccgagcgcctgcgcaccgtgatggacgaggtgggaagcgtcaatatcttcatctcggagggagccggcgttcccgatatcgtcgcccagatgcaggccacgggccaggaggtgcccactgacgccttcggccacgtgcagctcgacaagatcaatcccggggcgtggttcgccaagcagttcgccgagcgcatcggtgcgggcaagaccatggtgcagaagtccggttacttcagccgctccgccaagtcgaatgcccaggacctggagctcatcgccgccaccgccacgatggcggttgatgcggcgctggccggcacccccggcgtggtcggtcaggacgaggaggcaggcgacaagctgagcgtgatcgacttcaagcggatcgcgggccacaagcccttcgacatcacccttgattggtacacccagctgctggcccgaatcggtcagccggcacccatcgccgccgcgtag

SEQ ID NO: 149 - DNA, 1215 bp, Propionibacterium freudenreichii; identical to SEQ ID NO: 148

SEQ ID NO: 150 - DNA, 1215 bp, Propionibacterium freudenreichii
atggtgaaaaaggtcgctctgctgaccgctggtggcttcgccccctgtctttcctcggccatcgctgagctcatcaagcgctataccgaggtatcacccgaaacgaccctcatcggctatcgctatggctatgagggcctgctcaagggcgattccctcgagttctcccctgccgtgcgcgcacactacgaccggctcttcagcttcggcgggtcaccgatcgggaactcccgggtcaagctcaccaatgtgaaggacctggttgcgcggggcctggttgcttccggcgatgatcccctcaaggttgccgccgatcagctgattgccgacggggtcgacgtgctgcacacgatcgggggcgacgacaccaacaccacggccgccgacctggccgcctacctggcacagcatgactacccgctgacggttgtggggctgcccaagacgatcgacaacgacatcgtgcccatccgccagtcgctgggtgcctggacggccgccgacgagggggcccgcttcgcggcgaatgtgatcgccgagcacaatgctgctccgcgcgaactcatcatccacgagatcatgggccgcaactgcggctatctggcggccgagacctcgcggcgttacgtggcctggctcgacgcgcagcagtggctcccggaggccggtctcgaccgacgtggctgggatatccacgccctgtacgtgccggaggccacgatcgacctggacgccgaggccgagcgcctgcgcaccgtgatggacgaggtgggaagcgtcaatatcttcatctcggagggagccggcgttcccgatatcgtcgcccagatgcaggccacgggccaggaggtgcccactgacgccttcggccacgtgcagctcgacaagatcaatcccggggcgtggttcgccaagcagttcgccgagcgcatcggtgcgggcaagaccatggtgcagaagtccggttacttcagccgctccgccaagtcgaatgcccaggacctggagctcatcgccgccaccgccacgatggcggttgatgcggcgctggccggcacccccggcgtggtcggtcaggacgaggaggcaggcgacaagctgagcgtgatcgacttcaagcggatcgcgggccacaagcccttcgacatcacccttgattggtacacccagctgctggcccggatcggtcagccggcacccatcgccgccgcgtag

SEQ ID NO: 151 - DNA, 2829 bp, Schizosaccharomyces pombe
atgagtggagaaaccgtgcatggaatttcgtgctactctgttgttgcaaacactgaggacacatataatcagactctcgacttctaccaaaagcttggcttcaagaaggttgccagcttcggtaccagcgattctgacaatgcccgtgtttgcaacgagtctctccgtgaggactggatgcatgtcgctggaaacaactctgctgaaagcgtcaccatcaagttccgtttagtccccggtgaattgagcctttcccccgctgccgaagattctgaatggcgcggacaaaagagttctcttgttttttactatcccaacttgcttgacttgcttaagcaactcagtgccgatgccattaaataccaagctttccccaacgagaagaagcctgatgaggtttatgtcgaggatcccttgggtaatttgattggcttctccgaccgttacaatcctttcgcccatgctaaccttaagaagagcgaggagtctggtgctgcttctaacctcgagagcggtttggctactcccgtcgttgagactctcaagaaagctaccacttctgacaagcctgcaggtgtcaagaagaagattgcagttatgaccagtggtggtgactcccctggtatgaacgctgttgttcgtgccgtcgctcgtattgccattcaccgtggttgtgatgctttcgctatttatgaaggttatgaaggtcttgttcaaggtggtgatatgatcaagcaattgcaatggggtgatgtccgtggttggcttgctgagggtggtactcttattggtaccgctcgttgtatggctttccgtgagcgtcctggtcgtcttcgtgctgccaagaaccttatttccgctggtattgattccattattgtttgcggtggtgatggttctttgaccggtgctgatatcttccgttctgactggcccggtttggttaaagagttggaggacaccaaggctattactcccgagcaagccaagctctaccgccatcttaccattgtcggtttggtcggttcaatcgataacgatatgtcttcaactgacgttactatcggtgccttctcttctcttcaccgtatttgcgaagccgtcgactccatttcttctactgctatttcccattctcgtgctttcatcgttgaagtcatgggtcgtcattgcggttggttggctgctttagctgcattggctaccggtgctgatttcgtctttatccctgagagacctgctgaagtcggcaaatggcaagacgaattgtgcaattctttgagctctgtccgtaagttgggcaagagaaagtcaattgttattgttgcagagggtgctattgactccgagcttaaccacatttctcccgaagacatcaagaacttgttagttgagcgccttcacttggacactcgtgtcaccactctcggtcacgttcaacgtggtggtattccttgtgcttatgaccgtatgcttgctacccttcaaggtgttgatgccgttgatgctgttcttgcctctacccctgatactccatctcccatgattgctatcaatggtaacaagattaaccgcaagcctttgatggaggctgttaagttgactcatgaggttgctgatgctattgagaagaagcagttcgctcatgctatggagctccgtgaccccgaatttgctgattacttacacacttgggaaggtactacctttattgaagacgagtcacacttcgttcccaaggacgagagaatgcgtgtcgccatcatccatgttggtgctcccgctggtggtatgaactctgctactcgtgctgccgttcgatattgtttgaaccgtggtcacactcctcttgccattgacaatggtttctctggcttcttgcgccatgattctattcatgaactttcatggattgatgttgatgagtggtgcattcgtggtggtagtgaaatcggtaccaaccgtgatacccctgatctcgacatgggcttcactgccttcaagttccaacaacataagattgatgctttgattattattggtggtttcgaggctttcaccgccctttctcaacttgagagtgcacgtgttaactacccttcattccgcattcccatggctatcatccctgccaccatttccaacaacgttcccggtaccgaattctctttgggttgcgatacttgtcttaatgccgttatggaatactgtgataccattaagcaaagtgctagtgctagccgtcgtcgtgtcttcgtttgtgaagttcaaggtggccgctctggttatatcgctactgtcggtggtctcattactggtgcctccgccatttacacccccgaggatggtatctccttggatatgttgcgtaaggatattgatcaccttaaggctacattcgccttagaagctggtcgtaaccgtgctggtcaacttatccttcgtaacgaatgtgcttctaaggtttacaccaccgaagttattggaaacatcatcagtgaagaagctcataagcgcttctccgctcgtaccgctgttcccggtcacgttcaacaaggtggtaaccccactcctatggaccgtgctcgtgctgctcgtctggctatgcgtgccattcgtttcttcgaaacttgccgtgccaacgacttgggtaatgaccccagctctgccgttgtcatcggtatccgtggtactggtgtctctttcagctctgttgctgatgttgagaacaacgaaaccgaaattgagatgcgtcgtcctaagaacgcttggtggcgtgatatgcacaacttggttaacatcttggccggcaagacctttgctgattag

SEQ ID NO: 152 - DNA, 2829 bp, Schizosaccharomyces pombe
atgagtggagaaaccgtgcatggaatttcgtgctactctgttgttgcaaacactgaggacacatataatcagactctcgacttctaccaaaagcttggcttcaagaaggttgccagcttcggtaccagcgattctgacaatgcccgtgtttgcaacgagtctctccgtgaggactggatgcatgtcgctggaaacaactctgctgaaagcgtcaccatcaagttccgtttagtccccggtgaattgagcctttcccccgctgccgaagattctgaatggcgcggacaaaagagttctcttgttttttactatcccaacttgcttgacttgcttaagcaactcagtgccgatgccattaaataccaagctttccccaacgagaagaagcctgatgaggtttatgtcgaggatcccttgggtaatttgattggcttctccgaccgttacaatcctttcgcccatgctaaccttaagaagagcgaggagtctggtgctgcttctaacctcgagagcggtttggctactcccgtcgttgagactctcaagaaagctaccacttctgacaagcctgcaggtgtcaagaagaagattgcagttatgaccagtggtggtgactcccctggtatgaacgctgttgttcgtgccgtcgctcgtattgccattcaccgtggttgtgatgctttcgctatttatgaaggttatgaaggtcttgttcaaggtggtgatatgatcaagcaattgcaatggggtgatgtccgtggttggcttgctgagggtggtactcttattggtaccgctcgttgtatggctttccgtgagcgtcctggtcgtcttcgtgctgccaagaaccttatttccgctggtattgattccattattgtttgcggtggtgatggttctttgaccggtgctgatatcttccgttctgactggcccggtttggttaaagagttggaggacaccaaggctattactcccgagcaagccaagctctaccgccatcttaccattgtcggtttggtcggttcaatcgataacgatatgtcttcaactgacgttactatcggtgccttctcttctcttcaccgtatttgcgaagccgtcgactccatttcttctactgctatttcccattctcgtgctttcatcgttgaagtcatgggtcgtcattgcggttggttggctgttttagctgcattggctaccggtgctgatttcgtctttatccctgagagacctgctgaagtcggcaaatggcaagacgaattgtgcaattctttgagctctgtccgtaagttgggcaagagaaagtcaattgttattgttgcagagggtgctattgactccgagcttaaccacatttctcccgaagacatcaagaacttgttagttgagcgccttcacttggacactcgtgtcaccactctcggtcacgttcaacgtggtggtattccttgtgcttatgaccgtatgcttgctacccttcaaggtgttgatgccgttgatgctgttcttgcctctacccctgatactccatctcccatgattgctatcaatggtaacaagattaaccgcaagcctttgatggaggctgttaagttgactcatgaggttgctgatgctattgagaagaagcagttcgctcatgctatggagctccgtgaccccgaatttgctgattacttacacacttgggaaggtactacctttattgaagacgagtcacacttcgttcccaaggacgagagaatgcgtgtcgccatcatccatgttggtgctcccgctggtggtatgaactctgctactcgtgctgccgttcgatattgtttgaaccgtggtcacactcctcttgccattgacaatggtttctctggcttcttgcgccatgattctattcatgaactttcatggattgatgttgatgagtggtgcattcgtggtggtagtgaaatcggtaccaaccgtgatacccctgatctcgacatgggcttcactgccttcaagttccaacaacataagattgatgctttgattattattggtggtttcgaggctttcaccgccctttctcaacttgagagtgcacgtgttaactacccttcattccgcattcccatggctatcatccctgccaccatttccaacaacgttcccggtaccgaattctctttgggttgcgatacttgtcttaatgccgttatggaatactgtgataccattaagcaaagtgctagtgctagccgtcgtcgtgtcttcgtttgtgaagttcaaggtggccgctctggttatatcgctactgtcggtggtctcattactggtgcctccgccatttacacccccgaggatggtatctccttggatatgttgcgtaaggatattgatcaccttaaggctacattcgccttagaagctggtcgtaaccgtgctggtcaacttatccttcgtaacgaatgtgcttctaaggtttacaccaccgaagttattggaaacatcatcagtgaagaagctcataagcgcttctccgctcgtaccgctgttcccggtcacgttcaacaaggtggtaaccccactcctatggaccgtgctcgtgctgctcgtctggctatgcgtgccattcgtttcttcgaaacttgccgtgccaacgacttgggtaatgaccccagctctgccgttgtcatcggtatccgtggtactggtgtctctttcagctctgttgctgatgttgagaacaacgaaaccgaaattgagatgcgtcgtcctaagaacgcttggtggcgtgatatgcacaacttggttaacatcttggccggcaagacctttgctgattag

SEQ ID NO: 153 - DNA, 744 bp, Glycine max
atgaagttcaacatcgcgaatcccaccactggatgccagaagaagctcgagatcgacgacgatcagaaactacgagcattttgggacaagaggatctcacaggaggtcagcggagatgcacttggtgaggaatttaagggctatgtcttcaaaattactggaggttgtgacaaacaaggattcccgatgaaacagggagtgcttactcctggtcgtgttcgacttttgcttcacaggggaactccttgcttccgtggatatggaaggcgtaatggagaacgtaggagaaagtctgttcgtgggtgcattgtcagcccagacctctctgttttgaacttggtaattgtgaagaagggtgagaatgatttaccaggattgactgatgttgagaagccaaggatgagaggcccaaagagagcatccaaaatccgtaaactgttcaacctgtctaaggaggatgatgttaggaagtatgtcaacacctaccgtcgtacatttacgacaaaagctgggaaaaaggtgagcaaagctcccaagatacaaagactggtcactcctcttacgctccaaagaaagcgggcaagaattgctgataagaagaagaggattgccaaggcaaaatctgaggcagcagagtaccagaaactccttgcctccaggttgaaggagcagagagaccgccgcagtgagagtttggctaagaggagatccaagctttccagtgctgccaaggcagctgtgtag

SEQ ID NO: 154 - DNA, 1245 bp, Saccharomyces cerevisiae
atggctaagactactaaagtaaaaggtaacaagaaggaagttaaggcttccaaacaagccaaagaagaaaaagctaaggccgtctcttcctcttcctccgaatcttcatcctcatcttcatcttcatctgaatctgaatctgagtctgagtctgaatctgaatcttcatcttcatcttcatcctctgattctgaatcctcttcttcatcgtcttctgacagcgaaagtgaagctgaaaccaagaaggaagaatccaaggattcctcttcctcttcctctgactcttcttccgacgaagaagaagaagaagaaaaagaagaaaccaagaaggaagaatcaaaagaatcttctagctctgattcatcctcatcttcatcttctgatagcgaaagcgaaaaggaagagtctaacgataagaaacgtaaatctgaggacgccgaagaagaagaagacgaagagtcttccaacaagaagcaaaaaaatgaagaaaccgaagaaccagctactattttcgttggtagactatcgtggtctattgatgacgaatggttgaagaaggaattcgaacacatcggtggtgtcattggtgccagagttatttatgaaagaggtaccgatagatctcgtggttatggttacgttgattttgaaaacaaatcttatgctgaaaaggccattcaagaaatgcaaggtaaggaaattgatggtagaccaatcaactgtgatatgtccacaagcaagccagctggtaacaacgatcgtgccaagaaattcggtgataccccatctgaaccatctgacactttgttcttgggtaacttatctttcaatgctgacagagacgctattttcgaattattcgctaaacacggtgaagttgtttccgtccgtatcccaacacatccagaaactgaacaaccaaaaggtttcggttatgttcaattctccaacatggaggacgccaagaaggctctagacgctttacaaggtgaatacattgacaacagaccagttagattagacttctcttctccaagaccaaacaacgatggtggtcgtggcggtagccgtggttttggtggtcgtggcggtggtcgtggcggtaaccgtggattcggtggtcgtggtggcgctcgcggtggccgtggcggtttcagaccatctggttctggtgctaatactgctccattgggcagatcaagaaataccgcttctttcgctggttcaaagaaaacatttgattag

SEQ ID NO: 155 - DNA, 483 bp, Zea mays
atgtcggacgaggagcaccagttcgagtccaaggccgacgccggcgcctccaagacctacccgcagcaggccggcaccatccgcaagaacggctacatcgtcatcaagggacgtccctgcaaggttgttgaggtctccacttccaagactgggaagcatggccatgccaagtgccactttgttggcattgacgttttcactggaaagaagcttgaggatattgttccttcttctcacaactgtgatgttccccatgttgatcgcactgagtatcagctgattgacatcactgaagatggatttgtgagccttttgactgacagtggcaacactaaggatgacctcaggcttccgactgatgaagctctggaaggccagatcaagagcggatatgatgatggaaaggacctcctcctgacggtgatgtcttccatgggcgaggaacagatctgcgctgtcaaggagatcgggggcaagaactag

SEQ ID NO: 156 - DNA, 360 bp, Zea mays
atggtagctgccggggtgctggggttcgttgctcacttgctctgcctgggtacacacatacagggtttaagcttgggatggattgggcagcgccacccgaggttttgcatgcgcccgaccgcagcggaattccgtgaaccctgtacggcaatggcaattggcaatgacagggttactggggtgggtgaatggtttcgggatagacaattgtttgtgggagctgcgctggcgaaatgtaggctgtctattgttgcaattgcaggatggatgggtagcctctggtcggctctgctagtgtgtagtgttgctgtctgtggtctattcagggattcccatgcccatacccatgcagattgctag

SEQ ID NO: 157 - DNA, 468 bp, Zea mays
atggctgatgatgaatttgaatccgttggatcaggagcatccacctgcttcccaatgcaatgctctgccatcaagaagaatggatatgctgtgttgaagaacagaccctgcaaggtcgtcgaaacctctacctccaagaccggaaagcacggacacgctaaggtccatatggttggtattgatatcttcaccggaaagaaatacgaagaaatttgcccatccacccacaacatgatggttcctaacgtcgacagacgtgacttccaagtcatcaacatcgaagagggctttgttagcttgttgaaggatgacggaagcaccaaggacgacttgaaggtcccagaaggcgagctcggagataagttaaaggaagcttttgatgatggaaaggatgttgttgccaccgtcttggctgctatggacgaagagtgcatcatctcctggaaggaagcctctaacaagtcctag

SEQ ID NO: 158 - DNA, 468 bp, Zea mays; identical to SEQ ID NO: 157

SEQ ID NO: 159 - DNA, 756 bp, Zea mays
atggcgctgaacggcggcaagacgacgttggtgcaggacgaggagaagcagcagcttctgctggagaagcacaccgagaagcacttcacagcgggcgaggtggtccgggacatcatcatcggcgtctccgacggcctcaccgtgcccttcgcgctcgccgcggggctgtccggcgccaacgcctcctccgcgctcgtgctcaccgcggggctcgccgaggtcgccgccggcgccatctccatggggctcggagggtacctggcggcgaagagcgaggctgaccactacaaccgggagctgcagcgcgagcaggacgagatcgacaccgtccccgacgtcgaggccgccgagatcgccgacatcctgtcgcagtacgggctgggcccggaggagtacggccccgtggtgacctccctccgcaacaaccccaaggcgtggctggagttcatgatgaagttcgagctcgggctggagaggcctgagccccggcgcgcgctggtgagcgccgccaccatcgcgctgtcctacgtcgcgggcgggctggtgccgctgctcccctacatgttcgtgccggaggccgcgcgcgccatggccgtgtccgtcgccgtgacgctcgcggcgctgctcttcttcggcttcgtcaagggccgcttcacgggcgaccgccccttcttcagcgccgtccagaccaccgtcgtcggcgcgctcgcctccgccgccgccttcgccatggccagggccgtgcagtccatatag

SEQ ID NO: 160 - DNA, 1434 bp, Arabidopsis thaliana
atgcagagcctcctcgtgcccactgctgcatcggccccggtggcggctccgcgggctcggcggaatctccctatgcgcctctccgtccgcgcctccgcgacggcggcagcggcaccgcggcgggagacgcattcacatcgccgtgttgttgtcactggtctaggcatggtgactccacttggtagaggcgttgaaacaacgtggaggcgtttaattgatggagaatgtgggattagaggattgactcttgatgatctcaagatgaagtcttttgatgaagagacaaagttatatacttttgatcagctttcttctaaagttgctgcttttgtgccttatggatcaaaccctggtgaatttgatgaagccctttggctaaactctaaggcagttgcgaattttatcggatatgctgtatgtgctgccgatgaagctttgagagatgcagagtggttaccaactgaagaagaagaaaaagagagaacaggagtctctattggtggtggaattggaagtatatgtgatattgtggaggcagcgcagctgatttgtgaaaagaggctgcggcggcttagtccgtttttcattccaaaaatattggtaaacatggcatctggtcatgtgagcatgaagtatggatttcaggggccaaatcatgctgctgtgacagcttgcgcaactggtgcacattctataggcgatgccactaggatgattcaatttggagatgcagatgttatggtggctggtggaactgagtctagcattgatgctctgtccgtagctggattctctagatcaagggctttgtcaactaaattcaattcttctccacaagaagcttcacggccttttgattgtgaccgggatggttttgtgataggggaaggttcaggggttatagtattagaggaatatgagcatgcaaaaagacgaggagcaaaaatttatgctgagctttgtggatatgggatgtcaggcgatgcacaccatattactcaacctcctgaagatggaaaaggagctgttttggccatgacgcgtgccttaagacagtctggtctgtgtccaaaccaaattgattatgtaaacgcacatgcaacatcaaccccaataggcgatgccgtggaagcgagagctatcaagacggtattctctgaacatgctacttcaggcaccttggcattctcctccaccaagggggctactggtcatcttcttggagcagctggagcagtggaagctattttcagtatccttgctatacatcacggggttgctcctatgacgctgaatgtcaagaatccagatcccatcttcgacaagaggttcatgcctttaaccacttcgaaaaagatgttagttaggacagcaatgtcgaattcgtttggctttggaggaacaaatgcatctttgctctttgcctctatctag

SEQ ID NO: 161 - DNA, 1434 bp, Arabidopsis thaliana; identical to SEQ ID NO: 160

SEQ ID NO: 162 - DNA, 1896 bp, Arabidopsis thaliana
atggcgtcttcgcttctgagaaaccctaatctctactcatcaacaacaatcaccaccacttcttttcttcccaccttctcctctaaacccacacctatctcctcctctttccgtttccaaccatctcaccaccgttcaatctccctccgaagtcaaaccctccgtctctcatgctcaatctcagatccttctccactaccacctcacactcctcgccgtccccgtcctgaatacatccccaaccgcatttccgatccaaactacgtccgcgtcttcgatactactctccgtgacggtgaacaatctccaggagctacacttacttccaaggaaaaacttgacatcgctcgtcagctagctaaacttggtgttgacatcatcgaggctgggtttcctgctgcttccaaggatgattttgaagcggttaagactatagctgaaacagttggaaacactgttgatgagaatggttatgttcctgttatctgtggactctctagatgcaataagaaggatattgagagagcttgggatgctgtgaaatacgctaaacggcctaggattcatacttttatagctactagtgatatacatttggagtataaactaaagaaaaccaaagcagaggtcatcgaaatcgctaggagtatggttagattcgcgaggagcttggggtgcgaagatgttgagttcagtccagaagatgcaggaagatcggagagagagtacttatacgagattcttggtgaagtgataaaagcaggagcaacaactctcaacatacctgatactgttggtataactttgcctagtgagtttggtcaactgattactgatttaaaggccaatactccggggattgaaaatgttgtcatctcaacacattgtcagaatgatcttggactctctacggccaacactttatctggggcacatgcaggtgcgaggcagatggaagtgacgatcaatggaattggtgaaagagctggaaacgcttcactggaagaggttgtgatggccataaaatgccgtggagatcatgtattaggaggtctatttaccggaattgatactcggcacattgttatgacaagcaagatggtagaggagtacactgggatgcagacacaacctcataaggctattgtaggagcgaatgcctttgcgcatgaaagtggaattcaccaggatggaatgctgaaacacaagggtacatatgaaattatatgtcccgaagaaattggacttgaacgatcaaatgatgctggcattgtcttggggaagcttagtgggcgtcatgcgctgaaagaccgtttgactgagcttggttatcaattagatgatgaacagctaagtaccattttctggcgcttcaaaaccgtggctgagcagaaaaagagagttactgatgcggacataatagctttagtatctgatgaagttttccagccagaagccgtgtggaaactcctggacattcagataacttgtggaactctcgggctttcaacagcaactgtaaaacttgctgacgctgatggcaaagaacatgtcgcttgttctattggaactgggcctgtggattcagcttacaaggcagtagatcttatcgtaaaggaaccggctactctgcttgagtactcaatgaatgcagtaacagaaggcattgatgccatcgcaaccacaagagttcttatccgtggaagcaacaaatactcatctacaaacgcaataactggtgaagaggttcaaagaacctttagtggaactggagcaggaatggatattgtggtgtcaagcgtcaaagcttatgttggagctttgaacaaaatgatggacttcaaagaaaactccgccacaaaaatcccttcccaaaaaaacagagtcgctgcctag

SEQ ID NO: 163 - DNA, 951 bp, Glycine max
atggattttgaccttgaaaaccctcttggaaacttccacgaccttccctgcgacgctgtcccttccctcttcctcatcgaatccgaccacatccctcctccgaactactgtcagagtctcaaagccagcgacttcgacatctctgttagaagagatgttgtctctttgatctcgcagttgtcctgcaccttcgatccggttctcccttacttagctatcaactacttggatcgcttcctcgctaaccaaggaatattgcaaccaaagccatgggcaaacaagcttcttgcagtctcttgcttttctctagctgccaagatgttgaaaacagagtactctgccactgatgtccaggttcttatgaatcatggcgatggaggtgccatttttgagacacaaacaattcaaagaatggagggcattgtcttgggagctctacaatggcgaatgcgttcgatcacccccttctctttcattcccttcttcgtgaatttgttcaggctgaaagacccagcattgaggcaggttctgaaggatcgagcatcagaaataatactcaagtcacaaagagagataaaggtcttggaattcaagccatctacagttgctgcgtcagcccttctgtatgcttcacatgagttgtttccctttcaatatccgtgcttcttaagagcaatatccgattgttcatatattaataaggaaactgtagtgcaatgttataatgtgatacaagatatagccagggaggagtacgaatcggtgttgaatataaactcaacttcagacacaccggttaatgtgttagacgaacattttctgagcttggaaagtgaaaaaaccaacggaaccaacgttgttgtgacacaagagcaggacttcaaaagaaggaaaaccaccgattatggcaacaatcgcagggtcccgttttcacattttcatcaatgctag

SEQ ID NO: 164 - DNA, 951 bp, Glycine max; identical to SEQ ID NO: 163

SEQ ID NO: 165 - DNA, 951 bp, Glycine max; identical to SEQ ID NO: 163

SEQ ID NO: 166 - DNA, 810 bp, Oryza sativa
atggcggcggcggcggcggcggcgaccatagggatgatggacagcgcgtacttcgtcgggaggggggagatcctcagctggatcaatgccaccctccagctctccctcgccaaggtcgaggaggcggcgtcaggggcggtgcagtgccagttgatggatatggttcaccctggggtggtgccaatgcacaaggtgaattttgatgctaagaccgagtatgacatgatccagaactacaagattcttcaagatgtgttcaacaagctgcggttgagcaagaatattgaggtcaacaagcttgtcaagggacgtccattggataacctggagtttctgcaatggttgaaaagatattgtgattctgtaaatggtggaatcatgaatgaaaactacaatcctgtagagaggaggtctaagggttgcaaagaacgcagtctcaaaggttccaacaagtcgtccaaatcactacaagctaatagattgtctagtgcaaattcagctgatggaggtccatgcgttggtaaagtcaatgttatctctgaagagcattacatagaacagattcagcaattatctgagaagattgcaggcctgaaaatttctatggatagcgcggagaaagaaagagacttctacttttctaagctgcgcgacattgagatactgtgtcaaagaccagagttggagcatcttccgatgaccaaggctgtacagaagatactttatgcggctgatgcaagagattcgccattgcctgaggctaatgaaataatcacccggtcaccaagcatgttcccagatgaagcctag

SEQ ID NO: 167 - DNA, 1695 bp, Oryza sativa
atggcgcagccgcggcgcccggagtacgtccccaaccgcatcgacgaccccaactacgtccgcatcttcgacaccaccctccgcgacggggagcagtcccccggggccaccatgaccagcgccgagaagctcgtcgtcgcgcgccagctcgcccgcctcggcgtcgacatcatcgaggccgggttcccggcctcctcccccgacgacctcgacgccgtgcgctccatcgccatcgaggtcgggaacacgcccgtcggggaggacggccacgtgccggtcatctgtggcctctcgagatgcaataagcgagacattgatgctgcctgggaggccgtgcggcacgcgcggcggccgcgcatccacaccttcattgccaccagcgagatccatatgcagcacaagctaaggaagacgcccgagcaggtggtggccattgccaaggaaatggtggcctacgcccgcagcctaggctgccctgatgtcgagttcagccctgaagacgctggcaggtcaaacagagagtttctatatcatatactagaggaagtcataaaagctggagcaacaacactcaatatcccagacactgttggatacactcttccttatgaatttgggaaactaattgctgatataaaagcaaacactccaggaattgaaaatgccattatttctactcattgccagaatgaccttggtctagcaaccgcaaatacattagcgggcgctcatgcaggagcacggcaattagaggtgactatcaatggtattggtgaaagggctggaaatgcttctttggaagaggttgtgatggcaattaaatgtcgtcgagaactcttaggaggtctgtatactggaatcaatacccaacatatcactatgtcaagcaaaatggtacaagagcacagtggacttcatgtacaaccacataaagctattgtcggtgccaatgcctttgcacatgaaagtggaattcatcaggatgggatgcttaagtacaaaggaacttatgaaataatttctcctgatgatattggtctaacacgtgcaaatgagtttggtattgttcttgggaagctcagtggaaggcatgctgtgagatctaaactagtggagcttggatatgaaatcactgacaaggaatttgaggatttctttaaacgctacaaagaggttgcagagaagaaaaagcgtgtaactgatgaagacattgaggcgctgttgtctgatgagatatttcagcccaaggttttttggtcccttgctgatgtacaggcaacttgtggaacacttggtctgtctacagcaactgtcaaactgataggtccggatggagatgagaagattgcatgtgcagttggaacaggtccagttgatgcagcttacaaggctgttgatgatataatacagatcccaactgttcttcgagaatatagcatgacatcggtcacagaaggcattgatgcaattgcaactactagagtggttgtcactggagatgtcagcgactctaaacatgctttgactggtcactccttcaaccgggcattcagtgggagtggtgccgcactggatattgttgtttccagtgtgcgagcttacctgagtgccctgaacaagatgtccagttttgttggggctatcaaggctagtagtgaagtatctgaaagccaaagagttcaaaccacagaatag

SEQ ID NO: 168 - DNA, 846 bp, Zea mays
atggcgcccgcaccggcagcgctctccgcggccaacgccctctcgctgctcgcgcccgctagagtctcctccgggaggtggaacaacctgtccgtctccgtttcggcccggcgggtggtgtctgtcgcgccgccagcggcggccacggcgcagaggaggctggtcgcggcggcggcggcgacggagatggcgcccgcggcgagcggggaagaagggagcaagccgttcgtggaggagatgcgggcggtcgcgatgaagctccacaccaaggaccaggcccgggagggggagaaggagccccaggcgccccccgtcgccaagtgggagccctccgtcgaggggtacctccgattcctcgtcgacagcaagctcgtcttccagacgctcgaagccatcgtcgagcgcgccgctgtcccgtggtatgcagagtttcggaatactgggctggagagatcagaggcgctgaaaaatgatctggaatggttcaggcaacagggccacacaattccagaaccatcggcccctggcaccacatacgcttctctactggaagagctgtctgaggaggacccccaggcctttatctgccatttctataacgtgtactttgctcatactgctggaggccgaatgattggcaaaaaggtttccgagaagattctgaacaacaaagagctggagttctacaagtgggagggcaatctctcccagctgctgcagaacgtccgcaacaagcttaaccaagtcgctttgagctggtctcgggaggagaaggaccactgcctggaggagacggagaagtcgttctcttactcaggaggcctcctccgccatatattcacctag

SEQ ID NO: 169 - DNA, 1479 bp, Zea mays
atgacgagcttgcctgagaggggagaatcacctgtgccgccactcgattctctgcgccaggactctgccgtgaccgtcctagcggctgccgccgttgcctcttcctccgctggctccgatcgcaaggaagacagcggctccaggcagcccaaggcctccatcctgtccggcgtcttctctcccccttttgccatattcgaggggcagcagcagggctcctcgtcgccggcgtgcgacgccaggtcgacaaagtcgtcctcagggtcctatggtttatccaggatcctgaggaggttcgtgggcagcggctccatgtggcgacttctggggtgcggcagggtcttgacctccagtgacgtgtggttccttggtaaatgctataaggtgtcgcctgaagaagaggagtctggcgactcggagtccgacagcgggcatgctgcgtttctggaagatttctcttccaggatatggatcacttaccggaaaggctttgatgcaatatctgattccaagctaactagtgatgtgaactggggatgcatggttagaagcagtcaaatgctggttgctcaggcgctgatttttcaccaccttggaagatcttggagaaagcccccagagaagccatacaacccagattatataggggtcttacacctattcggtgattctgaagcttgtgctttctctattcacaatttacttcaagctggaaggaattatggtctggctgctggatcatggttgggtccatatgctatgtgccgggcatggcagacccttattcgcacaaatagagagcaagctgatgctgtagatgggaaggaaaatttccctatggcgctgtatgtggtttcgggtgatgaagatggcgaaagaggtggagctccagttgtttgcattgatgttgctgctcagctttgctctgatttcaacaaaggaccatctacatggtcacctattcttttgttagttcctctggttcttggccttgacaaaattaacccaaggtacatcccattactaaaggagacatttatgttcccacaaagcttgggcattttaggtggaaaacctggtacatcaacatacattgctggggtacaggatgatagggctctctacctagatccccatgaagttcagatgacggttgacattgcactggataacttggaggcagacacttcctcataccactgcagcgttgtccgagccttagctctggaacaaatagatccctccctggctattggtttttactgtcgtgacaaagacgactttgatgatttctgttctcgggcctctgagttggcggagaaggccaatggcgcgccactctttactgttgtgcagtcaatcgagccatcgaaacaaatgtataaacaggatgatggactgggttgttctggcagtagcatggccaatgacgacgaccttgatggctctggtgaagcagaagagtggcagatcctttag

SEQ ID NO: 170 - DNA, 924 bp, Zea mays
atggcgacggaggagtgggagctgcgggaggaggacgcctacgcctacgagttcgagttcgacctcgagaaccccttcaccagccccgccgacgagccgatcgccagtctcctcgacgccgagggccaccacgcgccctctatctccgccgcggcctcggccacccgccgcgccgccgccgccttcatctccaaggtgcgtttcggcggcgagctcgccgtgcacccgcgcgtcgcctacctcgcgctcaactacgtggatcgcttcctctccaagaggcaattggcgtgcgagcagcagccgtgggcgccgcgcctgctcgccatcagctgcctctccctcgccgccaagatgcagcgcgtcgcaacattctccaccgccgacattcagagggacgaagacttcatgttcgacgcggtgaccatccgtcgcatggagcgggtggtgcttggcgcgcttgagtggcgcgcgcgctccgtcacgccgctcgccttcctcggcttcttcctctccgcatgctatccgccgccgcagcaccccccacaggtagccgctgtcaaggcgcgcgccgtcgacctccttctccacgctcagcctgaggtgaagatggcggagttctcaccctccgtggtggcggcggcagcgctgctggccgccgccggagaggtcgccgccgcgaacctccacgcgttccaagccagcttggccgcctgtccctttgtaaatagcgagaagctgcgggagtgcggtgaggtgctggcagcggcgggcggcgtcgggcgggggcgagccgctccgagcgcggacacgcctgtgacggtgctcggtcaccagcgcagcgccagctccgcctcggagaccgactggattaacggcggcgacgcgaagaaacgctgcatgggcccaccatcgcaatgggggtag

SEQ ID NO: 171 - DNA, 924 bp, Zea mays; identical to SEQ ID NO: 170

SEQ ID NO: 172 - DNA, 960 bp, Lactobacillus delbrueckii subsp. bulgaricus
atgaaacggattggtattttgactagcggcggtgacgcccctggtatgaatgcagccgtaagagccgtaaccagagtcgcgatcgcgaacggtttggaagttttcggtatcagatacggttttgcaggtttggttgcgggcgacattttcccattggaaagtgaagacgtagcccacttgatcaatgtttccggtaccttcctctactctgcgcgttatcctgaatttgcagaagaagaaggacagctggctggtattgagcaattgaagaagcacggcatcgatgctgttgtcgttattggtggggatggttcctaccatggcgccctgcagctgacccgccacggcttcaactcaattggcctgccaggcacgatcgacaacgatatcccttacacggatgccacgatcggctatgacacggcctgcatgacggcaatggacgcgatcgacaagatccgtgacactgcttctagccaccaccgcgtcttcattgtcaacgtaatgggccgcaactgtggtgacatcgctatgcgcgtcggcgtagcctgcggggcggacgcgatcgtcattcctgaaagaccatatgatgtcgaagaaatcgccaaccggctcaagcaagcccaggaaagcggcaaggaccacggtttggtagttgttgctgaaggcgtaatgaccgctgaccaattcatggctgaactgaagaagtatggtgacttcgacgtccgggccaatgttttgggtcacatgcagcggggcggcacgccaactgtttctgaccgggtgctggcttccaagctgggcagcgaagccgttcaccttcttttggaaggcaagggcggcctggctgtcggcattgaaaacggcaaggttacttcacacgacatccttgatttatttgatgagtctcacaggggtgactatgacttgttaaagctcaacgcagatttatcaagatag

SEQ ID NO: 173 - DNA, 1467 bp, Oryza sativa
atggcggtcacgcgcctcgccgtggccgccgccctctcggccaaggcgttgcgcgcgtcggctgcccccgccgtcgacgaggaggcccccgcatccccgcctccatcagatcttggcaagggagtggagaacttggtgatcataggctctggcccggcggggtacactgccgcgatttacgccgctcgggcgaacctcaagcccgtcgtgttcgaaggctaccaggttggtggcgttcctggtgggcagctgatgaccaccaccgaggtggagaatttccctgggtttccggatggcgtcactgggcctgatctcatggacaaaatgcggaagcaagcggagcggtggggtgctgagcttcaccaggaggatgttgagtttgtgaatgtgaagagcagaccgtttgttattcgtagcagtgatcgtgaggtgaaatgccatagtgtaatcattgctactggtgctgctgctaagcgccttcgattacctcgtgaagatgaattttggagtagaggtatcagtgcatgtgcaatatgtgatggagcatccccactatttaagggtcaagttcttgcagttgttggaggtggtgatacagctacagaggaagctatatatttgaccaaatatgcacgtcacgttcatttacttgttcgaaaggatcagctacgagcatccaaagctatgcaggaccgagtactcaacaatcccaacataacagtacatttcaatacagaagctgtggatgttgtcagcaatcccaaaggccagatgtctggtattcaactgaagagaaccgacacgggagaggaatcagttcttgaggtgaaaggtctattctatggcataggacacactccaaacagtcagttgttacaaggtcaaattgatcttgacgatgctggttatattttggttgaagaaggcacagcaaaaacatcagttgatggtgtatttgctgctggtgatgtgcaggatcatgaatggaggcaagccgttactgcagctggatccggatgtgtagccgctttgtcggtggaaagatacttagttgccaacgaccttcttgttgaatttcaccagcctgttcgcgaagaaaaggagaaggagattacagatagagatgtcgagatgggctttgacatttctcacacaaagcataggggacagtatgcactccgcaaagtatatcatgaaagtccaaggcttgtctgtgttctatatacttctccaacatgtggtccttgcagaaccttaaagccaattctaagcaaggttatagatgagtacaacgaacacgttcattttgtcgaaattgacatcgaggaggatcctgaaatagcagaagctgcaggcatcatgggaacaccatgtgttcaattttttaaaaataaagaaatgctcaggactgtctctggtgttaaaatgaagaaggaatatagggagtttatcgagtcaaacaaatag

SEQ ID NO: 174 - DNA, 1467 bp, Oryza sativa; identical to SEQ ID NO: 173

SEQ ID NO: 175 - DNA, 1467 bp, Oryza sativa; identical to SEQ ID NO: 173

SEQ ID NO: 176 - DNA, 2364 bp, Arabidopsis thaliana
atggcttcgttcatagatcttttcgccggcgacatcacgacgcaactcttaaagctgctcgctctagtagctaacacagtctacagttgcaaaggaatcgccgaacgactgatcacgatgatcagagacgttcaaccaacgatcagggagatccaatacagtggcgcggagctgagtaaccatcaccaaactcaactgggagtattctatgagatcttggagaaagcaagaaagctatgtgaaaaggttttaagatgcaataggtggaaccttaaacatgtgtaccacgcgaataagatgaaggatctcgagaaacaaatatctcgtttcctcaacagccagattttgctctttgttcttgctgaggtatgtcatctacgggtcaatggtgacaggattgagaggaatatggatagactgttgactgagcggaatgattctttgtcgtttccggagactatgatggagattgagacggtaagcgatccggagattcagacggtattggaattggggaagaaaaaggtgaaggagatgatgtttaagtttacggatacacatttgtttgggatctctggaatgagcggttcagggaaaaccactcttgcaatagagctttcaaaggacgatgatgttcgaggactctttaagaataaggttttgtttttgactgtgtcacggtctccgaattttgagaatttggagtcttgtatacgagaatttctttatgatggagttcatcaacggaagctagtgattcttgatgatgtttggacaagggagtccttggacaggctgatgtctaaaattcgtggaagcactactttagtagtgtcacggtccaagcttgcagatcctagaaccacctacaatgtggaattattaaagaaagatgaagcaatgtctcttttgtgtctctgtgctttcgaacaaaagtccccgccttctccattcaacaaatatttggtgaagcaggttgttgatgagtgtaaaggtttacctttatctttgaaagttcttggtgcttcgttaaaaaacaaacctgaaagatattgggaaggcgtagtgaagaggttattaagaggagaagctgctgatgaaactcatgagagcagagtgtttgctcatatggaagaaagtctagaaaacctcgacccgaaaatccgagactgtttcttggatatgggtgctttccctgaagacaagaagatccctcttgatcttctcacgagcgtgtgggttgagaggcatgatattgacgaggaaactgcgttttcctttgttcttcgtttagctgacaagaatctccttactatagtgaacaatccgaggtttggcgatgtgcacattggctactatgatgtatttgtgacgcaacacgatgttttgagagacctagcccttcatatgtccaatcgtgtggacgtaaataggagagagcggttattaatgccaaaaacagagccagtgcttccaagagaatgggaaaagaataaagatgagccatttgatgccaagatagtttcccttcatacaggggaaatggatgaaatgaattggtttgacatggacctccctaaggcagaagttttaatactgaacttctcttcggacaactacgtcttgccaccatttattggtaagatgagtagactcagggtgctcgtgattatcaacaatggcatgtctcctgcgcgtctacatggcttctccatctttgccaatttggccaaactgaggagtctctggctcaagagggtacatgtccctgaactcaccagctgcaccattccactgaaaaacctgcacaagatacatctaatcttttgtaaggtcaagaacagctttgttcagacgtcattcgacatctcgaaaatattcccaagcttgtctgatctcactattgatcactgtgatgatcttttggaactaaaatccatatttggaataacctctctcaactctctcagcataaccaactgtccacggattcttgaattgcccaagaatttgagtaacgtacagtcccttgaacgtctaaggttatatgcctgccccgagctgatatccctcccggtcgaagtttgtgagctgccatgtctaaagtacgttgacatttcacagtgtgtcagcctggtttctcttcctgaaaagtttggaaagctagggagtcttgagaaaattgacatgagagaatgcagtttattgggtttaccaagttctgtagctgcacttgtgtctctacgccatgtcatttgcgatgaggagacttcgtctatgtgggaaatggtcaagaaggtggttcctgaactttgcattgaagtcgccaaaaaatgcttcaccgtggattggcttgacgattag

SEQ ID NO: 177 - DNA, 2607 bp, Oryza sativa
atgatggtgacatggccgtggcgcgctctaccgttggcggccgttctcttcctcttcctctcgccggccgcgtccgtcgatacggtcaccatggaggctccactcgcgggcaaccggacgatcgtgtcggccggagggaccttcacgctcggcttcttcacgccggacgtcgccccggcagggcgcaggtacctcgggatatggtacagcaacatcctagcgcggaccgtcgtgtgggtcgccaatcgtcagagcccggtggtcggcggctcgcccacgctcaagatcaacggcaatgggagccttgccattgtggacgggcaaggcagggtcgtgtgggcgtcgccggtgatgtcggcttctgtgctgagcgccggcagcgccaaggcgcagctccttgacaacggcaacttcgtgctgcggttcgccagcgccggcgttgcgtggcagagctttgactacccgaccgacactctgctccccggcatgaagcttggcatcgacttccgcaccggccttgaccggtacatgaactcgtggagggcggccgatgacccgtcccccggagagtactccttccggatcgacccgagcggctcgccggagtttttcctgtaccggtggtccacgaggacgtacggcagcggcccgtggaacgggtaccagttctccggcgtgccgaacctcaggacgaacaccctcctgagctaccagtacgtgtcgacggccgacgaggcatactaccggtacgaggtggacgacagcacgacgatcctgacgcggttcgtgatgaactcgtcggggcagatccagaggctgatgtggatcgacacgacgcggtcgtggagcgtcttctcgtcgtaccccatggacgagtgcgaggcctaccgcgcctgcggtgcctacggcgtctgcaacgtcgagcagtcgccgatgtgcggctgcgcggaggggttcgagccgcggtaccccaaggcatgggcgctgcgtgacgggtccggcgggtgcatcaggcgcacggcgctcaactgtaccggcggcgacgggttcgccgtgacgaggaatatgaagctgccggagtcggcgaacgcgacggttgacatggcgctgggcctggaggagtgccggctcagctgcctgagcaactgcgcgtgccgcgcctacgccagtgccaacgtcaccagcgcggacgccaaggggtgcttcatgtggacggccgatttgcttgacatgaggcagttcgacaacggaggccaggacctgttcgtccgcctggctgcgtctgatctccccaccaattctgtttcagacaattcacagacagctaagctcgtcgaaatcattgtcccatccgttgtcgcactattgttgcttctagctggacttgtcatttgtgtcatcaaggcaaagaagaacaggaaggcgatcccatcagcactgaacaatggacaggttactcctttcggacaaagaaaccatactgcttcagcactgaacaattgggagattactcccttctggcaaagaaaccatgttgctgcatccaacgatgcccaggacaacaattccatgcgtcctgctggtcagggaaatcaccaggatttggatctgccgtcgttcgttatagaaaccattctttacgccaccaacaacttttcagctgataacaagcttggccaaggaggatttggccctgtctacatggggagacttgacaacggacaagatatagctgtcaagagactgtcacgtagatcgacgcaaggtctccgcgaattcaagaatgaagtcaagctgatagctaagcttcagcacaggaatcttgtcaggctacttggttgctgcattgacggttcagagaggatgctaatctacgagtacatgcacaatcgtagcctcaacactttcctgttcaatgaagagaaacaatcaattttaaactggtcaaagcgattcaatatcatcaacgggatcgcgcggggaatactatacctgcatcaagattccgcgctacggataattcatagagatcttaaagcaagcaacattttgcttgacagagacatgaaccccaagatctcagacttcggtgttgcgagaatatttggaactgaccagactagtgcatataccaagaaagtagttgggacatacggatacatgtctcctgaatacgcgatggacggcgtattctcgatgaaatctgacgtcttcagcttcggcgtcctggtactggagattgtcagtggcaagaagaacagaggattctaccacaatgagctcgacctgaacctccttagatatgcttggaggctgtggaaggaaggtcggagcttagagttcttggatcagtctatcgccggcacttcctcaaacgtgacggaggtgctgaggtgcatccagattggcctgctgtgcgtccaggagcagccgaggcacaggccgaccatgtcggcggtgaccatgatgctgagcagcgagagccccgcgctgctggagccgtgcgagcctgctttctgcacggggaggagcctcagcgacgacacggaggccagccggtccaacagcgcaagaagctggactgtaacagttgtagagggcagatag

SEQ ID NO: 178 - DNA, 2620 bp, Oryza sativa
tcgttaccatgatggtgacatggccgtggcgcgctctaccgttggcggccgttctcttcctcttcctctcgccggccgcgtccgtcgatacggtcaccatggaggctccactcgcgggcaaccggacgatcgtgtcggccggagggaccttcacgctcggcttcttcacgccggacgtcgccccggcagggcgcaggtacctcgggatatggtacagcaacatcctagcgcggaccgtcgtgtgggtcgccaatcgtcagagcccggtggtcggcggctcgcccacgctcaagatcaacggcaatgggagccttgccattgtggacgggcaaggcagggtcgtgtgggcgtcgccggtgatgtcggcttctgtgctgagcgccggcagcgccaaggcgcagctccttgacaacggcaacttcgtgctgcggttcgccagcgccggcgttgcgtggcagagctttgactacccgaccgacactctgctccccggcatgaagcttggcatcgacttccgcaccggccttgaccggtacatgaactcgtggagggcggccgatgacccgtcccccggagagtactccttccggatcgacccgagcggctcgccggagtttttcctgtaccggtggtccacgaggacgtacggcagcggcccgtggaacgggtaccagttctccggcgtgccgaacctcaggacgaacaccctcctgagctaccagtacgtgtcgacggccgacgaggcatactaccggtacgaggtggacgacagcacgacgatcctgacgcggttcgtgatgaactcgtcggggcagatccagaggctgatgtggatcgacacgacgcggtcgtggagcgtcttctcgtcgtaccccatggacgagtgcgaggcctaccgcgcctgcggtgcctacggcgtctgcaacgtcgagcagtcgccgatgtgcggctgcgcggaggggttcgagccgcggtaccccaaggcatgggcgctgcgtgacgggtccggcgggtgcatcaggcgcacggcgctcaactgtaccggcggcgacgggttcgccgtgacgaggaatatgaagctgccggagtcggcgaacgcgacggttgacatggcgctgggcctggaggagtgccggctcagctgcctgagcaactgcgcgtgccgcgcctacgccagtgccaacgtcaccagcgcggacgccaaggggtgcttcatgtggacggccgatttgcttgacatgaggcagttcgacaacggaggccaggacctgttcgtccgcctggctgcgtctgatctccccaccaattctgtttcagacaattcacagacagctaagctcgtcgaaatcattgtcccatccgttgtcgcactattgttgcttctagctggacttgtcatttgtgtcatcaaggcaaagaagaacaggaaggcgatcccatcagcactgaacaatggacaggttactcctttcggacaaagaaaccatactgcttcagcactgaacaattgggagattactcccttctggcaaagaaaccatgttgctgcatccaacgatgcccaggacaacaattccatgcgtcctgctggtcagggaaatcaccaggatttggatctgccgtcgttcgttatagaaaccattctttacgccaccaacaacttttcagctgataacaagcttggccaaggaggatttggccctgtctacatggggagacttgacaacggacaagatatagctgtcaagagactgtcacgtagatcgacgcaaggtctccgcgaattcaagaatgaagtcaagctgatagctaagcttcagcacaggaatcttgtcaggctacttggttgctgcattgacggttcagagaggatgctaatctacgagtacatgcacaatcgtagcctcaacactttcctgttcaatgaagagaaacaatcaattttaaactggtcaaagcgattcaatatcatcaacgggatcgcgcggggaatactatacctgcatcaagattccgcgctacggataattcatagagatcttaaagcaagcaacattttgcttgacagagacatgaaccccaagatctcagacttcggtgttgcgagaatatttggaactgaccagactagtgcatataccaagaaagtagttgggacatacggatacatgtctcctgaatacgcgatggacggcgtattctcgatgaaatctgacgtcttcagcttcggcgtcctggtactggagattgtcagtggcaagaagaacagaggattctaccacaatgagctcgacctgaacctccttagatatgcttggaggctgtggaaggaaggtcggagcttagagttcttggatcagtctatcgccggcacttcctcaaacgtgacggaggtgctgaggtgcatccagattggcctgctgtgcgtccaggagcagccgaggcacaggccgaccatgtcggcggtgaccatgatgctgagcagcgagagccccgcgctgctggagccgtgcgagcctgctttctgcacggggaggagcctcagcgacgacacggaggccagccggtccaacagcgcaagaagctggactgtaacagttgtagagggcagatagaaccc

SEQ ID NO: 179 - DNA, 1269 bp, Zea mays
atgccccttcttcctctcctccccgtcatggcttccaccttctcccccacttccgccgcgagggccctcctccctggctccacctcccgcccactcttcctcgccgcttcagcttcctcagggcgcattcaaccatccaggaagggactggacttccgccgcggccgattcaccgtctgcaatgtcgccgctcccaccgccgccgaacaggaggcgacggcgtcggccgcgaaggagacccagcgccccgtgtacccgttcgcggccatcgtggggcaggacgagatgaagctctgcctgctgctcaacgtcatcgaccccaagatcggcggcgtcatgatcatgggcgacaggggcacggggaagtccaccaccgtccgctccctcgtcgacctgctcccggacatccgcgtcgtcgtcggcgaccccttcaactccgacccggacgaccccgaggtcatgggccccgaggtccgccagcgggtcctgcagggggacaccggcctccccgtcaccaccgccaagatcaccatggtcgacctgcccctcggcgccaccgaggaccgcgtctgcggcaccattgacatcgagaaggcgctcaccgagggcgtcaaggcgttcgagcccggcctgctcgccaaggccaacaggggcatactgtacgtcgacgaggtcaacctgctggacgaccacctcgtcgacgtgctgctggattccgctgcgtcggggtggaacacggtggagagggagggtatctccatatcccaccctgctcgcttcatcctcatcggctctggtaacccggaggaaggggagctcaggccccagctgctggaccggttcgggatgcacgcgcaggttggtaccgtcagggacgccgagctcagggtgaagatcgtggaggagagggctcgtttcgacagggatccgaagacgttccgtgagtcgtatcatgacgagcaggagaagctccagcagcagatatcatctgcacggagtaaccttggcgctgtgcagattgaccatgacctccgtgtcaagatatccaaggtgtgctctgagttgaacgttgatggactcagaggtgacattgtgactaacagggctgccaaggcgctggctgcgttgaaaggaagggacagcgtcaccgtggaggacattgctactgtcattccaaactgcttgaggcatcggctccgcaaggatccgcttgaatccattgactcgggtttacttgtcattgagaagttttatgaagtctttagctag

SEQ ID NO: 180 - DNA, 2283 bp, Arabidopsis thaliana
atggcgatgactccggtcgcgtcatcatctccagtttcaacctgcagactctttcgctgcaatctcctccctgatctcttacctaagcctctgtttctctccctccccaaacgaaacagaattgcctcgtgccgcttcactgtacgtgcctccgcgaatgctaccgtcgaatcccctaacggtgtccctgcctccacatcagatacggatacggagacggataccacctcctatggccgacagtttttccctttggccgcagttgttggccaggaaggcataaaaactgctcttttacttggcgcggttgatcgtgaaatcggagggattgccatttcaggtcgtagaggcactgcaaaaacagtcatggcgcgagggcttcatgaaatcctccctcctattgaagttgttgtaggctcaatatcaaatgctgacccagcttgtccagatgagtgggaagatgacttagatgagcgcatagagtacaatgctgacaataccattaagactgagattgtcaaatctcctttcattcagattccactaggagttacagaagacagactcattgggtctgttgatgttgaggagtctgtgaaaagggggacaactgttttccaacctggtcttttggctgaagcccatagaggagtgttgtatgttgatgaaataaatctcttagatgagggaattagtaatttgcttctcaatgtattgacggatggtgttaatatagttgaaagagaaggaatcagctttaggcacccgtgcaaaccacttttaattgcaacctataaccctgaagaaggtgctgttcgagagcacttgctagaccgtgttgccattaatttaagtgcagacctacctatgagttttgaagatcgtgtcgcagcagttggaattgccacacagtttcaggaacgctgtaatgaggtttttagaatggtaaatgaagagacagaaacagcaaagacgcagattatattggctagagaatatttgaaagatgtcaagataagtagagagcaattgaagtatctggttttggaagctgtccgaggtggtgtccagggacaccgcgccgaattgtatgcagctcgtgtggcgaagtgtttagctgcaattgaaggacgagaaaaagtcacaatcgatgacctcagaaaggccgttgagctggtcattcttcctcgttcatcactagatgagactccacctgaacaacaaaaccaaccaccacctcctccacctcctccacaaaatagcgaatctggagaagaagaaaatgaagaagaacaagaagaagaagaagaggatgaaagcaatgaagaaaatgaaaatgagcagcaacaggaccaaatacctgaagagtttatatttgacgctgagggcggtctggtggatgagaaactcctcttctttgctcaacaagcccagaaacgtcgggggaaagctggcagggcgaagaatgtcatattctcagaagatagaggacgctacataaagccaatgcttccaaagggtccagtaaaaagattagctgtggatgcaacccttagagcagctgcaccataccagaaattgcgcagagagaaggatatctcaggaactaggaaagtctttgttgagaagacagatatgagggccaaaagaatggcaaggaaagctggagccctggttatctttgtggttgatgcaagtggcagtatggcattgaatcgtatgcaaaacgccaaaggtgctgcactcaaactactggcagagagctatactagcagggatcaggtttcgattattcctttccgaggggatgctgcggaagtgctcttgcccccttctagatcaatagcaatggcaaggaatcgtcttgagagacttccttgtggtggtggttctcctcttgcccatggtttaacaacggctgtaagagtaggacttaacgcagagaagagtggtgatgtcgggcgcataatgattgttgcgataaccgatggtcgagccaacattacactgaaaagatcaactgatccggagtctattgccccagatgctcctagacccacgtccaaagaattgaaggatgagattctggaagttgctgggaagatatacaaggcagggatgtctcttctagtgattgataccgagaacaagtttgtttcaactggttttgcaaaggagatcgcaagagttgctcaaggaaaatattattacttgccaaatgcttcggatgctgtaatctcggccaccactagggatgcactatctgatctgaagaattcttag

SEQ ID NO: 181 - DNA, 360 bp, Arabidopsis thaliana
atgtcaactttcttgataaggatacttcttcctttgcttatcatagcaatgactcttcctcgacgttcagaggcagagtcggaacaatggtgcatagcggatgaacaaacgccagacgatgagttgcaagcagccttagactgggcttgcggaaaaggtggagcagactgcagcaaaatgcagcaggaaaaccagccttgcttcttgcctaacacaatcagagatcatgcctcctttgctttcaacagttactaccaaacttataaaaacaaaggtggttcttgttacttcaaaggagctgccatgatcactgagcttgaccccagccatggttcttgccagtatgagtataacccctag

SEQ ID NO: 182 - DNA, 995 bp, Oryza sativa
atgggggcggggaatggtgaagtgccgccggcgaggcggcggtgatggcggacgacgggaccacggtgttccgggggacggcgcagccgccggtgcgcaccacggttgcgctggcgctgtggctgggggccatccacttcaacgccttcctcctcctcgcctcgctcttcctcttcccccgccgcgtcgccgccatggtgctcgccacgcagctcttcttcatgttcgcgccggtcaatgatatgagcaggttggggcgcaagatcgccaggttcatcagcaagtgcgtgattgggtacttccccgtcacattacatgtcgaggactacaaggcttttgatcccaatagagcttacgtgtttggttatgagccgcattctgttttgcccattgcccttggggtccttttggagcttgttggattcatgccattaccaaagataaaggttcttgcaagcagtgcggtgttctataccccattcttgaggcaaatatggacatggttggggttggttcctgcatccaggaagaatttctactcctaccttaaagctggttatagctgcgtcatagtgccaggaggggtgcaggagatgcttcacatggatcatgattcagaggttgcttttcttaaatcaagaaaaggtttcgttaagatagctatggaaacaggttcccctttagtccctgttttcgctttcggacagagctatgtttataagtggtggagaccaggtggcaaattaattgtcaaaattgctagagcaattaaatttactccaattatgttctggggaaaatttgggactcccattccgtttgcgacacccatgcacgtggttgttggaagaccaattgaggttaagaaaaatgctcagcctacctttgatgagataaatgaagtccatgaacaatttgttgtcgcactacaagaactgttcgagaagtacaagactaaagctggatatcccaacctccatttaagagttctatag

SEQ ID NO: 183 - DNA, 1059 bp, Neurospora crassa
atggagcgggatagagccaacgcataccaggctgccggcatcagatttgcgccatttaacatacctttacagcgaagactccagaccctggcggttctgctacactcgctgattattgccactaccgtatccttctttttcttcctgtgcgccatccctttactctggccattggttatcccatatcttcttcatatgctgcttagcaaagcagcatccgatggaaagttgcgcttccgctcagaaagattccggcactcccgaatctggcacttctttgcagactacttcccggctaagctgcacaagacgcacgatcttcccgccgataggaagtacatctttggttatcacccccacggcatcatctcacatggcgcttacgccgcttttgccaccgaagccctcggtttctctgagaaattccccggaattaccaacagcctgcttaccctggacagtaacttccgcattccgatttaccgcgactatatccttagcatgggcctccgctccgtttcgaaggagtcaatcaccaatatcctcagccgcggcggtactgacggtcacggcgcgggccgtgctgttaccattgttattggtggtgctcgagaatcactggaggctcaacctggtacactccgtctcgtgctcggcgagcgcaagggcttcgtcaaggtggccatgcgcactggcgctgacatcgtccccgtgctcgcatttggcgagaacgatctctacgatcaggtcagtcccaagagccatccgtacttgcataggctccagatgtttgtgctccgaaccctcaagttcactctgccgtttttgcatggaagaggcattttcaactacgatgtgggcctgatgccataccgccggccgttgaacattgttgtcggcaagccgatccgggttacaaagagggccgagagcgacctggagacaagcgagattgaccagctacacggcctttatgtaaaggagctggaaaagatgtgggagcgctacaaggacgggtttgccccagaacggattgaggaaatgcagatactgaaatag

SEQ ID NO: 184 - DNA, 849 bp, Arabidopsis thaliana
atggcgtatttagctccgatttcttcatccttatccatattcaagaatccccaactctcaagattccaattttcttcttcctcaccgaacccacttttccttcgacctaggattcagattctgagtatgaccatgaacaagtcgccgtctttagtggtggttgcggctactactgcggcagagaagcagaagaagaggtatcctggagaatcaaagggttttgtggaggagatgaggtttgtggctatgagacttcatactaaagatcaagctaaggaaggtgagaaagagactaaatctattgaggaacgtcctgttgctaaatgggaacctactgttgaaggttacttgaggtttcttgtggatagtaaattggtttatgatactcttgaactgattattcaagactccaatttcccaacttatgccgagttcaagaacacggggctggaaagagcggagaaattatccacggatttggagtggttcaaggaacaaggttacgagattccagaaccaacagctcctggtaaaacatattctcaatatttaaaggaattagcagagaaggatcctcaagcattcatttgtcacttctacaacatctactttgctcatagtgctggtggacgaatgattggcagaaaggtggcagagcggatactcgataataaagaactcgagttctacaaatgggacggcgaactttctcaattgttgcagaacgttagggagaaactgaacaaggttgcagaggagtggactagagaagaaaagaatcattgtttggaagagactgagaaatcgttcaagtattctggtgagatacttcgtctcatattgtcctag

SEQ ID NO: 185 - DNA, 2217 bp, Arabidopsis thaliana
atggaagtctgcaattgtattgaaccgcaatggccagcggatgaattgttaatgaaataccaatacatctccgatttcttcattgcgattgcgtatttttcgattcctcttgagttgatttactttgtgaagaaatcagccgtgtttccgtatagatgggtacttgttcagtttggtgcttttatcgttctttatggagcaactcatcttattaacttatggactttcactacgcattcgagaaccgtggcgcttgtgatgactaccgcgaaggtgttaaccgctgttgtctcgtgtgctactgcgttgatgcttgttcatattattcctgatcttttgagtgttaagactcgggagcttttcttgaaaaataaagctgctgagctcgatagagaaatgggattgattcgaactcaggaagaaaccggaaggcacgtgagaatgttgactcatgagattagaagcactttagatagacatactattttaaagactacacttgttgagcttggtaggacattagctttggaggagtgtgcattgtggatgcctactagaactgggttagagctacagctttcttatacacttcgtcatcaacatcccgtggagtatacggttcctattcaattaccggtgattaaccaagtgtttggtactagtagggctgtaaaaatatctcctaattctcctgtggctaggttgagacctgtttctgggaaatatatgctaggggaggtggtcgctgtgagggttccgcttctccacctttctaattttcagattaatgactggcctgagctttcaacaaagagatatgctttgatggttttgatgcttccttcagatagtgcaaggcaatggcatgtccatgagttggaactcgttgaagtcgtcgctgatcaggtggctgtagctctctcacatgctgcgatcctagaagagtcgatgcgagctagggaccttctcatggagcagaatgttgctcttgatctagctagacgagaagcagaaacagcaatccgtgcccgcaatgatttcctagcggttatgaaccatgaaatgcgaacaccgatgcatgcgattattgcactctcttccttactccaagaaacggaactaacccctgaacaaagactgatggtggaaacaatacttaaaagtagtaaccttttggcaactttgatgaatgatgtcttagatctttcaaggttagaagatggaagtcttcaacttgaacttgggacattcaatcttcatacattatttagagaggtcctcaatctgataaagcctatagcggttgttaagaaattacccatcacactaaatcttgcaccagatttgccagaatttgttgttggggatgagaaacggctaatgcagataatattaaatatagttggtaatgctgtgaaattctccaaacaaggtagtatctccgtaaccgctcttgtcaccaagtcagacacacgagctgctgacttttttgtcgtgccaactgggagtcatttctacttgagagtgaaggtaaaagactctggagcaggaataaatcctcaagacattccaaagattttcactaaatttgctcaaacacaatctttagcgacgagaagctcgggtggtagtgggcttggcctcgccatctccaagaggtttgtgaatctgatggagggtaacatttggattgagagcgatggtcttggaaaaggatgcacggctatctttgatgttaaacttgggatctcagaacgttcaaacgaatctaaacagtcgggcataccgaaagttccagccattccccgacattcaaatttcactggacttaaggttcttgtcatggatgagaacggggtaagtagaatggtgacgaagggacttcttgtacaccttgggtgcgaagtgaccacggtgagttcaaacgaggagtgtctccgagttgtgtcccatgagcacaaagtggtcttcatggacgtgtgcatgcccggggtcgaaaactaccaaatcgctctccgtattcacgagaaattcacaaaacaacgccaccaacggccactacttgtggcactcagtggtaacactgacaaatccacaaaagagaaatgcatgagctttggtctagacggtgtgttgctcaaacccgtatcactagacaacataagagatgttctgtctgatcttctcgagccccgggtactgtacgagggcatgtag

SEQ ID NO: 186 - DNA, 1602 bp, Arabidopsis thaliana
aacactcgccactgtttcgaatagatggcttctatttcaaccccttttccgatttctctccacccaaaaaccgtacgatcaaagccgttgaaattccgagttttgacccgtccgatcaaagcttccgggtcagaaactcctgatctaaccgtagcgacacgaaccggatccaaagatctcccgatccgaaacataccgggaaactacggtttaccaatcgtaggaccaatcaaagaccgttgggattacttttacgaccaaggagctgaagagttcttcaaatcacgaatccgtaaatacaactccacggtgtacagagtcaacatgccaccgggagcttttatcgccgagaatccacaagtcgtggctttactcgacggtaaaagcttcccggttttattcgatgtcgataaagtcgaaaagaaagatcttttcaccggtacttacatgccgtcaacggaactaaccggaggctaccgtatcctctcgtacctcgatccatcggagcctaaacacgaaaagctcaaaaatctccttttcttcctcctcaagtcatctcgaaaccggatcttccctgagtttcaagctacttactccgagcttttcgattctttggagaaagagctttcccttaaagggaaagcggatttcggcggttccagcgacggaaccgcctttaatttcttggctcgagctttctacgggacgaatcccgcagatacaaagctcaaagccgacgctccgggtttgatcactaaatgggttttattcaatctccatccattactctctattggtttaccgagagttatagaagaacctctcatccatacatttagtctaccaccggcgttagtcaaatctgattaccagagactctacgagtttttcttagaatccgccggtgagattctcgttgaagccgataaattgggtatctcacgagaagaagctactcacaatcttctcttcgccacgtgcttcaacacgtggggtgggatgaagattttgtttccgaatatggttaaacgtatcgggcgggcgggtcatcaagttcataaccgattagcggaggagattagatctgtgattaaatccaacggcggagaactcacgatgggagcgattgagaaaatggagttaaccaaatcagtggtttacgaatgtctccggtttgaaccaccggttacggctcaatacggtagagcgaagaaggatctggttatcgaaagccacgacgcggcgtttaaagtcaaagccggtgaaatgctttacggttatcaaccgttggcgacgagagatccgaagatttttgatcgggcggatgagtttgtgccggagagattcgtcggagaagaaggagagaagcttttgaggcatgtgttgtggtcgaatggaccggagacggagactccgacggtggggaataaacaatgcgccggtaaggattttgttgttttggtggcgaggttgtttgtgattgagattttccggcgatatgattcgtttgatattgaggttggtacgtcgccgttaggaagctccgttaatttctcgtcgttaaggaaagctagcttttaggagccaagggtaaatttgtag

SEQ ID NO: 187 - DNA, 1602 bp, Arabidopsis thaliana; identical to SEQ ID NO: 186

SEQ ID NO: 188 - DNA, 435 bp, Arabidopsis thaliana
atgaagcaaccggcgacaccaaacgcggcggaggaaaccaaatcagaacaaaagcagaaatcgaagaaattcccaactccgacggaactaatctctcactaccagaaacgagggctggaaccagcagaagcttcaataaaggtcatcgaagatttacaaaacgcgctcgtccgagtagtttcgtcctccagaaacgcctcgagcaaggataagcttgtaaccgacgcgaggaaaatcgacgccattaacgggaggcttgccgtcgtcgacgcgaagctggagacgaaacctggatacgttgagactttcgcgttagggttagcttctggtgcgacacttaacggaattagcgccgtttggcctcacgttaccagaggcattggtcaaatttggtccgccgttaggatcgggacggatccttcatctacctcttag

SEQ ID NO: 189 - DNA, 435 bp, Arabidopsis thaliana; identical to SEQ ID NO: 188

SEQ ID NO: 190 - DNA, 993 bp, Zea mays
atggcggctctgccgttctcgacgcggcggcccttctcgtcgccgtgcttcatcctctgcttcctcctcggcttcgtcgccggcctcttccccttcgcgcaccgccacctccacctcgacctcgacctccgccacctcccgctcgcggaccctcctcccgctgcgccgacccagcgggccctagtccggccgccaccgacgacgaccctgatcgtcgtgacgccgacccgcgcgcgcccgctgcaggcgtactacctgcaccgcctcgcgcacaccctccgcctcgtcccgcagccgctgctctggctcgtcgtcgaccgcggcgccgccacgcgcgagaccgccgcgctgctccgcggctgcggcctcatgtaccgccacctgccctcccagtcccaccgcgacgcgcccggtgctcgccggacgaggcccgagcacccggcggcgcgcggcctgcgccagaggaacgcggcgctcgaccacatcgagcaccaccgcatccacggcctcgtctacttcgccgacgaggacaacgtgtactcccttgacctcttcgaccagcttcgcggcataaggagttttggcacctggccagtcgcaatgctgggcgtggggaagagcaagacacttgtggaagggccggtttgtgacaacagccaggtagtgggatggcacacgaacgagaggaccaagaggcaacgaaggtttcatgtcaatacttcgggctttgctttcaatagcagtatgctctgggacgccgacaagagggctcgtcaggcgtggaattacatccggctgctggacacggtcagagatgggtttcaggcaacaacatttatagagcagcttgtagaagatgaaactcatatggagggcataccaactggttgttcaaaaattatgaatgttaatcttcgcctagaagataaacatcttgtatatccgaaggagtggcagatgacagaaaacctggatgtgttaattcctctctag

SEQ ID NO: 191 - DNA, 408 bp, Escherichia coli
atgcgtcttcttcataccatgctgcgcgttggcgatttgcaacgctccatcgatttttataccaaagtgctgggcatgaaactgctgcgtaccagcgaaaacccggaatacaaatactcactggcgtttgttggctacggcccggaaaccgaagaagcggtgattgaactgacctacaactggggcgtggataaatacgaactcggcactgcttatggtcacatcgcgcttagcgtagataacgccgctgaagcgtgcgaaaaaatccgtcaaaacgggggtaacgtgacccgtgaagcgggtccggtaaaaggcggtactacggttatcgcgtttgtggaagatccggacggttacaaaattgagttaatcgaagagaaagacgccggtcgcggtctgggcaactag

SEQ ID NO: 192 - DNA, 408 bp, Escherichia coli; identical to SEQ ID NO: 191

SEQ ID NO: 193 - DNA, 408 bp, Escherichia coli; identical to SEQ ID NO: 191

SEQ ID NO: 194 - DNA, 1521 bp, Oryza sativa
atggagttcttcactgagtatggagaagcaagccagtaccagatccaggaagtcattggcaaaggaagttatggagtagttgctgctgcagtagatacccgcacgggtgagcgggttgcaatcaagaagatcaatgatgtgtttgagcatgtatcagacgctacgcgcatattgcgtgagatcaagctccttcgtctgctccgtcacccagacatagttgagatcaaacacattatgcttcccccttctcgaagggagttccaagatatttatgttgtttttgagctcatggaatcagatctccatcaagtcatcagagcgaacgatgacctcaccccggagcactaccagtttttcctgtaccaacttctccgtgctctcaagtacatccatgcagctaatgtatttcatcgcgatctaaagcccaagaatatactggcaaactcagactgcaaattgaaaatatgtgatttcggacttgcccgagcatcattcaatgatgccccttcagcaatattttggacggattatgttgcaacgaggtggtaccgagcacctgaattatgtggctcatttttctccaaatacactcctgcaattgatatttggagtattgggtgcatatttgctgaacttctcactgggagaccactatttcctgggaagaatgttgtgcaccaattagatattataacagatcttcttggaactccatcatcagaaaccttatccaggattcgaaatgagaaggccaggagatacttgagcaccatgcggaaaaaacatgctgtccctttctctcagaagttccgcaatactgaccccttggctcttcgtctgctagagcgtttactggcatttgatcctaaagatcggtcttcagctgaagaagctttggctgatccgtacttcgcaagtcttgctaatgtggaacgtgagccctcaagacatccaatctcaaaacttgagtttgaattcgagagacggaagctgacaaaagatgatgttagagaattaatttatcgagagattttggagtatcacccacagatgctgcaagagtatatgaaaggtggagagcagattagcttcctctatccaagtggggttgatcgcttcaaacgacagtttgcacaccttgaggagaactacagcaaaggagaaagaggttctccactgcagaggaagcatgcttctttaccgagggagagagtaggtgtatcaaaggatggttataaccaacaaaacaccaatgaccaagagaggagtgcagattccgttgcccgcactacagtaagccctccaatgtcacaagatgcacaacaacatggatctgctggccaaaatggtgtgacatccacagacttgagttcgaggagctatctgaagagtgcaagcattagtgcttccaagtgtgtcgctgtcaaggacaataaagaaccagaggatgattacatctctgaagaaatggaagggtcggtcgatggattgtctgaacaagtctccaggatgcactcctag

SEQ ID NO: 195 - DNA, 969 bp, Arabidopsis thaliana
atggtgatgagaaagctacagttaccgttgagccagacgcagaaggttaggtttgagagagcaatcgagcggcttcaatcactgtcgtcgtcggctaactctgacgcttctgttatcgtcaccgactctattcccgtcaaccatgacgatgccttcctcaagggacatggaacttccgaggtcgatggtgagttgctcgcgacggtctgtggagtagtggagcgtgtggataagcttgtctatgtacgcaccttgcgagccaggtacaagcctgaagttggggatattgtggtaggccgtgtcattgaggttgctcaaaaacgttggagagtggagctcaacttcaatcaggatggagtactgatgctttcttccatgaacatgcctgatggtattcagaggcgaagaacctctgtggatgaactcaatatgcggaatatctttgtagagcatgatgtcgtatgtgctgaagtacgcaactttcagcatgatggtagcttgcagttacaagccagaagtcagaagtatggcaagctcgagaagggacaacttctgaaggtcgatccttacttggttaagagaagcaaacatcactttcattacgtagaaagtcttgggattgatttgattattggctgcaatggtttcatatgggttggagaacatgtcgaagtgagagatcctatggcaatagatgatcagaaagatgaggaaatgatctcatcctcctccacaggaaaagagcaaagccatattccactcgagactcgacaaaccatatgcagaatcgggaatgcgatacgtgtcttgtctaatctaggcttcaccgtgacactagaagtaatcatggagactgttaacctcagtaactcaaagaatattgacatacatgatatgcttggatcagagtttcacgttgtggtagcagagaatgaagctgaaagaagacgtacaaagaggaaaaagtag

SEQ ID NO: 196 - DNA, 546 bp, Saccharomyces cerevisiae
atgagacagctaacagaagaagagaccaaggttgttttcgaaaaactcgccggctatattggtagaaatatttcttttttagtggataataaagaacttcctcatgtcttcagattacaaaaggatagagtatattacgtacccgatcatgttgcaaaattggctactagtgtagcaagacctaacttgatgtctctgggtatttgtttaggtaaattcacgaaaactggaaaattcaggttacatattacttctttgacagtattggctaagcatgccaaatataagatatggattaaacctaatggggagatgccattcttatacggtaatcatgtgttaaaggcacatgtgggtaaaatgtctgatgatataccagaacacgccggtgttattgtgtttgcaatgaatgatgtgccattagggttcggtgtcagtgcgaaaagtacttctgagtcaagaaacatgcaacccactggtatagttgctttcagacaagcagatattggtgagtatttgagagatgaagacaccttgtttacttag

SEQ ID NO: 197 - DNA, 546 bp, Saccharomyces cerevisiae; identical to SEQ ID NO: 196

SEQ ID NO: 198 - DNA, 753 bp, Saccharomyces cerevisiae
atgggattgactactaaacctctatctttgaaagttaacgccgctttgttcgacgtcgacggtaccattatcatctctcaaccagccattgctgcattctggagggatttcggtaaggacaaaccttatttcgatgctgaacacgttatccaagtctcgcatggttggagaacgtttgatgccattgctaagttcgctccagactttgccaatgaagagtatgttaacaaattagaagctgaaattccggtcaagtacggtgaaaaatccattgaagtcccaggtgcagttaagctgtgcaacgctttgaacgctctaccaaaagagaaatgggctgtggcaacttccggtacccgtgatatggcacaaaaatggttcgagcatctgggaatcaggagaccaaagtacttcattaccgctaatgatgtcaaacagggtaagcctcatccagaaccatatctgaagggcaggaatggcttaggatatccgatcaatgagcaagacccttccaaatctaaggtagtagtatttgaagacgctccagcaggtattgccgccggaaaagccgccggttgtaagatcattggtattgccactactttcgacttggacttcctaaaggaaaaaggctgtgacatcattgtcaaaaaccacgaatccatcagagttggcggctacaatgccgaaacagacgaagttgaattcatttttgacgactacttatatgctaaggacgatctgttgaaatggtag

SEQ ID NO: 199 - DNA, 456 bp, Arabidopsis thaliana
atggagtcatcatcgtcgacttttctcaccacgacaagcttagacaagaaaaaaccatctccggtttcaagaaaatcaccaaagcaaaagaagaagacgacttcgacgaataaacccatcaaagttcgttacatctcaaaccccatgagagttcaaacttgtgcttctaagttcagagagctcgttcaagaactcacaggccaagacgccgtcgatcttcaaccggagcccatctattccccttcctccgacgaccacaacctttctccaccggcggagaatcttgcgccacgtgttcttcatcaggagccgttcggtgagagagacagtgattgttatgagccgttgaatgcggaagacatgtttttacctgatcagatgtcggcaggtttttctgggtttttctctaatgggttttacaatgtcaatgactttggaagcatcgattctatgtag

SEQ ID NO: 200 - DNA, 456 bp, Arabidopsis thaliana
atgtggttcgccggcggtggtggtggactgaggaagctctgcagagcgtcggctattttcgataatgagataagttataactctttgttggtgagatacatgtccagagaacgagctgtgaacgtccggaagataaaccctaaagttccgatccaagaagcttacgccatttctaattctctctacgatctctttaagctacatggtcctctctccgttcccaacacttggctccgcgctcaggaagctggggttagtggactgaatagcaaaacacatatgaagctattgttgaaatggatgagagggaaaaagatgctcaagttaatctgcaaccaagttggttcctccaaaaagtttttccacactgttttacctgaagatcctctacaagaacaaccggctgctccgattgagaacaagaaacaagccgtcaagaagaaacgaagcaaatag

SEQ ID NO: 201 - DNA, 1167 bp, Arabidopsis thaliana
atgctttcttcaatcaaaccatcttcgtcttccttctccaccgctatctccggcagcgtaaggcggtcaattcctacaaagctcaagttttctcctttactcatcatcaaaaactgccataaccaaagctttaacgctaatgttgtctcccatcaaaagcctctacacatttcatctgcttcgaatttcaagcgtgaggtcaaagtcgaagcttacgaggccgatcgttcccgtccactggacatcaacatcgagcttcccgatgaacaatccgcgcagaaactgaaaatcggaatctacttcgcaacttggtgggcacttaacgttgtcttcaacatctacaacaagaaagtcctcaatgcttttccttacccgtggcttacttcgacgttgtctctcgcttgtggttctttgatgatgcttgtctcttgggctactagaatcgcagatgctcctaaaactgatctcgagttctggaaaactctgttcccggtcgctgtagcacacacgataggacacgttgcagcaacagtgagtatgtcgaaagtagcagtttccttcacacacatcattaaaagtggtgaaccagctttcagtgtcttagtctcaagattcttcatgggagagactttccctcttcctgtctatctctctctcttaccaatcatcggaggctgcgctctcgcggccatcaccgagcttaacttcaacatcactgggtttatgggggcaatgatatcgaatttggcatttgtgttccggaatatcttttcgaagaaagggatgaaagggaagtcagtgagcggaatgaactactacgcttgcttatcgatgatgtctcttgtgatcctcactccattttctattgccgtggaaggtcctcaaatgtgggctgctggttggcaaaatgcggtttctcaagtcggaccaaactttgtctggtgggtagtggcacaaagtgtgttttaccatttgtacaatcaggtctcatacatgtcattagaccagatttcgccgttaactttcagtatcggtaatacgatgaagcggatttccgttattgttgcatcgatcatcattttccataccccgattcaaccggttaatgccctcggtgctgccattgcgatttttggaactttcctctactcacaggcgaagcagtag

SEQ ID NO: 202 - DNA, 381 bp, Saccharomyces cerevisiae
atgctcatgcactttattccccgaagatcttcgaaagcagttcaatttaattggctggagattggcgtttggagaggcggtgtgtatgtcaagaaaggcattgtcaacgcccggacaaataattctaatttttacaagatgccggtggtgttcggcattgtaaaaggtatgggtgctttgtgcgtccatgcatggggtatggggtatgggggcatcatcgattgttctccggtaacggaacacggcaatatttctgttctacagcttgaatacatgccgtggatctgtttatcaaagataatgtcatgtagcgtggcaagtcgacacagcaacgtgtggataatggatgagacgatagcgccactggttggttgtttgtag

SEQ ID NO: 203 - DNA, 879 bp, Zea mays
atggcgggcggaagcggcgaggcggctatgtctccgccgtcctctagtgccagcgggaagcgcgggcgggacccggaggaggacgtgtacgtggacaatctccattcccacaaacggtatctcagcgagataatggcatccagtctgaatggactgtctgttggggattcactgcctgacaacatcatggagtcccctgcaaggtcagagactgcttcctgctacagggatgagatattatcccaatactcaccgatgtcagaagactcggatgattaccggtgctatgacactcaattaaaccccagtgggaatcatcctgatgcgatgatcagcccttcaactagcccaatgtcatctcctcatcgacaccagagaccacaatcttctttgttaccttcaaacccataccctctcccaagctgctccctttcgtcagtagtctgctctcatgctcggcgtggctccgataatgaaggccggttcccgtcctcgccaaatgacatgtgccatgtagcagatttgaggcgaacagcactactgaggtcagtgcaaatgagggtgcagggaccccattcgtatgacctatcattcggcatcagacaaggacaagatcatgcacatgagcatgaaggggaacatgaccatgagcatgaacatctagaggacttggaagggacagaaggatcatcttgcaataagtcaatcgttaacgaagtcacgtacaaccagagacgtgaccatgattttggtcggtcagagcacgagatagattacatcaacaacagcacatcagatgattgtgtaagtgatctaaaatttaagcaagaagataagagccatagtaaatttgatatccctatgcacaaaaattcatag

SEQ ID NO: 204 - DNA, 444 bp, Arabidopsis thaliana
atgagctcaatgatggagactctccagattcgtaaacccacttccctccccgtttctcaacgccctaatgcagcagccaccgccgacgatgagcctggtctcatccgccgtcgtctctcttctctatcactcaacctctcaaaccaaccagcagcgatcgcagctagattcccgagatccaaatctgtttccgccatgggagaacaagcaggaagctctgtgaaagaatggtgggaatggggttggtcatggatcctttcaagaaaacctatattcatcagagatcttgagcttaacaaagacgaagctaaatcgattggttcacaaaacagaggaagtataatgcacgttttcttcaaactccgatctcagatccgtaatttcatgggaccttcttcagaagattctcttcctctttcttgcaaatacaagcgtcaacgatag

SEQ ID NO: 205 - DNA, 627 bp, Arabidopsis thaliana
atggatcaaaacgtaccaataagcaagaagctatggaacatcgtacgttttctcttgtacatgatccgcaaaggcgtctcaaaaaacaaactcatcgctgacttcaacgccactctcaaacgtggcaagaacctcatgttccaccaacgtcgtcgtgtccacgccggttccaccgcctcagccgctctaaacgctacttcagccaccgcgtcatcgcgacaagagtacgagtttagctgcagcaacactccaaactattcattccctttctctaatatggctttcatgaggaaaaagagtcacaataatctcttcacgtgtggtcaaacgcctcagacgcttgacgacgacgtagccgccgctagagccgttcttgagcttcttaacggcgttggagagaaaggaaacgtcacgccggcagatttaacggtggctttgtctccttatttccccggttttggacagactccattggttagaccgttaagagtaacggactcaccgtttccgttaacgccggaaaatggtgatgtggctaatggacacgttgacaaagcagctgatgattttataaagaagttttataagaacttgaatcagcagaaaaaaatgattgagttcagctag

SEQ ID NO: 206 - DNA, 1242 bp, Arabidopsis thaliana
atgtcagaaaactgcaattctcgccatttctcatggctcatgaaatcttgtttaccaaatccctccgacgccaaatcactagtccagatccaccaaccgtcgtccacggcggcgaattcttcagctacaatcgcttctctacctgacgatttactcctcgaatgtatctcaagagtcccttcctcttcaattccttctctcgccgtcgtttgtcgccgttggtctcgtctcctccactctccttactttctccatctccgtcgtcgtttaggtttgctccgacattctctcttcgcgatatccaccgtcgattcaggacttttcgccgcggatttgcagtttcagtccgagattgcgtcgtggaaagtgtctcttgcggtttcgagtaggtctgttggcgttgacggtagttatggaagtttatctcatgctcgcgcggcggcgattggacctagggtttatgttgttagtagaaatgctgttttgagatacgattcgtggatgggaacgcttaatttgagatctccgatgattttccctcggaagaaattcgcaatcgcggttgtttctggtaagatctacgttgctggaggtggtggtggttcggaggttgcggcggcggtggaagagtatgatccggagttgaatcggtgggaagttgtgactcaatcggcgaggaagagatacggttgcatcggagcagccgttgacggagttttttatgtgatcggtggattgaaaattgggaatgagacctcacgcgcggtggcggcgcgtgcttatgcgagctctatggatcttttcgatgtggagtcgcgtcagtggttaaggagtcgttcggttcctggtggtggatgtgtagtggcggcgtgtgcggcggttggatatgtgtatgtgctaaccagtcacgcggtggagctttcgttttggcgatttgatgcgcgtcgtcgtggtggaaacagcgggtttggagaatggcagaggctgaaaagtccgccgttaccggcacaggtgcggttagatggaacggtgaggtttagctgcgtcggagtggaagataaagtggcggtggttcaggtggtgggatgcattgacgatttgcttcggcggagtgggaggggtgagagagggattagagaaagccttgtgttgctgtatgatacgacggagggagagtggaggagagcggcggatttacctgagatgattacacgcgccgcctgtgcgtgtgtggagtggtag

SEQ ID NO: 207 - DNA, 1185 bp, Saccharomyces cerevisiae
atggctgaaagtaccacgttagaaactattgagatacacccaattacttttccacctgaagttcttgcgagaatatctccagaattgtctttacaaagacacttatccctaggaatcaggccatgtctaagaaaatatgaagaatttagagatgttgctatagaaaataatactttatcgcgttatgcggatgctggtaatatagacactaaaaacaacattttaggctcaaatgttttgaaaagtgggaaaaccatagtcataacttctattacgggtggaataatagaagaaactagcgccgcgattaaagatttggatgatttcggtgaggaagaattgttcgaagtgaccaaagaggaggacataattgcaaattatgcttctgtctatccggtggtggaagttgaaagaggtagagtgggcgcttgcaccgatgaagaaatgactatatcacaaaaactacacgattccatattgcactctaggatattgcctaaaaaagccttgaaggtaaaagctggtgttcgtagtgcgaatgaagacggtacgttttccgtcttgtatcccgatgaattagaagatgatacgctgaatgaaacaaacctgaaaatgaaaagaaaatggtcatacgttttgtatgcgaaaattgtagtcttgagtcgcactggtccagtcttcgatttgtgttggaattctttgatgtacgctttacagagcgtaaagttacctagagcatttatagatgagcgtgcgtccgatttaagaatgactataagaacaagaggaagaagtgccaccataagagaaacgtatgaaattatttgcgaccaaactaagtcagtaccgttaatgataaacgcaaagaatattgcatttgcttcaaattatgggatagtggagttagaccccgaatgccaattacaaaactctgataactctgaagaagaggaagtggacattgatatggataaattgaacactgtgctaatagcagacctagatactgaagcggaagaaacaagtatacacagtacgatctccatcctcgctgctccttcaggtaactataagcaattaacattagtgggaggaggcgctaaaataacgccagaaatgataaaaagatcattgttgttatctagggttagagcggacgatttgtcaacaagatttaacatatag

SEQ ID NO: 208 - DNA, 1185 bp, Saccharomyces cerevisiae; identical to SEQ ID NO: 207

SEQ ID NO: 209 - DNA, 723 bp, Saccharomyces cerevisiae
atgtctacgttcatattccctggtgatagctttcctgtagaccctactacacctgttaaactgggccctggcatatattgtgaccccaatactcaagaaatacgacctgttaatacaggtgttttgcatgtttccgctaagggtaagagtggtgttcagaccgcatatatagactattctagtaagagatacattccatctgtaaacgattttgtaatcggtgtcattatagggacattttcagatagctataaggtttcgttgcaaaatttctcctccagtgtttcactatcgtatatggcttttcccaatgcttcaaagaaaaacaggccaactttgcaagtgggagatctagtgtatgcgagagtttgtaccgcagaaaaggaactagaagccgaaatagaatgttttgactcaactacaggacgcgatgctggtttcgggatattggaagatggtatgatcattgacgtgaatttgaatttcgcacgccagttgcttttcaataatgacttcccgttattaaaagtgttggctgcacataccaagtttgaagtcgccattggtctcaatgggaagatctgggttaagtgcgaggaattatctaacactttagcttgttatagaaccataatggagtgttgtcaaaaaaacgacacggcagcgttcaaggatatagcaaaaagacagtttaaagaaatacttacggtcaaggaggagtag

SEQ ID NO: 210 - DNA, 723 bp, Saccharomyces cerevisiae
atgtctacgttcatattccctggtgatagctttcctgtagaccctactacacctgttaaactgggccctggcatatattgtgaccccaatactcaagaaatacgacctgttaatacaggtgttttgcatgtttccgctaagggtaagagtggtgttcagaccgcatatatagactattctagtaagagatacattccatctgtaaacgattttgtaatcggtgtcattatagggacattttcagatagctataaggtttcgttgcaaaatttctcctccagtgtttcactatcgtatatggcttttcccaatgcttcaaagaaaaacaggccaactttgcaagtgggagatctagtgtatgcgagagtttgtaccgcagaaaaggaactagaagccgaaatagaatgttttgactcaactacaggacgcgatgctggtttcgggatattggaagatggtatgatcattgacgtgaatttgaatttcgcacgccagttgcttttcaataatgacttcccgttattaaaagtgttggctgcacataccaagtttgaagtcgccattggtctcaatgggaagatctgggttaagtgcgaggaattatctaacactttagcctgttatagaaccataatggagtgttgtcaaaaaaacgacacggcagcgttcaaggatatagcaaaaagacagtttaaagaaatacttacggtcaaggaggagtag

SEQ ID NO: 211 - DNA, 672 bp, Saccharomyces cerevisiae
atgagcgtccaagcagaaatagggatattagatcatgtagatggttcatctgaattcgtatcacaagacaccaaggttatttgttctgtaacaggccctattgaaccaaaagcaagacaagaactgcctacacaattagcattagaaattattgtacgtcccgcgaaaggggtggccacaacaagagagaaggtactcgaagataaattacgggcagttctgaccccactcatcactcgtcattgttacccaagacagctctgccagataacttgtcaaattctggaatctggtgaagatgaagccgaattctccctgagagagctaagttgttgtataaatgcggcatttttggctttagttgatgcaggaattgccttaaatagtatgtgcgcaagcatccctattgcaataatcaaagacactagtgatatcattgtcgatcccactgccgagcaattgaagatttcgctctctgtccacactttagctctggagttcgtcaatggcggtaaagtcgtgaaaaacgttttattgttagacagcaatggtgattttaatgaagatcaattgttcagtttactggagctgggtgagcaaaagtgtcaagaacttgtcacaaatataagaagaataatacaggacaatatatcacctcgtctagttgtatag

SEQ ID NO: 212 - DNA, 672 bp, Saccharomyces cerevisiae; identical to SEQ ID NO: 211

SEQ ID NO: 213 - DNA, 753 bp, Saccharomyces cerevisiae
atgaatgttcaagacagaaggaggttattaggccctgctgctgccaagccaatggcgtttagcaacactactactcatgtgccagaaaagaaatcaacagatttgacacctaaaggcaatgaaagtgaacaggaactttctctacataccggtttcatcgaaaactgcaatggatctgcattagtagaagctagaagcttaggacaccaaacatcgctcattaccgctgtctatggaccacgctccattagaggatccttcacatctcaaggtactatatctattcagttaaagaacggtcttctggaaaaatataacacaaatgaactgaaggaagttagcagctttttaatgggcattttcaattcagtagtaaacctatctcgctaccccaagtccggcatcgatatcttcgtttatttaacgtatgataaggatcttacaaataatcctcaggacgacgattcgcaaagcaaaatgatgtcttctcaaatatcatctctcataccacattgtatcactagtataacgctagccttagctgatgccggcatcgaattagtggatatggcaggtgccggtgaggccaatggcactgtcgtatcattcatcaaaaatggagaggaaattgtaggtttttggaaggatgatggtgacgatgaagatcttttggaatgccttgatcgttgcaaggagcaatataaccgttatagagatttaatgataagctgtttaatgaaccaggaaacttag

SEQ ID NO: 214 - DNA, 753 bp, Saccharomyces cerevisiae; identical to SEQ ID NO: 213

SEQ ID NO: 215 - DNA, 1194 bp, Saccharomyces cerevisiae
atgtccaaagtgtttattgccacagcaaatgcaggtaaagctcatgacgctgatattttctcggtttctgcttgcaattcatttacggtaagttgttcaggtgacggttacttaaaggtgtgggataataagctgttagataatgaaaatccaaaagataagtcatattctcactttgtccataagtccggattgcaccatgtcgatgtcttgcaagctattgagagagatgcatttgaattatgccttgttgctaccacttcattttctggcgatttactcttctatcgtatcactagagaagatgagactaaaaaagttatattcgagaaattggatcttctagactcagacatgaaaaagcattccttttgggcattaaaatggggtgcctcaaatgacagactactttcccataggctggttgctacagacgtcaaagggaccacttacatttggaagtttcacccgtttgcagatgagtcaaattctttaacactaaattggagccccacgttagaattacaaggcactgtcgaatcgcctatgactccaagtcaatttgccacttctgtggatatctctgaacgaggactaattgccacaggttttaataatggaacagtacaaatttcagaactatctacattacgcccgttgtacaattttgaatctcagcattctatgattaataattcgaattccatcagatcggtgaaattttctcctcaaggatccttattagccattgctcacgattcaaattcatttggttgcatcactctatatgaaactgaatttggtgaaagaataggctccttatccgtaccaacccatagctcgcaggcaagtctgggtgaatttgcacattctagctgggtcatgagtctatcgtttaatgattctggtgaaacattatgcagtgccggatgggatggtaaattgagattttgggatgtaaaaacaaaggaaagaatcactacattgaatatgcattgtgatgatattgaaattgaagaggatatcttagctgttgatgaacatggagattctttagctgaacctggtgtctttgacgtgaagtttttgaaaaaaggttggagatctggtatgggagctgatttaaatgaaagtttatgctgtgtttgtttagatagaagcatcaggtggtttagagaagctggcggtaaatag

SEQ ID NO: 216 - DNA, 1194 bp, Saccharomyces cerevisiae; identical to SEQ ID NO: 215

SEQ ID NO: 217 - DNA, 1875 bp, Zea mays
atgggcagcggggtccgggcgctgatgcgccggaagcaggtagactccgagcggacgcgcgccgccggcagcgcccaccagctccgcaaggagctctccgtcacccagctcgtcgccatcggtgttgggtcgacgattggagctggcgtctacgtccttgttggcacagttgcgcgggagcattccgggccggcattgacgctttcatttctgatagccggaatagcagctgcgctttcagccttctgctatgcggagctggctagccgttgcccttcggcaggaagcgcctatcattattcgtacatctgcgttggcgaaggagttgcatggttgattggctgggctttgatacttgaatacacgattggtggatcagccgttgcccgtggcatttctcctaatctagccttattttttggaggacaggatagtctgccatggattttagcacgacatgagatcccatggcttgatgtcgttgtagatccttgtgcttctttcctcgttttcgtcgtcactggccttctctgtgtggggataaaagagagttcatttgtgcaaggagttgtgacggtcttaaattgctttgtgatgttatttgttatcatagccggtagctacatcggcttccaaacaggatgggttggctacaaggttgctggcggatttttcccttatggagcgaatggaatgcttgccgggtcagcaactgtcttcttcgcctacataggatttgattcagttgccagcacggctgaggaggtgaaaaatccacaacgagatctgccactgggaatcggaacagcattgtcgatttgctgttccttgtacatgttggtttcagttgttattgttggtctggtaccatactttgctatggacccagacacccctatttcatctgcttttgccaaacatgggatgcactgggcaatgtatcttgtaacaactggtgctgttcttgctctctgctcaaccttgatgggatctatattgccacagccaagaatattgatggccatggcacgagatggcctgctaccatcattcttctctgatgtccataagacgacacaagttccagtcaaaagcacagtagtgactggcatctgtgcagctgctcttgctttcttcatggatgtctctcaactggctggaatggttagtgtaggcacgctactcgcgttcactatagttgctgtgtccatcttgattcttagatacgttcctccagatgaggtacccctcccatcttccctgcaagcatcattccgcttgagccaagaaaatgacgaggaaaagctgaggggtacccttggagatgatgatcatgagcaaggctcagctgaaataagtgatgttgtagtagaaccaatcactgaccccctgatcgagaagcagctatacgcaagcaatttgagtgaggcaaaacggcgtaagaccgcggcatgcagcatcacatctgtttgcataggggttctgatcctcacgacgtcagcctcggcaacattcttgcccttcccggtgagatgctccgtttgtgttttgggtggcatgctcctcctagctggtctgggcatgctctgctggattgaccaagatgatgggaggcactcctttggccactccggaggattcatctgtccgtttgttcccttgctgccggtaatgtgtatcctcataaatacatacttgttaataaatcttggtggcggcacgtggatgcgagtgggggtgtggctagtgatgggggtgttcgtctacattttctatggccgcacccacagctcgttgacggatgtcgtgtatgtccctgtggccgaggcgaatgagatatacgggtcatcctcttcgttagggtttgtggcgtag

SEQ ID NO: 218 - DNA, 1434 bp, Zea mays
atgctctccgtcttctgctacaccgaattcgccgtcgagatccccgtcgcaggtggatcgttcgcgtacttgcgggtggagctcggcgacttcatggcgttcgtggcggcgggcaacatcctgctggagtactgcatcggcggcgcggccgtggcgcgcgcctggacgtcctacttcgccacgctgctgaaccaccagcccagcgacttccgcatccacgcgtcgtcgctctccgccgactactcggagctggaccccatcgccgtcgtcgtcatcgcgctcgtctgcatcttcgccgcggccagcaccaagggcacctcccgcttcaactacgtcctctccattgtccacatcgccgtcatcgtcttcatcatcgtggccgggctcaccaaggccgacgctgccaacatgcgggacttcatgcccttcggcgtccgcggcatcttctccgcgtccgccgtgctcttcttcgcctacatcggcttcgacgccgtgagcaccatggcggaggagaccaagaacccggcgcgggacatcccgatcggcctcgtgggcgccatgacgctcaccaccgcgctctactgcgtgctcgccgtcacgctctgcctcatgcagccgtacgcgtccatcgacaaggacgcgcccttctccgtggcgttctcggccaggggcatggactgggccaagtacatcgtcgccttcggcgcgctcaaggggatgaccaccgttctgctggtcagcgccgtcggccaggcgcggtacctcacgcacatcgcccggacgcacatgatgccgccgtggctcgcgcaggtgcacccgcggacggggacgcccgtcaatgccaccgtcgtcatgctcgtcgccaccgcgatcatcgccttcttcaccgaccttggcatcctctccaacctgctctccatctccacgctcttcatattcatgctcgtcgccgtcgcgctgctggtacgacgctactacgtcgccggggagaccacggtcgccaaccggaacaagctggcggcgtgcatcatcgccatcctggcgacgtcgtcggccacagcgacgtgctggggggtgaacgtgaacgggtgggtgccgtacgcggtgacggtgcccgcgtggtttgcgtcgacggtgtgcctgtgggcgttcgtgccgcaggccagggcgcccaagttgtggggcgtgccgctagtgccgtggctgccgtcagcgtccatcgccatcaacgtcttcctcctgggatccatcgactacaagtcgttcatgcgcttcggcttctggacgggcgggcttctcgtttactacctcttcatcggcctgcacgcgtcctacgacacagccaaggcgctcgccgccgagtctgccatggccaaggtggaggatggcgacggcaagccggcacgaggcgccgtccataacggtgagtactag

SEQ ID NO: 219 - DNA, 510 bp, Oryza sativa
atggctctcgtggagggaaacaacggcgtgtcggggggagcggtcagcttcagcgaggagcaggaggcgcttgtgctcaagtcgtgggccatcatgaagaaggattccgccaacattggactccgcttcttcttgaagatcttcgaggtcgcgccgtcggcgagccagatgttctcgttcctgcgcaactccgacgtgccgctcgagaagaaccccaagctcaagacccacgccatgtccgtcttcgtcatgacatgtgaggccgccgcgcagctgcggaaagccgggaaggtcaccgtgagagacaccaccctgaagaggctcggcgccacgcacttcaagtacggcgtcggagacgcccactttgaggtgacgaggttcgcgctgcttgagacgatcaaggaggcggttccggtggacatgtggagccccgcgatgaagagcgcgtggagcgaagcctacaaccaactggtcgcggccatcaagcaggagatgaagcctgctgagtag

SEQ ID NO: 220 - DNA, 501 bp, Oryza sativa
atggctctcgtggaggataacaatgccgtagcggtgagcttcagcgaggagcaggaggcgctggtgctcaagtcatgggcgatcttgaagaaggattccgccaatattgccctccgcttcttcttgaagatcttcgaggtcgcgccgtcggcgagccagatgttctcgttcctgcgcaactccgacgtgccgctcgagaagaaccccaagctcaagacccacgccatgtccgtcttcgtcatgacatgcgaggccgccgcgcagctgcggaaagccgggaaggtcaccgtgagagacaccaccctcaagaggctcggcgccacgcacctcaagtacggcgtcggagacgcccacttcgaggtggtgaagttcgcgctgcttgacacgatcaaggaggaggttccggcggacatgtggagcccggcgatgaagagcgcgtggagcgaagcctacgaccacctggtcgctgccatcaagcaggagatgaagcccgcggagtag

SEQ ID NO: 221 - DNA, 885 bp, Arabidopsis thaliana
atgtcgccgccgccgcaacgtatcggcttgccatggcctgagcttaacgatggtttggcatacaaggatgccatctcttcttctgaatcagagttaacgacggtgtcagaattctacttcaccaaatacaagagttcagctccattgctagggtggattcaacgaatccaaaacggacagatacaaattgacggtgaagttgtaaaagatcccaacacacttcttaggagtggttcgaaattagtttacagtaggcttccttggaaggaacctgacacgccatactcgcttgaagttttgtatgaagatgatgatttgatcgctttaaacaagccttctggacttcaagtattgcccggaggacttttccagcaacggactgtgttgacgcagctgcagtggtgttttggtaaaaatgactcttacatcggatcgcgtgaatcaccacatcctgtccctgtacatcgactgggtagaggaacttcaggtatacttctctgtgcaaagaccaagctggcaaaaacgaaacttgcagcgtattttgctgagggaacatctcttgtcggctccggcaacctggatcaagagtgtggaacaggaagaaaactatcaaagatatatcgagcactagcagatggtatagttgaagaagacgaggtagtaatcaaacagcctataggagtggttcgatatcctggggtcgcacaaggattatatgttgcttctccggaagggaaacctgctttcagtaaagtatttgttctggagagggacagggaaaaaaattgctcgcttgttaaggtagagatacaatctggaagaccacatcaaatccggattcatcttgcatacatgggacatcccttggggaccctctttatgtag

SEQ ID NO: 222 - DNA, 312 bp, Zea mays
atgatgatgcgaggtggaaggctcacgggtttgacctctcaggttctgaggtgcttcagcacggagatatttgtcagcagattatcattctatacgacagaggaagaattcaaagatattttttcaccatttggcaccgtagaggaagctcgacttatgagagaccaccaaactggaaggatgaagggatttggttttgtcaaatattcatcgcaagcagaggcagagaaagctgtcaaggcaatggatggcaggattctacgtggaagattgatctttgtggagatggcaaaaggacacgaaagcaagtag

SEQ ID NO: 223 - DNA, 1542 bp, Agrobacterium tumefaciens
atggcttcctctatgctctcttccgctactatggttgcctctccggctcaggccactatggtcgctcctttcaacggacttaagtcctccgctgccttcccagccacccgcaaggctaacaacgacattacttccatcacaagcaacggcggaagagttaactgcatgcaggtgtggcctccgattggaaagaagaagtttgagactctctcttaccttcctgaccttaccgattccggtggtcgcgtcaactgcatgcaggccatggcggaatttgttatcacgatgcccgatgtcggtgaaggcgtggcggaagccgagctggtggaatggaacgtcaagccgggcgatatcgtccatgaggacatggtgctggccgctgtcatgacggacaaggcgacggtggaaatcccctcgccggtggcggggatcatcacatggctcgccgtgactgtcggaaacacggtgccagtgaaagcaccgctcgtccgtatcgaaaccgatgtcgctgccgctgcacccaatggcagcgcgccggaggcggaggcgccaagccggatgacggaagaggaagcgcctgccgacatgacggaagcgccgccaccagtcgaaacccagccggcggctcgccagaccgaggaggcgccgtctgcgcccgtagccgagccgcatcataaaccgctggcatcccccgccgtccgccagcgtgccgacgatctcgatatcgatctcatcaaggtcaagggaacggggcccgacgggcatatcacccatgccgatctcgatgggtttttaacggtacgggcacggccggaacgtcccgagccgatgacgccgcacgatagcgcggtcgaggaagtgaaggtaacagggctgcggcgcaagattgccgagaagatggtgctctccgtctcgcgcattccccacatcacctatgtcgaggaaatcgacgtgacggagttggaggatttgcgcgcgacgatgaacggtaaccgtcgttccgggcagccgaaactgacgatcctgccgtttctgatgcgtgcgcttgtgaaagccgtagcggatcatcccggcatgaacgcgattttcgatgacgaaaaaggcgtcgtcagtcattacgaagcggtccatatcggcattgctacgcagacgcccgcgggcctgactgttccggtcgttcgccacgcggaaacgctcggcctctgggactgtgcggaagaagtcgcgcgcgtcgcggaagccgcccgcaccggcacggcgcatcgggaagagctgatgggttccaccattaccatcagttcgcttggagccttgggcggtgtggtttcgacgcccatcatcaatcatccggaggtggcgatcatcggcgtcaacaagatcatgacgcggccggtctgggacgggaaccggtttgtgccgcgcaagatgatgaacctgtcttcgagtttcgaccatcgtgtggtcgatggctgggatgccgcggtcttcattcaggccgtcaaagcgctgttggaaaagccggcactgattttcatcgagtag

SEQ ID NO: 224 - DNA, 1542 bp, Agrobacterium tumefaciens; identical to SEQ ID NO: 223

SEQ ID NO: 225 - DNA, 1242 bp, Nicotiana tabacum
atggccaccatctcaaacccagcagagatagcagcttcttctccttcctttgctttttaccactcttcctttattcctaaacaatgctgcttcaccaaagctcgccggaaaagcttatgtaaacctcaacgtttcagcatttcaagttcatttactccttttgattctgctaagattaaggttatcggcgtcggtggcggtggtaacaatgccgttaaccgtatgattggcagtggcttacagggtgttgacttctatgctataaacacggatgctcaagcactgctgcagtctgctgctgaaaatccacttcaaattggagagcttctgactcgtgggcttggtactggtggcaatcctcttttaggggaacaggcagcagaggagtcgaaggaagccattgcaaattctctaaaaggttcagatatggtgttcataacagcaggaatgggtggaggtacaggatctggtgctgctcctgttgtggctcaaatagcaaaagaagcaggctatttgactgttggtgttgtcacatacccattcagctttgaaggacgcaaaagatccgtgcaggctctggaagcaattgaaaaacttcagaaaaatgtcgatacccttatagtaattcccaatgaccgtctgctagatattgctgatgagcagacaccacttcaagatgcttttcttcttgctgatgatgtattacgtcaaggtgtccaaggaatttccgatataattactatacctgggcttgtaaatgtggattttgccgatgtaaaggcagtgatgaaagattctggaactgctatgcttggagttggggtttcatcaagcaagaaccgtgctgaagaagcagccgaacaagcgactcttgcccctctaattggatcgtctattcaatctgcaactggggtagtatataacattacgggaggaaaagacataactttgcaggaagtgaatagggtgtctcaggttgttaccagtctggctgatccctccgctaacatcatatttggtgctgttgtggatgagcgctacaatggcgaaatacacgtgaccataattgcaactggttttacccagtcttttcagaagactcttctctctgacccacgaggtgcaaagcttgctgataagggcccagtaatccaagaaagcatggcatcacctgttaccctgaggtcatcaacctcgccttcgacaacatcacgaacacctactcggaggctgttcttttag

SEQ ID NO: 226 - DNA, 633 bp, Zea mays
atgaccagcgtgtggaagaccaaggttctgcctggcctcaacaagatctttgacaaggatggcaagaaggctgcagctgcaggcttcttgaagtccttcaacaaggaggagattgacaaggagattgaggacaagaagacagagctggagcccaaggtcgtggaggcctacgaagcatctcctcctgaggtcaaggctctgttcaaggataagaagccagtcaaggtcagcaagaagaactcggctgcagtcaccaagttcctcgatgagctggctaagattgacttccctggagccaaggtggtgagcgaggcggtggccaagtccggcacctcgcccctgcttccggcgatcaccttcatcttggacaaggtcgcaccgtttatccccaaggaggagcccaaggcggagccggcggcggaggccacctcccgggaagtcgccgtggaggagaagaaggaggaggccgagccagctgcagcgacggaggcggcaccggcgccggcagagacaccgtcggaggaggcggtggtagaggagaagaaggaagaagagaagaaggaagaggaggataagccggctgccgaagaggcggcgccgccagcagcagcagctgctgctgaggagaagtag

SEQ ID NO: 227 - DNA, 1176 bp, Arabidopsis thaliana
atggttcagatttccgatcttccacgggatttgacagaggaggtgctctctaggattccggtgacatctatgagagcagtgagatttacttgcaaaaagtggaacaccttatcgaaagatcggagctttacaaagaagcacctgcgtggagcaagagcagcagcaaagaagaagcagacgaaggagtttcaggtgatcatgatgattcaatttagggtttatttatacagcgtcaacctccttaatccatcaatagagcgtataggtaaacttattagcctagacgttgaagatcatgtcgacatatctaaaatctttcactgcggcggtttattgttatgtatcaccaaagacatatctaggcttgtggtttggaacccttattctgggcaaacaaggtggatcaaacctagaaattcttaccacagattggacaggtacgctttaggatacgaagagaagaacaagtcgtgtcgttgctacaaaatcttgagatttatggatgattacgaggatgacagggcactgcgcctaattcgtgagtttgaaatctacgacttaaactctgattcatggaaggttgttaatgtcactcccgactgggatgtagagttttatcaccgtggcctgtctctcaaggggaatacttactggtttgctcaagagaagcttccaccattaccacgcggaagagtgataacaatatcagatatggctgatttcttactctgttttgattttacaagggagagatttggaccgcgcctgcctctgcctttccactcttttgttgaagatactgtgactctatccagtgttagagataagaaacttgcagtgttatttcagccatgtagtgcatctaccgtgaagatatggattagtcgcaagattgagcccaatgcagtgtcgtggaggaaggttttcttagcggttgatatgaaatcactcactggttttcagtttgacattaacgctgcaagtttctttgttgacgagaagaaaaaggtcgccatggttctggataaagacaggttcagttataaatttactcgcaacatagcttacatcattgggaagaaggggtacttcgaaaaagtggatcttggagaatctacagtttcaagttgtgcctcacttgtgtgctcttacgttccaagctcagtgcaaatctag

SEQ ID NO: 228 - DNA, 423 bp, Arabidopsis thaliana
atggctgcttcagtgatgctatcttcggtgacattgaaaccagctggtttcacggtggagaagacggcggctagaggattaccgtcgctcacaagagctcgtccctccttcaaaattgtcgccagtggcgtcaagaagatcaagaccgacaagcccttcggaattaacggcagcatggacttgagggacggcgtcgacgcctccggcagaaagggcaagggatacggtgtttacaagtacgtcgacaagtatggagctaacgtcgatggatacagtcctatttacaacgagaacgagtggtcagcgagtggtgacgtgtacaagggaggagtcaccggattggcaatttgggcggtaactctcgccggaattcttgccggaggtgctcttcttgtgtacaacacaagtgctttggctcagtag

SEQ ID NO: 229 - DNA, 507 bp, Zea mays
atggctgccctgccactggccaccgccgaagtatgcgacgctaaccctcacctgatcatgaacggcgagctccgcgcgctccagccaatcttccagatctacggacggcgccaggtcttcgccggccccatcgtcacgctcaaggtctacgaggacaacgtcctggtccgcgagttcctcgaggagaaaggccacggtagggtcctcgtggtcgacggcggcggcagcatgcgctgcgccatccttggcggcaaccccgtccagcaggcgcagaacaacgggtgggctggtatcctggtcaacggctgcatcagggacgtggatgagatcaacggctgcgacatcggtgtccgggctctcagctcgcaccctatgaaggccaacaagaaggggatgggcgagaagcacgtccccgtcaacatcgctggaaccaggatttgcgacggcgagtggctctacgccgatcccgatggcattcttgtctccaggacggaactcaccgtgtag

SEQ ID NO: 230 - DNA, 1170 bp, Arabidopsis thaliana
atgtctccgtcttggctccgcccaaccgccgatcacaatcatcctccaccgcaaccgccgtcgcaatcaccgtcccctctatcttccggtgatccgaatctcacaacatgtctctaccaaacagatcacggcgtcttctatctaacatggtcccgaactttcttaggaggccactctgtgaatctcttcctccattcacaagattactacaaccactcttcgccactctctttctcctccgctgatctctctctttcctccgccgtctctttccatctcaacttaaacacattagctttctggaaaaaacgtggatccagattcgtttctcccaaaatccaagtcttctgggacttaagcaaagccaaattcgactctggatccgaacctagatccggattctacatcgctgtagttgttgacggagagatgggactattagtcggagattcagtcaaagaagcttacgctcgtgctaaatcggcgaaacctccgacgaatccgcaagctcttctgttgaggaaagagcacgtgtttggagctagggttttcacaacgaaagcgagatttggagggaagaacagagagatttctattgattgtcgtgttgatgaagacgctaagctctgttttagcgttgattcgaaacaggttctgcagatcaagagacttagatggaaatttagaggaaatgagaaagttgaaatcgatggagttcatgttcagatctcttgggatgtatacaattggttgtttcagagtaaaagttccggtgacggcggaggaggaggaggacacgccgtgtttatgtttagattcgagagtgatccagaagcagaggaggtttgtgaaacgaagaggaaagaagaagaagatgagaaaaatcgaaacggtatcgttttatggaagccgaagaagcaatgtggaaatagttttgggattaaagggattgttgagtggaggaagatgaggaagagatttgttaagagtaagagaagttcttcgtcgtcttcgatttcgatgtcgtcggcttcttcggcgtgtagctcgtcggttatggaatgggctagtagtgctgatgaggcggagtacggcggaggaggttgttctggttccggttccggcaatggtcttggattctcattactggtttacgcttggattaagtag

SEQ ID NO: 231 - DNA, 1512 bp, Glycine max
atggttctctccaaaaccgcctccgaatccgacgtctctgtccactcaaccttcgcttctcgctatgtcagaacttcgcttcccaggttcaagatggcggaggagtcgataccgaaggaggcagcataccagatcataaacgacgagttgatgttggatgggaacccaaggttgaatttggcatcatttgtgacgacttggatggagccagagtgtgataaactcatcatggctgccattaataagaactatgttgacatggacgagtaccctgtcaccactgagctacagaatcgatgtgttaacatgatagctcatcttttcaatgcaccactagaagagactgaggcagcagttggtgttggcacggttggctcatcagaggccattatgttggctggattggcattcaaaagaaagtggcaaaacagaaggaaacaagagggaaagccttatgacaaacccaacattgtcactggagccaacgttcaggtttgctgggagaaatttgcaaggtactttgaggtggagttaaaggaggtgaagctccgtgatgattattatgtaatggaccctgaaaaggccgtggaattggtggatgagaacactatttgtgttgctgctatccttggttccacactaaatggagagtttgaagatgtcaaacgcttaaatgatctcctaattgaaaagaacaaaataactgggtgggacactcctattcatgttgatgcagccagcggtgggttcatagccccatttatttacccagagcttgagtgggacttccggttacaactagtgaagagcatcaatgttagtgggcacaagtatggtttggtctatgctggaatcggttgggttatctggagaagcaagcaggacttgcctgaggaactcatctttcacatcaactatcttggggctgatcaacccaccttcacccttaacttctccaaaggttctagccaagtcattgctcaatactaccaactgattcgccttggttttgagggatatagaaacgtgatggaaaactgcagggacaacatgctggtgctgaaagagggactcgagaaaacagggcgattttcaattgtgtccaaagacaatggtgtgcctttggtggctttcacactgaaagaccacacccactttgacgaattccaaatctcagactttttaaggcgctttgggtggatagtgccagcatacaccatgcccccagatgctcaacatgtcacagtgcttcgtgttgtcatcagggaggacttctcaaggaccctcgcggagcgtctcgtgtccgatgtggagaaggtgctgcatgagcttgattcacttcctgcaagggtcatcagcagcaccactgtgacactcagtgcagaagaaaatggcaaggtagtggttgctaagaagaatcctatggagactcagagggaaatcactgccatttggaagaagtttgtgttggagaggaagaagaacaatgacaagatgaatggtgtttgttag

SEQ ID NO: 232 - DNA, 1512 bp, Glycine max
atggttctctccaaaaccgcctccgaatccgacgtctctgtccactcaaccttcgcttctcgctatgtcagaacttcgcttcccaggttcaagatggcggaggagtcgataccgaaggaggcagcataccagatcataaacgacgagttgatgttggatgggaacccaaggttgaatttggcatcatttgtgacgacttggatggagccagagtgtgataaactcatcatggctgccattaataagaactatgttgacatggacgagtaccctgtcaccactgagctacagaatcgatgtgttaacatgatagctcatcttttcaatgcaccactagaagagactgaggcagcagttggtgttggcacggttggctcatcagaggccattatgttggctggattggcattcaaaagaaagtggcaaaacagaaggaaacaagagggaaagccttatgacaaacccaacattgtcactggagccaacgttcaggtttgctgggagaaatttgcaaggtactttgaggtggagttaaaggaggtgaagctccgtgatgattattatgtaatggaccctgaaaaggccgtggaattggtggatgagaacactatttgtgttgctgctatccttggttccacactaaatggagagtttgaagatgtcaaacgcttaaatgatctcctaattgaaaagaacaaaataactgggtgggacactcctattcatgttgatgcagccagcggtgggttcatagccccatttatttacccagagcttgagtgggacttccggttacaactagtgaagagcatcaatgttagtgggcacaagtatggtttggtctatgctggaatcggttgggttatctggagaagcaagcaggacttgcctgaggaactcatctttcacatcaactatcttggggctgatcagcccaccttcacccttaacttctccaaaggttctagccaagtcattgctcaatactaccaactgattcgccttggttttgagggatatagaaacgtgatggaaaactgcagggacaacatgctggtgctgaaagagggactcgagaaaacagggcgattttcaattgtgtccaaagacaatggtgtgcctttggtggctttcacactgaaagaccacacccactttgacgaattccaaatctcagactttttaaggcgctttgggtggatagtgccagcatacaccatgcccccagatgctcaacatgtcacagtgcttcgtgttgtcatcagggaggacttctcaaggaccctcgcggagcgtctcgtgtccgatgtggagaaggtgctgcatgagcttgattcacttcctgcaagggtcatcagcagcaccactgtgacactcagtgcagaagaaaatggcaaggtagtggttgctaagaagaatcctatggagactcagagggaaatcactgccatttggaagaagtttgtgttggagaggaagaagaacaatgacaagatgaatggtgtttgttag

SEQ ID NO: 233 - DNA, 546 bp, Glycine max
atggatgccatgacactgtcactcccgctccctccggttccggtctgtacagtgcccgcgtctgcatcaacctcgtcctctgtttctctcactcactcctggtcggccacggccaggcagaggctctcctctcacagaacaagacccattttccggaattattcctctgcggttccaaaacttacagtggtgacatgcggtgcggctgtgacggagatcaacgagacccaattcaaagacacggttctgaaggctaaccgtccggttcttgttgagttcgtcgctacttggtgcggtccttgccgtctcatctccccctctatggaatccctcgctaaggaatatgaagacagattaacggttgtaaagattgatcatgatgccaacccacggctaattgaagagtataaagtttatggactaccaacattaatactcttcaagaacgggcaagaagttccagaaagcagaagggaaggtgcaattacaaaagtgaaacttaaagagtacgtggatgctctattggaatcgatatcagtttcatag

SEQ ID NO: 234 - DNA, 1539 bp, Arabidopsis thaliana
atggatcattcatcaaatagatttggcaataatggagtggaatcgattttaccgaattacaagcttggtaaaactcttggaattgggtcttttgggaaggtgaaaatagcagagcatgttgtcacagggcataaggttgctatcaaaatccttaatcgtcgtaagatcaagaacatggagatggaagagaaagtgaggagggagattaagattctacggttgtttatgcatcctcatattattcggcagtatgaggtaatagagaccacgagtgacatttatgttgtgatggagtatgtcaagtctggagagctctttgattatattgttgagaaaggcagattacaagaagatgaggctcgtaactttttccagcagataatatctggtgtagagtactgccatcgtaatatggttgtccatagagacctgaagcctgagaatttactattggattcgaggtgtaatattaagattgcagactttgggttgagtaatgttatgcgggatggtcattttctaaagacgagttgtggaagccccaactacgctgctcccgaggttatatcaggtaaattatatgctggacctgaagtagatgtatggagttgcggagttatattgtacgctctattatgcggtactcttccttttgatgatgaaaacattcccaaccttttcaagaaaattaagggtgggatttacactcttccaagtcatttatcatctgaggctagagacctgatcccaaggatgcttatagttgacccggtgaaacgaatcaccattcctgagatccgtcaacaccgttggttccagactcatctccctcgttatcttgctgtctctccaccggatacagtagagcaggctaaaaagatcaatgaggagatagttcaagaagtggttaacatgggatttgatagaaaccaggttttggaatctctacgcaacagaacacaaaacgatgctactgttacatactacctgttattggataaccggttccgtgttccaagtggctatctagaatccgagtttcaggagacaacagacagtggttccaatcctatgcgcacacctgaagcgggcgcttcacctgtaggccactggattcctgcacatgtggatcactacgggttgggagcaagatcacaagtccctgttgatcgaaaatgggctcttggacttcagtctcatgcgcatcctcgtgaaatcatgaatgaagttttgaaagctcttcaagaactcaatgtgtgttggaagaagattggtcactacaacatgaaatgtcgatgggttcctggtttagctgatggtcagaatactatggtcaacaatcagctgcacttcagagatgaatccagcatcattgaggatgactgtgccatgacttcacccactgtcatcaaatttgaacttcagctatacaaagcccgggaagagaagtacttgctggatatacagagagttaacggtccgcagtttctcttcttggatctatgcgccgcctttcttacagagcttcgtgtgatctag

SEQ ID NO: 235 - DNA, 1350 bp, Chlorella sorokiniana
atgcacggcatcaagaaccccgagctgcgccagctgctgaccgagatcttcatgaaggacccggagcagcaggagttcatgcaggcggtgcgcgaggtggccgtctccctgcagcccgtgttcgagaagcgccccgagctgctgcccatcttcaagcagatcgttgagcctgagcgcgtgatcaccttccgcgtgtcctggctggacgacgccggcaacctgcaggtcaaccgcggcttccgcgtgcagtactcgtccgccatcggcccctacaagggcggcctgcgcttccacccctccgtgaacctgtccatcatgaagttccttgcctttgagcagatcttcaagaacagcctgaccaccctgcccatgggcggcggcaagggcggctccgacttcgaccccaagggcaagagcgacgcggaggtgatgcgcttctgccagtccttcatgaccgagctgcagcgccacatcagctacgtgcaggacgtgcccgccggcgacatcggcgtgggcgcgcgcgagattggctaccttttcggccagtacaagcgcatcaccaagaactacaccggcgtgctgaccggcaagggccaggagtatggcggctccgagatccgccccgaggccaccggctacggcgccgtgctgtttgtggagaacgtgctgaaggacaagggcgagagcctcaagggcaagcgctgcctggtgtctggcgcgggcaacgtggcccagtactgcgcggagctgctgctggagaagggcgccatcgtgctgtcgctgtccgactcccagggctacgtgtacgagcccaacggcttcacgcgcgagcagctgcaggcggtgcaggacatgaagaagaagaacaacagcgcccgcatctccgagtacaagagcgacaccgccgtgtatgtgggcgaccgccgcaagccttgggagctggactgccaggtggacatcgccttcccctgcgccacccagaacgagatcgatgagcacgacgccgagctgctgatcaagcacggctgccagtacgtggtggagggcgccaacatgccctccaccaacgaggccatccacaagtacaacaaggccggcatcatctactgccccggcaaggcggccaacgccggcggcgtggcggtcagcggcctggagatgacccagaaccgcatgagcctgaactggactcgcgaggaggttcgcgacaagctggagcgcatcatgaaggacatctacgactccgccatgggcgcgtcccgcgagtacaatgttgacctggctgcgggcgccaacatcgcgggcttcaccaaggtggctgatgccgtcaaggcccagggcgctgtttag

SEQ ID NO: 236 - DNA, 1431 bp, Zea mays
atggggaagcgatccggcggccggaagcttccgttcttcaccagatcctcctcgtcctcctccaagcggaatcgctccgggcgtcgcctcccttccccctccaagcaggacaacgcgacgagggctcttctcgcctcccccaccgccgcctcgccgtccgcgaccccggactctgcagcggcggggcagaccgcccagccgccctctcccctctcagtcaccgcgggcgccgggggtgccttgtcggggaagatcaccaagaagaagcccggcgcgcgcctgtggatgcggctggaccgctggggtgcctccgaggtcgtcgagctcgacaaggccaccataatccgccgcgctggccttccctcgcgcgacctacggatccttggtcccgtattctctcgctcctccagcatcctcgctagggagaagacaatggtgatcaacctcgaattcatcagagcgatagttactgccgaggaggtgctcctgttggaccctctcatgcacgaagtgctccctttcgttgatcaattgaggcagcacctgcctctgaggagccttgtgggtgggaatggtgaatgtgcccctgatggcaatggagaaaaacaggggggctcgcatggaggccaggtgccccgtcttaatgaggcgaccggggcagagcatgagtttccatttgagttccatgtgctggaggtcgcgctcgagattgtgtgctcatcgttggaccttagcgttgatgaccttgagaggcatgctactccagtgcttgacgaactgacaaagaatgtgagcacaaggaaccttgagcgagtgcggagccttaagagtcatcttacccgtttgcttgcccgtgtgcaaaaggtcagggatgaaatagaacatcttctggatgataatgaagacatggaacatctgtatctaacaaggaagcaagtacaaaaccaacaggttgaggctttaatgtcatctgctgcttccaacagcattgttcttgctggacctggtgtgcccaggttgaactctagcttccggcgtagcttgagcgttgctacgagcatgcatttggataatgatgtggaagacctagagatgttacttgaggcctacttcatgcagctggatggaattcgcaacagaatcttgtcggttcgggagtatattgatgacacagaagactacgtcaacattcaacttgacaaccagcgtaatgaactaatccaactccagcttacactgaccattgcatcctttggcatagctgccaacactttcattgttggagcttttgcaatgaacatcccgagctctctgtacaacaccgataacaccctcttctggccatttgtcgggggcacctcatccggctgctttgtgatcaccatcctcttgtttgggtatgcctggtggaagaagttgctgggtccttag

SEQ ID NO: 237 - DNA, 1431 bp, Zea mays; identical to SEQ ID NO: 236

SEQ ID NO: 238 - DNA, 1431 bp, Zea mays; identical to SEQ ID NO: 236

SEQ ID NO: 239 - DNA, 1431 bp, Zea mays; identical to SEQ ID NO: 236

SEQ ID NO: 240 - DNA, 1461 bp, Oryza sativa
atggggaggcgatccggggggaggaagctgcccttcttcgcctcgaacgcctccacgtcgtcctccaccaagcggacccgctcggcgcgccgcctcccctcgctcaccaggccgcgcgcgtcgagctccccatccccggcgtcgccgtccccgccgccgccgtccgcgtcgcaccccgcccctccgtcccctcccctcgccgtatctcccgccggcgccggtaaggtcgggaagaagaaggccggggcgcgcctctggatgcggctcgaccggtggggcgtctccgaaaccctccatctcgacaagggctccatcatccgacgcgccggcctgccgccgcgggacctccggatcctcggccccgtcttctccgactcctccagcatcctcgctagagagaaggcgatggtgatcaacctagaattcatcagggcgatcgttacggccgatgagatccttctactggatcctctcacgatcgatgtgatcccttttgttgagcaattgacacatcatctccctctcaagaacctggtgtgtgggaatggtcaacctggtggtgatgaccatggggaaaagcatgatgactcgcatggagatcaggtgccccgccttaacgaggccaccggagcagagcacgagttgccatttgaattccaggtgctggagctcgcactcgagaccgtgtgctcatcattcgacgttaacgtgtctggtcttgaaaggcgcgccactccggtacttgaggaactgaccaagaatgtcagcacaaggaatctcgatcgtgtgcgaactctcaagagtgatcttacccgtttgcttgcccatgtgcagaaggtcagagatgaaatggaacatcttctggatgataatgaagacatggcacatctgtatctaacaaggaagcaattacaaaaccagcaagttgaggctttaatatcatcggctgcttccaatagcattgttcctggaggaacaagtctgtccaggttgaacaatagttttcggcgcagcgtgagcatcgctacaagcatgcatttggataatgacgtggaagacctagaaatgttgcttgaggcttacttcatgcaattggatggaattcgcaacagaattttgtcggttcgagagtatattgatgatacagaagactatgtcaatattcaacttgacaaccagcgtaatgaacttattcagcttcagcttacactgactattgcatccttcggcatagctgtcaacaccttcatagctggggcttttgcgatgaacatccagagcaaattgtacagcattgatgatggtagcttcttttggccatttgttgggggcacctcatcgggctgcttcatgatctgcatcgtcttattatggggatccaatcatcctgaggcagcagtatgtcttctttgcagagagatagctgatgaatcactgaactttatggacaatactgaatag

SEQ ID NO: 241 - DNA, 1461 bp, Oryza sativa; identical to SEQ ID NO: 240

SEQ ID NO: 242 - DNA, 1461 bp, Oryza sativa; identical to SEQ ID NO: 240

SEQ ID NO: 243 - DNA, 750 bp, Anabaena sp.
atgaagccatttctttttgtcaccgatttggatcatactctggtaggtaatgatgcagccctggcagaactcagccagatactcactcaccatcgtcaagaatatggcacaaagatagtttatgccactgggcgatcgcctattctttacaaagaactgcaagtagaaaaaaacctgatagaacctgatgggttagttttgtctgtgggtacggaaatctatcttgatggtagtggtaatcctgattctgactggtcagaaattcttaacgatggctggaatcgagaactagtattgtccgtaactaaaaaatttcctgaattaatgctgcaaccagactcggaacaacgtccttttaaagtcagtttttttctgcatcaagaagcctcatttaaggtcataccacaacttgagacagagttagcgaaatgtaaactaaatataaagttaatttatagtagcggtatagaccttgacattgtaccattaaacagcgataaaggtcaggcaatgcagtttcttcgtcaaaagtggaaatttgcagcagaaagaacagttgtctgtggtgattcaggtaatgatattgctttgttcgctgtgggcaacgaaaggggaatcatcgtcgggaatgcccgaccggagttgcttcagtggcacagtgagtatcccgcagaccatcgctacctggcaaaaaacttttgtgcaggtggaattattgaaggtttacaattctttggtttcctcgaatag

SEQ ID NO: 244 - DNA, 1329 bp, Zea mays
atggcggggtcgaggttcgggtcgttcaagtcggagaagggcgactccgcctccgcagcggcggcagcgggtggagcggcgcagaggagggacccgtacgaggtgctcggggtgggccgcaccgccaccgaccaggagatcaagagtgcgttccgacgcatggcgctcaagtaccatccggacaagaatggcgatgaccctgttgcatcagacaggttccaggaagtcacattctcctataacatcctgtcagatcccgataagaggcggcagtacgatacatcaggatttgatgcaatcgaatctgatagtcaggaactggagctggacttgtcgagtctcaacactgtaaacacggtgtttgcagctctttttagtaagcttggtgtgccaattaaaacaactgtttcagctacagttttagaggaggcattgaatggttcggttatggtttctcaactccagctaggaaactcagtgcagagaaaggtggaaaagcaatcggcccatttctattctgtggatataactgaaaaacaagctaaaatggggctagtttgtcgtgttcactcaaacgataaaagcaaattcaagttgctatattttgagcttgaagaaaatggcgggcttagtcttgcactacaggaagacagtgtgaaggttgggaaagttactgctgcagggatgtatttccttggttttcctgtgtaccgttttgaacaaaataacctggcagctgctgcaaaagattctgatggtgcattctttaaaagattggatagctttcagccatgtgacatacatgaactgaaacctggaacacacttctttgctgtctacggtgacaacttcttcaagagcgctagttatactatagaggttgtatgtggtgaatcttttcctgccgaaaaggagatgctacgaaatgtggaggccaagatactcacaaaacgagctgaactttccaaatttgagtcagagtatagggaggttttggcgaagttcactgaaatgaccagcaaatacacacaagaaatgcaagcgattgatggtcttttgaaggaaaggaatgagatccatgcttcctataccaacaatccacctctaaaacggagttccagcaggaataaagccaagtcgccttcgaaagtggccaaaactggtacagaaaaacatcatcagaaggaaaagaaggtgaaggatcactgcatggagggatgtggaagtgacagcgataattcaagtgaaaagaaatcaaaagagcggttcccaaggaagaaatggctgaaccttccattcaaacttgacaggagaaagacgtgctgatag

SEQ ID NO: 245 - DNA, 882 bp, Zea mays
atggcgcagatcatcgatggcaaggccatcgccgccgacgtccgccgcgaggtcgccgccgatgtggccgcgctctcgtcagcccacggactcgtgccggggctggccgtggtcatcgtggggagcaggaaggactcgcagacgtacgtgaacatgaagcgcaaggcgtgcgccgaggtcggcatctgctccatcgacgtcgacctcccggaggacatctccgagaccgcgctcgtcgccgaggttcatcgcctcaacgctgaccccgcagtgcacgggatccttgtccagcttccacttcctaagcatatcaacgaagagaagatactgagcgagatttccatcgagaaagatgtggatggcttccatcctctcaacattggcaagcttgcaatgaaaggcagagagccactgttcgtaccatgtacgccaaaggggtgcatggagctcttgtcaaggagcggagtcactgttaaaggtaagcgggcagttgtggttggtcgcagcaacatcgtcgggctacctgtatccctgctccttctgaaggcagatgcgaccgtatctgttgtgcactcgcggacccctgatcctgaaagcattgtacgcgaagctgacatagtcatcgcggcagctgggcaggctatgatgatcaaaggtgactggatcaagccaggtgctgcggtcatcgatgtcgggacgaactccatcgacgaccctacccggaagtccgggtaccggctcgtcggcgatgtggatttcgcagcggcgagcaaggttgctgggtacctgactccggttcccggaggcgttggcccaatgacggtggcaatgctgctgaagaacacggtggatggggcaaagcgggggatagtcgagtagtag

SEQ ID NO: 246 - DNA, 1353 bp, Zea mays
atggccacccacgcagctctcgccgcctcccgcatccccgccggcgcccggctgcacagcagggcggcggcgtcgtccaggcacggcgtgcagaggctggacttcgccgacttctccgggctcaggccggggtcgtgctccgtgagcgctgccgcgcgggaggcgtccttctccgacgtccttggcgcgcagctcgtcgccaaggccaccggggagaacgccgtgagggcgcccgccgaggcgaagctgaaggtggcgatcaacggcttcggccgcatcggccggaacttcctccggtgctggcacggccgcgaggactcgccgatcgacgtcgtcgtcgtgaacgacagcggaggcgtcaggaacgcgtcccacctcctcaagtacgactcgatgctcggcaccttcaaggccgacgtcaagatcgtcgacgacacgaccatcagcgtcgacggcaagcccatcacggtcgtctccagcagggacccgctcaagctcccatggggtgagctcggcattgacatcgtcatcgagggcaccggagtcttcgtcgacggccccggcgccggcaagcacatccaggccggcgcgaagaaggtgatcatcacggctcccgccaagggcgccgacatcccgacctatgtcgtcggcgtcaacgagggcgactacgaccacagcgtcgccgacatcatcagcaacgcgtcctgcacgaccaactgcctcgcgccattcgtcaagatcttggacgaggagttcggaatcgtgaaggggaccatgacgacgacgcactcgtacaccggcgaccagaggctgctggacgcgtcccaccgcgacctccggcgggcccgcgcggcggcgctgaacatcgtgccgacgagcacgggcgccgccaaggccgtggcgctggtgctgccgcagctcaaggggaagctgaacggcatcgcgctgcgggtgccgaccccgaacgtgtccgtggtggacctggtgatcaacaccgtgaagactggcatcacggccgacgacgtgaacgcggcgttccgcaaggccgccgccggcccgctgcagggcatcctggatgtctgcgacgtgccgctcgtgtccgtcgacttcaggtgctccgacgtgtcctgcaccatcgacgcgtcgctcagcatggtcatgggcgacgacatggtcaaagtcgtcgcctggtacgacaacgagtgggggtacagccaacgcgtggttgatctggcgcacctggtggcggccaagtggcccggcgcggcggcggccggcagcggcgaccctctggaggacttctgcaaggacaaccccgagaccgacgagtgcaaggtgtacgaagcatgatag

SEQ ID NO: 247 - DNA, 2847 bp, Oryza sativa
atgctggcgccggcgaagctgtcggaggacgacaagctggtggagtacgacgccctcctcctcgaccgcttcctcgacatcctccaggacctccacggcgacgacctccgcgagctggtccaagaatgctatgagatcgctgctgagtatgaagggaagcatgactcccaaaagctcgatgaacttggcaacatgttgacaagcttggatcctggtgactccattgtgatggccaaagctttctcccacatgcttaatttggctaacttggccgaggaggtccagattgcatacaggaggagaatcaagctcaagaagggtgactttgctgatgagaactcggcactgacagaatctgacattgaagaaacttttaagaggcttgttgttgacctgaagaaatcaccagcagaggtctttgatgcccttaagagtcagactgttgacctggttttgactgcacatccaacacagtcagtgaggaggtcactgcttcaaaaacactcaaggataaggaattgtttggttcaactatactcaaaggatatcacaccagatgataaacaggagcttgatgaggctctccagagggagattcaagcagcctttagaactgatgagatccgaagaacccagccaactcctcaagatgaaatgagggctggtatgagttactttcatgagacaatctggaaaggtgttccgaagttcttacgccgtctggacactgccttgaagaacatcggaattgatgagcgtgttccttataatgcacctctcattcagttctcttcttggatgggaggagaccgtgatggaaatccaagagtgacaccagaagtcacaagggatgtatgcttgcttgctagaatgatggcttcaaatttatactgctcgcaaattgaggatctcatgtttgagctgtctatgtggcgatgcaatgatgagcttcgggcacgagcagatgagctgcatctctcctcaaagaaagatgcaaagcactatatagaattctggaagaaggttccgcccagtgagccataccgagttgttctaggtgatgtgagagacaagctgtacaacacacgtgaacgagcacgccagttattatccagcggatattctgacattcctgaagaaaccactctcaccagtgttgaacagttcttagagcctctggagctatgttacaggtcactctgcgattgcggtgaccgtgtaattgctgatgggacccttctggacttcttgcgccaggtgtctacctttgggctgtgccttgtgaggcttgacattaggcaagaatctgacaggcacaccgatgtcctcgatgccatcaccacatacctgggaataggatcataccgtgagtggtccgaggaacgccgtcaggactggctcttgtctgaactcaatgggaagcgcccattgtttggcccagaccttcccaagaccgatgagattgctgacgttctagacacgttccgcgtgatagctgagcttcccgctgacaattttggggcctatatcatttccatggcgacagctccgtcagacgtgcttgctgttgagctcctccaacgtgaatgccatgtgaagacaccacttagagttgtcccactgtttgagaagttggctgatcttgaatctgccccagcagcagtggccagactgttctccatagattggtacagagaaaggataaatggcaaacaggaggtcatgattggctattcggactcgggtaaggacgccggtcgtctctcggcagcttggcagctgtacaagtctcaggaggagctcatcaacgttgccaaggagtttggggtgaagttgacaatgttccatgggcgcggtgggactgtcggaagaggcggaggtcccactcatcttgccatcttgtctcagccaccagacacaatccatggatctctccgggtcactgtccagggtgaagtcattgagcagtcctttggtgaggagcacctttgcttcaggacactgcagcgtttcacggctgccactctggagcatggcatgcatccaccaattgcgccgaaaccagaatggcgtgctctgcttgatgagatggctgtggtggctacaaaggaataccggtccatcgtcttccaggaaccacgctttgtcgagtatttccgccttgcaacaccagagatggagtatggaaggatgaatataggaagcaggccatccaagagaaagccgagtggtggcatcgagtcactccgtgccatcccatggatcttcgcgtggacgcaaactcgcttccaccttcctgtctggcttggcttcggttctgccttcaagcacatcctggagaaggacatcaggaacctccacatgctccaggagatgtacaatgagtggccgttcttcagagtcacgatcgatctggttgagatggttttcgccaagggtgaccctggcatcgccgcattgtacgacaagctccttgtctccgaggagctatggcctctgggagagaaactgagggccaactgtgaagaaaccaaacagcttctccttcaggttgctggacacaaggatcttctcgaaggtgatctctacctgaagcagcgccttcgcctccgcaatgcctacatcaccaccctgaatgtctgccaggcttacacgatgaagcgaatccgcgacccggactaccatgtcacgctgcgcccccacatgtccaaggagatcatggactggtctaagccggctgcggagctggtgaagctgaacccgaccagtgagtatgcgccggggctggaggacaccctcatcctgaccatgaagggaattgctgctggaatgcagaacaccggctag

SEQ ID NO: 248 - DNA, 1746 bp, Zea mays
atgtgcggcatactagcggtgctggggtgcggcgacgagtcgcaggggaagagggtccacgtgctagagctctcgcgcaggctcaagcaccggggcccggactggagcggcctgcaccaggtcgccgacaactacctctgccaccagcgcctcgccatcatcgacccggcctccggcgaccagccgctctacaacgaggacaagtccatcgccgttgccgtcaacggggaggtctacaaccatgaggagcttcgggcacggctctccggacacaggttccggaccggcagtgactgcgaggtcatcgcccatctgtatgaggaatacggagaaagcttcattgacatgttggatggtgttttctccttcgtgttacttgacgcacgagataacagcttcattgctgctcgtgatgccattggtgtcacgcctctctacattggctggggaattgatggttcagtgtggatatcttcggagatgaaaggactaaacgatgattgtgagcacttcgagatcttcccgcctggtaatctttactccagcaaagagaagtccttcaagagatggtataaccctccttggttctctgaggtcatcccctcggttccctatgacccactgcgtctcagatcggcatttgaaaaggctgttatcaagaggctcatgacagatgttccatttggcgtcctcctctccggtggtctcgactcatcattggtggctgctgtcgcagcccgtcatttcgctgggacgaaggctgcaaagcgctggggaactaggctccactccttctgtgtggggcttgagggatcaccagatctcaaggctgcaaaggaggtcgcggatcacctgggtaccgtgcaccacgagttcaacttcacagttcaggatggcatcgatgcaattgaagatgtgatataccacattgaaacatatgatgtgacgacgatcagggcaagcacactgatgttccagatgtcacgcaagatcaaggcgcttggagtcaagatggtcatctccggtgagggtgccgatgagatcttcggagggtacttgtatttccacaaggcccctaacaaggaggagttccaccaggaaacatgtcggaagataaaagctctccatcagtacgattgcttgagggccaacaaagcaacatctgcatggggccttgaggttcgtgtgccattcttggacaaggagttcatcaatgaggctatgagcatagatcccgaatggaagatgatccggcctgatcttggaagaattgagaaatggatactgaggaaagcgttcgatgatgaggagcgacccttcctgccgaagcatattctgtacaggcagaaggagcagtttagtgatggtgttgggtatagctggattgatggcctgaaggatcatgcagcctcaaatgtgagtgataagatgatgtccaatgcaaagttcatctacccacacaacaccccaacaactaaagaggcctactattacaggatgatctttgagaggtacttcccccagagctcggcgatcctcacggtgccaggcgggccaagcgtggcgtgcagcacagccaaggctatagagtgggatgcccaatggtctgggaacctggacccctctgggagagcagcgcttggagtccatctctcagcctacgagcaggacacggtcgctgtgggaggtagcaacaagcctggggtgatgaacaccgtggtacctggtgttgccattgagacttag

SEQ ID NO: 249 - DNA, 1758 bp, Zea mays
atgtgcggcatactggcggtgctgggctgcgccgatgacacccaggggaagagagtgcgcgtgctcgagctctcgcgcaggctcaagcaccgcggccccgactggagcggcatgcaccaggtcggcgactgctacctctcccaccagcgcctcgccatcatcgaccctgcctctggcgaccagcccctctacaacgaggacaagtccatcgtcgtcactgtgaatggagagatctacaaccatgaacagctccgggcgcagctctcctcccacacgttcaggacaggcagcgactgcgaggtcatcgcgcacctgtacgaggagcacggggagaacttcatcgacatgctggatggtgtcttctccttcgtcttgctcgacacacgcgacaacagcttcattgctgcccgtgatgccattggcgtcacacccctgtatattggctggggaattgatgggtcggtgtggatatcatcagagatgaagggcctgaatgatgattgtgagcactttgagatctttcctcctggccatctctactccagcaagcagggaggcttcaagagatggtacaacccaccttggttctccgaggtcattccttcagtgccatatgatccacttgctctcaggaaggcttttgaaaaggctgtcatcaagaggcttatgacggacgttccattcggtgttctactctctggtggcctagactcatcattggttgcagccgttacagttcgtcacctggcagggacaaaggctgcaaagcgctgggggactaagcttcattctttttgtgtcggacttgaggggtcacctgatctgaaggccgcaaaggaggtagccaattacctggggaccatgcaccatgagttcaccttcactgttcaggacggcattgatgcaattgaggatgtgatttatcacaccgaaacatatgatgtgacgacaatcagggcaagcacgccaatgttcctgatgtcaagcaagatcaagtcacttggcgtcaagatggtcatctctggtgagggttccgatgagattttcggagggtacctctacttccacaaggcacccaacaaagaggagctccaccgtgagacatgtcaaaagatcaaagctctgcatcagtacgattgcttgagggccaacaaggcaacatctgcatggggactcgaagcacgtgtgccattcctggacaaggagtttatcaatgaggcaatgagcatagatcctgagtggaagatgatccgacctgatcttggaagaattgagaagtgggtgctgaggaaagcatttgatgacgaggagcaaccattcctgccaaagcacattctgtacaggcagaaagagcagttcagtgatggtgttggctatagctggattgatggcctaaaggctcacgcagaatcaaatgtgaccgataagatgatgtcaaatgcaaagttcatctacccgcacaacaccccgactacaaaagaggcctactgttacaggatgatatttgagaggttcttcccccagaactcggcgatcctgacggtgccaggcgggccaagcgttgcatgcagcacggcaaaggcggtagagtgggatgctcagtggtcggggaacctggatccctcagggagagcagcacttggagtccatctctcggcctatgaacaggagcatctcccagcaaccatcttgacaggaaccagcaagaagccgaggatgatcgaggttgcagcgcctggtgtcgcaattgagagttag

SEQ ID NO: 250 - DNA, 855 bp, Arabidopsis thaliana
atgacttgcagccaaacactcggaaacaacaacaccaacaaataccagatctgcgaggagatcggccgtggccgtttcggcaccgtctctcgcgtctacgctccggccaccggtgatttcttcgcttgcaaaaccatcgacaaagcctctctctccgacgaccttgaccgtgcctgtctcgacaacgagcctaagctcatggctctcttgtcctatcaccctaacatcgttcaaatccatgatctcatcgacactgattcgactctctccatcttcatggagctcgtccatccctctgtttcgatctacgaccgtctcgtctcttctggaaccttctttgagcctcagacggcgtcgttcgctaaacagattctccaggcgctttcgcattgtcaccgatacggcgtcgttcacagggatattaaaccggagaacattctggtagatctacgaaacgatacggttaagatctgcgatttcggttcagggatttggttaggtgagggagagaccaccgaaggagtcgtcggaacgccgtattacgtggcgccggaggttttaatgggatattcttacggagagaaggtcgatctatggagcgccggcgtcgttttgtacacgatgctcgctggaactccaccgttttacggcgagacagctgaagagatattcgaagcggtactcagaggaaatctccgttttccgacgaagatattccggggggtttcatctatggctaaagatttcctaaggaaattgatatgcaaagatgcttctagaagattctcagccgaacaagcattaaggcacccatggatccaaagagcaggagaaacagaggagagattcatctag

SEQ ID NO: 251 - DNA, 909 bp, Schizosaccharomyces pombe
atggcttctactactgacatgagtacttacaaactaaatcacactatgattcgtgtgaaagacctcgacaagagtctcaaattttataccgaggtgtttggtatgaaactcattgatcaatgggttttcgaggaaaatgaattctctttgtcgtttttagctttcgatggacctggagctctaaatcacggagtggaacgtagtaagcgtgaaggtatattggaactgacttataactttggcactgagaagaaggaaggccctgtttatatcaatggtaataccgagcctaagagaggatttggacacatctgctttactgttgataacattgaatctgcttgcgcatatttggaatccaagggggtttcttttaagaaaaagctttccgatggtaagatgaaacacatcgcttttgccttggatcctgacaattactggattgagcttgtttctcaatctgaaactaagcccaaagctaatatttctaactttcgttttaatcatacaatggtccgtgttaaggatcccgaacctagtatcgccttttatgagaaacttggaatgaaggtaattgacaaagcggatcatcccaatggtaagttcaccaattatttcttggcctatcctagcgacttgcccagacatgatcgtgagggattacttgaattgactcataactggggtactgaaaaggagtcaggacccgtttaccataatggcaatgacggcgatgaaaagggttatggtcatgtttgtatttccgttgacaatattaatgcagcttgctctaaatttgaagctgaggggctaccattcaagaagaaattgaccgatggcagaatgaaggatattgctttcttactggaccctgataattactgggttgaggtcattgaacagaagtag

SEQ ID NO: 252 - DNA, 564 bp, Arabidopsis thaliana
atggctacagcttcaaggtttcttctacggaaattgccgaggtttctcaagctgtctccaactcttctccgtagcaatggcgtaagagtttcaagcaatctgattcaagattccatagaaccgttggattccttctggagaataggatctcgaatccgccatgattctttgactaccagaagcttctcttctcaaggtcctgcttctgtcgattacagttcggttttgcaggaggaagagtttcacaaattagccaacttcacaattaatcaccttcttgagaaaattgaggattatggtgataatgttcagattgatggtttcgacatagattatgggaatgaagttcttacccttaagcttggatctttaggcacttatgtactgaataagcaaactccaaatcgacaaatctggatgtcttcacctgtgagtggcccttctagatttgactgggaccgtgatgctaatgcgtggatatatcggcgaactgaagcaaagttgcataaactcctggaagaggagttagagaatctatgtggtgaaccaatccaactctcatag

SEQ ID NO: 253 - DNA, 396 bp, Arabidopsis thaliana
atggcaactatagctactggtcttaacattgcaacccagcgtgtcttcgtcaccagcgagaatcggccagtttgtctcgccggtccggtccatttgaacaattcgtggaatcttgggtcaagaacaactaaccggatgatgaaacttcagccgattaaagcagcaccggaaggagggatatcggacgtagtggagaaaagcattaaggaagctcaggagacttgtgcgggcgatcctgtgagtggagagtgtgtagctgcgtgggacgaggttgaagaacttagcgcagcagctagccatgctagagacaagaagaaggctgatggttcggaccctttggaggaatactgcaaagacaatcctgagaccaacgagtgccgtacttacgacaactag

SEQ ID NO: 254 - DNA, 540 bp, Arabidopsis thaliana
atggctgcttacacgtgtacttcccgtccgccgatttctatccggtcagagatgagaatcgcttcctcgccgacgggttccttctctactcgacagatgttctctgtgttgccggaatcgagcggattgaggactcgcgtttctctatcttcactctcgaagaattctagggtttcccgattacgacgaggcgttatctgtgaagctcaggacactgctacaggaattccagtggtcaacgattcaacatgggactctctagttctcaaggctgatgagcctgtgtttgtcgacttttgggcaccatggtgtggaccctgcaaaatgattgatcccattgtcaacgaactcgcgcaaaagtacgccggccagttcaagttctacaaacttaacactgatgagtctcctgcaacccctggccagtatggtgttagaagcatcccaactatcatgatctttgtcaatggtgagaagaaggatacaatcatcggtgctgtctctaaagacactttagcaaccagcatcaacaaattcttgtag

SEQ ID NO: 255 - DNA, 561 bp, Arabidopsis thaliana
atggctgctttcacttgtacctctcgtcctccgatttctctccgctccgagaccagaatcgtatcctcatcaccatcggcttcttctctctcttctcggcggatgttcgccgtcttaccggaatcatcaggtttgagaatccgtctttctctctctccggcttcgttgacctcgattcatcaacctagggtttctcgattacgaagagccgtcgtctgtgaagctcaggaaactactaccgatattcaagtggtcaatgactcgacatgggactctctagttcttaaagcaactgggcctgtagttgtcgacttttgggcaccatggtgtggaccttgcaagatgattgatccgcttgtaaacgatctagcacagcattacactgggaagatcaagttctacaaattaaacactgatgaatctcctaatactcccggccagtacggagttagaagcatcccaacgatcatgatctttgtcggtggcgagaagaaggatacaatcataggtgcagtgcccaaaaccacactcacatctagcctcgacaagttcttgccatag

SEQ ID NO: 256 - DNA, 582 bp, Arabidopsis thaliana
atggcgtcgttactcgattccgtcaccgtgacccgcgtgttttctctgccgattgcggcttcggtctcgtcttcttcagctgctccgtcggtttcacgacgccggatttctcccgccaggtttctggaattcagaggtttgaagtcttcgcggagtttggtgactcagtcggccagtctgggtgcgaatcgtagaaccagaatcgctcgcggtggacgaatcgcctgtgaggctcaggacaccactgccgccgccgtcgaagtaccaaatctgtctgattcagaatggcaaacaaaggttctggaatcagatgtcccagttctggtcgagttctgggcaccatggtgtggaccttgccgtatgattcaccccatagttgaccagctagccaaagatttcgcagggaagttcaaattctacaaaatcaacactgacgagagcccaaatacagcaaaccgttacgggatacgaagcgttccaacagtaatcatcttcaaaggcggtgagaagaaagatagcatcattggagctgtgcctagagagacgttggagaaaactatagaaagattcttggtcgagtag

SEQ ID NO: 257 - DNA, 1032 bp, Arabidopsis thaliana
atgagaggtcttttcaaatccaaaccgcggactcccgctgatattgttcgtcagactcgcgatctcctcctctacgccgatcgatccaactccttccctgaccttcgagagtccaaacgcgaggaaaagatggtggaactaagtaagagcatacgagatttgaagttgattctatatggaaacagtgaggctgagcctgttgctgaagcttgtgctcagttgactcaggagttctttaaggctgatactcttcgccgtttgctcacttctcttcctaatttgaacttggaggcgaggaaagatgctacacaagttgttgcaaatcttcagaggcaacaagtcaattcacgtcttattgctgctgattatcttgaatccaacattgatcttatggattttctagttgatgggtttgaaaacaccgatatggcgttacactatggtactatgtttagagagtgcatccgtcatcagattgttgcaaaatatgttttggactcggagcacgtgaagaagtttttttactacatacagcttcccaatttcgacattgctgctgatgctgctgcaacttttaaggaacttctgacaaggcacaagtctacagttgctgagtttctcattaagaatgaagactggttttttgcagactacaactcaaagcttcttgaatcaactaattatattacccgacggcaagctattaagttgttgggcgatatattattggataggtcaaattcggctgtgatgacgaagtatgtgagctcgatggataacttgaggattctgatgaatcttctcagagaatcaagcaagactattcagatagaagctttccatgttttcaagctgtttgtagcgaaccaaaacaagccttcagacatcgccaacattctggtggcaaacagaaacaagcttctgagattgttggctgatatcaagccggacaaagaggacgagaggtttgacgcagacaaagctcaggttgtgagagagattgcaaaccttaagctgcgagagcttgcttag

SEQ ID NO: 258 - DNA, 1032 bp, Arabidopsis thaliana; identical to SEQ ID NO: 257

SEQ ID NO: 259 - DNA, 576 bp, Arabidopsis thaliana
atgtgtgctccgcagccctccaacgagtttccgctgatttttcgcaaggatggtaagacatgtgtgttttgggatgtggaggattacccaatcccagctgatctccatcctcgttcgatccggcggagaatcgtaaaggatgtgaagaaatatggttgtgatgcggaggtgtcgattcatgcttatgctaatgataatacggtctcggtaacaatgaggcgtcaattttcggctgctggaatcaaattggaagtgttcacccaagcaggggataaatatgcgagacattgttccttgtatggtgacattatgctgtggtcactggaaaatcctccaccatcaaatattattgtcatcgcaaaaataatcgatgacgacttggctgatcgtattggatgtttgactaccgtctggtcatatgggcttctcatatcccaagttaagccagaatggctagaacggctttttcctgttggaagctatccctcgtttttggcagccatatttgatggaggattgccgaaatcatcgaaagcgaacaaggatcgctttcctctcgatgagtccgacgactag

SEQ ID NO: 260 - DNA, 576 bp, Arabidopsis thaliana; identical to SEQ ID NO: 259

SEQ ID NO: 261 - DNA, 531 bp, Arabidopsis thaliana
atggcagctccggaagattcaaagatgtctccggcgaattcgtttggagctgtcgttctcggcggtacgtttgatcgattacacgatgggcatcgaatgttcctcaaggcggcggcggagctggccagggatcggatcgtagtgggagtctgtgatggcccaatgttgacgaaaaagcaattctctgacatgattcaacccattgaagaaaggatgcgtaatgtggagacctatgtcaagtctatcaagcccgagctggttgtacaagccgaacccattacagatccatatggcccttctatcgtagatgaaaatttggaagctattgttgtcagcaaagagacattacctggtggcttgtcagttaacagaaaaagagcagaaagaggtctttcacagcttaagattgaagttgtggaaatagtttctgatggatcgagtggaaataagataagttcaagtactctgagaaaaatggaggctgagaaagcgtctaaacaaaaacaaccagcagaagaaaaagcatcatag

SEQ ID NO: 262 - DNA, 531 bp, Arabidopsis thaliana; identical to SEQ ID NO: 261

SEQ ID NO: 263 - DNA, 1386 bp, Arabidopsis thaliana
accatgaattctgcttcagctcatgatctaagattactagaggtagataaagagaagcaagaccccaaatcaccaagaggagccctcgaagcctgcttaactcgttgctcaatctcttccgcttcatcttcatctgacgatcctcctccaaacagagaagctatcgacaatgcagatgcagacacagacgtacagtgcaagaatcacagagcatcttctaattggggaaaattcttcaagctatggaaacgcagatccatgaaacgcctctcttcctttcctccattaagtggcgccgccccaccgatcatcaaacaaaacaaaagtgcagatccaaacatgaatggcatggtccttcacgatatctacgatttccaatcatctctccaaaacttctcaatatctgacatcgaaattgcaactgacaatttcagtccagaaaacattatcggtagaggcggttacgccgatgtataccagggaattctaccggaaggaaagctaatcgctgtgaaacgtttgacaaaaggcacaccggacgagcaaacagctgagtttctatcggaacttgggattattgctcatgttgatcatcctaacactgccaaattcatcggttgttgcatcgagggtggaatgcatctcgtgttccggctatctcctcttggaagcttaggctctctcctccatggaccatcaaaatataagctgacttggagcagacgttacaatgtagcgttaggaacagcagatggactagtgtatcttcatgagggttgtcaaagacgaatcattcatcgagacatcaaagctgataatattcttctcaccgaagattttcaaccgcagatttgcgacttcgggttagccaaatggcttcccaagcaattgacacaccataacgtatccaaatttgagggaacactcgggtactttgcacctgaatatttcatgcacggaatcgtggacgagaagactgatgttttcgcttttggagttctcctcttggagctcataaccggacatcctgcccttgacgagtctcagcagagccttgtcttatgggctaagccgttgctagagagaaaagctataaaagaattggtggatccatctcttggagatgagtataaccgagaagagcttatccggttaacttccacggcttctttatgcatcgatcaatcttctcttctacgaccccggatgagccaggttgtggaattattactaggccacgaagatgtcgtaatgactccaagagaagcgaagataaagatgatgcaacgaacgtattccgaagaattattagatagtgtagaatataactccactaagtacttgggagatcttgatcgcattcgagaggttgctttagcctcttag

SEQ ID NO: 264 - DNA, 675 bp, Arabidopsis thaliana
atggattccaattggatcaattgtccctctgttttctcctcatcctcttcttcttccagacgctgtcaatcccgatcagacttgtatttaggaggagggtacgaggatcttgaaggagaagacgatttgaaggcagagtttatatgccctttttgcgctgaagattttgacattgttgggctttgttgtcacattgatgaagaacatcctgttgaagccaagaatggggtctgtcctgtatgcactaagagggtgggattggatatcgttggccatattacgacgcaacatgcgaatttctttaaggtacagcgaaggagaaggttgcgaagaggaggatatagctctacctatctcgccttgaaaaaggaactccgggaagcaaacctacagtctcttcttggtggatcttcaagtttcacttcttcaaccaatatcgattctgatccgttgctgtcatcctttatgtttaattctccttcagtgaaccagtctgcaaacaaatctgctacacctgtgactgtaggaaacgcggctacaaaagtctcgattaaggaatctctcaaaagagacattcaagaagctccactttcaggtgaagatcaggagaaggcgaaaaagagtgagtttgtgcgaggcttgttgttgtcaaccatgcttgaagacgatttctag

SEQ ID NO: 265 - DNA, 675 bp, Arabidopsis thaliana; identical to SEQ ID NO: 264

SEQ ID NO: 266 - DNA, 309 bp, Arabidopsis thaliana
atgatgaagaagagacagatggtaatcaagcagagatcaagaaactccaacacatcttcctcttggactactacttcgtcttcttcttcttcctccgagatcagtaacgtccgttacgtggagtgtcagaagaatcacgctgctaacatcggaggctacgccgtcgacggttgccgtgagttcatggccgccggagttgaaggaaccgttgatgctttgagatgcgcggcttgtggttgtcaccggaattttcaccggaaggaagttgatactgaggttgtttgtgagtattctccacctaacgcttag

SEQ ID NO: 267 - DNA, 309 bp, Arabidopsis thaliana; identical to SEQ ID NO: 266

SEQ ID NO: 268 - DNA, 1086 bp, Xenorhabdus nematophila
atgaaaaaaacgtttaaaattgcagcaattccgggtgatggaattggtcatgaagtgcttcctgaaggtattcgggttttgcaggcggtggctgaaaaatgggatcttcatttatcgtttgaatattttgaatgggctagctgcgattattatctcaggcacggcaaaatgatgccggatgactggtttaatcaattaatgcagtttgatgctatttattttggcgcagtaggctggcctgaaaccgtgcctgatcatatctcactttggggctcattacttaagtttcgccgtgattttcagcagtatgttaatttgcgtcctgtgcgtttgttaccgggagtgccttgtccattagcgaataagaaaccggaagatatcgatttctatgtcgtccgggaaaatactgaaggggaatattccgctattggggggcgtttcaatgaaggtacagagcatgaagtggtgattcaggagtcggtttttacccgccgtggtgttgatcgcatcctgaaatatgcgtttgaattagcccagagccgcccgcgcaaattattaacttccgcgacgaaatccaatgggttatccatcagtatgccttactgggatgagcgggttgaaaagatggcaaaacagtaccctgatattaaatgggataaacagcatattgatattctttgtgcccgctttgtgttgaatccagagcggtttgatgttgttgtcgcttccaatttatttggcgatattctttccgatctagggccggcatgtaccggaactattggaatttccccttctgctaatttaaatccggaaaggaatttcccttctttgttcgaacctgtgcatggctctgcaccagatatttatggcaaaaatattgctaacccgattgctatgatctgggcgggagccatgatgttacagtttttgggggagggtgagcagcgctatcaggatgctcatgatgatattttagcggcgattgaagcggtaattgtgcaaggcattgtaaccccggatatgaaaggaaaggcatcaacacagcaggtgggagaagccatcgttaatcatttgaatgcttag

SEQ ID NO: 269 - DNA, 606 bp, Arabidopsis thaliana
atgggaggcaaaaaaacaaagattgagattaagaagatcataaacaaacccgcaaaaacggttgctttcacaaaacgcagggaaggtctcttccgcaaagcttcacagctttgtctcctctctccagccactcaaatcgcaatcttagcggctcctatgacttccaaatctcacgcttctttctactctttcggtcattcctctgtcgataacgttgtctcctctctgctttatgaccatcctcctcttacggcaaaccaagacaacaggtcagggttagggttttggtgggaagacaaacgttttgacgtatcggagaacgttgaggagttaaaagaggcggtcgatgctgtttcgaggatgttgaacaatgtgagatgccgattaaatgatgccgtgaagagtactcaaagagatggaggtttagagattcttcatcatcaggaggaggaagttcttcagactcgcaacgacgagacaaagacgaatcaaactcacgaatttgaaggcggcgaaacttctggttctgcaagttggttagagaacgaggatgatattcttcactttgatgatgatttttatactggtattgatcctttgttttag

SEQ ID NO: 270 - DNA, 513 bp, Glycine max
atgggtgcttcgctatcggtctcggaaaaatccatccatgaattcatggtcaaggatgctaagggcagagacgtgaacctcagcatctacaaagggaaggttcttcttgtagtaaatgtcgcttcaaaatgtggatttacgaataccaattacacccagttaactgagctttacagcaaatacaaagacagaggccttgagatactggcatttccatgcaaccagtttctgaagcaggagcctgggagtagccaggacgtagaggaatttgcctgcacaagatacaaggccgcgtatcccatttttggaaaggtacgtgtcaatggacctgatacagcacctgtctacaaattccttaaagcaaataaatcaggatttctgggttctaggataaagtggaatttcaccaagtttttggttgacaaggaagggaatgtcctccggcgttatggttcaaccacctcaccgttttccattgaaaatgacatcaagagagcattgggggaggcttag

SEQ ID NO: 271 - DNA, 705 bp, Glycine max
atgtcctccatggcttcctccaccgctttcttcacacccctccatgatttcactcaagccagaacaaccccatcaccccctttgcctttcatcaaatcctcctttgcttcctccaagtcaaccttttttcaccctgccctttccctacaaacctcttccaactttcccaggctttttggaaagcctaagtttttctctgttcatgcaagggctgccacagaaaaaaccatttatgattttactgtcaaggatattgacagaaaggatgtttctcttagcaagtttaaggggaaggttctattgattgtcaatgttgcttcacgatgtggtttgacatcatcaaattactcggagctgtcacgcttgtatgaaaaatataagaatcaaggtttggagattttagctttcccctgcaatcaatttggtatgcaggaacctggatcaaatgaagatattaagcaatttgcttgcactcgatataaagcagaatttccaatttttgataaggttgatgtcaatggaccatttacaactccagtgtaccagtttctgaaatcgagtgctggaggctttttgggtgatcttataaagtggaattttgagaaattcttggttgacaaaaatggtaaagttattgaaagatacccaccaacaacgtctccttttcaaattgagaaggatatccagaagttacttgctgcctag

SEQ ID NO: 272 - DNA, 513 bp, Glycine max
atgggtgcttctcaatcaatctcagaaaaatcctttcatgaattcactgtcaaggatgccaggggcaaagatgtgaacctcaacgcctacagggggaaagttcttcttgtaattaatgtcgcttcaaaatgtggatttgcggatgccaattacacccagttaactcagctttactccacgtacaagagcaggggacttgagatattggcatttccatgtaaccaatttttgaagaaagagccagggacaagccaggaggcacaagactttgcttgtacaagatataaggctgagtatcccatttttgggaagatacgtgtgaatggatcagatactgcaccagtcttcaaattcctgaaaacgcagaaatctggagttatggggtcaagaatcaaatggaatttcacaaagtttttagtcgatgaggaaggccgtgtcatccaacgttatagcccaaccaccaagccattagccattgaaaatgatatcaagaaggcattgcgggtggcttag

SEQ ID NO: 273 - DNA, 681 bp, Zea mays
atggcctcctccttggtcctcatcgcagcggccctgcttgcgctggcctcgtcgtggcagcaggccatcgcctacgatcctagccccctccaggacttctgtgtcgcagacaagaactcgcctgttcgcgtcaacgggttcccttgcaaggacccgatggcggtcaccccggacgacttcttcaacgcggcgatgatcatcgacaagcggagggacacgaacaacaaggtggggtccaacgtcaccaacgtgaacgtggagagcttcccggggctgaacacgctgggcatctcgctggcgcgcatcgactacgcgccgctcggggtgaacccgccgcacatccacccacgcgctaccgagctgctcaccgtgctcgagggcaccctctacctcggcttcgtcacgtccaaccccaaccgcctcttctccaaggtggtcaagaagggcgacgtcttcgtcttccccaaggccatgatccacttccagatgaacctcgaccacgacaagcccgccgcggcgctctcgtcgctcagcagccagaaccctggcgtcatcaccatcgccagcgccgtcttcggctccaagccgcccatctcggacgacgtcttggccaaggcgttccaggtggagaagaaactcatcgactggctccagtctcagttctgggataccaactactag

SEQ ID NO: 274 - DNA, 1074 bp, Zea mays
atggagggaggtgccggtgcgagcgagaaagggacggtgctggtcacgggggcgtcgggcttcgtcggctcctggctcgtcatgaagctcctccaggccggctacaccgtccgggcgaccgtgcgcgatcccgcgaacgttgggaagacgaagccattgatggaccttcccggagcaacggagcgcctgtccatatggaaagccgacctggcggaggaaggcagcttccacgacgccatcaggggctgcaccggcgtcttccacgtcgccacgcccatggacttcctgtccaaagaccctgagaatgaggtaatcaagccgacggtggaagggatgataagcatcatgcgggcatgcaaggaggccggcaccgtgcggcgcatcgtcttcacttcctccgccgggacggtcaacctggaggagcggcagaggcccgtctacgacgaggaaagctggaccgacgtcgacttctgccgtcgcgtcaagatgacaggatggatgtacttcgtgtctaaaaccctggcggagaaggcggccctggcgtacgcggcggagcacggcctggacctggtcaccatcatcccgacgctcgtggtcggcccgttcatcagcgcgtccatgccgcccagcctcatcaccgcgctggcgctcatcacggggaacgcgccgcactactcgatcctcaagcaggtgcagctcatccacctcgacgacctctgcgacgccgagatcttcctcttcgagaacccggccgcggccgggcgctacgtttgctcctcgcacgacgtcaccatccacggcctcgccgccatgctcagggataggtaccccgagtacgacgtcccgcagaggttccccgggatccaggacgacctccagccggtgcgcttctcgtccaagaagctccaggacctcgggttcaccttcaggtacaagacgctggaggacatgttcgacgccgccatccggacttgccaggagaagggcctcatccccctcgccactgccgccggaggggacggctttgcctcggtgcgcgcacccggcgagacggaggcgacgattggcgcttag

SEQ ID NO: 275 - DNA, 549 bp, Zea mays
atggcggcggcagcagcaacaagagcaggagcgtggggcgtggcgtggctcctggcggccaccgtggcggcggcgctgctggcctcggcgtcggcgcagtccgggtgcacgaccacgctgatcagcctgtacccgtgcctcaactacatcagcggcaacgtgtcggcgccgccgtcctcgtgctgctcgcagctcgccagcgtcgtgcagaccaacccgcagtgcctctgcgccgcgctcagcggcgactcctcgtccctcggcggcgtcaccgtcgacaagacgcgcgcgctccagctcccccaggcgtgcaacgtcaagaccccgccggcgagcaagtgcaactctgctggcggcggcagcgctccgggcgccgcgacgccggccacgccgtcggccggcgtaccatcgaccgcaggaaccggcactggatcgaaggcgacgccgacggccccgttcctgacgtccggcgccgcgtcgacccggggggcggtgagcctggtgctggcattcgcgactgttgccgtctacggcatctcggccgcgtag

SEQ ID NO: 276 - DNA, 1164 bp, Zea mays
atggctatggcgacggcgaagctgaactccccggctaccagcttgctcgctggcggccgcacgcgccgatctgcgcccgcccgctgcacgacggtgatccgcgccgccgcaggctcctactcggacgagctcatctccaccgcgaaatctgttgcttcccctgggcgtggtattctggcaattgatgagtcaaatgcaacatgtggaaagaggttatcatctattggtttggacaacacagaagtgaaccgccaggcttacaggcagcttttgctgacaactgctggtcttggtgaatatatttctggcgctattcttttcgaggagaccctttatcaatcaactacagacggcaagaagtttgttgactgcttgaaggatcagaatatcatgcctggcatcaaggttgacaagggtttggttccattgcctggatccaacaatgaatcatggtgccaaggtcttgatggtttggcttcaaggtgtgctgagtactataagcagggggcgcgcttcgcaaagtggaggactgttgttagcatcccttgtggtccatctgcattagcagtcaaggaagcagcatggggacttgctcgatatgctgctattgctcaggataatggtttagtgccaattgtggagccagagattcttcttgatggagaccatgggatcgagggagctcttgaggtggcagagaaagtgtggtctgaggtgtttttctacttagccgagaacaatgttctgtttgagggtatcctgctgaagcctagcatggtcacccctggagctgagcacaaggagaaggcttctccagaagccattgcaaagtacacgctaacaatgctcagaaggagagtacctcccgctgttcctggaatcatgttcctttctggtggacagtccgaggtggaggcaactctgaacctgaatgcaatgaaccagtctctgaacccatggcatgtgtcgttctcctatgcccgggctctgcagaactcggtgctgaagacatggcaagggcgccctgagaacgtggaggcagcgcagaaggccctgctggtgcgcgcaaaggccaactcgctggcccagctcggtcgctacactggtgagggcgagagcgatgatgccaagaaaggcatgttccagaagggctacacctactag

SEQ ID NO: 277 - DNA, 3057 bp, Schizosaccharomyces pombe
atggcgcaagttagcagaatctgcaatggtgtgcagaacccatctcttatctccaatctctcgaaatccagtcaacgcaaatctcccttatcggtttctctgaagacgcagcagcatccacgagcttatccgatttcgtcgtcgtggggattgaagaagagtgggatgacgttaattggctctgagcttcgtcctcttaaggtcatgtcttctgtttccacggcggagatgagtggagaaaccgtgcatggaatttcgtgctactctgttgttgcaaacactgaggacacatataatcagactctcgacttctaccaaaagcttggcttcaagaaggttgccagcttcggtaccagcgattctgacaatgcccgtgtttgcaacgagtctctccgtgaggactggatgcatgtcgctggaaacaactctgctgaaagcgtcaccatcaagttccgtttagtccccggtgaattgagcctttcccccgctgccgaagattctgaatggcgcggacaaaagagttctcttgttttttactatcccaacttgcttgacttgcttaagcaactcagtgccgatgccattaaataccaagctttccccaacgagaagaagcctgatgaggtttatgtcgaggatcccttgggtaatttgattggcttctccgaccgttacaatcctttcgcccatgctaaccttaagaagagcgaggagtctggtgctgcttctaacctcgagagcggtttggctactcccgtcgttgagactctcaagaaagctaccacttctgacaagcctgcaggtgtcaagaagaagattgcagttatgaccagtggtggtgactcccctggtatgaacgctgttgttcgtgccgtcgctcgtattgccattcaccgtggttgtgatgctttcgctatttatgaaggttatgaaggtcttgttcaaggtggtgatatgatcaagcaattgcaatggggtgatgtccgtggttggcttgctgagggtggtactcttattggtaccgctcgttgtatggctttccgtgagcgtcctggtcgtcttcgtgctgccaagaaccttatttccgctggtattgattccattattgtttgcggtggtgatggttctttgaccggtgctgatatcttccgttctgactggcccggtttggttaaagagttggaggacaccaaggctattactcccgagcaagccaagctctaccgccatcttaccattgtcggtttggtcggttcaatcgataacgatatgtcttcaactgacgttactatcggtgccttctcttctcttcaccgtatttgcgaagccgtcgactccatttcttctactgctatttcccattctcgtgctttcatcgttgaagtcatgggtcgtcattgcggttggttggctgttttagctgcattggctaccggtgctgatttcgtctttatccctgagagacctgctgaagtcggcaaatggcaagacgaattgtgcaattctttgagctctgtccgtaagttgggcaagagaaagtcaattgttattgttgcagagggtgctattgactccgagcttaaccacatttctcccgaagacatcaagaacttgttagttgagcgccttcacttggacactcgtgtcaccactctcggtcacgttcaacgtggtggtattccttgtgcttatgaccgtatgcttgctacccttcaaggtgttgatgccgttgatgctgttcttgcctctacccctgatactccatctcccatgattgctatcaatggtaacaagattaaccgcaagcctttgatggaggctgttaagttgactcatgaggttgctgatgctattgagaagaagcagttcgctcatgctatggagctccgtgaccccgaatttgctgattacttacacacttgggaaggtactacctttattgaagacgagtcacacttcgttcccaaggacgagagaatgcgtgtcgccatcatccatgttggtgctcccgctggtggtatgaactctgctactcgtgctgccgttcgatattgtttgaaccgtggtcacactcctcttgccattgacaatggtttctctggcttcttgcgccatgattctattcatgaactttcatggattgatgttgatgagtggtgcattcgtggtggtagtgaaatcggtaccaaccgtgatacccctgatctcgacatgggcttcactgccttcaagttccaacaacataagattgatgctttgattattattggtggtttcgaggctttcaccgccctttctcaacttgagagtgcacgtgttaactacccttcattccgcattcccatggctatcatccctgccaccatttccaacaacgttcccggtaccgaattctctttgggttgcgatacttgtcttaatgccgttatggaatactgtgataccattaagcaaagtgctagtgctagccgtcgtcgtgtcttcgtttgtgaagttcaaggtggccgctctggttatatcgctactgtcggtggtctcattactggtgcctccgccatttacacccccgaggatggtatctccttggatatgttgcgtaaggatattgatcaccttaaggctacattcgccttagaagctggtcgtaaccgtgctggtcaacttatccttcgtaacgaatgtgcttctaaggtttacaccaccgaagttattggaaacatcatcagtgaagaagctcataagcgcttctccgctcgtaccgctgttcccggtcacgttcaacaaggtggtaaccccactcctatggaccgtgctcgtgctgctcgtctggctatgcgtgccattcgtttcttcgaaacttgccgtgccaacgacttgggtaatgaccccagctctgccgttgtcatcggtatccgtggtactggtgtctctttcagctctgttgctgatgttgagaacaacgaaaccgaaattgagatgcgtcgtcctaagaacgcttggtggcgtgatatgcacaacttggttaacatcttggccggcaagacctttgctgattag

SEQ ID NO: 278 - DNA, 1158 bp, Escherichia coli
atggcgcaagttagcagaatctgcaatggtgtgcagaacccatctcttatctccaatctctcgaaatccagtcaacgcaaatctcccttatcggtttctctgaagacgcagcagcatccacgagcttatccgatttcgtcgtcgtggggattgaagaagagtgggatgacgttaattggctctgagcttcgtcctcttaaggtcatgtcttctgtttccacggcggagatggtacgtatctatacgttgacacttgcgccctctctcgatagcgcaacaattaccccgcaaatttatcccgaaggaaaactgcgctgtaccgcaccggtgttcgaacccgggggcggcggcatcaacgtcgcccgcgccattgcccatcttggaggcagtgccacagcgatcttcccggcgggtggcgcgaccggcgaacacctggtttcactgttggcggatgaaaatgtccccgtcgctactgtagaagccaaagactggacccggcagaatttacacgtacatgtggaagcaagcggtgagcagtatcgttttgttatgccaggcgcggcattaaatgaagatgagtttcgccagcttgaagagcaagttctggaaattgaatccggggccatcctggtcataagcggaagcctgccgccaggtgtgaagctggaaaaattaacccaactgatttccgctgcgcaaaaacaagggatccgctgcatcgtcgacagttctggcgaagcgttaagtgcagcactggcaattggtaacatcgagttggttaagcctaaccaaaaagaactcagtgcgctggtgaatcgcgaactcacccagccggacgatgtccgcaaagccgcgcaggaaatcgttaatagcggcaaggccaaacgggttgtcgtttccctgggtccacaaggagcgctgggtgttgatagtgaaaactgtattcaggtggtgccaccaccggtgaaaagccagagtaccgttggcgctggtgacagcatggtcggcgcgatgacactgaaactggcagaaaatgcctctcttgaagagatggttcgttttggcgtagctgcggggagtgcagccacactcaatcagggaacacgtctgtgctcccatgacgatacgcaaaaaatttacgcttacctttcccgctag

SEQ ID NO: 279 - DNA, 1863 bp, Arabidopsis thaliana
atggttttggaggatagaaaggacggttcttctttgccgggacgatccggtagtttctctaaatcgtcaccgtcggagttggatgttgttgatccctacaagcggataagttcgccgggatctatattggatgctgagaaggtagagaaaaagcctggaggatggagagccgtctcgttcattttaggaaatgagacgctggagagactgggatcgataggattgttggcaaacttcatggtttatctaaccaaagtgtttcacttagaacaagtcgacgctgcaaatgtcatcaacatttggtcaggtttcaccaatctcactcctctcgtcggagcgtatatctcagacacttatgttggccgcttcaagaccatcgctttcgcctcattcgccactctcctcggactaataacaattacactcacagcatcgtttcctcaactccacccagcatcatgcaacagccaggacccactcagttgcggcggtccgaataagctccagatcggagttttgctattgggactctgtttcctctccgtagggagtggaggaatacgaccttgtagcatcccttttggggttgatcagtttgaccaacgaactgaggaaggggttaaaggagtggccagtttcttcaactggtattacatgactttcactgtggttctgatcattacacagaccgtagttgtgtatatccaggatcaagtcagttggattatcggttttagtatccctaccggactcatggctcttgcggttgttatgttttttgccggaatgaagcgttatgtctacgttaaaccagaaggaagtatattctctgggatcgctcaagttatcgtggcagctcgtaagaagcgaaagctgaaacttccggcggaagatgacggcactgtcacctattacgacccagccatcaagtctagcgtgttatccaagttacaccgcagtaaccaattcaggtgtcttgacaaagccgcggtggttatagaaggtgacctaacacccgagggacctcccgcagacaagtggcggttatgcagcgtccaagaagtggaagaagtgaagtgtttgatccgaattgttcctatctggtcggccggaataatctcactcgcggccatgacaacacaaggcactttcacggtctctcaagctttgaaaatggatcgaaacttaggtcctaaattcgagattccggctggttcactctccgtcatctctctcctcacaatcggcatctttcttcccttctacgaccgcgtttttgtaccattcatgcggcgaatcaccggccataaatccggaatcacactcctccaaaggataggaacagggatcgttttcgcgatcttttctatgatcgttgcgggcattgtggagcgtatgagacgcatacgctccatcaatgccggagatccaacgggaatgactccaatgtcggtgttttggctttcgccgcagctaattctcatgggactatgtgaagcattcaatatcatcggacaaattgagttcttcaacagtcagtttccagagcacatgagaagtatcgctaactctctcttctctttatcgttcgccggttcgagctaccttagtagtttccttgtgactgtcgttcataaattctccggtgggcatgatcgtccggattggctaaacaagaatctcaacgcgggaaaattggattacttctattatctgattgcggttttgggtgtggttaatctggtttacttttggtattgtgctcggggataccggtacaaggtcggtttaccgattgaagactttgaggaggacaagtcctccgatgatgttgagatgacttcgaagaaatcgatgaaatag

SEQ ID NO: 280 - DNA, 1122 bp, Zea mays
atgctgggcgtcgcgcggaggcggctcggatccggatgcgtgctcgcccagctggcgcaggccctccgccccgccgccgctcccgccaggacctactccgccgcggccaaggagataactgtacgggaagcattgaataccgcattagatgaagaaatgtcggcagacccttctgttttcttgatgggagaagaggttggcgagtaccaaggtgcatacaagatatccaagggtttgcttgacaagtatggccccgatagggttctcgatactccgatcactgaggcgggcttcactggcattggtgttggtgccgcttaccatggtcttcgacctattgtagagttcatgacatttaacttttcgatgcaggcaattgatcacataattaattcagctgccaagtcgaactacatgtctgctgggcagatatctgttcctattgtctttaggggtccaaatggtgctgctgctggagttggtgcccaacactcacagtgctatgcagcttggtatgcacatgttcccggattgaaagttctagctccatattctgcagaagatgctcgaggtttgctgaaagcagcaatcagggatccagatcctgttgtgttccttgaaaatgaacttctttatggtgaatcatttcctgtatctgctgaggtacttgattctagcttctgccttccgattggaaaggctaagatagagcgacaagggaaagatgtcactatcactgcattctccaaaatggtgggatatgcccttcaggccgctgatatactggccaaggaaggtatcagtgccgaggtaatcaatcttcgctcaattagaccgctggatagagctactattaatgcatctgtgaggaaaaccaatagattggtaaccgtagaagaaggcttccctcaacatgggattggtgcggaaatatgcatgtctgttgtagaggacagctttgagtatcttgatgcaccagtcgagaggattgctggagctgatgtgcccatgccgtacgctgccaaccttgagaggatggctgttccacaggtcgatgacatcgtccgggcagccaagcgtgcttgctacagggcagcagtaccgatggcagcaaccgcctag

SEQ ID NO: 281 - DNA, 696 bp, Zea mays
atgccgaagtcgaagcgcaaccgcccagtgaccttatcgaagaccaagaagaagccaggtttagagcgcaagggcaaagtagtcgccgagataaaagatgctgtcgacaaatacagcagcgcctatgtttttacctacgataacatgaggaatcagaagctcaaggacctcagggagcagctcaagtcttcgagcaggatttttctcgctggaaagaaggttatgcagatagcgctggggcgttcgcctgctgatgaagctaaaacaggcctccacaaactttccaagttccttcaaggcaactctggtctgttattcaccaatcttccaagggatgatgttgagaggatgtttcgagaattcgaggagcatgattttgcaaggacaggaagtactgctatcgatacggttgagcttaaggaaggccctctggaacagttcacacatgagatggagccatttctacgcaagcaaggacttccagttcgcttgaacaaaggtgttgtagagttggttgcagaccatgtagtttgtgaggaaggaaagcccctttcgccagaagcagcgcagactctgcggctgcttgggatacaaatggcgacattccgtctataccttgtgtgtcgctggtcgggcgatgactttgaagtttacaaagaaggcttgatgcacctaggagctgatgaatcctcttag

SEQ ID NO: 282 - DNA, 1104 bp, Zea mays
atgttttttttgaaggatccgccgcccaccatgtcgccgccgcagccaccacacccggtgccccgagagacggtggccagcgctgtcgcttccctgacaacgtggatgaagaagcgcgctgcggaggcgcgcccgaacctcctcgccgacgagcgcgacgacatcgtggtcctccagctctcgctacgccgcatccccgcctcgcgcagcaccaagccgcgcctcctcccgatgccacatcccgttgttgggcacgacggcgcctccgtctgcgtcatctcggacgaccgcaccaagtcgcggtccccttccgcctccgacctccacgcgtccatgtcgctccaccgtttccccgtctccgaggtcatcccgctctccacgctccgcacggattaccgcccgtacgagtcgcggcgccgcctcgcagcctcccacgacctcttcgtcgccgaccgcgccatcctccctctgctgccgcgcgtcctcgggaaggcgttctactccaccaagaaggctccgattggagtcgatttcacccgcatcggatggccggagcaggtccgcagggttcttggctctgcttttctgtacctgcggtcagggacctgctcggggattaaggtgggtaggctggacatggaggaggaggatatcgtggacaatgtgatggccgcggtggaggaggctgtcgagaaggtgccaaagaagtggggcaatgttagggcgctgcatctgaaggctgtggattcagttgccctaccaatttaccaggttgtgccggagttgggtatgaaaatcgaggtgcctgagcctgacattgttggatctggggaggtcatcgaaaagaaggcgaatgctggtgccgatggaagagaggtatttgccaatgtgagttccaagaggaagaggaataagaaggagcagattgaggagggtgttgtgatgcaggaagaagttcaggtggatacagagaaaaagaagaagacgaagagcatcatggttgatgatggccacgaggttggcaagaagggtagagtgaagggcaagcgtgctaccgaggagggaaagaagaggaagaagagcataaagggtgatcgtctgtag

SEQ ID NO: 283 - DNA, 516 bp, Zea mays
atggtgaagtactcgcaggagccgggcaaccctaccaagtcggctaaggccatgggcagggatctgagggtccacttcaagaacacaagggagacagcctttgctcttcgcaagttgtctttgaccaaggctaagcgataccttgaggatgttattgctcacaagcaggcaattcccttccggagatactgtggcggtgttggtcgcaccgcgcaagctaagtctcgccactccaatgggcagggccgctggcctgttaaatcagccgggttcatcctggatttgctgaagaatgctgagagtaacgctgatgtgaaaggcttggatgtggacaacctctatgtttcacacatccaggtgaaccaagcccagaagcagaggcgccgcacctaccgtgctcacggacgcatcaatccctacatgtcctcaccttgccacattgagctgatcttgtcagagaaggaagagcctgtgaagaaagaggctgacaacattgtcgcagcaaggaagcagtag

SEQ ID NO: 284 - DNA, 402 bp, Zea mays
atggcggtcccgttgcttaccaagaaggtcgtgaagaagaggtccgccaagttcatcagaccccagagcgaccgtagaatcactgtcaaggaaagctggaggaggccaaagggtattgattctcgggtcagaagaaagttcaaaggtgtcacgttgatgcccaatgttggttacggatctgacaagaagacccgtcactatctccccaatggattcaagaagttcgttgttcacaacacgagtgatctcgagttgttgatgatgcacaacaggacttactgcgcagagattgctcacaacgtctccaccaagaagaggaaagccattgtcgagagagcttctcagctagacattgttgttaccaacaggcttgctaggctccgtagccaagaagacgagtag

SEQ ID NO: 285 - DNA, 2008 bp, Arabidopsis thaliana
atggaaggaactttagatgaagagaatctagtcttcgaaaccaccaaaggtatcaaaccaatcaagagtttcgatgacatggggatgaatgataaagttcttcgcggcgtttatgactacggttacaagaaaccatctgagattcagcagagagctttggttccgattctcaaaggacgagacgtcatagctcaggctcagtccggtactggtaaaacctctatgattgctatctccgtttgccaaatcgtcaacatatcctccagaaagtacgtctctgttttcccctgagattgaaaacaaatagtaaccctttttcagatttccaatttaggtcactaaaatttatcagaattacatgattaatgatcttgctttgtaattgagttgaggaacacttatctgtttctccaatttgctaatctacttggtaatacatagttaatgatcttgctctgtaattaagatgcagagcactagagactgccatatctgttttccagtttgctattttatttggtatgtaacacatggttagtgaggaacactttcttgacactataatgtttgttttccgatttactaaatccatttattactacatgttactgatcttactttatgattagttaggaacacttacttttaggctgcaagatctgtttttttaccgctttactaattaaatggttagattcattaggatgaggaaggtttacttaaggctgtgtggtatttttttttttgtttcaagggttcaagtcttggtgttgtctccatcaagagagctggcttcacaaacagagaagactatacaggctattggggcacataccaatattcaggcgcatgcttgcattggtggtaagagcatcggtgaagatatcaagaagctagagcgtggtgtccacgctgtgtctgggacacctggtcgagtttacgatatgataaagagaggaagcttacaaactaaagctgttaaacttttggttctggatgaatcagatgaaatgctgagtaaaggtttgaaagaccagatttatgacgtttacagagctcttccacacgatattcaggtttcgatctcaattgtttaaacagtagtaataattagtagatcctagtttctatgataatatgaagttaatacggttggtttataggtttgcttgatttctgctactcttcctcaagagattttggagatgacagaaaagtttatgacagatcctgtgaggattcttgtgaagcctgatgaattgactcttgaagtaagtttttccttctgccatttttatgctttaagttttagttttatcatgaaatgcatcaacctttggttttatagggaatcaaacaatactatgttgatgttgataaagaagagtggaaattcgatactctttgcgatctttatggaagacttactattaaccaagctattatcttctgcaacacaagacaaaaggtaaaagactcttgttcttaagctctggtccctccacttttgtcgataatattatacctttgatctgcgttttttatatatatgaaaggttgattggcttactgagaagatgaggagtagcaatttcatagtctcatcaatgcatggagacaaacgtcaaaaggagagagatgatatcatgaaccagtttcggtcatttaaaagccgtgttttaatcgcctcagatgtatgggcacgagggatcgacgttcaaactgtatgatctctctttctctcattctctgtcttttaactatcaatgtcacaaagaaactccatgttgacattaaaaactctttatgtaactaggtttctcatgtcatcaattatgatatacccaacaacccggagctatacattcatcgtataggacgagctggtcgttttggtcgtgaaggtgttgccattaactttgtaaaatcttcggatatgaaagatcttaaggatattgagcgacattacggtactaaaatccgcgagatgccagctgatcttgtctag

SEQ ID NO: 286 - DNA, 735 bp, Zea mays
atgatctccccggacgcagcccgcaacgtagtcggcatcatcggcaatgtcatctccttcggcctcttcctgtccccagtgctgacgttctggcggatctacaaggccaaggacgtggaggagttcaagccggacccttacctggcgacgctgctcaactgcatgctctgggtgttctatggcatccccgtcgtccaccccaacagcattctcgtcgtcaccatcaacggcatcggcctcgtcatcgaggccgtctacctcactatcttcttcctctattccgacagccagaagcgcaagaaggcgttcgcgatcctggccgtggagattctgttcatgctcgccgtggtgctcggtgtgatcctcggcgcgcacactcacgagaaacgttccatgatcgtcggcatcctctgcgtcatcttcggctcgatgatgtacgcctcaccactcactatcatgagtcgagtgatcaagaccaagagcgttgagtacatgcccttcctcctgtcgctggtgagcttcctcaacggctgctgctggacggcctacgcgctcatccgcttcgacctctacgtcacgatcccaaacgccctgggcgcattcttcggactcatccagctgatcctctacttctgctactacaagtcgacccccaagaatgagaagaacgtggagctgcccaccgtctccagcaacgtcggcggcggcaacgtcaccgtcagcgttgagcgatag

SEQ ID NO: 287 - DNA, 870 bp, Arabidopsis thaliana
atgggtaacgtgaacgcgagagaagaagcgaatagtaacaacgcttctgctgttgaagacgaagacgctgagatttgttctcgtgaagctatgtctgctgcttctgatggtaaccatgtcgctcctcctgagcttatgggtcaatctcctcctcatagccctcgagctactcagtctcctctcatgtttgctcctcaggttccggtgcttccacttcaaagacctgatgaaattcatatccctaatccttcgtggatgcaatcgccatcttcgttgtatgaagaagcttctaacgaacaaggaatccctacgatgatcacttggtgtcatggaggcaaggagattgctgtggagggatcatgggataattggaagacaagaagtcggctgcagagatctgggaaggacttcactatcatgaaagtgttaccttcaggagtctatgagtacaggttcattgtggatggacagtggaggcatgcccctgagctccctttagctagagatgatgctgggaacactttcaacattttggatcttcaggactatgttcctgaagacattcaaagcatatctgggtttgagcctccgcaatctccagagaatagttacagcaacttgcttctcggagctgaggactactctaaagaaccgcctgtggttcccccgcacctacaaatgacactgctgaacttgccggcagccaatcctgacattccatctccgctgccgagacctcagcatgtcattctcaatcatctttacatgcagaagggcaaaagtggtccttctgtggttgcgcttggttccactcaccgatttctagcaaagtatgtaactgtggtgctctacaaatccctgcagaggtag

SEQ ID NO: 288 - DNA, 240 bp, Arabidopsis thaliana
atgtcggacaaaggtcgtcccttgccaaaatttggtgaatgggatgtgaatgatccagcatcagcagaaggttttacagtgatattcaacaaagctagggatgagaaaaagaccggtggcaaaccgggatcacccggtaaatccagtgagggtcatgttaaatctggaggaggagatcctagtaaacctcagcctaaaaaatggctctgctgcatgcaagctccagctgtggactcttag

SEQ ID NO: 289 - DNA, 474 bp, Zea mays
atggccgccccgctccggcggagcctcccctcccttggtcgcgcgcttctcacgccggcgccggcgcggatgctctccgcggaggcctctgatgccctcgttgagatcaagcccggggagatcgggatggtctccggcatccctgaggagcatctccgccgtaaggttctaatttattcaccagctaggactgcatcccagcaaggttcaggcaaagtcgggaggtggaaaattaattttttgtcaacccaaaagtgggagaacccgttgatgggatggacatctactgggggtccatatgctaatgtcggtgaagcaggacttacgtttgacagtgcagagtcagcaaaggcgtttgccgaaaaacatggatggaattatgtggttcggaaacgccatgcacctcttctgaggcctaaggcctacgctgaaaacttcaagtggagaggccctccgaaagcggagcaagcatag

SEQ ID NO: 290 - DNA, 474 bp, Zea mays; identical to SEQ ID NO: 289

SEQ ID NO: 291 - DNA, 2970 bp, Arabidopsis thaliana
atgagtgattacggtgaaaagacttgccctttgtgtgctgaggagatggatttgactgaccagcaattgaagccttgcaaatgtggctatcagatttgtgtttggtgctggcaccatataatggacatggcagagaaagatcaatcagaagggcgctgtccagcttgccgcactccatatgacaaagaaaagattgttgggatgactgttgatcaggagagactggcctctgaaggcaacatggatcgcaaaaaaatacaaaagtcgaaaccgaaatcttctgatgggagaaagccactaacaagtgtccgagtggttcaaagaaatcttgtttacattgttggattgccccttaatctagcagatgaagatcttctccagcgtaaagaatattttggtcagtatggaaaggttctaaaggtttcgatgtcccgaacagcaacaggtctcatccaacagtttcctaacaacacatgcagtgtatacatcacatatggcaaagaggaagaggccattcgatgtattcagtctgttcatgggtttatcttggatggtaaagcactgaaggcatgttttgggacaaccaagtattgccatgcatggttgagaaacgtggcatgcaacaatcaggattgcctctatttgcatgaggttggctctcaagaggatagttttacaaaagatgagatcatatcagcccatacaagagttcagcaaatcactggagcaacaaatactatgcaataccgttcagggagcatgctacctccaccattggatgcttataccagtgacagttctactggaaatccaattgcaaaagttccttctagtacttcagttagtgctcctaagagttccccacctagtgggagctcgggtaaatcaactgctcttcctgctgcagcatcatggggggcacgtttaacaaatcaacactctttagcaacttcagctttgtcaaatggatctttggataatcaaagatcaacatcagagaatggaactttggctacgtctacagttgttacaaaggcagctaatgggcctgtatcctctagtaacagtcttcagaaagcacctctcaaggaagaaattcaatcattggctgaaaaaagcaaacctggtgtgttgaagcctttgcagcagaagattgtgttggatcccgagtccaagagaactacatcacctaatagagaccctagtagcaatcagatatcctgtttagtagagtcttcctacaatagcagagtcattgacaagccttctgctgttgagaattctcttgaacacacaagtgaaattgctgaagatgtcttcgatgttggtaaattgtctgctgatgttgcatggatggggataactacaaattctagggatgaaacccctggtgttccagtggttatcggtactcattgtgatcttggttctattacacaatctgataacgatgtacaaaatctcgagcaatgtagaaaacagtctcctacaaacacttatgcagaagctgacatatcactgaatggaattcatggttcaaggcctgagtgggattggagatcaggtttgcaatcccagatagatgttaaggaaccgttggaagtcaatgatttctcatcattcaataacaacagacgtggtattgcagaggctgttagccactcgacttctaagtttagtttatcaatctcaattctggattcaaatcatctagcttctcgttcgttccagaaccgggaaacttcttgtgggatggattcaaaaactggatcctcctttgaaataggtagtgatagattgcatcttccaaatggattttctgagaaagctatgtccaatatggagcattcattatttgctaatgaaggcagaagcaacattcagaatacagaggatgatatcatttcaaacattttagactttgatccctgggatgaatcgttgacttcgcaacacaattttgcaaaattacttggtcagagtgatcatagggccagtactctggaatcttctaacctcctaaagcaacataatgaccagtctaggttctcttttgctcggcatgaagaatcaaatagtcaagcgtatgacaatagaagttacagcatatatgggcagttgtcaagagatcagcctcttcaagagtttggagcgaaccgtgatatgtatcaggataagcttggcagtcaaaatggttttgcctcaaactattccggtggatatgaacaatttgctactagtcctggattatcttcttacaagagtcctgtggcgaggactcaagtttctgctcctcccggattttctgctcccaacaggttacctcctcccggtttctcttcacatcaaagaggcgacctgtcttctgatattgcatcaggaactcgtttacttgactcagccaatttgttgaggaacgcatatcatgtaccacctccaagtggaaatttgaatgctgcaggagatattgagtttattgatcctgcaattttagctgttggaaggggaagacttcataatgggatggaaacagcagactttgatttgagatcagggttctcttctcaactgaattcatttgataatgatgcaagactccaattgttggcgcagaggtctctggctgcacaacaagtcaatggatttcacgatcccaggaacgtaaacaacttctcttcttcgttctctgacccatatgggattagctcgaggccaacggatcaaacacaaggaactggcttgtctcctttcacacagctgcctagacaagcttcagcaaatccattgttgtcaaatggacactgggataataagtggaatgaaccacaaagtggtaacaatcttgggattacccagcttctaaggaatgaacggatgggttttaatgacaacgtttacagcggttttgaagagcctaaattccggaggcccggtcctggagatccgtataacagaacatacgggatttag

SEQ ID NO: 292 - DNA, 534 bp, Zea mays
atggttctaaccagcaatatttcggttcagaagaccttgtacgaggttttatctgtgagtgaagacgctacatacgatgagatccgcgcagcatacaggtctgccgctctgaacacgcaccctgacaaagcgcagacaactctcgagtcatcatccgtgccttccaccgagcaacaggaattttctagcgtgcagaaagcatgggaagtcctacgacatcctacatccagagcatattatgacaagcagctgcagtcatccagacaaagcatcgagatcatcgcatctgaaatccaagtcggggacatgatcgtcgagagcgctgctggtgctctagagctgctgtacccatgcaggtgtggcgattatttctccatcacttcgggtgaacttagcgggatggggattgtcgtcactggggatggagaagaggtagaagggctgcaggcgtcggattccgggtcggcttctgtcgttctgggctgtggctcctgttctctcaaaatacggctggttatagatggaacctcatag

SEQ ID NO: 293 - DNA, 1452 bp, Zea mays
atggccgctcgcttcctcctcgtcgttgccgtcgccctcctcctccgccctggggatgcgtccgtgcacgagtaccgcgggctcagcttcgccaacaagggcaacgccttcatcctccacgccggcagcgagggcctctacgcggcctcccacgccaacaccaccgccgaggacgccgccgcagtggccgaagccttcatccggtttgacaagattacttttaggcgatcagaggatactaataattctgtaaaggagactagttcagctaaggttcaggtactcatttttgagatagaagatcgtgaaatgattggtggatcagcatatggaggtcagaaagctatttgttgtacttcagatcttgcgaagttaggagcttgcacagaaggttctgtcatctaccgcccatcccaggtaaatcctggttggccaaagttgtttgtagcatcttttgatggaagtgacctgatcgcgacactaccgtcaaggaccattccaattaccaaaactgggatatacaatatgtactttatacactgtgatccgtcacttgctagtttggaaatcgaggggaaaaccatatggaaaaatcctactggataccttccgggtcggatggcacctcttaagaacttttttggactgatgtcttttgcatttgtcgtacttgggatctattggttttatcagtatatgaagtcctggagagaggttcttccacttcagaactgtattactcttgtgattacactgggcatgtttgagatggcattgtggtattttgagtatgctgagtttaatgagactggagtacggccaaaaggcatcacattttgggctgtcacgtttgggactgtcaagaggacggctgctgaagttattgttctcattgtctcaatgggatatggtgttgtcacgcctactttgggtggcttgacatcaaaagtggtcatgcttggaggaacattctttctagcaacagaaattcttgaattggtagaaaatcttggtgctgttaatgatctatctggaaaagctcgtctgttcttggtctatccagtggccattttagatgctgcatttgttatttggatatttatttctctagctaagaccattggtaaacttcagatttactccaaatcaacagatgtgtttaatgaacgatggcagcatgcccggattattcctgccttctggcatgtcttgtctttcttacttctttgtgtcatttgctacctgtgggcaccttcacaaaactcaatgagattttcttatgatgcaagtgaattctttgatcgaaaggataacatctcattaattaggccagcacccagtgcatccaagaatggatggaatttatcttctacaccagagcccaaagctacaaaggatgtgaataccgtagcagattttgaaggtgatgatgaggaaaacaaaagggagtag

SEQ ID NO: 294 - DNA, 1110 bp, Arabidopsis thaliana
atggagagcacgaagattgctccttcattcgatcgtgccagtgagcttaaagctttcgatgagacgaagactggtgtgaaaggactcgttgactctggaatctcaaagattccacgcattttccatcactcatctgtcgaactagcaaaccctaaaccacttccctcggacctgctacatctcaagacgatcccaacgatcgatctcggaggacgggacttccaggacgcgattaagcacaagaacgcgattgaagggattaaagaagcagctgccaagtggggtttcttccaagtgatcaaccatggagtttcgctcgagcttcttgagaagatgaaagatggagttcgtgactttcatgagcaacctcctgaagtgaggaaagatttgtacagccgcgatttcggcagaaagtttatctatttaagtaatttcgatctctacactgctgcagctgcgaattggagagacacattctattgttacatggctccagatcctccagaaccacaggatctgccagagatttgtagggatgttatgatggaatactcaaagcaagtgatgattttgggtgaatttctgtttgagcttttgtcagaagcactagggttgaaccctaatcacctcaaggacatggagtgcttaaagggtttgcgcatgctttgccactacttcccaccgtgtccggagcctgacctaacttttggcacaagtaagcactccgacggctcttttcttaccgtccttctaccagataacatagaagggcttcaggtttgtcgtgagggatactggttcgatgttcctcatgttcccggcgctctcatcatcaacatcggagatcttctgcagcttataacaaacgacaagttcatcagtttgaagcatagagtattggcgaacagagccacaagagctcgagtctctgtcgcatgtttcttccatacccacgtaaaaccaaatcctagagtgtacggacccattaaagagcttgtgtccgaagaaaatcctccaaagtacagagagaccaccatcagagattacgctacttacttcaatggcaaaggacttggcgggacctctgctttgctggattttaaagtatag

SEQ ID NO: 295 - DNA, 1110 bp, Arabidopsis thaliana; identical to SEQ ID NO: 294

SEQ ID NO: 296 - DNA, 366 bp, Zea mays
atggcgagcacggggcggtcgatgctgctgtcactgctcctcttcgcagtgacgctgtcgctgctggagatgtacagggccaagttcgcctcgtcggagctcatgaccattgccggtggattcgtctgctccctcctattcctgctactcctcacctttattggaaactatcaagaagctagtggagatagaactgggtggggtgcagttgttgtagcacaacttgtagctcttattgtagccggcactgtccaccgtgtctgtatcacaacatgcttcctgttttccgctggactcctttacgaggttgacaagctctctggcatgatccttgcgaggagtgagtctaaggtgaggcggcactag

SEQ ID NO: 297 - DNA, 366 bp, Zea mays; identical to SEQ ID NO: 296

SEQ ID NO: 298 - DNA, 1398 bp, Arabidopsis thaliana
atgaaatctgtcattttcacagaggaaaaaaacttacaaagacaaaatccattgcaaaagagcgagcaacaacgacgaaatttcgaaatgccatcgccaccgacgacgacttctctctcggtgacacagaccataaacggatcacacagcttcacaatcaaaggctattctttggctaaaggaatcgggatcggaaaacacatcgccagcgatactttcaccgtcgggggttatcaatgggctatctatttctatcctgatggcaagaatcctgaggataattcggcttatgtctccgttttcattgctttagctagcgatggtaccgatgttagggctctttttgagctttctttgcttgatcagagtggtaaagggaagcataaggttcatagccacttcgatcgtgctcttgagagcggtccttatactctcaagtatcgtggcagcatgtggggctacaagcgcttttttcgaagacttatgctggaaacatctgattttctgaaggatgattgtctgaaaattaattgcaccgtgggagttgtggtctcagaaatagattgcccacggttacattctattcatgtccctgcatctgatattggatctcatttcgggatgcttctagagaacgaggacggttcagatataacttttaacgtctctggtgaaaagttccgtgctcacaggttagtattggctgctcgatctcctgtctttgaaagcgagttcctcgatgttacgggagaagaagatcgtgatatcgaagttactgacatggagcctaaggttttcaaggctttgctccactacatatacaaggatgctctcattgaagatgcagagtcatcatcatcttccggttcatctgttggtccatctgcctcagacacattagctgcaaagctactaggagccgctgataaatacaagttgcctagattaagtctaatgtgcgagtcagtgctctgcaaggatatatcagtagattccgttgcaaatattttggcgcttgctgaccgttacaatgcttccgccttgaaatccgtttgtctgaaattcgcagcagaaaatctcatcgctgttatgaggtcagatgggtttgattatctaagggaacactgcccgtcacttcagtctgagcttctgaaaacagttgcgggttgcgaagaggagttaagcggaggaggagggaagacgagaagcgtatggggccaattctcagacggtggagctgagacaaacggaagacaagcacagacttggggagatatcaatggaggagcagagagaagccagagtgtttgggtcgaagttgtgaacgctaatggaagcggtagaaacaataatgacaacaataacagtgatgacccaatggcagaactagaagattag

SEQ ID NO: 299 - DNA, 1398 bp, Arabidopsis thaliana; identical to SEQ ID NO: 298

SEQ ID NO: 300 - DNA, 1665 bp, Pseudomonas fluorescens
atggcgtactaccgcactcctcatgacgttaccgctctgcctgcctggcaagcgttgaaagatcaccgccaagccatgcaggatttcagcatgcgcgaagccttcaacgccgatccgcagcgcttcaatcagttcactctcagcagctgcggactgtttctcgactattcgaagaatctgatcaacgccgagacccgcaacctgctggtgggtctggccaatgaagtcgatctcaaaggcgcgatcaaggcgctgttcgacggcgaaatcgtcaactcctccgaaggccgcccggcactgcacaccgccctgcgtcgcccggtcggcgacaagctgtcggtcaacggtgtcaacgtgatgcctgaggtacacaaggtgctgaaccagatcaccgatctcgtgggccgcatccacgacggtctgtggcgcggttacaccgagaagccgatcactgacgttgtgaacatcggcatcggcggctcgttcctcggccccgagctggtctccgaagccctgctgtcctacgcccagaaaggcgtgcgttgccattacctggcaaacatcgacggcagcgaattccacgagctgacgcaaaaactgcgcgccgagaccacgctgttcatcgtttcgtcgaaatcgttcaacaccctcgaaaccctgaaaaatgcccaggccgcacgcgcctggtacctggcccagggtggttcggaagccgagctgtatcgccacttcatcgccgtatcgagcaacaatgccgccgccgtggccttcggtatccgcgaagaaaacatcttcccgatgtgggactgggtcggcggtcgttactcgctgtggtcggccatcggcctgccaatcgcgctggccatcggcatgtccaacttcaaggaactgctgtccggtgcctacaccatggaccagcatttccagagcgcgccgttcgaacagaacatgccggtgctgctggccctgctcggcgtgtggtacggcaacttctggggcgcgcaaagccacgcgatcctgccgtacgaccactacctgcgtaacatcaccaagcacttgcaacagctggacatggaatccaacggcaagagcgtgcgtcaggacggcaccccggtgtcgaccgacactggcccggtgatctggggcggcgtcggttgcaacggtcagcacgcttatcaccagttgctgcaccaagggacccaactgatcccggccgacttcatcgtgccgatcgtcagcttcaacccggtctccgaccaccatcagtggctgtacgccaactgcctgtcgcagagccaggcgctgatgctcggcaagaccctgccggaagccgaagcggaactgcgcgacaagggcatgagcgaagaccaggtgcagaaactcgcaccgcacaaggtgatcccgggcaaccgtccgagcaacaccctggtggtcgagcgcatcagcccgcgtcgtctcggcgcactggtggcgatgtacgaacacaaagtcttcgtgcaaagcgtggtctggggcatcaacgccttcgaccagtggggcgtggagctgggcaaggaactgggcaagggcgtgtacaaccgtctggtcggcagcgaagaaaccgccgctgaagacgcgtccacccaaggcctgatcaactacttccgcggccgtcaccgcggctag

SEQ ID NO: 301 - DNA, 1668 bp, Pseudomonas fluorescens
accatggcgtactaccgcactcctcatgacgttaccgctctgcctgcctggcaagcgttgaaagatcaccgccaagccatgcaggatttcagcatgcgcgaagccttcaacgccgatccgcagcgcttcaatcagttcactctcagcagctgcggactgtttctcgactattcgaagaatctgatcaacgccgagacccgcaacctgctggtgggtctggccaatgaagtcgatctcaaaggcgcgatcaaggcgctgttcgacggcgaaatcgtcaactcctccgaaggccgcccggcactgcacaccgccctgcgtcgcccggtcggcgacaagctgtcggtcaacggtgtcaacgtgatgcctgaggtacacaaggtgctgaaccagatcaccgatctcgtgggccgcatccacgacggtctgtggcgcggttacaccgagaagccgatcactgacgttgtgaacatcggcatcggcggctcgttcctcggccccgagctggtctccgaagccctgctgtcctacgcccagaaaggcgtgcgttgccattacctggcaaacatcgacggcagcgaattccacgagctgacgcaaaaactgcgcgccgagaccacgctgttcatcgtttcgtcgaaatcgttcaacaccctcgaaaccctgaaaaatgcccaggccgcacgcgcctggtacctggcccagggtggttcggaagccgagctgtatcgccacttcatcgccgtatcgagcaacaatgccgccgccgtggccttcggtatccgcgaagaaaacatcttcccgatgtgggactgggtcggcggtcgttactcgctgtggtcggccatcggcctgccaatcgcgctggccatcggcatgtccaacttcaaggaactgctgtccggtgcctacaccatggaccagcatttccagagcgcgccgttcgaacagaacatgccggtgctgctggccctgctcggcgtgtggtacggcaacttctggggcgcgcaaagccacgcgatcctgccgtacgaccactacctgcgtaacatcaccaagcacttgcaacagctggacatggaatccaacggcaagagcgtgcgtcaggacggcaccccggtgtcgaccgacactggcccggtgatctggggcggcgtcggttgcaacggtcagcacgcttatcaccagttgctgcaccaagggacccaactgatcccggccgacttcatcgtgccgatcgtcagcttcaacccggtctccgaccaccatcagtggctgtacgccaactgcctgtcgcagagccaggcgctgatgctcggcaagaccctgccggaagccgaagcggaactgcgcgacaagggcatgagcgaagaccaggtgcagaaactcgcaccgcacaaggtgatcccgggcaaccgtccgagcaacaccctggtggtcgagcgcatcagcccgcgtcgtctcggcgcactggtggcgatgtacgaacacaaagtcttcgtgcaaagcgtggtctggggcatcaacgccttcgaccagtggggcgtggagctgggcaaggaactgggcaagggcgtgtacaaccgtctggtcggcagcgaagaaaccgccgctgaagacgcgtccacccaaggcctgatcaactacttccgcggccgtcaccgcggctag

SEQ ID NO: 302 - DNA, 1020 bp, Arabidopsis thaliana
atgaagggaactctaagatacttagcaggaatcgctgggccaaatgggtttggctcaagatccacagctgaacaagttacacaacatagcttttttccttgttcacatctcactgccataatcactggaggaacgtctgggatcggtgcggaaactgcgagagtgttagcaaaaagaggggtgagagtagtgatggcagtaagagatatgaagaaagcagaaatggtgaaggagagaataataagagagaatccagaagctgacattatattattcgagattgatctgagctctctatcttccgttgccagattctgctctcaatttctttcccaagatcttcccctcaacatactcataaacaacgcaggagttttctctccaaatcttgaattctccgaagaaaagattgagctgacatttgctacaaactttttaggacattacttattaacagaaatgctgatagagaaaatgatagatacggcagagaagagtggaatcgaaggacgaatcattaacctttcctctgtgattcacaattgggtcaagcctgattgtttctccttccctaaattgctccatcccattagtaggtataacgggacaagggcatatgctcagtcaaagttggctacaattttacatgcgaaagcgttgagcaagcaattaaaggacaggaatgcaaacgtgacgataaatgcagtccatccaggaattgttaaaactggaattatcagagcacacaagggtctttttacagattctctgtttttgatagcttcgaagctgctaaaatctataagccagggcgcagctacaacatgttatgtggcattgagcaacgaaaccaaagggttaagtggaaagtattttgcagactgcaatgagaccaattgctcagatttagcgaatgatgagtatgtggctctcaagctctgcacccaaagccgtgccttaatccatgatcatttgcatgaatttcaaatacatgcccttcctaatttatgttttttgtag

SEQ ID NO: 303 - DNA, 735 bp, Zea mays
accatgatgtcgtcgtcgtcggacgcggcagcggcgctggagctgcaggagtccgggtgggaggagctgcggcgggaggcgcgcaagctggagggcgacctcgacgtgaagctctcctcctacgcgcgcctcgccgcgcgctcctcctcctccgcctcgggcgccgcctcccccaccgccgaccgctcctcctggaagtccatggagttcgagatccagtcgctgctcggcaagctgcaggacgtcaacgacgccatgagccgctgcgccgcctccagcgccaccaccacctccgtctcccagaagctcgcgcgccaccgcgacatcctccacgagttcacgcaggagttcaggcggacgagggggaacctgagctccatgagggagcacgccgatctactcaactccgtccgagacgacatcaccgagtccagggcctccggtggcatgtcgccaagagtgcatttgctcagggaacgagcttccattcatggcagcatcaaccagattgatgaggtaattggccaagctcaaagcacaagagtagctcttaacaatcagagggccatgtttggagacattcaagggaaagtgaagcagctgggtgaaaagttcccggtaatcagaggtcttcttggtgccatcaagcggaagaaatcaaaggacaccataatcctctcggcagtgatcgcggcctgcaccatcttcctgatcatttactggctttcgaaatag

SEQ ID NO: 304 - DNA, 1425 bp, Arabidopsis thaliana
atggtgatggaggaaggaagaagcatagaagaagggcttttgcagctcaagaacaaaaacgacgattcagagtgtcgtattactgcttgtgttatccttagcacttttgtcgccgtttgtggctccttctcttttggtgttgctactggttacacttcaggtgctgagacaggagttatgaaggacttggatctttctatcgcgcaattttcagcttttggctcattcgccactttaggagctgcaattggtgcactgttctgcggtaatctggcaatggtcattggcagaagagggacaatgtgggtctccgatttcctatgcatcactggttggctctccatcgcttttgctaaggaagtagtgttgctgaacttcggaagaatcatttcagggataggtttcggcttgacgagctatgtggtacctgtctacatagcagaaattacgccaaaacatgttcgtggtacatttacgttttcaaaccagcttcttcaaaacgctggactcgccatgatttatttctgtgggaatttcatcacttggaggacgttggctttattaggtgctttaccatgcttcattcaagtaatcggtttattcttcgtgccagagtctccaagatggctggccaaagttggctccgataaagaactagaaaattcactgtttcggcttagaggaagagatgctgatatttcacgtgaagcctcagaaattcaagtaatgaccaaaatggtggaaaatgattcaaagtcgagtttttcagatttgttccagagaaagtatagatacaccctcgtggtaggaatcgggctaatgttgatacaacaattctcaggaagtgctgctgtaatctcttatgcaagtaccatttttagaaaagctggtttttcggtggccattggaacgacgatgctaggtatcttcgtgattccaaaagccatgattggcctcattcttgtcgataaatggggcagacgtcctctcctgatgacttcagcgtttgggatgagcatgacttgcatgctacttggggtcgccttcacattacagaaaatgcaattgctttcggaactaactccaatattatcgtttatatgcgtaatgatgtatattgcaacttatgcaataggcttgggaggtctaccttgggtaattatgtcggagatatttccaataaatataaaagtaactgcaggaagtatagttacgttagtctcattttcaagtagttcaatcgtcacttacgctttcaactttctgttcgaatggagcactcaaggaacgtttttcatattcgcgggtatcggtggagcagcgttgctttttatatggttgctcgttccagaaacgaaaggattatcactcgaagaaatacaagtttcacttattcatcagcccgatgaaagaaatcaaacttag

SEQ ID NO: 305 - DNA, 2028 bp, Arabidopsis thaliana
atggaagagatttcgacggatccggttgttccagcggtgaaacctgacccgagaacatcttcagttggtgaaggtgctaatcgtcatgaaaatgacgacggaggaagcggcggttctgagattggagcaccggatctggataaagacttgctttgtccgatttgtatgcagattattaaagatgctttcctcacggcttgtggtcatagtttctgctatatgtgtatcatcacacatcttaggaacaagagtgattgtccctgttgtagccaacacctcaccaataatcagctttaccctaatttcttgctcgataagctattgaagaaaacttcagctcggcatgtgtcaaaaactgcatcgcccttggatcagtttcgggaagcactacaaaggggttgtgatgtgtcaattaaggaggttgataatcttctgacacttcttgcggaaaggaagagaaaaatggaacaggaagaagctgagaggaacatgcagatacttttggactttttgcattgtctaaggaagcaaaaagttgatgaactaaatgaggtgcaaactgatctccagtatattaaagaagatataaatgccgttgagagacatagaatagatttataccgagctagggacagatattctgtaaagttgcggatgctcggagatgatccaagcacaagaaatgcatggccacatgagaagaaccagattggtttcaactccaattctctcagcataagaggaggaaattttgtaggcaattatcaaaacaaaaaggtagaggggaaggcacaaggaagctctcatgggctaccaaagaaggatgcgctgagtgggtcagattcgcaaagtttgaatcagtcaactgtctcaatggctagaaagaaacggattcatgctcagttcaatgatttacaagaatgttacctccaaaagcggcgtcagttggcagaccaaccaaatagtaaacaagaaaatgataagagtgtagtacggagggaaggctatagcaacggccttgcagattttcaatctgtgttgactaccttcactcgctacagtcgtctaagagttatagcagaaatccggcatggggatatatttcattcagccaacattgtatcaagcatagagtttgatcgtgatgatgagctgtttgccactgctggtgtttctagatgtataaaggtttttgacttctcttcggttgtaaatgaaccagcagatatgcagtgtccgattgtggagatgtcaactcggtctaaacttagttgcttgagttggaataagcatgaaaaaaatcacatagcaagcagtgattatgaaggaatagtaacagtgtgggatgtaactactaggcagagtcttatggagtatgaagagcacgaaaaacgtgcctggagtgttgacttttcacgaacagaaccatcaatgcttgtatctggtagtgacgactgcaaggttaaagtttggtgcacgaggcaggaagcaagtgtgattaatattgatatgaaagcaaacatatgttgtgtcaagtacaatcctggctcaagcaactacattgcggtcggatcagctgatcatcacatccattattacgatctaagaaacataagccaaccacttcatgtcttcagtggacacaagaaagcagtttcctatgttaaatttttgtccaacaacgagctcgcttctgcgtccacagatagcacactacgcttatgggatgtcaaagacaacttgccagttcgaacattcagaggacatactaacgagaagaactttgtgggtctcacagtgaacagcgagtatctcgcctgtggaagcgagacaaacgaagtatatgtatatcacaaggaaatcacgagacccgtgacatcgcacagatttggatcgccagacatggacgatgcagaggaagaggcaggttcctactttattagtgcggtttgctggaagagtgatagtcccacgatgttgactgcgaatagtcaaggaaccatcaaagttctggtactcgctgcgtag

SEQ ID NO: 306 - DNA, 1761 bp, Arabidopsis thaliana
accatggttttaccagagcttctcgtgattctagcagaatgggttctttaccgtcttcttgctaaatcatgttacagagctgctagaaagctcagaggctatggtttccagttaaaaaatctcctaagcctctccaaaacacaatctctacacaacaattctcagcatcatcttcataaccatcatcaacaaaatcaccctaaccaaacccttcaagattctctagaccctctgttcccaagccttacaaaataccaagaacttcttctagacaaaaacagagcatgctctgtttcgtctgatcattatcgtgatacctttttctgcgatatcgatggtgttttattaagacaacattcgagcaaacacttccacacgttcttcccttacttcatgctcgtggcttttgaaggaggatcgatcatcagagcgatccttctcttgctctcctgttctttcctttggactctgcaacaagaaaccaaactcagagttctctctttcataaccttctctggtcttagagtcaaagacatggacaatgtttctagatcggttctaccaaaattcttcctcgagaacttgaatatccaagtttacgacatctgggctcgaactgagtactccaaagttgtgttcacgagcttgccgcaagtgctggtggagaggttcctcagagaacatctcaacgctgatgatgtgattgggactaaactgcaagaaataaaagtcatgggaaggaaattctacacaggcctagcttctggttctggtttcgtcctgaaacataaatcagctgaagactacttttttgatagcaagaagaagcctgcacttggaattggaagctcttcaagcccacaagatcacatcttcatctccatttgcaaagaagcttatttttggaatgaagaagagtccatgagcaagaacaacgcattgcctagagaaagatacccaaagccactgatattccacgacgggagattggctttcttgccaacaccattagctacattagccatgttcatatggctccctatcggatttttactcgctgtcttcaggatctcggtaggagtctttcttccttaccatgtagccaatttcttggcttctatgtccggtgttaggatcactttcaagacccataatttgaataacggtcgtccagagaaaggtaatagtggagtcttgtatgtatgcaaccataggaccctcctcgacccagttttcctcaccacttcgctgggcaagcccttgaccgcggttacttacagcctaagcaagttctccgagttcatagcacctctcaagacggttagccttaaaagagataggaagaaagacggtgaggcaatgcagagactattaagcaaaggagatctagtggtttgtccggagggaaccacatgtagagagccttatctactaaggttcagtcctttgttcgctgagttaactgaagacattgttcccgtggctgtagatgctcgagtgagcatgttctatgggacaactgcgagcgggctcaagtgtttagaccctatcttcttcctcatgaaccctaggccggtttattgtcttgagattttaaagaagttgccaaaagagatgacttgtgcaggaggcaagtcaagctttgaagttgcgaatttcatacagggagaacttgctagggttttgggatttgaatgcactaatctcacaaggagggataagtacttggttcttgctggaaatgaaggcattgtcagatag

SEQ ID NO: 307 - DNA, 696 bp, Arabidopsis thaliana
accatgaacgacggagatgtatcgaggcagatccagcagatggtgagatttatccgccaagaagcggaagagaaagcaaacgagatctcggtttctgctgaagaagaattcaacattgagaaactccagcttgttgaggcggagaagaagaagatcaggcaagattatgagaagaaggagaagcaagctgatgttcgcaagaagattgattactctatgcagctaaatgcatcaaggatcaaagttcttcaagcgcaagacgatattgtcaatgccatgaaagaccaagcagctaaggatcttctgaacgttagtcgcgatgagtatgcctacaaacagctcctcaaggatctaattgttcagtgtttgcttcggttgaaagaaccttctgtgttgttgcgttgtcgtgaagaggacttgggtttagtggaagctgtacttgatgacgcaaaggaggaatatgctggtaaagcaaaggttcatgccccagaggttgctgttgacacaaaaatattccttccccctcctcctaaatctaatgatcctcatggtctccactgctctggaggtgttgtgttagcttctcgtgatgggaaaatcgtgtgcgagaacacacttgatgcgcgtcttgatgtggcattccgtatgaaactcccagtgatccgtaagtcgttgttcggccaagttactgcctag

SEQ ID NO: 308 - DNA, 1166 bp, Arabidopsis thaliana
ataccatgtctgtacatgtcaaggaagaacctgtgcttgttccaaactgcgatgtcgagaatacagagcttgcagttttcaatggaaatggagaaagtgagcttgagaattttgggacttgcgtagatgagataacagatagagtgaatcagcttgagcaaaaagttgtggaggtcgaacacttttactctacaaaagatggagctgctcaaactaacacttctaagagtaactcgggcgggaagaagatcgctatttctcaaccaaacaactcgaagggtaactcggccgggaaagaaaaatcaaagggaaaacatgtttccagccctgaccttatgcgtcaatttgcaacaatgtttcgtcagattgctcaacataaatgggcatggccgttcttggagcctgttgatgttaaaggacttggactacatgattattacaaggttatagagaagccaatggacttgggaacaattaaaaaaaaaatggagagttcggagtatagcaatgtcagggagatatatgccgatgttagactagttttcaagaacgcgatgagatacaatgaagaaaaagaagatgtttatgtgatggctgaatctcttctggagaaatttgaggagaaatggctcctgataatgcctaaacttgtggaggaggaaaagaaacaagtagacgaagaagcggagaagcatgccaataagcagcttacaatggaggctgcacaagcggaaatggctagggatttaagcaacgaactatatgagattgatctgcagctggagaaactccgggaatcagtagttcagagatgcagaaaactgtccactcaagaaaagaaaggactttctgcagctctaggtcgtctctcacctgaggatctgtctaaggcgttaaaaatggtttcagagagcaacccgagtttcccggctggagcaccagaagtcgagcttgacattgatgttcagactgacgttacattgtggagactgaaggtgtttgtgcaagaagcattgaaagcagctaacaaaagctctggaggaacaaacgctcaaaacaataacaatactggaactggagagatcaacaagaacaatgcaaaaagacggagagagatctctgatgcaatcaataaagcttcaattaaaagagctaagaaagcttag

SEQ ID NO: 309 - DNA, 723 bp, Agrobacterium tumefaciens
atggatctgcgtctaattttcggtccaacttgcacaggaaagacgtcgaccgcggtagctcttgcccagcagactgggcttccagtcctttcgctcgatcgggtccaatgttgtcctcagctgtcaaccggaagcggacgaccaacagtggaagaactgaaaggaacgagccgtctataccttgatgatcggcctctggtgaagggtatcatcgcagccaagcaagctcatgaaaggctgatggggggggtgtataattatgaggcccacggcgggcttattcttgagggaggatctatctcgttgctcaagtgcatggcgcaaagcagttattggagtgcggattttcgttggcatattattcgccacgagttagcagacgaagagaccttcatgaacgtggccaaggccagagttaagcagatgttacgccctgctgcaggcctttctattatccaagagttggttgatctttggaaagagcctcggctgaggcccatactgaaagagatcgatggatatcgatatgccatgttgtttgctagccagaaccagatcacatccgatatgctattgcagcttgacgcagatatggaggataagttgattcatgggatcgctcaggagtatctcatccatgcacgccgacaagaacagaaattccctcgagttaacgcagccgcttacgacggattcgaaggtcatccattcggaatgtattag

SEQ ID NO: 310 - DNA, 1724 bp, Escherichia coli
ataccatgaaacaaacggttgcagcttatatcgccaaaacactcgaatcggcaggggtgaaacgcatctggggagtcacaggcgactctctgaacggtcttagtgacagtcttaatcgcatgggcaccatcgagtggatgtccacccgccacgaagaagtggcggcctttgccgctggcgctgaagcacaacttagcggagaactggcggtctgcgccggatcgtgcggccccggcaacctgcacttaatcaacggcctgttcgattgccaccgcaatcacgttccggtactggcgattgccgctcatattccctccagcgaaattggcagcggctatttccaggaaacccacccacaagagctattccgcgaatgtagtcactattgcgagctggtttccagcccggagcagatcccacaagtactggcgattgccatgcgcaaagcggtgcttaaccgtggcgtttcggttgtcgtgttaccaggcgacgtggcgttaaaacctgcgccagaaggggcaaccatgcactggtatcatgcgccacaaccagtcgtgacgccggaagaagaagagttacgcaaactggcgcaactgctgcgttattccagcaatatcgccctgatgtgtggcagcggctgcgcgggggcgcataaagagttagttgagtttgccgggaaaattaaagcgcctattgttcatgccctgcgcggtaaagaacatgtcgaatacgataatccgtatgatgttggaatgaccgggttaatcggcttctcgtcaggtttccataccatgatgaacgccgacacgttagtgctactcggcacgcaatttccctaccgcgccttctacccgaccgatgccaaaatcattcagattgatatcaacccagccagcatcggcgctcacagcaaggtggatatggcactggtcggcgatatcaagtcgactctgcgtgcattgcttccattggtggaagaaaaagccgatcgcaagtttctggataaagcgctggaagattaccgcgacgcccgcaaagggctggacgatttagctaaaccgagcgagaaagccattcacccgcaatatctggcgcagcaaattagtcattttgccgccgatgacgctattttcacctgtgacgttggtacgccaacggtgtgggcggcacgttatctaaaaatgaacggcaagcgtcgcctgttaggttcgtttaaccacggttcgatggctaacgccatgccgcaggcgctgggtgcgcaggcgacagagccagaacgtcaggtggtcgccatgtgcggcgatggcggttttagcatgttgatgggcgatttcctctcagtagtgcagatgaaactgccagtgaaaattgtcgtctttaacaacagcgtgctgggctttgtggcgatggagatgaaagctggtggctatttgactgacggcaccgaactacacgacacaaactttgcccgcattgccgaagcgtgcggcattacgggtatccgtgtagaaaaagcgtctgaagttgatgaagccctgcaacgcgccttctccatcgacggtccggtgttggtggatgtggtggtcgccaaagaagagttagccattccaccgcagatcaaactcgaacaggccaaaggtttcagcctgtatatgctgcgcgcaatcatcagcggacgcggtgatgaagtgatcgaactggcgaaaacaaactggctaaggtag

SEQ ID NO: 311 - DNA, 1224 bp, Zea mays
atggcggcgcccaccacctcccgccgcggccccggcggcgcgcgcaacatggacgacgagaacctaaccttcgagacctccccgggggtcgaggtcgtcagcagcttcgaccagatgggcatcaaggacgacctcctccgcggcatctacggctacggtttcgagaagccctccgccatccagcagcgcgccgtgctccccatcatcaacggccgcgacgtcatcgcgcaggcccagtccggtaccggcaagacgtccatgatctccctcaccgtctgccagatcgtcgacaccgccgtgcgcgaggtgcaggctttgattctctcgcctactagggagcttgcttcccaaacagagagagttatgctggctattggggaccacctcaacgtccaagtgcacgcttgcattggtggaaagagtattggtgaggacatcaggaggctcgagaatggggtgcatgtcgtctctggaactccaggcagagtctgtgatatgatcaagaggaggacactgcggaccagagccatcaagcttctagttctggatgaagctgatgagatgttgagtagaggctttaaggatcagatttacgatgtctacagatatctccctccagaacttcaggtggttttgatctctgcaactcttcctcatgagatcttggagatgactagtaagttcatgaccgaaccggttaggatccttgtgaagcgtgatgagctgaccctggagggcatcaaacaattctttgttgctgttgagaaagaggagtggaagtttgatacactttgtgatctttatgatacactcaccatcacccaagctgttattttctgcaatactaagagaaaggtggattggctcactgaaaaaatgcgtacaaataacttcaccgtatcagctatgcatggtgacatgccccaacaagaaagggatgccattatgggtgagttcaggtctggcgcaactcgtgtgctaataactacagatgtttgggctcgaggactggacgttcagcaggtttcacttgtcataaattatgatctcccaaataatcgtgagctttacatccatcgcattggtcgttctggtcgttttgggcgcaagggtgtggcgatcaatttcgtgcgcaaggatgacatccgtatactgagagatatagagcagtactacagcacacaaattgacgagatgccaatgaatgttgctgatcttatttag

SEQ ID NO: 312 - DNA, 1224 bp, Zea mays; identical to SEQ ID NO: 311

SEQ ID NO: 313 - DNA, 1401 bp, Arabidopsis thaliana
atgttcattgcaatggcagatttcaaaattcttttgcttatactcatccttatatctctctttgaacttgatctacttcattttcaccatgacttcttctctccttttccggtcaagatcggtttactcctgatatccatcttcttctatgcctactcaaccacccggtctaaaccggtttacctagtggatttctcatgtcaccaacccacggattcttgcaaaatctcatccgaaacgttcttcaacatggccaaaggcgctcaactctacaccgatgaaacaatccaattcatgacgaggatattaaaccggtccggtttaggagacgatacgtactccccacgttgcatgttaacctctccaccaactccatcaatgtacgaggcgagacatgaatccgaattagttatcttcggagctcttaactcactattcaagaaaaccggaatcgaaccgagagaagtcggaatcttcattgtaaactgcagcttgtttaaccctaacccatctctctcgtccatgatcgtaaaccggtacaagcttaaaaccgacgtcaaaacttacaatctctccggtatgggatgcagcgccggcgcaatctccgtcgacctcgccacaaatctactaaaggcaaaccctaatacctacgcagttattgttagtacggagaacatgaccctaagcatgtatcgaggcaacgaccggtcaatgttagtccctaactgtctattccgagtaggtggcgctgcggttatgctctcaaaccggagtcaagaccgagtccggtctaagtacgaattgactcatattgtaaggactcacaaaggctctagcgataaacactacacttgtgctgaacaaaaagaagatagtaaaggtatcgttggagtcgcactctctaaagaactaacggttgttgctggtgactcgttaaagacgaatctaacagcacttggtccgcttgtgttgcctttatctgaaaaactccggtttatcctctttttggtaaagagtaagcttttccggttaaaggttagtccatatgttccggattttaaactatgtttcaagcatttctgtattcacgctggtggtagagcgttacttgacgcggttgaaaaaggtcttggacttagtgagtttgatcttgagccgtctcggatgactttgcaccgctttggaaacacttcaagctcgtcgctgtggtacgagctggcttacgtggaggctaaatgtcgggtcaaacgaggagatagggtttggcagttggcgtttgggtcgggttttaaatgtaatagtattgtgtggagagcgttgagaacgattccggctaacgagtcattggtgggtaacccgtggggtgactcggttcataagtatccagttcacgtgacctag

SEQ ID NO: 314 - DNA, 621 bp, Arabidopsis thaliana
atgccttctcgtagaagaactctcctcaaagtcatcatcctcggtgatagcggggttgggaagacttctttaatgaatcaatatgttaataagaagttcagcaaccagtataaggcaactattggggctgatttcttgactaaggaagttcaatttgaagaccggcttttcactttacagatctgggacacagctggtcaagaaaggtttcagagtcttggtgttgcgttttatcgtggtgctgattgctgtgttcttgtatatgatgtcaactccgcaaaatcattcgaggatctcaacaactggagggaagagtttctgatccaggcaagtccttcggatccagagaactttccctttgttgttatcggtaataagatcgatgtggatggtggaagcagccgggtggtatcagagaagaaggctcgagcttggtgtgcttcgaaaggaaacattccatactatgaaacctcagctaaagtaggcaccaatgtagaagacgcgttcctgtgcataactacgaacgcaatgaagagtggagaagaggaagaaatgtacctaccagacacgatcgatgtcggaaccagcaatccacagaggtcaacaggatgtgaatgctag

SEQ ID NO: 315 - DNA, 621 bp, Arabidopsis thaliana
atgccttctcgtagaagaactctcctcaaagtcatcatcctcggtgatagcggggttgggaagacttctttaatgaatcaatatgttaataagaagttcagcaaccagtataaggcaactattggggctgatttcttgactaaggaagttcaatttgaagaccggcttttcactttacagatctgggacacagctggtcaagaaaggtttcagagtcttggtgttgcgttttatcgtggtgctgattgctgtgttcttgtatatgatgtcaactccgcaaaatcattcgaggatctcaacaactggagggaagagtttctgatccaggcaagtccttcggatccagagaactttccctttgttgttatcggtaataagatcgatgtggatggtggaagcagccgggtggtatcagagaagaaggctcgagcttggtgtgcttcgaaaggaaacattccatactatgaaacctcagctaaagtaggcaccaatgtagaagacgctttcctgtgcataactacgaacgcaatgaagagtggagaagaggaagaaatgtacctaccagacacgatcgatgtcggaaccagcaatccacagaggtcaacaggatgtgaatgctag

SEQ ID NO: 316 - DNA, 358 bp, Lycopersicon esculentum
gcgataccatggaaatgtttggaaaaattgcatgctttgtggttttttgcatggtggtggttgcaccccatgcagagtcactgagctgcggcgaggttacgtctggcttggctccttgtctcccttatctcgagggtcgcggccctctaggagggtgttgtggtggtgttaagggtctattgggcgcagccaagaccccagaagaccggaagacagcgtgcacttgccttaaatcggcagctaattctattaagggcattgatacaggaaaagccgctgggctccctggagtttgtggagtcaacattccttacaagatcagcccttccactgattgctcaacggtccagtagatcgc

SEQ ID NO: 317 - DNA, 1662 bp, Arabidopsis thaliana
atggatgtctccaacacgatgctccttgtagctgttgttgcagcttactggctatggttccagcggatctcaaggtggctaaagggtccacgtgtttggccagttttgggcagtcttccgggtctgatcgagcagcgtgaccgtatgcacgactggatcactgagaacctccgtgcgtgtggcggcacttatcagacatgtatctgcgccgtacctttcttggcaaaaaagcaaggtctcgtgaccgtcacgtgcgatcccaagaacatcgaacacatgctcaagaccaggttcgacaactaccctaaaggtcctacgtggcaagccgtgttccatgacttcctcggccaaggtatcttcaactccgacggtgacacttggctcttccagcgtaaaaccgccgctcttgaattcaccaccaggacgttgaggcaagcgatgggtcggtgggtgaaccggggaatcaagctccggttttgtccaattctcgaaacggctcagaacaattacgagccggttgatctccaagacttaatactacggctcacattcgacaacatttgcggtttagcattcggtaaagacactcgaacctgcgcaccgggacttcccgagaacggtttcgcctcggctttcgaccgagccaccgaagcttctctccagcggtttattctaccagagtttctatggaggctgaagaaatggcttggactcggcttagaagtcagcttgagccggagcctaggagagatcgatgggtatttagatgctgtcattaatacacgtaagcaagaattgctgagtcagcgagagagtggggtccagcgtcacgacgatctcctctctcgtttcatgaagaagaaagaccagtcgtacagcgagacgttcttacgacacgtggcgcttaacttcatcctagctggacgtgacacgtcatcagtagcgttgagctggtttttctggctcatcacgacgcatccgacggttgaggataagatcgtccgcgagatatgctccgttctgattgagacacgtggaaccgatgtatcgtcgtggacggcggagccgttggaattcgatgaggtcgaccggttggtttacctgaaggccgcgctctctgagacgttgaggctttacccgtcggtgccggaagattcaaagcacgtcgtgaacgacgatatcttaccggacggaactttcgtaccggcgggatcgtcggtgacttattcgatctacgcggcggggaggatgaagagcacgtggggagaggattgcttggaattcaaaccggagaggtggatctcgccggacgatggaaaattcgtgaatcacgatcagtaccgattcgtggcgtttaacgccggacctaggatctgtctaggaaaagatctagcgtatctgcagatgaagacgatcgcggcggcggttttactcaggcatagactaacggtggcgccgggacacaaggtggagcagaagatgtcgttgactttgttcatgaagaacggacttttggtcaacgtgcacaagagggatttggaagtgatgatgaagagtctcgtacccaaagagagaaacgacgtcgttgttcttaacggaaaatgcaacggcggtatcggtgaaggcgtcgccgttaatgcggctgtggcggttgccgtgtag

SEQ ID NO: 318 - DNA, 606 bp, Arabidopsis thaliana
atgaactcactcgccattagagtctccaaggttctcagatcctcttcaatatctcctttagcaataagtgctgagagaggctctaagtcgtggttctctactggtcctatcgatgaaggtgtagaagaagattttgaagaaaatgttacagaaaggcctgagcttcaacctcatggagttgatcctcgtaaaggttggggatttcgcggtgttcatagggcgattatttgtgggaaagtagggcaagcaccgttacagaagatcttaaggaacgggcggacagtaacgatctttacagtaggaacaggtgggatgtttgatcagaggcttgtaggagctactaatcagccaaaaccagctcagtggcatagaatcgctgtgcacaacgaagtgcttggctcttacgctgtccaaaaactcgctaaaaactcgtcggtttatgtggaaggtgatattgagactagagtgtataatgatagcatcagcagtgaagtgaagagtatccctgagatttgcgttcgtcgtgatggtaagattcggatgatcaaatatggtgaaagcattagcaaaatctcttttgatgagctaaaagaaggattgatttag

SEQ ID NO: 319 - DNA, 342 bp, Escherichia coli
atgacaatgaacattaccagcaaacaaatggaaattactccggccatccgccaacatgtcgcagaccgtctcgccaaactggaaaaatggcaaacacatctgattaatccacatatcattctgtccaaagagccacaagggtttgttgctgacgccacaatcaatacacctaacggcgttctggttgccagtggtaaacatgaagatatgtacaccgcaattaacgaattgatcaacaagctggaacggcagctcaataaactgcagcacaaaggcgaagcacgtcgtgccgcaacatcggtgaaagacgccaacttcgtcgaagaagttgaagaagagtag

SEQ ID NO: 320 - DNA, 375 bp, Synechocystis sp. PCC 6803
atgtcaactttgtatgaaaaattaggtggaaccaccgctgtcgatctagctgtggacaaattttacgagcgggtgttgcaggatgaccgcatcaaacattttttcgccgacgtggatatggctaaacaacgggcccaccaaaaagcctttttaacctatgcctttggcggtacggataaatatgatggtcgctatatgcgggaagcccacaaagagttggtggaaaaccatggtttgaacggtgaacacttcgacgcagtggcggaggatttgctggcaaccttgaaggaaatgggtgttcccgaagatttaattgcagaagtggccgccgtggccggggctccagcccataaacgggacgtgcttaatcagtag

SEQ ID NO: 321 - DNA, 951 bp, Zea mays
atgccgctaatcgacgccgccgcctcggcggtcgcgccgcccccaccccggcgagtggctcaactccgcttcttcagcactcgcagacccggaatcctatccctaactgccaccagctgctccccctcccctccgcccccggtcgctgcggaggtgcctgcgccgccacaggaagcgaagtcgaagccgaggccacggcggtacccgaagcagtaccccggcgagtcggtgggcgttgctgaggagatgcgctttgtcgccatgcgcctgcgtaaccccaagcgcaccaccataaaagacaagtcggggacggaggacgcggacgccggggcgggggtgtcggagggcgaggctgaggaggacgacggcggcggcgtgaaggaggaacacgaggaggaggatgagggcgagctcgaggaaggggaatggatgcccagcatggaggggttcgtgcgatacctggtggacagcaggctcgtcttcggaaccatcgagcgggtcgtggccgagtccaccgatgtcgcctatgtttacttcaggaaaagtggtttggagcgttcagctagcatttcaaaagatttggagtggttcagaaaacaagggattgcaatcccagagccgagtacttcgggatcaacttatgcagcttatctgactgaactggctgagagcaacgctcctgcattcctctctcattattacaatatctattttgctcatataactggaggtgtcacaataggcaataagatctgcgaaaagattctggaaggaagggatctggagttctacaagtgggatactgatgctgaacttctactaaaagatgccagggagaagctgaatgagctcagcaagcactggactcggaaggacaggaacttgtgcttgaaagaagctgcaaaatgcttccagtacttgggaaagatggtccggttaattatcttgtag

SEQ ID NO: 322 - DNA, 751 bp, Arabidopsis thaliana
tcgttaccatggcaaaagtttcgtttaaggattctctgaaagctcttgaagctgatattcaacacgctaacactgtagctttagattatcctcgggagaaggatggagcgcgtgttcaaatgaggctatcgtacactccagctgctcagtttttactttttcttgtacaatggactgattgccatcttgctggtacactcggtctgctcagagttctgatttacatgacctatgcggatgggaaaaccacaatgtcggtttatgagagaaaaacaagtattaaagatttctatgctgtgatatttccgtcgttgttacaactagaaagaggtatcacagacctggatgatcgtaaacagaaagaagtctgcaaaatacggtacagaaataaagatgagactgaaaaggtcaagctctcggagattgacatcgagagagaagaagaatgcgggatttgtatggagatgaacaacatggtggttctccctaattgtacgcattctttatgcatcaagtgttaccgcgattggcacgggaggtcagaatcatgccctttttgccgagacagtcttaagagagtaaactcaggggacttatggatgttaatggagaaatccgatacggttaatatgtatacaattgagcgggagaataagaagaggttgtttgtgtatatagagaagctacctctagtggttccagatcaagtgtttgcttcttctccttatgattgccatgtcaagtagaaccc

SEQ ID NO: 323 - DNA, 1101 bp, Agrobacterium tumefaciens
atggcctatgaccagaaacgcgttgtcgacgccatccgcgcattcgaagccggcgaaatcgttgtcgtgaccgatgatgacgaccgcgagaacgaaggcgatctgatcatttcggcggttcactgcacgccggaaaaaatggcgctgatcgtgcgccatacatccggcatcgtctgcgcgccgatgccgcgcgaagaagcgaagcgtctgaacctcaacgccatggtggcggaaaacgacagcgcccacacgacggccttcaccgtcagcgtcgatttcaagcacggcacaacgaccggcatttccgccgatgaccgcaccctaacggtgcgcaatcttgccaatcccaatgtcggcgcttccgacttcacccggccgggccatattttcccgctgatttcccgcgaaggcggcgtgttgatgcgttccggccacaccgaagcggccgtcgatctctgccggctcgccggcctgccgcccatcggtgtcatcagcgagcttgtgaatgatgatggcagcgtgatgcgcggcccgcaggttctggatttcgccgacaaacacggcatgaaacatgtgtcggttgccgacctcatcgcctatcgccagcgcaaggaaacactggtggagatggaatcctccttcaccatcgagacgcccttcgggccggccatggcgcagacctattccctgccctgggacccgatgcagcatatggcggtgattttcggcgacatcagggacggcgtcgacattcccgttcgcctgcatacggaaaatgtcgccgacgacgtattcggcgaccgtcagccagtgcggcattacatgcagaagatcgctgaagaaggccgcggcgtcatcgtctatctgcgcgagggctccgtcggcgtcggccaggtcgccggacgccgcaaggcgcgtgatcccgatgaagcgcatgcgcaggcccgctctcgcgagaatgaatggctggaaatcggccttggcgcacaaattctcaaagacctcggcatcagctccatcaagctgctgacaacccgcgaacgccattatgtcgggcttgaagggttcggcatccagatttcggcgacggatatctgctag

SEQ ID NO: 324 - DNA, 279 bp, Arabidopsis thaliana
atggcgaagagaacgaagaaggttggaatcgtcggcaaatacggaacacgttatggtgcgagtatcaggaagcagattaagaagatggaggtcagccagcacagcaagtacttctgtgagttctgtggcaagtacggagtgaagcgaaaggctgttggtatctggggttgcaaggattgtggcaaggtcaaggcaggtggtgcttacacaatgaacaccgccagtgcggtcactgttagaagcacgatcagaaggttgagggagcagatcgagggttag

SEQ ID NO: 325 - DNA, 837 bp, Zea mays
atgtcacggctactcccgcccgtgctctctcctttaccggcgttctcgctgccgccgccgcttcttcctcgcatccacatccgcacgtcggcggtgagaggcggtgcggcggagaacgcgatggcgtccgggacgacggcgagggagcggcgcctggtcaaggtgcgggaggagcgccgccgccgcgagtacgaccgggagcacacctaccccggatgggccaaggtactggagaacgcctgcagggatgatgaagagctccgcgccattcttggtgatagcatcggcaacccggagctcatgaagcaacggatccaggaaagggtgcgcaagaaaggcagggcccaattcaataaatccaagacaggctccattgttgcttttaaagtcagctttcgagactttaacccattgaattctttcatttggtttgagctctttggagaaccaacagatcgagatgttgacctgcttggtggtgtagtccaagcttggtatgtcatgggaaggctaggagcttacaattcttcaaatttgcagctggccaactcaatgatggactacgacccttcatatgattctgaagaagcttccacagtaatgccatcatctttccatgatatcagtgatgttgagttccaagacaattgggccagggtttgggtggaccttggaacctcggattaccttggcttggatgtattactaaactgcttaacacagttgagctcagagcacttgggtatcaaacaagtggtttttggaggcaagaaaatgggtgactgggaagagggcatgacgagctctgattatggatacaagcacttcaagatatag

SEQ ID NO: 326 - DNA, 423 bp, Zea mays; identical to SEQ ID NO: 125

SEQ ID NO: 327 - DNA, 825 bp, Zea mays
atgggtagtaggagatatgacattgatacgaggagatgtgggatccactcaagaccaaccaaatcaatgtatctggatgctcaacaaatcgtcagctgccaaactagagtgggagaccacgatgttggttcctgtgctgtgaagcatcacttcccgtctccaatcgtatcttggatagaagatctttccagctttggcaatgcttcttttaatcctgtctctgaatatgtggatgagcaagccagagcttcagtgggacagtcttcagcatcaagtaatttgcatgacatgcaaatatcagtgagattgacagccgaattcatggagcttgcaaaggagaatacaagcaataatctagagacttgtggaattcttggtgcttcatttagggatggaacttattttgtcacgatgttgattataccaaagcaagaaggaactgctcactcatgtcaggctgttagtgaggaggagatacatgccgtgttatcagagcagtcactttatcctgcagggtggattcatactcatccttcacaaacatgctttctatcatcgatcgacttgcatactcaatactcttaccaggttatgttaccagaggctgttgcaattgtggtcgcacccacagatccaaccaggagttacggaatattcaggctgactgaacctggagggatggatgttcttagggagtgtgacgaaagtgggttccacactcaccgagagacaaccaacggcagcccaatctatgaaacctgctcgaaagtgcacttcaatcccaacttgcggtttgagattgtcgacctgcgctcggctcaatag

SEQ ID NO: 328 - DNA, 909 bp, Zea mays
atgctcggcctccggcgcctccccgctgtctccggccgcctcgcgccggaggtcacctccgtctctgcggcctcctcccacagcgccgtcttctttcgcaccctccaaatcctcgtccagcaggggcccgtccgcctccaaaagctctctgctccggacaccgggatcgtggagctgaggctggagcggccggaggccaagaatgccatagggaaggagatgctccaggggctgcggagcgcgatccaggaggtggaggccgacacggctgcaaacgtcgtcttggtgacgagctcggtgcccaaggttttctgcgcgggcgctgatctcaaggaaaggaggttgatgggtcctagtgaagttcgggacttcgttaattccttaaggtctacattttcatcctttgaggcactgtctattcctacaattgctgttgtcgaaggggttgcttttggtggcgggttagaattggctctgtcatgtgatcttcgcatatgtggcaaggatgcaaaattcagtttgccagagactggccttgctattatcccaggtgctggaggaacacagcgccttcctaggattgttggaaggtcaagagcaaaagaactaatattcactggtcgtagattcgatgcggtggaggctgtaactatgggagtagtaaactactgtgttcctgccggcgacgcttatcaaaaggctcttgaacttgcgcgggagataaaccagaaaggcccgttagcagtaaaaatggctaagaaggccatcgatcaaggggcagaggtagacttgccctcagcattggccgttgaagaagaatgctaccagcaagtcctgcacactgaggatcgtcttgagggtctagccgcattcgccgagaaaagaaagcctatatataaagggaagtag

SEQ ID NO: 329 - DNA, 1500 bp, Zea mays
atgtaccgcgccgccgggagccacctccgctccctcaagcatcatggtgcttctaggcttgccagtacaagtgttgcgaagcagtcctcaggtggtctgttcagctggcttcttggtggaaaatcaagcgaactccctccccttgatgttccactcccaggcattagcattccctcacctctaccagattttgtagagccatctaagacaaaagtcactactcttccaaatggcgtcaagatcgcctcggagacatcatcgagcccagcagcatctgtgggtctgtacattgactgtggttccatttacgaaacacctgcttcatctggagtatcacatctgttggagagaatggccttcaagagcacagtgaatcggactcacttacggttagttcgtgaggtagaagccattggaggaaatgtctctgcatcagcttcccgtgaacaaatgagctatacctatgatgcattgaagagctatacaccagaaatggttgaagttctcattgacagtgtgaggaatccagcattcctcgattgggaggtcaaagagcagctccagaacataaaatctgaaatagctgatgcgtctgctaatcctcaaggtctacttctggaggcccttcattcggttggatattccggggcactggcaaaacctttgatggcttcagaatctgctgtaaaccggttggatgttagcagcttggaggaatttgttgctgaacattacactgctcccaggatggttcttgcagcatcaggagttgatcatgatgcgctgatttcagttgtagaaccacttctgtctgaccttccgtgcgtgaaacgtcctgaagagccaaaatctgtgtacgtgggaggagactatcgctgccaagcagattctccaaacacacacatcgcacttgcttttgaggtgccaggtggttggaatcaagagaaaactgcaatggttgtgacagtgcttcagatgctcatgggaggaggagggtccttctctgctggtgggcctggaaagggaatgcattctcgattgtatctccgtgtcttgaccaacttccaacagattgaatcattctctgctttcaatagcgtctataacaattcgggcctttttggaatttatgcagtcactagcccagacttttcatcgaaggctgtggatttggcagcaggggaactcctggagattgcgacacctggaaaagttacacaagaacaacttgatcgtgctaaagaggcaaccaaatctgcagttctgatgaacttggaatcaaggtctatagcatctgaagatattggaagacaggttcttacttatggggaaaggaagcccatcgagtatttcctgaaaacagttgaggagatcactttgaatgacattttgtcaaccgcaaaggagatgatgtctacaccactcacaatggcatcgtggggcgacgttattcatgttcctagctacgagtctgttagccgcaagtttcactcgaagtag

SEQ ID NO: 330 - DNA, 1014 bp, Glycine max
atgtcggaagcaccaccgcctccaactgccgatgcgtcaccgcctccgtactggtgctaccactgcgagaagcgcgtctccgtcgaaacgctcgcgaatctccccgacgtcgtctgcggcgagtgcaagaacggctttgtggaatccatgcccacgccgtcgcgctctcgctccccctccgcctcctccgacgacccctacttcggctcgcagttcctccaggtccttcgcctaatcgctcagtcggcgcgtgacgacgacgcgtcgcctccgccgccgccgagccgctctccggagaacgatttcctcaggatcgagctcggcggctgggacaacgacgaggagaacgaaaacgacgacgataacggcgacgaggagttcgaggaacacgaggaggcggaggatcgctccggcaacgaagatccgcacggaggagacgacgaggatctgagaagaaggaggcgcgagctacttcggcttcggattagggatttggcgactcgtacgaggagcatgcggaaccggatcttggattgggccgagattctgatgggcctcgaggacaattccatcgagttccgcctccagctgccagaatccgaccgctacgtcggaaatcccgaggattacgtcgacgcggcagagtacgaggcgctgctgcagacgctggcggagagcgacgggggaggcaggaggggagcgccgccggcgtcgaaggccgcgctggaagccttgccgacggtgaaaattgcgtcggaaagcgaagccgtggcgtgcgctatatgtaaagatttgctcggtgttggagacgcggcgaagaggttgccgtgcgggcatcggtatcatggagattgcattgttccttggttgagttctcgaaattcttgccctgtttgcaggtttgagctaccaacggatgataaggaatacgaggaagagagagtggttatcgctgcttcttcgaattcgaacggagcttcgagttccggtggaggtggaagtgccattgtttag

SEQ ID NO: 331 - DNA, 1014 bp, Glycine max; identical to SEQ ID NO: 330

SEQ ID NO: 332 - DNA, 1344 bp, Bacillus halodurans
atgaaccatcgttacttaccaatgacaacggacgatcgacaggaaatgctacaggcgatcggtgtcgactcaattgaggaactgttttcggatattccgcaagatattcgcttcaaagggaagctgaacattccgaacgcgttaaaagagccagaactcattcgttattttcagcagttagcgaatgaaaatgttcacttaaaagataaagcctcttttttaggtgctggagtgtatgaccattacatcccatcaattgtcgaccatgtcatttcacgctctgaattttatactgcatataccccttaccagccggaaatttcccaaggggagttacaagccatctttgaatttcaaacgatgatttgtgaattaaccggaatggaagtggccaattcatccatgtatgacggaccgacagcattggcagaagcagcaatgatgagctgtggacatacgaaaaagaaaaaaattcttgtttccaaagctgtccatccagaggcgcgcgatgtattaatgacgaatgcttatggacaacgtttagaagtagttgagatcgacacgaacaatggtgtaacggatgtagagcatttaaaggcgttgtatgatgaggaaaccgcttgtgtgatcgtgcaacacccgaactttttcggccgacttgaaccattagcggaaattgaatcagttagtcatcaagggaaggcgacgttcgtcgtttcaagtaatcctcttgcgcttgggttattgaagccaccaggggccttcggagctgatgtggtcgttggagatgctcaaccgtttggaattccaacacaatatggcggccctcactgcggatattttgccactacgaaaaagttgatgagaaaagtacctggacggctcgttgggcaaacgaccgatgatcagggacagcgaggcttcgtgcttactctacaagcgagagagcagcatattcggcgtgaaaaagcgacatctaatatttgttcgaaccaagcccttaatgccctagccgctgcggttgctatggccacaatcggtaaacgtggcgtcaaggaaatggccttacaaaacgtacaaaaagcggcatacgctaaatcccagcttaaggccaatggtgtagaaatcgttgcagaaggaccttgctttaatgaatttatcattaagttaagcagtccgcttcatgaagtggaggaagcgttgcttgccaaaggattcattgcagggtacgacctggggaaagtgtatccagagcttgagggacatatgctcgtcgctgtgacagaggtaaggacaaaagaggagatagatcaatttgcaaaagaagtggggatgttcgcatag

SEQ ID NO: 333 - DNA, 1344 bp, Bacillus halodurans; identical to SEQ ID NO: 332

SEQ ID NO: 334 - DNA, 513 bp, Arabidopsis thaliana
atggcgatgaggttgaaatcaatggcgactttgccgaaattgattcaaagtatgagaaaagaagttccgaagcattctaatcctgttttgccctctctgagacgagctttttccctctatgatcagatcaatctcattgacaatgttcctgaagaccagcttcgcttccaagaatttaatgatacgagtttcactgtgaatggagtcaaatacgaaggtagcttactctgtgttgggaatctgttaatgtcatggagtcctcgtaaattttcagagatcaccactgatagcttgtctatcttccagacagttcgacctattccagagctcttgattgttggttgtggaagagacattcacccggtaactcccgaggtccgtcagtttgtcaagtcccttggcatgaaactagaaacagttgattctagaaatgctgcatcaacgtacaacattctgaatgaagaaggaagagtcgttgctgcggcattgcttccatatggagttacatcctag

SEQ ID NO: 335 - DNA, 513 bp, Arabidopsis thaliana; identical to SEQ ID NO: 334

SEQ ID NO: 336 - DNA, 969 bp, Arabidopsis thaliana
atgtggttttttggatcgaaaggagcatctggattctcgtctcgttcaactgcagaggaagtcacacatggtgttgatgggactggtctcactgccatagtcacaggagcatcaagtggtataggagtagagacagcgcgtgttctttcactgcgtggtgtgcatgtggttatggcggtgaggaacactgactctggtgctaaagttaaggaagatattgtcaagcaagtccctggagctaaactcgatgtcatggagttagatctcagctcaatgcaatctgtcaggaaatttgcgtctgagtacaaatctactggtcttccactcaacctcttgatcaacaatgccgggattatggcatgtccttttatgctctctaaggacaacatcgagctgcaattcgcaaccaatcatttaggtcattttctgttgactaaacttctgctagatacaatgaagagcacatcacgtgaaagcaaacgagaaggaagaattgttaacctatcatcagaagctcatcggttctcgtatccagaaggagttcgttttgataagatcaatgacaagtcaagttacagtagtatgcgagcttatggacaatctaaactctgcaatgtgttgcacgccaacgagcttacaaagcaactgaaggaagatggagtcaatataacagcaaattcgcttcatccaggagccattatgactaacctcgggcgctacttcaacccctatttggctgtagcggttggtgcagtggctaaatatatactcaagtctgttccacagggagcggcaacaacttgctatgtggcattgaatcctcaagttgcaggagtttcaggggaatacttccaagatagcaacattgctaaaccattaccacttgtcaaagatacagaattggccaagaaggtttgggatttcagcaccaagcttaccgattcacaatcaggagaaagcagttcttag

SEQ ID NO: 337 - DNA, 1321 bp, Zea mays
tcgttaccatgccggtgccgaagccgatggagaggaagcaagccgcctacagcaacctcgatgagaggtacgcgatccagggggagaagtaccaggggcagcagtacagccatatctacttcacgcgcctccaccacatgcggaatctcctccacgccctcgtcccctcctggaagccgcaactccctgtcactacagtgttaggacttgaagaaggaaaggattgcataattgttggaactttatataagcacatgaagttgaagccttcaattcttgatgaatatgccaaagagaggtctgcaattccccttgtcaaaccacataatttcatgcatcctgatgatcatctcattctggaagatgaaagcggaagagttacacttgcaggagccatacctccagcagcattcgtgactggggttgtagtggctctccatgggaaggaaacaagtgctggcaattttcttgtggaagatgttcttgaggctggtcttccaccccaaagtgcattgtctagcgcagaagaagacaagtatgtagtattcatatcagggctaagtgtaggaagtgacacattcaatcctctacagttccaacttcttattgaccatgtcacaggacatctgggtgacgagaatgagcaatccatagcatcaaatatagtacgcattgtggttgttgggaattcagtgcatatttcaccaaggtttgtcaatggtcagacggtaccatcaaaagatcaatcaaggatagcagaacctattaaggaactggatataatgcttacccagctcgtggcttcgttgcctgtagatatgatgccggggtgtcatgatccggcaaatttttctttgcctcagcagcctctgcacagatgccttttctctggggcatccacctacaacactttttcgtcttgttcaaatccccatcaattcgagcttgacagtgtccagtttcttggaacatctggtcagaacatagatgacctgtacaagtactctgatgctaaagacaagctggaattcatggaaagaacactgagatggcgccatcttgctcctactgctccaaatagcctaggctgttatccatacacagacaaggatcctttccttgttgaaagttgcccgcacgtctactttgttgggaatcaagataaatatgaaactcgactgttggaagggcaagaaaaacagaaagtgaggctaatctccatcccaaggttctcggagagtggagttgctgtaatgctcaatctgaggaacttggaatgcagcacattgagtttctcaacaagctttgatgcctagaaccc

SEQ ID NO: 338 - DNA, 780 bp, Glycine max
atgcacaaattgggaagaggtcatcgtgacaaactccagcagttcataacaataactggagccagcgagaaactagccctgcaggctctgaaggctagtgattggcatcttgaaggagcatttgatttcttttacagccaaccccagcttaaaacatttactgattctaggcacttggaggagctatacaatagatataaagatgcatatgttgatatgattttggcagatggtatcactctcctttgcaatgatatccaggtggatcctcaagatatagtaatgttagttctttcatggcacatgaaggctggcaccatgtgtgaattttccaagaaggagtttattgaaggtctacaatctttggggattgattctctggaaaagttccgtgaaaagataccttatatgcgctctgagctgaaagatgaacagaaattccgtgagatatataattttgcttttggctgggcaaaagagaagggtcaaaaatctcttgcattggatactgctattggtatgtggcaattattatttgctgagaagcagtggccgctggttgatcattggtgccagttcttgcaggctcggcataacaaagcaatatctagggacacatggtctcagcttttggagtttgcaaagactgttggctcaaatttatctgattatgatgccgaaggtgcttggccatatcttattgatgaatttgtggagtatctcaacgagaatggcataatccaaaatgatctgatcaatgattctagtctaaaacgatag

SEQ ID NO: 339 - DNA, 1416 bp, Arabidopsis thaliana
atgatcctgaagaaagtatggggatcggtgtggaaccgatcgaatagtggcaaggatttggtgaatcatcagagagcgatcgatgttcctcctctgttattgtcttcttcatcgtctcttggtgcgtttgatcagctaccgatggatattctagtccagatactgatgatgatggagccaaaagatgctgtgaaattgggcttaacgtgcaaagcctggaaatgcgtagctagtggtaatcgtctctggatattttatctccagtgttctcaagagccatgggactccattttcttcgctgaaactagtttgcgttctggttatcctctccgaatgatttctagtcaatcaggagagttgtcgtttatgcacatttatagtcagagggcacaagttcctggttctatcattattgatggtggttctggatattgtaagtttggttggagcaagtatgcgtctccttctggacgttctgctacttttttggaatttggtaacattgagtcaccgatttatgctagacttcaacagttctttgcaaccattttcaccaggatgcaggtaaagccctctatgcagccaatagtggtatcactacctctctgccattttgatgatactgaatcagccaaggcatcaaggcggcaacttaagactgctattttcaatgtcttgtttgacatgaacgtccctgcagtgtgtgcagttaatcaggctgtgttagctctatatgcagcacggcggacatctggaattgttgtcaacattggtttccaagtcatcaccattcttccgattttacatggtaaggtgatgcgccaggtaggtgtagaagtcattggttttggagcattgaaactcacgggcttccttaaggagaagatgcaagaaaacaacatttcctttcaatcactctacactgttcgtactcttaaagagaaactgtgttatgtggctcttgattataaagctgaactttcaaaagacacacaagcttcagtggaagtttcaggtgaaggatggtttactttatcaaaagagcgtttccaaacaggggagatattattccaaccacgtctcgctggaatgcgtgcaatgagtctgcaccaggccgtctcgctctgtatggaccactgtgatgcagcaggacttacaggtgacgatagttggttcaagactgtagtactaactgggggaagcgcgtgtttgcctggactctcagagaggctagagagagaactgcaagatcaccttccttcatctataagtaacggaatcagagtaatacctcctccttacggcgtggacacatcatggcatggggcaaagcttattagtaatttgagcatctttcctggtccttggtgtatcacaaggaagcagttccgtcgcaagtcaagactcatgtggtag

SEQ ID NO: 340 - DNA, 1446 bp, Bacillus halodurans
atggctttacaaacagaacaattcaacgcaaacattctaaggaatggtgagtgggtggaaagtcgaactggcgaacgcatttcgatttctgctccagcatctggcgtagctcttggatctatcccagccttatcccaagaggaagtaaatgatgcgattcaaggagcaaaagatgcacagaaaatttggaagattcgcccgattcatgaacgtgtagacttgctttacgcttgggctgaccttttagaggaacgaaaagagatcattggcgaactcatcatgcatgaagtggccaaaccaaaaaaatcagcaattggtgaggttagtcgaacagctgacattatccgtcacacagctgatgaagccctccgtttaaatggagaaaccctcaaaggggaccagttcaaaggaggaagttcgaagaaaattgctctggtggagcgcgaacctcttggtgtcgttttagcgatttcaccatttaactacccagttaaccttgcggcagcaaaaattgccccagccctcgtgacaggaaatactgtcgtctttaaaccggcaactcaagggtcattaagcggtattaaaatggttgaagcacttgcagatgcaggagcaccagaaggaatcattcaagttgtaaccggccgtggttctgttatcggtgaccacttggttgaacacccagggattgacatgattacatttacaggtggaacaactactggagagcgtatttccgaaaaagcgaaaatgattcctgtcgttttagagcttggcggaaaagatccagcgatcgttctcgacgatgccgacttaaagcttacagctagccaaattgtgagcggagctttttcctactctggtcaacgttgcacagcgattaaacgtgtgttcgttcaagacagtgtagcagatcagctcgtagctaacattaaggagctagtcgagcaactaacggtcggaagccctgaggacgatgcggacattactcccgttattgatgaaaaaagcgccgcgttcattcaagggttaatcgatgatgccctcgaaaatggagcaaccttactatctggcaacaagcgtcaaggcaacctcttgtcaccgacactgttagatgatgtcacacctgcaatgcgtgtagcttgggaagagccattcggccctgtccttccaatcattagagtgaaagacgcaaatgaagccattagcttgagcaatcaatcagactatgggcttcaagcgagcatctttacgaaagacaccgatcgcgcgatcaacatcgggaaacatttagaagtcgggacggtccatattaacgcaaaaacagagcgtgggcctgatcacttcccattcttaggtgtaaaaaaatctggtctaggtgtacaaggcattaagccaagccttttatccatgactcgcgagcgcgtgaccgtacttaacctgtag

SEQ ID NO: 341 - DNA, 291 bp, Arabidopsis thaliana
atggagattgagagtcacgtttcagtccctgggaagaatctagttaaagtagagttcaagcttgggacagagagctacacaattgattcaatcaagggtgatactgtattggaccaattggtttcgatgaaagaagaaagtatgaagatacttaaggattttatcacaaagcataatgttccagatgatgatgtccctgaccaaatcttgtctgatgatgaagaaggtgatgatgatgatgcttctcctgtaatatgtcctgtgaaaccacccaagaagacaaagatttag

SEQ ID NO: 342 - DNA, 1326 bp, Arabidopsis thaliana
atggggaacagtgaaatgtcagcgagtgaggttgcggcggccaagcagaagaacgtcgacgattggttaccgatcacatcttccagaaacgctaagtggtggtactctgcttttcacaatgtcaccgccatggttggtgctggtgttcttagcttgccctacgctatgtccaatctcggatggggacctggagtgacgattatggtgatgtcatggatcataacgttgtacacactgtggcaaatggtggagatgcatgagattgttccagggaagaggcttgataggtatcacgagctaggtcaacacgcttttggtgaaaagcttggcctatggatcgtcgtgccgcagcagcttatcgtggaggtcggtgttgacatcgtttatatggtcacaggaggagcatccctcaagaaagtccatcaactagtctgtcccgattgcaaagagatcagaactacgttttggatcatgatctttgcttccgtccactttgttatctctcaccttcccaatttcaactctatctccatcatctcacttgccgcggctgttatgtccttaacttactcaactattgcttgggctgcatccgtgcacaaaggggtacatccagatgtggactactctcctagagcatcaaccgatgttggaaaagtattcaacttcttgaatgcgttgggagatgtggcttttgcttatgcaggtcacaacgttgtgttggagattcaggccacaatcccttcgactccggagatgccatccaaggtcccaatgtggagaggagttattgtagcctacattgtagtcgccatctgttacttccctgtagcattcctcggctattatatctttggaaacagcgttgatgacaacatcctcatcactttggagaagcctatctggcttattgctatggctaacatgttcgtggttatccatgtcattggaagctatcagatatttgcaatgccagtttttgacatgctcgaaaccgttttggtcaaaaagatgaatttcaatccttctttcaagctccgcttcattactcgtagtctttacgtcgctttcacgatgattgttgcgatatgcgtcccgtttttcggtggactactcggcttctttggaggattcgcctttgccccaacaacttactaccttccatgcattatgtggctcgttctcaagaaaccaaagaggtttggtctatcttggacagctaactggttctgcatcatagtaggagttcttttgacgatccttgccccaattggaggactcagaaccatcattatcaacgccaagacctacaagttcttctcttag

SEQ ID NO: 343 - DNA, 468 bp, Arabidopsis thaliana
atgcattacatgggtttgtttagtagagctggaaacatatttaggcagcctagagcgttgcaggcctcaaacgctatgttacagggcaatctttcattaactccatccaaaatctttgttggaggtctctcaccatctactgatgtggagctcttgaaagaagcttttggcagttttggaaaaattgttgatgcggtagtggttttggaccgtgaaagtggtttatcaaggggctttggtttcgtaacatatgattcgatcgaagttgctaataacgcaatgcaagctatgcaaaataaggagcttgatgggcgaataattggagtgcatccagctgattcaggaggtggtgggggtggtggtggttttgcaagaaggggaggttatggtggtggtcgtgggggatatgctcgtggtggatttggtcgcggtggatttggtggtggtggctatggctttgttcgttag

SEQ ID NO: 344 - DNA, 468 bp, Arabidopsis thaliana; identical to SEQ ID NO: 343

SEQ ID NO: 345 - DNA, 1455 bp, Sinorhizobium meliloti
atgaatctgaaagacccgtcgctgtttcgccaggctgctctcgtgggcgagacctggatcgaagccgacccgaagaatgcgatcgaggtgaacaatccagcgaccggcgaaatcatcggccgcgtcccgaagctcggcgccgccgatacccggaccgcgatcgaggccgcggcgcgggtgcagaaggaatgggcggcgaggaccgccaaggagcgctcggcggtgctgcgccgctggttcgagctgatgatcgaaaacaaggacgatctcggccggattctgacgatggagcagggcaagccgctagcggaggcgacaggcgagatcgtctacggagcgagcttcatcgaatggttcgcggaagaggcgcggcgtgtctatggcgatctcgtccccgggcatcagaaggacaagcgcattctggtgatgaagcagccgatcggcgtcgtcgccgcgatcacgccgtggaacttcccgaacgcgatgatcacccgcaaggccgggccggcccttgccgccggctgcgccatggtcttgaagccggcagcgcagacgccgttttcggcgatcgccatcgccgtgctcgccgagcgcgcgggcatgccgaaaggtctcttcagcgtcattaccggctccgcgcgcgagatcggcgccgagatgacttcgaacccgaccgtccgcaagcttacctttaccggctcgaccgaggtcggcgcagagctctaccgccagagcgcggcaacgatcaagaagcttggcctggaactcggcggcaacgccccgttcatcgtcttcgatgatgccgatctcgatgcggcggtcgaaggcgcgctgatcgccaagttccgcaacaatggccagacctgcgtctgcgccaaccgcatctatgtgcaggacggcgtctacgaggccttctccgacaagctcgcccaggccgtcgccaagctcaagaccggcaacggcatggaggacggcgtcatcctcggaccgctgatcgaccagccggcgctgaaaaaggtcgaggagcatgtggcggatgcgcttgcgaagggcgcgcgcgtggtgcagggcggccgtcgccattcactcggcggcaccttctacgaggcgacggtgctggccgacgtgacccaggcgatggcggtcgcgcgggaagagaccttcggaccggtagcgccgctcttccgcttcaaggacgagtcggatgtgatcgcacaggcgaacgacaccgaattcggcctcgcctcctatttctacgccaaggacctcgcccgcgtcttccgcgtggcggaagcgctggaatacggcatggtcggtgtcaatacaggcctgatctccacggccgaagcaccctttggtggcgtcaagctctcgggccttggccgcgagggctcgaaatacggcatcgaggaattcatggagatcaaatatgtctgcctcggcggcattgcctag

SEQ ID NO: 346 - DNA, 1455 bp, Sinorhizobium meliloti; identical to SEQ ID NO: 345

SEQ ID NO: 347 - DNA, 1008 bp, Saccharomyces cerevisiae
atggcttcctctatgctctcttccgctactatggttgcctctccggctcaggccactatggtcgctcctttcaacggacttaagtcctccgctgccttcccagccacccgcaaggctaacaacgacattacttccatcacaagcaacggcggaagagttaactgcatgcaggtgtggcctccgattggaaagaagaagtttgagactctctcttaccttcctgaccttaccgattccggtggtcgcgtcaactgcatgcaggccatggcaaagttagttttagttagacacggtcaatccgaatggaacgaaaagaacttattcaccggttgggttgatgttaaattgtctgccaagggtcaacaagaagccgctagagccggtgaattgttgaaggaaaagaaggtctacccagacgtcttgtacacttccaagttgtccagagctatccaaactgctaacattgctttggaaaaggctgacagattatggattccagtcaacagatcctggagattgaacgaaagacattacggtgacttacaaggtaaggacaaggctgaaactttgaagaagttcggtgaagaaaaattcaacacctacagaagatccttcgatgttccacctcccccaatcgacgcttcttctccattctctcaaaagggtgatgaaagatacaagtacgttgacccaaatgtcttgccagaaactgaatctttggctttggtcattgacagattgttgccatactggcaagatgtcattgccaaggacttgttgagtggtaagaccgtcatgatcgccgctcacggtaactccttgagaggtttggttaagcacttggaaggtatctctgatgctgacattgctaagttgaacatcccaactggtattccattggtcttcgaattggacgaaaacttgaagccatctaagccatcttactacttggacccagaagctgccgctgctggtgccgctgctgttgccaaccaaggtaagaaatag

SEQ ID NO: 348 - DNA, 480 bp, Arabidopsis thaliana
atgggaaaggcacgtacggtgggagtgggaatggactattctccgacgagcaaattagctctccggtgggcggcggagaatctccttgaagacggcgacaccgtcatcttgattcacgtccaaccacaaaacgccgatcatacccgcaaaatcctcttcgaggaaaccggttcaccgctaattcctttggaggaatttagagaggttaatttgtctaaacagtatggacttgcttacgatcctgaggttcttgatgttcttgatactctctctagggctaaaaaggtgaaggttgtagcaaaggtgtattggggagatccaagggagaaactttgtgatgctgtcgaaaatctaaaactcgattccattgttcttggcagtcgaggtttgggttctctcaaaaggatcttgctgggtagtgtgagcaatcatgtggtgacaaatgcaacatgtcctgtcacagttgttaaggctaattag

SEQ ID NO: 349 - DNA, 204 bp, Arabidopsis thaliana
atgacggagtggcttccggtggtggtcgcgacggtgttgtttgtggtgctgagcccgggattgttgtttcaggttccgggaaacaacaactttgtagacttcgggaagatggaaacgagcggatactcaatccttctccacgccttcctttactttggccttgtcactgtcttcaccgtcgtcatccactttccgggcacttag

SEQ ID NO: 350 - DNA, 204 bp, Arabidopsis thaliana; identical to SEQ ID NO: 349

SEQ ID NO: 351 - DNA, 2500 bp, Escherichia coli
gcgataccatgaaactcagtcgtcgtagctttatgaaagctaacgccgttgcggccgctgcggcggctgccggtctcagcgtgccgggcgttgcccgcgccgttgttggtcagcaggaagccatcaaatgggataaagcgccgtgccgtttctgcggtactggttgcggcgttctggtcggaacgcagcagggacgtgtggtggcctgtcagggcgacccggacgcaccggttaaccgtggcctgaactgcattaagggctatttcctgcccaaaatcatgtacggtaaagaccgtttgacgcagccgctgctgcgtatgaaaaacggtaaatatgacaaagaaggcgaatttaccccaatcacctgggatcaggccttcgatgtgatggaagagaaattcaaaaccgccctgaaagaaaaagggccggaatcgatcggtatgttcggttctggtcagtggactatctgggaaggttatgccgcgtccaagctgtttaaagcgggcttccgttcgaacaacatcgacccgaacgcgcgtcactgtatggcgtcggcagtagttggctttatgcgtacctttggtatggatgagccgatgggctgctatgacgacatcgagcaggctgacgcgtttgtgctgtggggcgcaaacatggcggaaatgcacccgatcctctggtcgcgcatcactaaccgtcgtctctctaaccagaacgtcaccgtggcggtgctttctacctaccagcatcgtagcttcgagctggcggataacggcatcatctttacgccgcaatctgacctggtgatcctgaactacatcgccaactatatcattcaaaacaatgcgataaatcaggacttcttcagcaagcacgttaacctgcgcaaaggggcgacggacatcggctacggtttacgtccgacccatccgctggaaaaagcagcgaagaatccgggttctgacgcctccgaaccgatgagctttgaagattacaaagccttcgttgccgagtatacgctggaaaaaactgccgaaatgaccggcgtgccgaaagaccagttagaacaactggcgcagctgtatgccgatccgaacaagaaagtcatctcctactggacgatgggcttcaaccagcatactcgtggcgtgtgggctaacaacctggtctacaacctgcacctgctgaccggcaaaatttcccagccgggttgcggtccgttctccctgaccgggcaaccttctgcgtgtggtactgcgcgtgaagtgggcacctttgctcaccgtctgcctgcggacatggtggtgaccaacgagaaacaccgtgatatctgcgagaagaagtggaatatcccgagcggcaccattccggcgaaaatcggtctgcacgcggtggcacaagaccgtgcgctgaaagacggcaaactgaatgtttactggaccatgtgtaccaacaacatgcaggccgggccgaacatcaatgaagagcgtatgccgggctggcgcgatccgcgcaacttcatcatcgtctccgatccgtatccgacagtcagtgcgctggccgccgacttgatcctgccgaccgcaatgtgggtagagaaagagggcgcttacggtaacgccgaacgccgtactcagttctggcgtcaacaggtacaggcaccgggcgaagcgaaatcggatctctggcagttagtccagttctcccgccgcttcaaaactgaagaagtatggccggaagatctgctggcgaagaaaccggaactgcgtggcaaaacgctgtacgaagtgctgtatgccacaccggaagtgagcaaattcccggtatccgaactggcggaagatcagctgaacgatgaatcccgcgagctgggcttctatctgcaaaaagggctgttcgaagagtacgcatggtttggtcgcggtcacggtcacgatctggcaccgttcgatgactaccacaaagcgcgcggtctgcgctggccggtggtgaacggtaaagaaacgcagtggcgttacagcgaaggtaacgacccgtacgtgaaagcgggcgaaggctataagttctacggtaaaccggatggcaaagcggtgatcttcgcactgccattcgaaccggcggcggaagcaccggatgaagagtacgacctgtggctctctaccggacgcgttctggagcactggcacaccggcagtatgactcgccgtgtaccagaactgcaccgcgccttcccggaagcggtcctgtttattcacccgctggatgcgaaagcgcgcgatctgcgccgtggcgacaaagtgaaagtggtttctcgccgtggcgaagtgatctcgattgttgaaacgcgcggtcgtaaccgtccgccacagggcctggtgtacatgccgttcttcgacgccgcacagttggttaacaaactgacgctggatgcgaccgatccgctctcgaaagagacggacttcaagaagtgcgcggtcaaactggagaaggtgtagatcgc

SEQ ID NO: 352 - DNA, 2557 bp, Escherichia coli
gcgataccatgagcaaagtcagactcgcaattatcggtaacggtatggtcggccatcgctttatcgaagatcttcttgataaatctgatgcggccaactttgatattaccgttttctgtgaagaaccgcgcatcgcttatgaccgcgtacacctctcgtcttacttctctcaccacaccgccgaagagctgtcgctggtgcgcgaaggcttctacgagaaacacggcatcaaagttctggtcggcgaacgcgctatcaccatcaaccgtcaggagaaggtgattcactccagcgccggacgtaccgttttttatgacaagctgatcatggcaaccggttcctacccgtggatcccgccaatcaaaggttctgatactcaggactgctttgtctatcgcactattgaagacctcaacgccattgaatcctgcgcccgtcgcagcaaacgcggtgccgttgttggtggcggcctgttaggtctggaagccgcaggcgcgctgaaaaacttaggtattgaaacccacgttatcgaatttgcccctatgctgatggcagaacagcttgatcagatgggcggcgagcagctgcgtcgcaaaatcgaaagtatgggcgtgcgcgttcacaccagcaaaaacacccttgagattgtgcaggaaggtgttgaagcgcgtaaaaccatgcgttttgccgacggcagcgaactggaagtcgactttatcgtcttctctaccggtatccgtccgcgcgataagctggcaacccagtgtggtctggacgttgctccgcgtgggggtattgtcattaatgattcctgccagacttccgatccggatatctacgccatcggtgaatgcgcaagctggaacaaccgtgtatttggtctggtagcacctggctacaaaatggcgcaggtcgccgttgaccatattctcggtagcgaaaacgcctttgaaggtgctgaccttagcgccaagctgaaactgctgggcgtagacgtaggcggtattggtgatgcgcacggtcgcacgcctggcgcacgtagctacgtttacctcgacgaaagtaaagagatctacaaacgcctgattgtcagcgaagacaacaaaaccctgctcggtgcggtactggtgggcgataccagcgactacggtaacctgctgcaactggtgctgaacgctatcgaactgccggaaaacccggattccctgatcctgccagcacactcgggtagcggcaagccgtctatcggtgttgataaactgccggacagcgcgcaaatctgctcctgcttcgacgtcaccaaaggtgatctgattgctgccatcaacaaaggctgccacacagttgcggcgctgaaagctgaaaccaaagcgggtactggctgcggtggctgtatcccgctggtcactcaggtactgaacgcggaactggcgaaacagggcatcgaagttaacaacaacctgtgcgaacactttgcttattcgcgtcaggaactgttccatttgatccgcgttgaaggcattaaaaccttcgaagaactgctggcgaaacacggcaaaggctacggttgtgaagtttgtaaaccaaccgtcggttcgctgctggcctcctgctggaacgaatacattctgaagccggaacatactccgctgcaggattctaacgacaacttcctcgctaacatccagaaagacggcacctactcggtgatcccgcgttctccgggcggtgaaatcaccccggaagggctgatggcggtaggtcgtatcgcgcgtgaatttaatctctacaccaagatcactggctcccagcgtctggcgatgtttggcgcacagaaagacgatctgccggagatctggcgtcagctgattgaagccggcttcgaaaccggtcatgcctatgcgaaagcactgcgtatggcgaaaacctgcgtgggtagcacctggtgccgctacggcgttggcgacagcgtcggcctcggcgtggaactggaaaaccgctacaaaggcatccgtacgccgcacaaaatgaagttcggtgtctccggctgtacccgtgaatgttcagaagctcagggtaaagacgtgggtattatcgccactgaaaaaggctggaacctgtatgtttgcggtaacggcggcatgaaaccgcgtcatgcggatctgctggcggcggatatcgatcgcgaaacgctgatcaaatatctcgaccgcttcatgatgttctacatccgtactgccgacaaactgacgcgtaccgcaccgtggttagaaaacctcgaaggcggcatcgattacctgaaagcagtgatcattgacgacaaactggggctgaacgcacatctggaagaagagatggcgcgcctgcgtgaagcggtactgtgtgagtggactgaaacggtcaatacgccgtctgcgcagactcgcttcaaacacttcatcaacagcgacaagcgtgacccgaacgtgcagatggtgccagagcgcgaacagcaccgtccggcaacgccgtatgaacgtatcccagtaactctggtggaggacaacgcatagatcgc

SEQ ID NO: 353 - DNA, 1527 bp, Zea mays
atgtcgaccaacaagggcagcgcggccaagggcggcggagggaagaagaaggaggtgaagaaggagacgaagctcgggatggcctataagaaggacgacaacttcggggagtggtactccgaggttgttgttaacagtgaaatgattgagtactatgacatttctggttgttatatattgaggccatgggcgatggaaatctgggagctactgaaagaattctttgatgcagaaattaaaaagctgaagctcaaaccatattatttccctttgtttgttactgagaatgttctacagaaggaaaaggaccacattgagggctttgcacctgaggtagcttgggttactaaatctgggaaatctgacctggaagcaccgattgcaatccgccccacaagtgagactgtcatgtatccgtacttctccaaatggataagaagccaccgagacttacccttgaggtgtaatcaatggtgtaatgttgttagatgggagtttagcaatccaactcctttcataaggagccgtgaatttctgtggcaagaggggcatactgcttttgcgactaaagaagaggcagatgaagaggttctccaaatattggaactgtaccgaaggatatacgaagaatttttagcagttccagtttccaaagggagaaaaagcgagatggaaaaatttgcaggtggcctttataccaccagcgttgaggccttcattccaaacactggtcgtggcatacaaggcgcaacctcacactgtcttggtcaaaactttgccaagatgtttgatatcacttttgagaatgagaaaggtgttagggaaatggtttggcaaaactcttgggcctacacaacccgctcgattggagtgatggtgatgacacatggtgatgacaaaggcttagtattaccaccaaaggtagcgccaatccaggtaattgtgattccagtgccttataaggatgctgacacaactgccataaagggagcctgcgaatcaactgtttacacactcgatcaatctggaattagagcggatcaggacacccgtgaaaattactctccaggttggaagtattcccactgggaaatgaaaggtgttccattgagaattgagattggtccaaaagatctggcaaacaaacaggtgcgtgttgtccgccgggacaacggtgcaaaggttgacatccctgtgaccaatttggttgaagaggttaaagtgttactggatgagattcaaaaaaatctgttcaaaacagcccaagaaaagagagatgcctgtgttcatgtcgtgaacacttgggatgaattcacaactgctctgaataacaaaaagttgatcttggctccatggtgtgatgaggaggaaattgagaaagatgtaaaaactcggacaaaaggggaacttggagctgcgaaaacattgtgtactccatttgagcagccagaacttccagaaggtaccctgtgctttgcatctggaaagccagcgaagaagtggtcgttctggggccgcagctactag

SEQ ID NO: 354 - DNA, 285 bp, Arabidopsis thaliana
atgtcttctagcagaaggtcgagacaagcaagctcatcatcaagaattagcgatgaccagatcactgatctcatctcaaagctccgacagtccattccggagattcgccagaaccgtcgttccaacacggtatcagcgtcgaaagtgttacaagagacttgcaactacataagaaacttgaacaaggaagccgatgacctcagtgatcgattgactcagcttctggaatccattgatcctaatagcccacaagccgcagttattaggagcttgattaatggatag

SEQ ID NO: 355 - DNA, 684 bp, Arabidopsis thaliana
atggtgggtgtgtcgccgaagatcgctccgtcgatgttgtcatcggactttgcaaatcttgccgcggaggctaagcggatgatcgatttgggcgccaattggcttcacatggacattatggacgggcattttgtttctaacctaacgattggtgctcctgtcatcgagagtttgaggaagcacacaaatgcatatcttgattgccacttaatggtgacgaaccccatggattatgtggatcagatggctaaagctggggcgtctggtttcacattccacgttgaggtggcccaagagaattggcaagaacttgtgaagaagattaaggctgctgggatgaggccaggtgtggctctaaagcctggaacacctgttgaacaagtctatcctctggtcgaaggtacaaatccggtcgaaatggttcttgtgatgactgtggagcctggatttggaggccagaagttcatgcccagcatgatggacaaggtcagggcattgaggaacaagtacccaacacttgatattgaggtggacggcggcttaggcccttccacaatcgatgcagcagctgcagctggagccaactgtatcgtcgcaggaagttcagtgtttggagctccgaagcctggggacgtcatatcccttttgcgggctagtgttgagaaagcacaaccctccacttag

SEQ ID NO: 356 - DNA, 1269 bp, Zea mays
atggggatgttcttcagcaaagcggaaccgccgccgcccatggtgctggtgccgccgctcttcgactaccctcccatcgctgcccgcaccaggatggcggtgccagcatatgagctaatgtttgggaaagtctccctgcacaatctgtttgaggactactttgaccaagctgggaatatgacctcaaggatcatgttgaagccgcttgaagatcctcacgttgatttgattgctactgtgtctgctgctgctgatagaaacagtggaacagaagtaaaaggggatgctttatttcgctggcagagagagctggatgacccccatacctttgtggaccttcttgtgtcaacttcaaatcccttgctgcagctgagattatgtgcatatcatcctaagtatcgtattggtgcctttggaacattacctttgctaatggggaacagggtgcgttcagaagactatggggtcatgggtgtaagatatggttcagagaatttatctgttggagcatcctttgtgccaatttccttatccagtgaggtaccctttggtgcatggttggttgggagaaaagggagcttatctgcaggagtacaatacaagccacttagtggcagcaaatatcctatgccatttacagaattggagaactggaattatgcaatcagttatggtgttggctcaactagcccgctcagcccttcattcattttctccctggaacttgccagaagcacacagctaaccgcatcattctatcagcacctggttgttcaaagaagggtaaaaaatccttttgaagatgatcaggttgttggcattacaaactacatcgattttggacttgagttggctgccagggttgataaagataaagtgagtggggatggcaactcgtttcagttggctggaagttggcaagctaacaaaaactttctgctgaagggaaagcttggtccttccacgtcctctgtagctctggcattcaaatcatggtggagaccatcctttacatttagtgtaacagctgtgaatgatcattcaaagggcacaacatcgtatggatttggcctccgtgtcgaggaccttagacgagcgagttaccagcgcgctgatccaaactacgtcatgctgacgccaagcaaggagcacttggcaccaggtgttctgcgggagtacgggaagcggcccatgttccagacacaaatcgattcgggcaactacgaccatctgcctacagagctgaagcctcttggcaggattttctag

SEQ ID NO: 357 - DNA, 714 bp, Arabidopsis thaliana
atgaagaagactaatttcgtttcctctgcttccggtggcgatcccatgatcagattaacctttgtgcaggttctggagttggaaaaggaattagagataaagagaaagagattggagatgattaaacaaaagagattgaccctcaagtcagaagttaggttcttgagacgtagatacgagcacttgaagcaagatcaaactcttgaaacctctccagagatgttgagattgtcagaatccgggggtttagaggtcccaaggaaaccaagtggcgaaagaaagaagcagtctggtgtgagagcatctgtaccatgttttgatttgaaactgaagaatacaatttgcaatgagaaggaagcattggctaataatgttgcaagttgtgacttggataagaagcgaaaaaggagcagaggaagcgatgttttgacattccccgtttcacttcctgaccttaacggagagggaaacacttctggcactgacaaagtccctggctttgacctaaaccagatctcgagagaagaagaggagccggaagtgaatggtgaacatatggtcgcggaagcaatgaagaatgcaatgcttgataacaggatcagtgatctacatgttgaaagaaagttacccatttgcggagatgtggagaaagagttaaatagagcagtgaagaggaaggttacatggcaagatccagtggctttaagtgtttag

SEQ ID NO: 358 - DNA, 714 bp, Arabidopsis thaliana; identical to SEQ ID NO: 357

SEQ ID NO: 359 - protein, 710 aa, Oryza sativa
MSASPSSMSGAGAGEAGVRTVVWFRRDLRVEDNPALAAAARAAGEVVPVYVWAPEEDGPYYPGRVSRWWLSQSLKHLDASLRRLGASRLVTRRSADAVVALIELVRSIGATHLFFNHLYDPLSLVRDHRVKALLTAEGIAVQSFNADLLYEPWEVVDDDGCPFTMFAPFWDRCLCMPDPAAPLLPPKRIAPGELPARRCPSDELVFEDESERGSNALLARAWSPGWQNADKALAAFLNGPLMDYSVNRKKADSASTSLLSPYLHFGELSVRKVFHQVRMKQLMWSNEGNHAGDESCVLFLRSIGLREYSRYLTFNHPCSLEKPLLAHLRFFPWVVDEVYFKVWRQGRTGYPLVDAGMRELWATGWLHDRIRVVVSSFFVKVLQLPWRWGMKYFWDTLLDADLESDALGWQYISGSLPDGRELDRIDNPQLEGYKFDPHGEYVRRWLPELARLPTEWIHHPWDAPESVLQAAGIELGSNYPLPIVELDAAKTRLQDALSEMWELEAASRAAMENGMEEGLGDSSDVPPIAFPPELQMEVDRAPAQPTVHGPTTAGRRREDQMVPSMTSSLVRAETELSADFDNSMDSRPEVPSQVLFQPRMEREETVDGGGGGGMVGRSNGGGHQGQHQQQQHNFQTTIHRARGVAPSTSEASSNWTGREGGVVPVWSPPAASGPSDHYAADEADITSRSYLDRHPQSHTLMNWSQLSQSL

SEQ ID NO: 360 - protein, 982 aa, Nostoc sp. PCC 7120
MVDLLRQLRDLCSPEGQATKDQAVSAVKLIEQLNINEAIRAARAFALYFQLINIIEQEYEQRQQLTRYSDLEAETAPLNGSENITSSSNHNEDDVIFNRGLGTDFLGKNWTNRGQGKQKGTFAALFPLLSKLNVPPQQIQRLISQLDVRLVFTAHPTEIVRHTIRDKQRQVVDLLQQLDEVENRAKDGGGYPWEAGEIREKLLEEIRLWWRTDELHQFKPTVLDEVDYALHYFQEVLFDGIPQLYKRFKYALNQTFSWLEPPSKDFCSFGSWVGSDRDGNPSVTPEITWQTACYQRKMVLERYIKSVTQLIELLSISMHWSDVLPDLLESLELDQSQLSEVYDALALRYRQEPYRLKLAYVLKRLENTRDRNLALYKGETPTNEDSPMYRSGSEFLAELRLIQHNLTETGLSCRELDNLICQVEIFDFNLTKLDIRQESTRHSDALNEILDYLQLLPQPYNDLSEEQRVAWLTTELQTRRPLISSELPFSDKTNDVIKTFRVVRSLQQEFGINICQTYIISMCRQVSDVLEVLLLAKEARLFDPAIAVGTIQVVPLFETVEDLQRSRSVMRQLFELPLYRALLAGGYKNTEVKVPNTELTPQSPAPSPQSVLTPDLQEVMLGYSDSNKDSGFLSSNWEIHKAQKSLQQIAEEYGVNLRIFHGRGGSVGRGGGPAHEAILAQPGHSINGRIKITEQGEVLASKYSLLDLALYNLETITTAVIQASLLRTGFDDIEPWNEIMEELAARSRQHYRGLIYEQPDFIDFFHQVTPIEEISQLQISSRPARRPSGKKDLSSLRAIPWVFSWTQTRFLLPSWYGVGTALQEFFNEEPEEHLKLMRYFYVKWPFFKMVISKVEMTLAKVDMQMAGHYVQELSDPEDKPRFEKVFEQIANEYYLTRDLVLKITDHGRLLDGDPVLQRSVQLRNGTIVPLGFIQVSLLKRLRQSKNNTATSGVIHSRYSKGELLRGALLTINGIAAGMRNTG

SEQ ID NO: 361 - protein, 298 aa, Zea mays
MSAELKRDYEIGEEIGRGRFGVVHRCTSRATGEAYAVKSVDRSRLGDDLDRELAQLEPKLAQLAGAGNPGVVQVHAAYEDEAWTHVVMDLCPGPDLLEWVGRRRGAPVPEPVAAAIVAQVAQALALCHRRGVAHRDVKPENILIDAAAGSDDDEEDEAEAAPRARLADFGSAAWVGAGGLGRAEGLVGTPHYVAPEVVAGGEYGAKADVWSAGVVMYALLSGGALPFGGDSAAEVLAAVLRGSARFPPRLFGGVSPAAKDLMRRMICRDEWRRFTAEQVLAHPWIVSGGGARAMERPT

SEQ ID NO: 362 - protein, 298 aa, Zea mays; identical to SEQ ID NO: 361

SEQ ID NO: 363 - protein, 286 aa, Zea mays
MGGAAEEALRREYVVGEEIGRGRFGTVRRCYAAATGEPFALKTTPKAALRADPLDLALAEQEPKVHHLASAASRHVVALHAAFVDADAVHLVLDLCAGGDLFALVSARGALPEPEAAELMAQLADALAGCHRRGVAHRDVKPDNLLFDAAAGGALRLGDFGSAAWFGDGRPMTGLVGTPYYVAPEVVAGREYTEKVDVWSAGVVLYMMLSGTVPFSGATAGEIFQAVLRGNLRFPPRAFAAVSPEAKDLLRRMLCRDVWRRLSAEQVLSHPWIVTRGGSVPGGRLV

SEQ ID NO: 364 - protein, 467 aa, Triticum aestivum
MATTVTLKSFTGLRQSSTEQTNFVSHVPSSLSLPQRRTSLRVTAARATPKLSNRKLRVAVIGGGPAGGAAAETLAQGGIETILIERKMDNCKPCGGAIPLCMVGEFNLPLDIIDRRVTKMKMISPSNIAVDIGRTLKEHEYIGMVRREVLDAYLRERAEKSGATVINGLFLKMDHPENWDSPYTLHYTEYDGKTGATGTKKTMEVDAVIGADGANSRVAKSIDAGDYDYAIAFQERIRIPDEKMTYYEDLAEMYVGDDVSPDFYGWVFPKCDHVAVGTGTVTHKGDIKKFQLATRNRAKDKILGGKIIRVEAHSIPEHPRPRRLSKRVALVGDAAGYVTKCSGEGIYFAAKSGRMCAEAIVEGSQNGKKMIDEGDLRKYLEKWDKTYLPTYRVLDVLQKVFYRSNPAREAFVEMCNDEYVQKMTFDSYLYKRVAPGSPLEDIKLAVNTIGSLVRANALRREIEKLSV

SEQ ID NO: 365 - protein, 484 aa, Zea mays
MSSSGPSPATGIHASPPLGLLPATGTHHTRSWGKTTSTSFTGSTTKHEQSLHGNVKPLQLAANESSRLAYRSPALKNQWNLPASSSSTNVVTTFDDNEHVSSSVIEEKVGVLLLNLGGPETLDDVQPFLFNLFADPDIIRLPRLFRFLQRPLAKLISTFRAPKSKEGYASIGGGSPLRKITDEQANALKIALEKKKLNANIYVGMRYWYPFTEEAIDQIKKDKITKLVVLPLYPQYSISTSGSSIRVLQDIVKEDSYFSGLPISIIESWYQRDGYVKSMSDLIEKELSAFSNPEEVMIFFSAHGVPLTYVEDAGDPYRDQMEDCIALIMGELRSRGILNSHTLAYQSRVGPVQWLKPYTDEVLVELGQKGVKSLLAVPVSFVSEHIETLEEIDMEYKELALESGIKNWGRVPALGCTSTFISDLADAVVEALPSASALATRKPDDIDSSMDLTHYLTKMLFGSILAFVLLLSPRLVSAFRSTML

SEQ ID NO: 366 - protein, 484 aa, Zea mays; identical to SEQ ID NO: 365

SEQ ID NO: 367 - protein, 484 aa, Zea mays; identical to SEQ ID NO: 365

SEQ ID NO: 368 - protein, 582 aa, Glycine max
MVLFNVSRVETTPFDGQKPGTSGLRKKVKVFVQPHYLHNFVQSTFNALTVEKVRGATLVVSGDGRYFSKEAIQIITKMSAANGVRRVWIGQNGLLSTPAVSAVIRERVGADGSRATGAFILTASHNPGGPHEDFGIKYNMENGGPAPEGITDKIYENTTTINEYLIASDLPDVDITTTGVTSFTGPEGPFDVEVFDSASDYIKLMKSIFDFESIRKLLSSPKFTFCYDALHGVGGAYAKSIFVDELGAQESSLLNCTPKEDFGGGHPDPNLTYAKELVARMGLGKSEPQDDPPEFGAASDGDADRNMILGKRFFVTPSDSVAIIAANAVEAIPYFSAGLKGVARSMPTSAALDVVAKHLNLKFFEVPTGWKFFGNLMDAGLCSVCGEESFGTGSDHIREKDGIWAVLAWLSILAYKNKDKLEDKLVTVEDIVRQHWATYGRHYYTRYDYENVDAGAAKELMAYLVKLQSSLSEVNQIIKGIRSDVSNVVHGDEFEYNDPVDGSISSHQGIRYLFEDGSRLIFRLSGTGSEGATIRLYIEQYEKDPSKIGRLSNEALAPLVEVALKLSKMEEFTGRSAPTVIT

SEQ ID NO: 369 - protein, 536 aa, Zea mays
MALGAAYHHYLQLAGDHGTATHALLLGVLIFLVIRLVSARRTGTTSANKRKQQQRLPLPPSPPGKLPIIGHLHLIGAETHISIRDLDAKHGRNGLLLLRIGAVPTLFVSSPSAADAVLRTQDHIFASRPPSMAAEIIRYGPSDVAFVPYGEYWRQGRKLLTTHMLSTKKVQSFRHGRQEEVRLVMDKIRAAATAAPPAAVDLSDLLSGYTNDVVCRAVLGASHRNQGRNRLFSELTEINVSLLGGFNLEDYFPPNMAMADVLLRLVSVKARRLNQRWNDVFDELIQEHVQSRPSGESEESEADFIHVLLSIQQEYGLTTDNLKAILVDMFEAGIETSYLTLEYGMAELINNRHVMEKLQTEVRTTMRSPDGKKLDMLAEEDLGSMPYLKATIKETLRLHPPAPFLLPHYSTADSEIDGYFVPAGTRVLVNAWALGRDRTTWEKPEEFMPERFVQEPGAVDVHMKGKDLRFIPFGSGRRICPGMNFGFATMEIMLANLMYHFDWEVPGSAAGVSMDESFGLTLRRKEKLLLVPRIAS

SEQ ID NO: 370 - protein, 192 aa, Zea mays
MAATVMASMSPLASATPGARRAFPVRLLLQASALAPRRRALAVTVRAQSDDAEAEPKEAAAAATTPAPKSKAAAAASPGLWDALAFSGPAPERINGRLAMVGFVSALAVEASRGGGLLSQAGSGSGLAWFAATAAVLSVASLVPLLRGDSAEARSGAVMSANAELWNGRFAMLGLVALAFTEYLTGAPFINA

SEQ ID NO: 371 - protein, 530 aa, Zea mays
MQDWRVREFEGKFTDEFAHSSSNEHKGGVEASGVISSKKLKHAVANEKIQGVIPGTNSSGSLKRNSENIQHANGVLSQNISCAGDYKNGSIAFPLREENTITETRCPDDNWNSCQFALNNGSSILNNHSAPQDSLTYGDNDLNYIEWPGIDNFEDVDTLFRSFDSTYGQQQLENADGLSWIPSSDAVYSTDVALQQGLDSSYSDYGILDDLSAFQCAEDKSLPLVDPSSALCDNQFNDTYLFSEQKNVNAYGEQIYQEDLMELLPTDQICSGHENIDMVGNQYPSENAIQGTEDKKFSIASTSQLSSQNLLNQRHHLDSSSPSNITSESYPGKFGPSSCSSAQRNSKVQKKTVNIQPRQPANDNVMNTSRASYPCENYETERRGLGKRTLGDPQVTMGSSMVVDGSFVSSMSSDNSVEESSFQQLQDAVSQLDVQTKLCIRDGLYRLARSAQHRQVFPNTMNSNGGSEDGKELENAETSCKFMDPRSIETQTNPIDRSIALLLFRESSGGHVHVAVAADDASSLKSPAGV

SEQ ID NO: 372 - protein, 530 aa, Zea mays; identical to SEQ ID NO: 371

SEQ ID NO: 373 - protein, 268 aa, Oryza sativa
MAQSMLVSGANGTVAAASTSRLQPVRPTPFSRLVLSQPSSSLGRAVSVKTVALFGRSKTKAAPARKAEPKPKFKTEDGIFGTSGGIGFTKENELFVGRVAMLGFAASILGEAITGKGILAQLNLETGIPIYEAEPLLLFFILFTLLGAIGALGDRGSFVDDQPVTGLDKAVIAPGKGFRSALGLSEGGPLFGFTKANELFVGRLAQLGIAFSIIGEIITGKGALAQLNIETGVPINEIEPLVLFNVVFFFIAAINPGTGKFVSDDDEE

SEQ ID NO: 374 - protein, 145 aa, Glycine max
MPVPLAPYPTPPAPYTPPANGVQSQLVCSGCRNLLVFPVGATSVCCAVCNAVTAVPPPGTEMAQLVCGGCHTLLMYIRGATSVQCSCCHTVNLALEANQVAHVNCGNCRMLLAYQYGARSVKCAVCNFVTSVGATASTTEQKFST

SEQ ID NO: 375 - protein, 513 aa, Arabidopsis thaliana
MFETEHHTLLPLLLLPSLLSLLLFLILLKRRNRKTRFNLPPGKSGWPFLGETIGYLKPYTATTLGDFMQQHVSKYGKIYRSNLFGEPTIVSADAGLNRFILQNEGRLFECSYPRSIGGILGKWSMLVLVGDMHRDMRSISLNFLSHARLRTILLKDVERHTLFVLDSWQQNSIFSAQDEAKKFTFNLMAKHIMSMDPGEEETEQLKKEYVTFMKGVVSAPLNLPGTAYHKALQSRATILKFIERKMEERKLDIKEEDQEEEEVKTEDEAEMSKSDHVRKQRTDDDLLGWVLKHSNLSTEQILDLILSLLFAGHETSSVAIALAIFFLQACPKAVEELREEHLEIARAKKELGESELNWDDYKKMDFTQCVINETLRLGNVVRFLHRKALKDVRYKGYDIPSGWKVLPVISAVHLDNSRYDQPNLFNPWRWQQQNNGASSSGSGSFSTWGNNYMPFGGGPRLCAGSELAKLEMAVFIHHLVLKFNWELAEDDKPFAFPFVDFPNGLPIRVSRIL

SEQ ID NO: 376 - protein, 513 aa, Arabidopsis thaliana; identical to SEQ ID NO: 375

SEQ ID NO: 377 - protein, 513 aa, Arabidopsis thaliana; identical to SEQ ID NO: 375

SEQ ID NO: 378 - protein, 105 aa, Oryza sativa
MEGVGARQRRNPLIPRPNGSKRHLQHQHQPNAAEKKTAATSNYFSIEAFLVLVFLTMSLLILPLVLPPLPPPPSLLLLLPVCLLILLVVLAFMPTDVRSMASSYL

SEQ ID NO: 379 - protein, 559 aa, Cyanidium caldarium
MCGILAVLGSSLPVEELRELVKSCTKKLYHRGPDEEQYFISEDGWCGLGFARLKIVDPEHGVQPMFNDQRTVWSVTNGELYNHEEIRKTELNNMTLHSHSDCEIMIPLYEKYVSSQRYDHDIQYVYNLLRGVFASCLVDLKRGFFMAGRDPIGVRALFYGTSKDGAVWFASEAKAIVDVCDYVTAFIPGTFVKGYRGREQAFSFTRYYEPVYWHDHWMPVSPVDYQLLHDTFVLSCKRRLMSDVPIGVFISGGLGSSLVASVAKRLLDPNYDFHSFACGLEGAPDVAAAQRVADFLGTKHHVLTFTVEEGIQALDQVIYHLETYDVTTVRASTPMYLLSGLCKKYVKVVLSGEGADEIFGGYLYFHNAPNEIAFHQEVVRRVKLLYTADVLRGDRATAAQSLELRVPFLDRDFLDVAMSIHPREKVTSKHRIEKYIIRYAFSKEFCGEEYLPDDILWRQKEQFSDGVGYSWIDGLKAYCEKAVSDADLQNAAQRFPHDTPTTKEAYVYRAIFEKHFGNCKAVQGLRESVARWVPMWSDSTDPSGRAQKVHVAAYSNGGD

SEQ ID NO: 380 - protein, 180 aa, Arabidopsis thaliana
YRRASAVAVVTMAASSEPKSLYDFTVKDAKGNDVDLSIYKGKVLLIVNVASQCGLTNSNYTELAQLYEKYKGHGFEILAFPCNQFGNQEPGTNEEIVQFACTRFKAEYPIFDKVDVNGDKAAPVYKFLKSSKGGLFGDGIKWNFAKFLVDKDGNVVDRFAPTTSPLSIEKDVKKLLGVTA

SEQ ID NO: 381 - protein, 182 aa, Arabidopsis thaliana
KRTGRASAVAVVTMAASSEPKSLYDFTVKDAKGNDVDLSIYKGKVLLIVNVASQCGLTNSNYTELAQLYEKYKGHGFEILAFPCNQFGNQEPGTNEEIVQFACTRFKAEYPIFDKVDVNGDKAAPVYKFLKSSKGGLFGDGIKWNFAKFLVDKDGNVVDRFAPTTSPLSIEKDVKKLLGVTA

SEQ ID NO: 382 - protein, 645 aa, Arabidopsis thaliana
MSEILSSLRSLMASHSPPLDALVVPSEDYHQSEYVSARDKRREFVSGFSGSAGLALITKKEARLWTDGRYFLQALQQLSDEWTLMRMGEDPLVEVWMSDNLPEEANIGVDSWCVSVDTANRWGKSFAKKNQKLITTTTDLVDEVWKSRPPSEMSPVVVHPLEFAGRSVSHKFEDLRAKLKQEGARGLVIAALDEVAWLYNIRGTDVAYCPVVHAFAILTTDSAFLYVDKKKVSDEANSYFNGLGVEVREYTDVISDVALLASDRLISSFASKTVQHEAAKDMEIDSDQPDRLWVDPASCCYALYSKLDAEKVLLQPSPISLSKALKNPVELEGIKNAHVRDGAAVVQYLVWLDNQMQELYGASGYFLEAEASKKKPSETSKLTEVTVSDKLESLRASKEHFRGLSFPTISSVGSNAAVIHYSPEPEACAEMDPDKIYLCDSGAQYLDGTTDITRTVHFGKPSAHEKECYTAVFKGHVALGNARFPKGTNGYTLDILARAPLWKYGLDYRHGTGHGVGSYLCVHEGPHQVSFRPSARNVPLQATMTVTDEPGYYEDGNFGIRLENVLVVNDAETEFNFGDKGYLQFEHITWAPYQVKLIDLDELTREEIDWLNTYHSKCKDILAPFMNQTEMEWLKKATEPVSVSA

SEQ ID NO: 383 - protein, 270 aa, Oryza sativa
MSPQIRWRKGELIGSGAFGQVYLGMNLDTGELLAVKQVLIGSNNATREKAQAHIRELEEEVKLLKNLSHPNIVRYLGTVREEDTLNILLEFVPGGSIQSLLGKLGSFPEAVIRKYTKQILQGLEYLHNNAIIHRDIKGANILVDNKGCIKLADFGASKQVAKLATITAAKTMKGTPHWMAPEVIVGSGHNFSADIWSVGCTVIEMATGKPPWSQQYQEVALLFHVGTTKSHPPIPEHLSPEAKDFLLKCLQKEPELRSTASDLLKHPFVT

SEQ ID NO: 384 - protein, 270 aa, Oryza sativa; identical to SEQ ID NO: 383

SEQ ID NO: 385 - protein, 150 aa, Arabidopsis thaliana
MESSQATTKPTRGAGGRKGGDRKKSVSKSVKAGLQFPVGRIARYLKKGRYALRYGSGAPVYLAAVLEYLAAEVLELAGNAARDNKKNRINPRHLCLAIRNDEELGRLLHGVTIASGGVLPNINPVLLPKKSTASSSQAEKASATKSPKKA

SEQ ID NO: 386 - protein, 150 aa, Arabidopsis thaliana; identical to SEQ ID NO: 385

SEQ ID NO: 387 - protein, 292 aa, Arabidopsis thaliana
MGVMINHHFLAFIFGILGNVISFLVFLAPVPTFYRIYKRKSTESFQSLPYQVSLFSCMLWLYYALIKKDAFLLITINSFGCVVETLYIAMFFAYATREKRISAMKLFIAMNVAFFSLILMVTHFVVKTPPLQVSVLGWICVAISVSVFAAPLMIVARVIKTKSVEYMPFTLSFFLTISAVMWFAYGLFLNDICIAIPNVVGFVLGLLQMVLYLVYRNSNEKPEKINSSEQQLKSIVVMSPLGVSEVHPVVTESVDPLSEAVHHEDLSKVTKVEEPSIENGKCYVEATRPETV

SEQ ID NO: 388 - protein, 292 aa, Arabidopsis thaliana; identical to SEQ ID NO: 387

SEQ ID NO: 389 - protein, 636 aa, Zea mays
MLSTRTAAVAASASPASPWKLGGRSEGGASCDGCRTYRNTLRRRAAPAKVRALPPRRVDAVAMVSNAETETEKEQEEAAAASEELPVMPWATSVASGYTLLRDPHHNKGLAFTEEERDGHYLRGLLPPAVLSQELQIKKFMNTLRQYQTPLQRYIAMMNLQETDERLFYKLLIDNVVELLPFVYTPTVGEACQKYGSIFGRPQGLYVSLKDKGKVLEVLRNWPHRNIQVICVTDGERILGLGDLGCQGMGIPVGKLALYTALGGVDPSVCLPITIDVGTNNEKLLNDEFYIGLRQKRATGEEYDELIEEFMSAVKQFYGEKVLIQFEDFANHNAFDLLEKYSKSHLVFNDDIQGTASVVLAGLLAALKMVGGTLAEQTYLFLGAGEAGTGIAELIALEISKQTNAPIEECRKKVWLVDSKGLIVDSRKGSLQPFKKPWAHEHEPLKTLYDAVQSIKPTVLIGTSGVGRTFTKEIIEAMSSFNERPIIFSLSNPTSHSECTAEQAYTWSQGRSIFASGSPFAPVEYEGKTFVPGQSNNAYIFPGLGLGLVISGAVRVHEDMLLAASKALADQATQDNFEKGSIFPPFTSIRKISAHIAAAVAAKAYELGLATRLPPPSDLVKYAENCMYTPVYRNYR

SEQ ID NO: 390 - protein, 644 aa, Zea mays
MISARTAAASPASLWKQGGRSEGGGSCDGCRTYRNTLRRAAAAKVRALPSRAVEAVKMGSAAEMEQEEAEVAAAAAGVVVEDHYGEDSATEELPILPWAFSVASGYTLLRDPHHNKGLAFMEKERDAHHLRGLLPPAVVPQELQIKKIMHNLRQYQVPLQRYMAMMDLQERNERLFYKLLIDNVEELLPVVYTPTVGEACQKYGSIFRQPQGLYVSLRDKGKVLEVLRNWPHRNIQVICVTDGERILGLGDLGSQGMGIPVGKLALYTALGGVRPSACLPITIDVGTNNEKLLNDEFYIGLRQKRATGEEYHELMEEFMAAVKQIYGEKVLIQFEDFANHNAFNLLAKYSKSHLVFNDDIQGTASVVLAGLLAALKVVGRTLAEHTYLFLGAGEAGTGIAELIALEISKQTSAPIEECRKKIWLVDSKGLIVDSRKNSVQSFKKPWAHEHEPLTTLYDAVQSIKPTVLIGTSGVGRTFTKEVVEAMASFNERPIIFSLSNPTSHSECTAEEAYNWTQGRVIFASGSPFDPVEYDGKVFVPGQSNNAYIFPGFGLGLVISGAIRVHEDMLLAASEALAAQATQENFDKGSIFPPFTNIRKISARIAAAVAAKAYELGLATRLPPPRDLVKYAQSCMYTPVYRNYR

SEQ ID NO: 391 - protein, 169 aa, Arabidopsis thaliana
MADESPKSIYDFTVKDIGGNDVSLDQYKGKTLLVVNVASKCGLTDANYKELNVLYEKYKEQGLEILAFPCNQFLGQEPGNNEEIQQTVCTRFKAEFPIFDKVDVNGKNTAPLYKYLKAEKGGLLIDAIKWNFTKFLVSPDGKVLQRYSPRTSPLQFEKDIQTALGQASS

SEQ ID NO: 392 - protein, 322 aa, Arabidopsis thaliana
MDGEELTEQETALYDRQIRVWGANAQRRLTKAHILVSGIKGTVAEFCKNIVLAGVGSVTLMDDRLANMEALNANFLIPPDENVYSGKTVAEICSDSLKDFNPMVRVSVEKGDLSMLGTDFFEQFDVVVIGYGSRATKKYVNEKCRKLKKRVAFYTVDCRDSCGEIFVDLQDYKYTKKKLEEMVECELNFPSFQEAISVPWKPIPRRTAKLYFAMRVIEVFEESEGRKHGECSLLDLARVLEIKKQLCEANSVSESHIPDILLERLITGTTEFPPVCAIVGGILAQEVIKAVSGKGDPLKNFFYYDGEDGKGVMEDISDSFTS

SEQ ID NO: 393 - protein, 236 aa, Oryza sativa
MEKNTTAMGQLMSSSATTAATATGPASPKRPAGRTKFQETRHPVFRGVRRRGRAGRWVCEVRVPGSRGDRLWVGTFDTAEEAARAHDAAMLALCGASASLNFADSAWLLHVPRAPVASGHDQLPDVQRAASEAVAEFQRRGSTAATATATSGDAASTAPPSSSPVLSPNDDNASSASTPAVAAALDHGDMFGGMRTDLYFASLAQGLLIEPPPPPTTAEGFCDDEGCGGAEMELWS

SEQ ID NO: 394 - protein, 584 aa, Xenorhabdus nematophila
MASSMLSSATMVASPAQATMVAPFNGLKSSAAFPATRKANNDITSITSNGGRVNCMQVWPPIGKKKFETLSYLPDLTDSGGRVNCMQAMGIVGHFINGKVTDIHSRLQDIYNPATGEVSRQVAIASKATAEEAIAAAQAAFPEWRDTPPIKRARIMFRYKQLLEEHADEICRLIGQEHGKIIHDAAGELQRGIENVEYACGAPEILKGEFSKNVGPGINSWSDFQPLGVVAGITPFNFPAMVPLWMYPLALVCGNTFVLKPSERDPSAPLYIGQLLKKAGLPDGVFNIVNGDKEVVDTLLTDKRVKAVSFVGSTPVARYIYTTATANGKRCQALGGAKNHAIVMPDADMENVVNSLLGAAFGSSGERCMALSVAVAIGDEIADQLVTQLQERMKSLTIGVHSDKNNDFGPVITREHQQKVCGYITSAEQQGAKILVDGRNMKVSGYENGFFVGATLIDDVTTDMDSYKAEIFGPVLQVVRVKTMQEAMDIIDEHEYGNGTCIYTRDGEAANYFADRIQVGMVGINIPLPVPVSYHSFGGWKNSLFGDLYAYGPDGVRFYTRRKTITQRWPSANLREGAEFSMPT

SEQ ID NO: 395 - protein, 469 aa, Arabidopsis thaliana
MPRVIPPENLGCPPFRALTFDSLGLIKVTEARGQERGIPTVVNTWGEMNASRSVLAASIDDRLRNPLLAVARKDGNVEVINPCNGDLHFSYSVFGDDGCSPEDNEISALHLFRKKIDDQTERSCTLLTCTKKGDVSLRSVKFPDAHGNSTDDASPKTWKACGSGEILVGKVDGSENFSLFGGKRVEANIWDLEQCTKIWSAKCPPKNNLGIFTPTWFTSATFLSKDDHRKFVTGTKSHQVRLYDISTQRRPVLSFDFRETAITSIAEDPDGHTIYVGNASADLASFDIRTGKLLGSFLGKCSGSIRSVVRHPQHQVIASCGLDRYLRVYDVKTRQLISAVFLKQHLTGLVFDSGFSGEAETAVANTVAEAATEEKMTIMDQEDDETEKAPVKRKKSKKEKRSREIVFEGEDDEENEDEIEKAPVKTKKSKKEKRSREKVSEGEEKDELRSKKTREHKKKTKIVKHNQED

SEQ ID NO: 396 - protein, 479 aa, Arabidopsis thaliana
MTFREKMPTSPKSPLRRRRSSWTGTWLNHQTTSFKQAVSAVIQAQSPRSRFKSLSSDFSDVDRTLSLSDSLLLKILEKLPESQNEDVSLVCKRWLSVQGRRLRSMKVFDWEFLLSGRLVSRFPKLTSVDLVNACFNPSSNSGILLCHTSISFHVSTDSSLNLNFVEESLLDNEMVDKGLRVLGRGSFDLIKLVVINATELGLLSLAEDCSDLQELELHKCSDNLLRGIAACENLRGLRLVGSVDGLYSSSVSDIGLTILAQGCKRLVKLELSGCEGSFDGIKAIGQCCEVLEELSICDHRMDDGWIAALSYFESLKTLLISSCRKIDSSPGPGKLLGSCPALESLQLRRCCLNDKEGMRALFKVCDGVTKVNIQDCWGLDDDSFSLAKAFRRVRFLSLEGCSILTTSGLESVILHWEELESMRVVSCKNIKDSEISAALSSLFSLLKELTWRPDTRSHLSSSLEGTGIGKRGSKFFKKR

SEQ ID NO: 397 - protein, 479 aa, Arabidopsis thaliana; identical to SEQ ID NO: 396

SEQ ID NO: 398 - protein, 544 aa, Glycine max
MASLLRCNGVFLSPLPPQPRRDPILPKFFLPQSPNPKPSRLLTVRAEVKETSSAAATTTTTTSSDDKIREILRNRDYDKKFGFSVDIESLTIPKGLSKETIRLISSLKEEPQWMLEFRLKAFEKFLSMKEPTWSDNTYPPIDFQNICYYSAPKNKPSLQSLDDADPELLRYFDKLGVPLNEQKRLANVAVDAVLDSVSIATTHRKTLEKAGVIFCSISEAIKEYPDLVRKHLGRVVPSDDNYYAALNAAVFSDGSFCYIPKDTKCPMQISTYFRINALETGQFERTLIVADDRSSVEYLEGCTAPSYDRNQLHAAVVELYCGEGAEIKYSTVQNWYAGDEEGKGGVYNFVTKRGLCAGAGSKISWTQVETGSAITWKYPSVVLEGDGSVGEFYSVALTNNYQQADTGTKMIHKGKNTRSRIISKGISVGHSRNCYRGLVQVLSKAENARNSSQCDSMLIGDNAAANTYPYIQVKNPTARIEHEASTSKIGEDQLFYFQQRGIDYEKAMAAMISGFCRDVFNELPDEFGSEVNQLMSLKLEGSVG

SEQ ID NO: 399 - protein, 497 aa, Arabidopsis thaliana
MSGAITCSAADLATLLGPNATAAADYICGQLGTVNNKFTDAAFAIDNTYLLFSAYLVFAMQLGFAMLCAGSVRAKNTMNIMLTNVLDAAAGGLFYYLFGYAFAFGGSSEGFIGRHNFALRDFPTPTADYSFFLYQWAFAIAAAGITSGSIAERTQFVAYLIYSSFLTGFVYPVVSHWFWSPDGWASPFRSADDRLFSTGAIDFAGSGVVHMVGGIAGLWGAFIEGPRRGRFEKGGRAIALRGHSASLVVLGTFLLWFGWYGFNPGSFTKILVPYNSGSNYGQWSGIGRTAVNTTLSGCTAALTTLFGKRLLSGHWNVTDVCNGLLGGFAAITAGCSVVEPWAAIVCGFMASVVLIGCNKLAELVQYDDPLEAAQLHGGCGAWGLIFVGLFAKEKYLNEVYGATPGRPYGLFMGGGGKLLGAQLVQILVIVGWVNATMGTLFFILKRLNLLRISEQHEMQGMDMTRHGGFAYIYHDDDESHRVDPGSPFPRSATPPRV

SEQ ID NO: 400 - protein, 497 aa, Arabidopsis thaliana; identical to SEQ ID NO: 399

SEQ ID NO: 401 - protein, 114 aa, Arabidopsis thaliana
MFRAMSTRKVHGGYEKLGDEEARLKRVSSVPASVYGHSRNPVQEVKKTPTAKPTGGSVHPLFSFFDVHFQRKKKKTTKKKSLATAKPEFARYMEYVREGGVWDPSSNAPVIHYR

SEQ ID NO: 402 - protein, 251 aa, Arabidopsis thaliana
MAATMIGINLSCFKSTSFFSPDLNSLQSKLSLLSLKPSPTQPRKSTVIRMGGGPRTFPGGVSKWQWKRMQAKKQKQLLKARLCRERQIYEMRKRAELKAAVAELERPWEPIHKPPNLFSVCADEQVKVLADRFQKPGGFDLWTDRDGPQLFESVDDLPSARFFPKGVVHSVKPYGRLSSSSVVDDGDESEVKDEEIGKKLRGRRVRKRGDDGGKRRTENRGNGGRLRNGGSSSSQVYDMTLQNDGRYEIGS

SEQ ID NO: 403 - protein, 359 aa, Glycine max
MAGSAIGFEGYEKRLEISFFENGVFADPGGLGLRALSKDQLDEILKPAECTIVASLSNDYVDSYVLSESSLFVYPYKIIIKTCGTTKLLLSIPVILKLADALDIAVKSVRYTRGSFIFPGAQSFPHRSFSEEVSVLDSYFSNLGSGSKAYVMGDPSKSQIWHIYSASAQTKGSSEAVYGLEMCMTGLDKESASVFFKENTSSAASMTENSGIRKILPQSDISDFEFDPCGYSMNGIEGSAISTIHVTPEDGFSYASFEAVGYDFNDMALGELVERILACFCPAEFSVALHIDMHGEKLNKFPLDIKGYYCGERSTEELGVGGAVVYQTFVQGCDGSASPRSILKCCWSEDENEDEVREI

SEQ ID NO: 404 - protein, 211 aa, Oryza sativa
MSSPATAAAAAASCGVLRHHHPPASPRPPPTTTTTSRLLLASRSRGLQRPLRVNHAPPRRLPPTAARAQSAAAAGYQPESEFYKVEAILRPWRVPYVSSGLLQMGIRGVTVSDVRGFGAQGGSTERHEGSEFAEDTFIDKVKMEIVVSKDQVEAVVDKIIEKARTGEIGDGKIFLIPVSDVIRIRTGERGERAERMAGGLADKLSSAMPIS

SEQ ID NO: 405 - protein, 396 aa, Xenorhabdus nematophila
MLDSQVIATVKSTIPLIVSTGPKLTAHFYERMFKHNPELKDIFNMSNQLNGAQREALFNALCAYASNIDNLQALLPAVEKIAHKHTSLNIQPEHYQIVGTHPLATLDEMFHPGDEVLNAWGKAYEVLADVFINREEDIYQRGESEEGGWRGLRQFRVNKKQPQSDVITSFEFVPADGGKVIDYKAGQYLGIYLDTPVFENREIRQYSLTTAPNNHSYQIAIKREAQGKVSNYMHDNVQEGDTILLAPPRGDFFLDVQSDTPVTLISAGVGLTPMMSMLQHLHNQHHVGTVNWFHATEHGGYHAFADKVNTITQSMTNLHTQVWYREPRNEDQQGADYQHMGLMDLSVVKDSITEEGMQFYFCGPVVFMQYIAQQLLAIGIDKQHIHYECFGPHKVL

SEQ ID NO: 406 - protein, 196 aa, Zea mays
MNQLSLLHRAFHLHLLSPERGHGLTAAVIRVRLSSSQHTPRQHAKRLLAVAPHESIAAATEESSRPRQELAAAGNKNDGGGGGGRTCALPTWALIGGITAGVAVALALSAGAGPALALGPEGPLVEEFWDNMRRYALYVVTVSTGVAYTVLQPIVELLKNPITALLIVAVLAGSGFLVSQVLNAMVGNSDFIYMYE

SEQ ID NO: 407 - protein, 300 aa, Oryza sativa
MNMCEKDQNFHWGYDLFRDPFAPIGYYGPPHGYGDGNYCDLHYARDASHLDETHLHSSALTYDLYNPSVGIYHPGNAGEHDHDTVYIEPTSSNSCPDTDDSFPMDEEVGKRFYPMVPVPHVPKINGEIPSVDEATMDHERLTERLRLYELVEHKVKGDGNCQFRALSDQLYQSPDHHEFVRQQIMSQLKSNRDAYDGYVPMAYDDYLEKVSQNGEWGDHVTLQAAADKYGVKIFVMTSFKDTCYIEIQPKVQKSNKVVLLSFWAEVHYNSIYPQNDAPRSQTTRKRRWWPFSHNHHHHHH

SEQ ID NO: 408 - protein, 130 aa, Zea mays
MAAAPVGAQNRCVFVGNIPYDATEEQLVQICEEVGPVVSFRLVIDKETGKPKGYGFCEYKDEETALSARRNLQGYEINGRQLRVDFAENGRNTDRNREKVDDPQIFTVEEPFLPPLEFSVNLRSCIVFVL

SEQ ID NO: 409 - protein, 205 aa, Zea mays
MHNTSTHTHAGCCWAFSAVAAVEGLNKIRTGRLVSLSEQELVDCDVSGVDQGCDGGLMDNAFQFVARRGGLASESGYPYQGRDGPCRSSAAAARAASIRGHEDVPRNNEAALAAAVANQPVSVAINGEDMAFRFYDSGVLGGACGTDLNHAITAVGYGTANDGTRYWLMKNSWGASWGEGGYVRIRRGVRGEGVCGLAKLPSYPV

SEQ ID NO: 410 - protein, 342 aa, Zea mays
MGCAQGKCCLRRHPRRGSAAAAVGGGATLGRAAVPGAGLVLEYAALAVAGLYPDSTARESQDAHLVATRFAGDPDLHLFAVFDGHGTAGTACAGFARDALPRLLASLSLASAADPTAAFREAMLGANAEMHAAPEVDDSMSGTTAVAALVSGGALHVANVGDSRAVAGVWRAGRVVAEDLSWDQTPFRADERERVRACGARVMSVEQVEGMRDPEAERWAPDEGDPPRVWARDGLYPGTAFTRSLGDLAAEAIGVIAEPEVKSVEITPSHLFFVVASDGVFEFLSSQEVVDRVATYQDPRDACSAIAAESYKLWLEHENRTDDITIIIVHIRDMESVGAPKF

SEQ ID NO: 411 - protein, 565 aa, Oryza sativa
MGGCYSAYASSRKLRGRISKISLVIPDPVPDAEAASPRKDGVDGDGDDVRGGGGGCDDGGDVVAIATTTADEFARRYVLGKELGRGEFGVTRRCSDAATGEALACKTIRKHRRLAPPRVTAAKAAAAHGEDVKREVAIMRRMSSASSSRGGGAASSAAVVRLREACEDAADGSVHLVMELCEGGELFDRIVARGHYSERAAANIFRTIVDVVQLCHSNGVIHRDLKPENFLFANKSEDSPLKVIDFGLSVFFKPGDRFTEVVGSAYYMAPEVLRRSYGPEVDVWSAGVILYILLCGVPPFWGDNDEKIAQAILRGAIDFNREPLPRVSANAKDLVRRMLDPNPSTRLTAKQVLEHPWLKNADTAPNVSLGDAVRARLQQFSAMNKFKKKALGVVARNLPGEEVDKYVQMFHHMDKDKNGHLSLDELLEGLHINGQPVPEPEIRMLLEAADTDGNGTLDCDEFVTVSVHLKKMSNDEYLAAAFNYFDKDGSGFIELDELREEVGPNEQAILEILRDVDTDKDGRISYQEFELMMKSGADWRNASRHFSRANFSTLSRRLCKDTLTP

SEQ ID NO: 412 - protein, 389 aa, Oryza sativa
MAAMASSPPTTPNLGSQPTWVPYEPTRDCSQGLCSMYCPQWCYFIFPPPPPAFDITGSSSDDSSGPTFSPLVIAIIGVLASAFLLVSYYTIISKYCGTFSSLRNRLLGSSAHRGSGGGADGGDNSRSQEPWSVALSDGMDETLINKITVCKYRRGDGFVDSTDCSVCLGEFREGESLRLLPKCSHAFHVPCIDTWLKSHSNCPLCRCNIAFVTVGMVSPEPEARVPREDRRDNHELVLTIDNPEHVREEPQNVVTGVAVGNGGRNHEAKDGPGRSEDANGTAEIREDGALMPPTRAPSSLSDTHREGRMSIADVLQASLEDELMVARESGLLAGSSGSSRRCHGEHSKDGGGRSGRALPDGANMKRLAPAGRSCFSSRSGRGKDSVLPM

SEQ ID NO: 413 - protein, 500 aa, Oryza sativa
MASTVTTPSRPVSAGCHRRSPRRSAPVVLSLGGGPRRRTPSSTSCSALASPAKQGTAKLPPPQPTASRTAAADAERERERTDYNEVAAALESIYKLSPAVVEEKDADEEDEKSKQTKRKRKGRVGRSRNATVTVRSSRRRRRGQRMDLGKRVEMRRREEEEGGGGAGKVEDEERGFEEMLLREHAVSTDMGSLDWKRMKIPPVLTSAQSIRLFRIMQPMKAIMEMKENLENEVQSEPNDAQLAEAMNMSVLQMRRHLEVGRAARNKLIKHNLRLVLYTINKYYPDMSNDERFDDICQAGANGLITAIDRFEPKRGFRISTYALFWIRHSIVRAITLSNFTRFPFAMESERQEIHRAREELAFELGRAPTEEEVMKKVGLSPARYRDVVRMTRPTYSLHARNRVTQEELINEVTDDDAIGVDTSSHNTLLRLAIDDLLDSLKPKESVVIRQRFGLDGRGKRTLSEIAGNLNISREMVRKYELKALMKLKHPTRVEYLRRYM

SEQ ID NO: 414 - protein, 397 aa, Zea mays
MDDAGRPPPHAPVAVTASASASATAAPAPPQPSATAAVDRSSPDPDALYEEGMWQQMAMDSGATMQPGSYPERPGEPDCTYYLRTGLCRFGMSCRFNHPPDRNLAIASARMKGEYPERAGQPECQYYLKTGTCKFGPTCKFHHPREKAGIAGRVQLNTSGYPLRPNEKECAYYLKTGHCKYANTCKFHHPELFNVVPSSRGSPIYTSVHSSASAGPQSYTGTMPSWAFPRASFIPSPRWQSPSNYAPMIVPQGLVQMPSWNSYTGQLQSPGAQQTYGSSQQGEASTGNQGMLSPYRSSSFPVPQYALQRENVFPERPDEPECQYYMKTGDCKFGAVCKFHHPRVRSLPPPDCVLSPMGLPLRPGEELCKFYSRYGICKFGANCKFDHPTVVAPMVYA

SEQ ID NO: 415 - protein, 592 aa, Zea mays
MAAALECWSGRPSTDEEMVEQVLMKPHGRSDDSLPTCADSASAGEPTSAPAPPNPKKWQRLGRNFAGAIAAFKNTLSLDGGGLPRDPSPRAEKPPPLLLRGLAQLYSRGAAANQQLPEKLVADLRRHFDALPNSYAQAGFDMKDVLLHARLVEQATGEDQPAVNIEEVHGRGAGDEGTVFQLTFACTAPLSWQSMSGSLDSPSFCCKKIQIFEKRGLTLGVVMILVQTGNETLFKNRVESALKSVAKKQRKNSGGGVKLPFGLCGCQEEGSRNFDEESMFDPDDGQVLDNEPARRPQLPTRLPQSSVFVSVDEWQTIRSGGEELGRWMLRSEEIEFIDWVGANSFRGVYRGKKVWVNKLRGCDMGSAYEVEIRQDLLQLMSCGQRNILQFHGICFNGNHGLCIVTRMMEGGSVHDILTQRNKRLSLRDTVRIALDVADALAFMNSYGIAYRDLNARKILLDRQGNACLGDMGIVTPCSNVGEVTEYETSGYRWLAPEIIAGDPETVSETWMSNVYSYGMVLWEMITGEEAYSAYSPVQAAVGIAACGLRPEIPRECPPFLRSLMNRCWDNSPLKRPQFSEIISILQRQQNVR

SEQ ID NO: 416 - protein, 315 aa, Zea mays
MACSTASLAATLLAFALMFQACVAGRRRLTALVQEPAITMKYHKGALLSGPIAVNFIWYGDFTAPQRAVITDFVSSLSAAPRAAAQSQPEPSVSTWFKTARKYYDTSKARFPALRLGSHAVDRNCSLGRRLTERDLLRLAARGAPSRAINLVLTAADVAVDGFCASRCGTHGASPRSRAGRFAYVWVGNPASQCPGQCAWPFHQPVYGPQAPPLTPPNGDVGVDGMVISLASMIVGTVTNPFGNGFYQEGSADAPLEAATACAGVYGKGAYPGYAGALLVDPASGASFNANGAHGRKYLVPALVDPDTSSCATLG

SEQ ID NO: 417 - protein, 709 aa, Arabidopsis thaliana
MVVATTIALYASPPSSVCSTPHQISCDLDLTSRSSSTSSSMASSPQKPIVGGLSSLFSSASVKSSSSSSCSYSTGVDEFSSLRYDRSDDLKDLSFSSSFGYSPAKFVNSFRRDHQSPISVLHGPVSCSCSPPMRMSRDRNLDGSFRLGASGLFNGFVRKALGSCVDYEFGSDSVLVDELTFPMEVDTIKPYARDLLRRAQLRHKIFNDESVIKAFYEAEKAHRGQMRASRDPYLQHCVETAMLLANIGANSTVVVAGLLHDTIDDSFMSYDYILRNFGAGVADLVEGVSKLSQLSKLARENNTACKTVEADRLHTMFLAMADARAVLIKLADRLHNMKTLYALSPVKQQRFAKETLEIFAPLANRLGISTWKVQLENLCFKHLYPNQHNEMSTMLEDSFDEAMITSAIEKLEQALKKAGISYHVLCGRHKSLYSIYSKMLKKKLTVDEIHDIHGLCLIVDNEGDCYKALGVVHSLWSEVPGKLKDYITHPKFNGYQSLHTVVMDNGTVPLEVQIRTQEMHLQAEFGFAAHWRYKEGGCKYSSFVLQMVEWARWVVTWHCEAMSKDRSSISSSDSIKPPCKFPSHSEDCPASYKPNSSQDGPVYVIVIENDKMSVQEFPASSTVSDLLSRAGPGSSRWSMYGIPAKEELRPRLNQIPVSDLKWKLKMGDVVELTPTIPDESLTEYREEIQRMYDRGLAFSRPGTMVGWGS

SEQ ID NO: 418 - protein, 310 aa, Arabidopsis thaliana
MAAGLSTAVTFKPLHRSFSSSSTDFRLRLPKSLSGFSPSLRFKRFSVCYVVEERRQNSPIENDERPESTSSTNAIDAEYLALRLAEKLERKKSERSTYLIAAMLSSFGITSMAVMAVYYRFSWQMEGGEISMLEMFGTFALSVGAAVGMEFWARWAHRALWHASLWNMHESHHKPREGPFELNDVFAIVNAGPAIGLLSYGFFNKGLVPGLCFGAGLGITVFGIAYMFVHDGLVHKRFPVGPIADVPYLRKVAAAHQLHHTDKFNGVPYGLFLGPKELEEVGGNEELDKEISRRIKSYKKASGSGSSSSS

SEQ ID NO: 419 - protein, 569 aa, Arabidopsis thaliana
MANSKKQAWFFYTTGLPSDIEIEVDDITFHLHKFPLMSKSKKLHQLITEQEQSKVYSHIKLENFPGGSEIFEMVIKISYGFKVDISVSTAVPLRCAAEYLEMTEEYSPENLISKTEKFLSEFVFTNVQESIKALKACESVSSLAESLCITEQCIDSIVFQASSTDPSSFYGWPINNGGIFTVDRKKQSKDSKTELWFEDLTELSFPIFRRVILSMKSSVLSPEIVERSLLTYAKKHIPGISRSSSASSSSSSSSTTIASENQQRELLETITSDLPLTATTTRSLFGLLRAAIILNASENCRKFLEKKIGSNLEKATLDDLLIPSYSYLNETLYDIDLVERLLRRFLENVAVSSSSLTVVGRLIDGVLGEIASDANLKPEQFYNLAVLLPVQARVYDDGLYRAVDIYFKTHSWILEEEKEKICSVMDCRKLTVEGCTHAAQNERLPLRAVVQVLFLEQLQLRQVITGTLLTEEDGDKTVVDLGRWKEAVKENQVLRLDMDTMRTRVNQLEKECLYLKKVIAKIDKESLLKAKHGAGKWSIGKKFGCKFSAQVCDSQEATMVDRRSRRFLS

SEQ ID NO: 420 - protein, 158 aa, Arabidopsis thaliana
MRPLSVQSKFEDVATSTSVNHHGVTPQSPWHSPVPYLFGGLAAMLGLIAFALLILACSYWRLSSSGEEDGQNVDEEKESRSGDKAANGAYEEKFLVIMAGEDLPRYLATPAMKKCTCGGHEGKMVISQEESVAKEEEKMREGEEEKVKDTGETTTTSH

SEQ ID NO: 421 - protein, 158 aa, Arabidopsis thaliana; identical to SEQ ID NO: 420

SEQ ID NO: 422 - protein, 620 aa, Arabidopsis thaliana
MDSLSSMGFQTASFFLILLFLFYHLPCVPSQQERSRLCKPFQCGDITVGFPFWGENRQSDCGHFSLKLNCNKPSNTTSLTISGHNYSVLRIDNKSNILSLSRQDFSGPFCSASFSSTPLRSDLFQNLQPYRNLTVFYMCDPRRHFFGNFTCPVKGLGSVVQNSTYRKLCDKSFSVTVPTSYVPEEEALNLTHLESVLRKGLEVKLKISEMSGQECVTTDGNSGFTRFCCTNVSGPEISCLTSITTMNNGTYSDNRPFLVTIGTVLGSILCVCVVLFLAFYLNERRIAKAARIQHLEALGTLRGYNYKQIKKITKSFTEVVGRGGFGTVYRGRLRDGRKVAVKVLKDSKGNCEDFINEVASMSQTSHVNIVTLLGFCYEGSKRAIIYEFLENGSLDQSLNLDVSTLYGIALGVARGLEYLHYGCKTRIVHFDIKPQNVLLDENLRPKVADFGLAKLCEKQESILSLLDTRGTIGYIAPELFSRMYGSVSHKSDVYSYGMLVLEMIGARNKERVQNADPNNSSAYFPDWIYKDLENFDNTRLLGDGLTREEEKNAKKMILVGLWCVQFRPSDRPSMNKVVEMMEGSLDSLDPPPKPLLHMPMQNNNAESSQLSVESSIYSEV

SEQ ID NO: 423 - protein, 317 aa, Arabidopsis thaliana
MVTLIVATTADPASINPAAALLAMPGWTAGPILPPDIKSFSNKQTRVIQHDRSIVKEDDLDLRWEEATGEVVDEVIFLSRHTAVSNRPALTVHPIGVLHLKDGESPPQGGKPGWAALPSTRIGPWFRLLKKMAEAHGLVPEFEITLEATHHGPITNKPTMFLEIGSTEEYWKRQDAAQVMALLMWEGLGLGGSEEVGKWKSETGKRKVLLGIGGGHYAPRHMDIALKDDIWVGHLLSGYSLPMEDPTQTKTTPGENYIGGNWRQSIKAAFEATKASFPGGEILAHLDHKSFKGWQKKAITEFLAEESINVGKPNDFT

SEQ ID NO: 424 - protein, 314 aa, Zea mays
MVVLVVATTSDPASIGPAAAFLAMPGWSPGPPIAEAMESFTNGNVRLLKHERSIVAEDDLDQRWQEATGESVSEVIFLSKHTAVSKRPALTVHPIGVPHLKEDETPPQGGTPGWAAIPSPRIGPWLRLMQKIAVEQGLVPEFEVTLEATHHGPVTSTPTMFVEIGSTEDHWGRQDAAQAIALVLWKGLGLEDGNAVGTWQRNCEKVLLGIGGGHYVPRHMDIVIKDGVWVGHLLSGYSLPMDMSSQVNVKSSEEVAGMWKHSIKVSYEATKAAFPGGEVIAHLDHKSFKGWQKNAVTCFLQEQNIRIGKPSDFL

SEQ ID NO: 425 - protein, 314 aa, Zea mays; identical to SEQ ID NO: 424

SEQ ID NO: 426 - protein, 314 aa, Zea mays; identical to SEQ ID NO: 424

SEQ ID NO: 427 - protein, 108 aa, Zea mays
MSGVWVFKNGVVRLVENGAAVGGEAAVRRRKALVHTPSGQVVRSYAELEAELRALGWERYYEDPALYQFHKRGSLDLISLPADFARFSSVHMYDIVIKNRDSFRVVDV

SEQ ID NO: 428 - protein, 405 aa, Zea mays
MASSAAAASSASALFRLPGSGHLRAPPRSGWRDHRRSRRATVRCSFAPVETARIKVVGVGGGGNNAVNRMIGSGLQGIEFYAINTDSQALINSQAQYPLQIGEQLTRGLGTGGNPNLGEQAAEESRETIATALRDSDLVFITAGMGGGTGSGAAPVVAQISKEAGYLTVGVVTYPFSFEGRKRSVQALEALEKLEKSVDTLIVIPNDKLLDVADENMPLQDAFLLADDVLRQGVQGISDIITIPGLVNVDFADVKAVMKNSGTAMLGVGVSSSKNRAQEAAEQATLAPLIGSSIEAATGVVYNITGGKDITLQEVNKVSQIVTSLADPSANIIFGAVVDDRYTGEIHVTIIATGFPQSFQKSLLADPKGARIVESKEKAATLAHKAAAAAVQPVPASAWSRRLFS

SEQ ID NO: 429 - protein, 405 aa, Zea mays; identical to SEQ ID NO: 428

SEQ ID NO: 430 - protein, 405 aa, Zea mays; identical to SEQ ID NO: 428

SEQ ID NO: 431 - protein, 357 aa, Zea mays
MASTSSAPAGATDAVLKPSEPVPEGVQQVQGIDFNQHAARPITVDELVSGYATMGFQATSVGAAVRIINDMRAWRDPETGDRTTIFLGYTSNLISSGLRETLRYLVQHKHVSAIVTTAGGVEEDFIKCLAPTYLGSFSTPGAGLRKKGMNRIGNLVVPNSNYCAFEDWVVPILDKMLEEQEASNKTDEPLHWTPSKVIHRLGKEINDERSVYYWAWKNDIPIFCPALTDGSLGDMLYFHTFKSSPEQLRVDIVEDIRKINTIAVRAKRTGMIVLGGGLVKHHIANANLMRNGAESAVYINTAQEFDGSDAGARPDEAVSWGKIKLDGDSVKVYAEATVVFPLIVAATFARVAAKAED

SEQ ID NO: 432 - protein, 357 aa, Zea mays; identical to SEQ ID NO: 431

SEQ ID NO: 433 - protein, 357 aa, Zea mays; identical to SEQ ID NO: 431

SEQ ID NO: 434 - protein, 357 aa, Zea mays; identical to SEQ ID NO: 431

SEQ ID NO: 435 - protein, 204 aa, Glycine max
MASAGDVFRQGLPEVCAAGKLHVLAVDDSHVDRKVIERLLKISSCKVTVVESGSRALQYLGLDGEKSSIGLDSVKVNLIMTDYSMPGMTGYELLKKIKESSVFREVPVVVMSSENILTRIDSCLEEGAEEFLLKPVKLSDVKRVTDFIMRGEGMKGVKISKKRSRSDDCIPSLSTAFSSVSHPCDISSPPSPCVLQPKKSRLSI

SEQ ID NO: 436 - protein, 248 aa, Arabidopsis thaliana
MSAVYCGTKRSYFDDNSSPPSSKRFRCFSPSNSPIWSSPPSSSLDQLHSAFPHIELTVLVKALEDNGSDFNAAMKSLYSFASSEEKKAEELAAGGAATQETDAVCGGNPPTSGDDWVELLVREVLQSSGTDDAKVRAARVLEALEKMLSARAREEAGNKFQEEKVAVQQQVETLVKDNTVLKRAVAIQHERQKALEDANHQLGLLKQLVPQYQEKLRNLEVNNYALRMQLQQVEHGNSMPARFNPDVF

SEQ ID NO: 437 - protein, 341 aa, Arabidopsis thaliana
MGHRHSKSKSSDPPPSSSSSSSGNVVHHVKPAGERRGSSGSGTVGSSGSGTGGSRSTTSTQQNGRILGRPMEEVRRTYEFGRELGRGQFGVTYLVTHKETKQQVACKSIPTRRLVHKDDIEDVRREVQIMHHLSGHRNIVDLKGAYEDRHSVNLIMELCEGGELFDRIISKGLYSERAAADLCRQMVMVVHSCHSMGVMHRDLKPENFLFLSKDENSPLKATDFGLSVFFKPGDKFKDLVGSAYYVAPEVLKRNYGPEADIWSAGVILYILLSGVPPFWGENETGIFDAILQGQLDFSADPWPALSDGAKDLVRKMLKYDPKDRLTAAEVLNHPWIREDGE

SEQ ID NO: 438 - protein, 466 aa, Arabidopsis thaliana
MAGLKIWQAIFITIALIIIVVLSVLSFCLIWKKKSRRSKTLSLPIIQTPVVSKEIKEVRIEHVVSTSSNFDPQDENNNESDKFLLNLEMEKNRENGLSSSRSGSGKEGYLCVANRSTSSLYEMATPSPSPLSGLPESHLGWGHWFTLRDLEIATNRFSKENVIGEGGYGVVYRGELVNGSLVAVKKILNHLGQAEKEFRVEVDAIGHVRHKNLVRLLGYCIEGTNRILVYEYMNNGNLEEWLHGAMKHHGYLTWEARMKVLTGTSKALAYLHEAIEPKVVHRDIKSSNILIDDRFNAKISDFGLAKLLGDGKSHVTTRVMGTFGYVAPEYANTGLLNEKSDVYSFGVLVLEAITGRDPVDYARPANEVNLVEWLKMMVGSKRLEEVIDPNIAVRPATRALKRVLLTALRCIDPDSEKRPKMSQVVRMLESEEYPVPREERRVRRTQEESSDTDRSRPVSRSQSKRL

SEQ ID NO: 439 - protein, 261 aa, Arabidopsis thaliana
MARLVFSLNLPSSHGFNLSPRNLQSFFVTQTGAPRFRAVRCKPNPESSETKQEKLVIDNGETSSASKEVESSSSVADSSSSSSSGFPESPNKDINRRVAAVTVIAALSLFVSTRLDFGISLKDLTASALPYEEALSNGKPTVVEFYADWCEVCRELAPDVYKIEQQYKDKVNFVMLNVDNTKWEQELDEFGVEGIPHFAFLDREGNEEGNVVGRLPRQYLVENVNALAAGKQSIPYARAVGQYSSSESRKVHQVTDPLSHG

SEQ ID NO: 440 - protein, 492 aa, Arabidopsis thaliana
MADSHSVNNQLSRHTSIFGLRLWVVLGVCVGAAIVLLLVLISLWFIYRRSNKNKSLESSSKSNHTIVPVVSKEIQEIRPPIQPDPTPEPHQNQQREDDNKIHIEIGKDHRIAYPERGGWTGSGSGSGSGDQGLLMLSGPEVSHLGWGHWYTLRELEVSTNGFADENVIGQGGYGIVYRGVLEDKSMVAIKNLLNNRGQAEKEFKVEVEAIGRVRHKNLVRLLGYCVEGAHRMLVYEYVDNGNLEQWIHGGGLGFKSPLTWEIRMNIVLGTAKGLMYLHEGLEPKVVHRDIKSSNILLDKQWNSKVSDFGLAKLLGSEMSYVTTRVMGTFGYVAPEYASTGMLNERSDVYSFGVLVMEIISGRSPVDYSRAPGEVNLVEWLKRLVTNRDAEGVLDPRMVDKPSLRSLKRTLLVALRCVDPNAQKRPKMGHIIHMLEAEDLVSKDDRRNSGGGGGGIEQGRSPRRKTNVNESEDESGNSVLINNDQLALENKQN

SEQ ID NO: 441 - protein, 311 aa, Arabidopsis thaliana
MELLFLLCSIIYTSITSIFFSLLLPFRFLLHRLLPSRAAVDPNVSFYEGTVWHDRLRPVRHSFRYSVRYALFDLDKAINTPPDHFSADEARRVSRTTGPIFLLTIPPSVGYEQNPLSLYYCYDLEGSSKRLSKCIAQVTNTPWGERVTFVFDPESDLVAKSLQVSPFMDMLGNWKIRANEPGDDLSVSIASQHPHFGNYFSATLKAKRIPLSRVSDPAVFFWLMPHKVAIWIYWHALQLWWKSVPFIQHPRYSNPSYREEAAKRDQELRCPGLDGSDSDKTNKFDGLKGDGCSSSFGGCRFAWRDANWPWS

SEQ ID NO: 442 - protein, 108 aa, Zea mays
MEIESVKCECCGLKEDCTPHYIASVRSGFHGQWLCGLCCEAVRDEACRRKAHHGVEEAVRAHMAFCNMFKLNPAVRVADGMRQMLRRRSGDMSKPESAKKYESSVTLY

SEQ ID NO: 443 - protein, 119 aa, Arabidopsis thaliana
MASRDQVKASHILIKHQGSRRKASWKDPEGKIILTTTREAAVEQLKSIREDIVSGKANFEEVATRVSDCSSAKRGGDLGSFGRGQMQKPFEEATYALKVGDISDIVDTDSGVHIIKRTA

SEQ ID NO: 444 - protein, 295 aa, Arabidopsis thaliana
MEANSGGGGGAEGGRAVTGGGGGGGGSDVELVSKTLQVEHKLFYFDLKENPRGRYLKISEKTSATRSTIIVPSSGISWFLDLFNYYVNSEEHELFSKELQLDSKVFYFDIGENRRGRFLKVSEASVSRNRSTIIVPAGSSPDEGWAAFRNILAEIHEASGLFVMPNQKPSDGQEHLVDDVGAGFIPGHGSQQPSSSEHNVDRTIDSPGQEETGMTGVSKVIRADQKRFFFDLGNNNRGHFLRISEVAGSDRSSIILPLSGLKQFHEVIGHFVEITKDKIEGMTGANVRTVDPPQR

SEQ ID NO: 445 - protein, 128 aa, Arabidopsis thaliana
MESYQNQSGAQQTHQQLDQFGNPFPATTGAYGTAGGAPAVAEGGGLSGMLHRSGSSSSSSSEDDGLGGRRRKKKGITEKIKEKLPGHHDSNKTSSLGSTTTAYDTGTVHHEKKGMMEKIKEKLPGGHH

SEQ ID NO: 446 - protein, 310 aa, Zea mays
MDGGGGGVGGGGVGAGVMVGGGVGPGGGVGVGVGGDVELVSKTLQFEHKLFYFDLKENPRGRYLKISEKTSATRSTIIVPVDGVAWFLDLFDYYIRTDERDAFSKELRLQTKVFYFDIGENKRGRFLKVSEASVNRNRSTIIVPAGSSGEEGWEAFRSVLLEINNEATRLYVLPNHPNQQHMEPPERLPGLSDDVGAGFIAGHGSQSASGPEVDVERLVDLPPQEEISGMGMSKVIRADQKRFFFDLGSNNRGHYLRISEVAGADRSSIILPLSGLKQFHEMVGHFVGIMKDRLEGMTGANVRTVEPSQR

SEQ ID NO: 447 - protein, 558 aa, Arabidopsis thaliana
MAFAVSVQSHFAIRALKRDHFKNPSPRTFCSCFKSRPDSSYLSLKERTCFVSKPGLVTTRYRHIFQVGAETGGEFADSGEVADSLASDAPESFSWSSVILPFIFPALGGLLFGYDIGATSGATLSLQSPALSGTTWFNFSPVQLGLVVSGSLYGALLGSISVYGVADFLGRRRELIIAAVLYLLGSLITGCAPDLNILLVGRLLYGFGIGLAMHGAPLYIAETCPSQIRGTLISLKELFIVLGILLGFSVGSFQIDVVGGWRYMYGFGTPVALLMGLGMWSLPASPRWLLLRAVQGKGQLQEYKEKAMLALSKLRGRPPGDKISEKLVDDAYLSVKTAYEDEKSGGNFLEVFQGPNLKALTIGGGLVLFQQITGQPSVLYYAGSILQTAGFSAAADATRVSVIIGVFKLLMTWVAVAKVDDLGRRPLLIGGVSGIALSLFLLSAYYKFLGGFPLVAVGALLLYVGCYQISFGPISWLMVSEIFPLRTRGRGISLAVLTNFGSNAIVTFAFSPLKEFLGAENLFLLFGGIALVSLLFVILVVPETKGLSLEEIESKILK

SEQ ID NO: 448 - protein, 605 aa, Arabidopsis thaliana
MADRLTRIAIVSSDRCKPKKCRQECKKSCPVVKTGKLCIEVTVGSKLAFISEELCIGCGICVKKCPFEAIQIINLPRDLEKDTTHRYGANTFKLHRLPVPRPGQVLGLVGTNGIGKSTALKILAGKLKPNLGRFTSPPDWQEILTHFRGSELQNYFTRILEDNLKAIIKPQYVDHIPRAVKGNVGEVLDQKDERDKKAELCADLELNQVIDRDVENLSGGELQRFAIAVVAIQNAEIYMFDEPSSYLDVKQRLKAAQVVRSLLRPNSYVIVVEHDLSVLDYLSDFICCLYGKPGAYGVVTLPFSVREGINIFLAGFVPTENLRFRDESLTFKVAETPQESAEEIQSYARYKYPTMTKTQGNFRLRVSEGEFTDSQIIVMLGENGTGKTTFIRMLAGLLKPDDTEGPDREIPEFNVSYKPQKISPKFQNSVRHLLHQKIRDSYMHPQFMSDVMKPLQIEQLMDQEVVNLSGGELQRVALTLCLGKPADIYLIDEPSAYLDSEQRIVASKVIKRFILHAKKTAFVVEHDFIMATYLADRVIVYEGQPSIDCTANCPQSLLSGMNLFLSHLNITFRRDPTNFRPRINKLESTKDREQKSAGSYYYLDD

SEQ ID NO: 449 - protein, 355 aa, Umbelopsis ramanniana
MASKDQHLQQKVKHTLEAIPSPRYAPLRVPLRRRLQTLAVLLWCSMMSICMFIFFFLCSIPVLLWFPIILYLTWILVWDKAPENGGRPIRWLRNAAWWKLFAGYFPAHVIKEADLDPSKNYIFGYHPHGIISMGSFCTFSTNATGFDDLFPGIRPSLLTLTSNFNIPLYRDYLMACGLCSVSKTSCQNILTKGGPGRSIAIVVGGASESLNARPGVMDLVLKRRFGFIKIAVQTGASLVPTISFGENELYEQIESNENSKLHRWQKKIQHALGFTMPLFHGRGVFNYDFGLLPHRHPIYTIVGKPIPVPSIKYGQTKDEIIRELHDSYMHAVQDLYDRYKDIYAKDRVKELEFVE

SEQ ID NO: 450 - protein, 532 aa, Saccharomyces cerevisiae
MLLQAFLFLLAGFAAKISASMTNETSDRPLVHFTPNKGWMNDPNGLWYDEKDAKWHLYFQYNPNDTVWGTPLFWGHATSDDLTNWEDQPIAIAPKRNDSGAFSGSMVVDYNNTSGFFNDTIDPRQRCVAIWTYNTPESEEQYISYSLDGGYTFTEYQKNPVLAANSTQFRDPKVFWYEPSQKWIMTAAKSQDYKIEIYSSDDLKSWKLESAFANEGFLGYQYECPGLIEVPTEQDPSKSYWVMFISINPGAPAGGSFNQYFVGSFNGTHFEAFDNQSRVVDFGKDYYALQTFFNTDPTYGSALGIAWASNWEYSAFVPTNPWRSSMSLVRKFSLNTEYQANPETELINLKAEPILNISNAGPWSRFATNTTLTKANSYNVDLSNSTGTLEFELVYAVNTTQTISKSVFADLSLWFKGLEDPEEYLRMGFEVSASSFFLDRGNSKVKFVKENPYFTNRMSVNNQPFKSENDLSYYKVYGLLDQNILELYFNDGDVVSTNTYFMTTGNALGSVNMTTGVDNLFYIDKFQVREVK

SEQ ID NO: 451 - protein, 559 aa, Arabidopsis thaliana
MAASMQFYGVKTPELALNSKRIEFSSKGLNFSALVSSARVFSRNVDRSCKNIALRVTCEAGRVELLERKASETFKLNKTEKKLTCVMKFGGSSVASAERMIQVAKLILSFPDEKPVVVLSAMAKTTNKLLMAGEKAVCCGVTNVDTIEELSYIKELHIRTAHELGVETAVIAEHLEGLEQLLKGVAMMKELTLRSRDYLVSFGECMSTRLFAAYLNKIGHKARQYDAFEIGIITTDDFTNADILEATYPAVSKKLLGDWSKENALPVVTGFLGKGWRSCAVTTLGRGGSDLTATTIGKALGLREIQVWKDVDGVLTCDPNIYCGAQPVPHLTFDEAAELAYFGAQVLHPLSMRPAREGNIPVRVKNSYNPTAPGTVITRSRDMSKAVLTSIVLKRNVTMLDITSTRMLGQYGFLAKVFSTFEKLGISVDVVATSEVSISLTLDPSKFCSRELIQHELDQVVEELEKIAVVNLLRHRSIISLIGNVQRSSFILEKGFRVLRTNGINVQMISQGASKVNISLIVNDDEAEHCVKALHSAFFETDTCEAVSECPTGYIAASS

SEQ ID NO: 452 - protein, 559 aa, Arabidopsis thaliana; identical to SEQ ID NO: 451

SEQ ID NO: 453 - protein, 423 aa, Arabidopsis thaliana
MAVEYECCGTSFFIHIAVIVLLVLFAGLMSGLTLGLMSMSLVDLEVLAKSGTPRDRIHAAKILPVVKNQHLLLCTLLICNAAAMEALPIFLDALVTAWGAILISVTLILLFGEIIPQSVCSRHGLAIGATVAPFVRVLVWICLPVAWPISKLLDFLLGHGRVALFRRAELKTLVDLHGNEAGKGGELTHDETTIIAGALELSEKMAKDAMTPISDTFVIDINAKLDRDLMNLILDKGHSRVPVYYEQRTNIIGLVLVKNLLTINPDEEIQVKNVTIRRIPRVPETLPLYDILNEFQKGHSHMAVVVRQCDKIHPLQSNDAANETVNEVRVDVDYERSPQETKLKRRRSLQKWKSFPNRANSLGSRSKRWSKDNDADILQLNEHPLPKLDEEEDAVGIITMEDVIEELLQEEIFDETDHHFEDL

SEQ ID NO: 454 - protein, 183 aa, Arabidopsis thaliana
MKNPILKTWRKVKSFGHTSSSTTPSFTKSKSCHGSFRLEDAKSNESKGKPKKESPSHGFFTVYVGPTKQRIVVKTKLLNHPLFKNLLEDAETEYGYRRDGPIVLPCEVDFFFKALADMKSNPGHHDHDDDYDDDDGFTNSPICGFVCSPYRSYGGGVTDPLAMKRNGSYKLLRSPSLFKLTRF

SEQ ID NO: 455 - protein, 281 aa, Glycine max
MYAETGLLFPYLNNISHGLHQLEEYCKTQKSNASMDDLVQSSVMSEYDLAAEGDLFKAPEPIIEEPIMDMDPMTATISMISCGEDVSSQGLKSTDIDILQNDQFLHEVFYECEKDLLEKAAIEPPFSEILEIKVPLLNIDENTIQENKLLPDMQLAKSVSSGSLSSMDWMRGAAMKPAFIDIPAIDFNADYGMRRSFSEGDIKTLGNGNMNIVQSPLERPLLISNCTSEERFQKLSRYRNKRTKRNFGRKIKYACRKALADSQPRIRGRFARTEESDVKRE

SEQ ID NO: 456 - protein, 281 aa, Glycine max; identical to SEQ ID NO: 455

SEQ ID NO: 457 - protein, 281 aa, Glycine max; identical to SEQ ID NO: 455

SEQ ID NO: 458 - protein, 324 aa, Zea mays
MARAGVSTAPLSRTHLLPPRPSLLHNTQPHSLLLRPQRKAPATTAAALPPAADFPALSLPAAAAAAAALAAAVSLSDPERRRRSQAEAAGGGDKEAVRAYFNSTGFERWRKIYGSATEGVNRVQLDIREGHAQTVAAALAMLRDSPLELAGATVCDAGCGTGSLAIPLAAAGADVLASDISAAMVSEAQRQAAAQSSSSSFRMPRFEVRDLESLEGRYDVVVCLDVLIHYPREEARAMIRHLASLADKRLLISFAPRTLYFDFLKRVGELFPGPSKATRAYLHAEADIEDALRQAGWRVANRGFISTQFYFAKLFDAVPVGSST

SEQ ID NO: 459 - protein, 356 aa, Zea mays
MVSLRCTTAHHSLLGSPTCLARPRRRPCPVVRAAVAVEAGAQAKVSLIRIGTRGSPLALAQAHETREKLKAAHSELAEEGAIEIVIIKTTGDMILDKPLADIGGKGLFTKEIDDALLQGRIDIAVHSMKDVPTYLPEGTILPCNLPREDVRDAFICLTANSLAELPAGSVVGSASLRRQSQILYRYPSLKVVNFRGNVQTRLRKLKEGDVSATLLALAGLRRLNMAENATAVLSVEEMLPAVAQGAIGIACRSNDDKMMEYLSSLNHEDTRLAVTCEREFLAVLDGNCRTPIAAYAYRDKDGNCSFRGLLSSPDGSKVFETARSGPYSFDDMVLMGKDAGHELKAKAGPGFFDSLQ

SEQ ID NO: 460 - protein, 142 aa, Arabidopsis thaliana
MATKSTGGTEKTKSIEVKKKLINVLIVDDDPLNRRLHEMIIKTIGGISQTAKNGEEAVILHRDGEASFDLILMDKEMPERDGVSTTKKLREMKVTSMIVGVTSVADQEEERKAFMEAGLNHCLEKPLTKAKIFPLISHLFDA

SEQ ID NO: 461 - protein, 182 aa, Arabidopsis thaliana
MMTPGGSGRLRPLPTAMYAGYSGTASSWVAKTSVSASGKRIQREMAELNIDPPPDCSAGPKGDNLYHWIATIIGPSGTPYEGGIFFLDIIFPSDYPFKPPKLVFKTRIYHCNVDTAGDLSVNILRDSWSPALTITKVLQAIRSIFLKPEPYSPALPVIARLYLTDREKHDEVAKEWTLRFAK

SEQ ID NO: 462 - protein, 166 aa, Zea mays
MTTTAAGYGCCWAGIPPFALLPRILSTRRETPPPPPPRASLVASSSKLRALAPRLRVSNRPRRLIVSASSSGEANSDAAPSPTEAAIDIKLPRRSLLVQFTCNACGERTKRLINRVAYERGTVFLQCAGCQVYHKFVDNLGLVVEYDLREENELQGENAVDTSSED

SEQ ID NO: 463 - protein, 164 aa, Oryza sativa
MAQRDKKDQEPTELRAPEITLCANSCGFPGNPATQNLCQNCFLAATASTSSPSSLSSPVLDKQPPRPAAPLVEPQAPLPPPVEEMASALATAPAPVAKTSAVNRCSRCRKRVGLTGFRCRCGHLFCGEHRYSDRHGCSYDYKSAARDAIARDNPVVRAAKIVRF

SEQ ID NO: 464 - protein, 164 aa, Oryza sativa; identical to SEQ ID NO: 463

SEQ ID NO: 465 - protein, 452 aa, Zea mays
MASAAVLRNAGSRRLFSYPTLRAAAIYVPSALPDAPAAAAAPAQPPPMAGTLWARSMATFTRTKPHVNVGTIGHVDHGKTTLTAAITKVLAEAGKAKAVAFDEIDKAPEEKARGITIATAHVEYETAKRHYAHVDCPGHADYVKNMITGAAQMDGGILVVSAPDGPMPQTKEHILLARQVGVPSLVCFLNKVDAVDDPELLELVEMELRELLSFYKFPGDEIPIIRGSALSALQGNNDEIGKNAILKLMDAVDEYIPDPVRQLDKPFLMPIEDVFSIQGRGTVVTGRVEQGTIKTGEDVEILGLAQTGPLKTTVTGVEMFKKILDHGEAGDNVGLLLRGLKRGDVERGQVVCKPGSLKTCKKFEAEIYVLTKDEGGRHTAFVTNYSPQFYFRTADVTGRVELLGEMKMVLPGDNVTANFELISPVPLEPGQRFAIREGGRTVGAGVVSKVLS

SEQ ID NO: 466 - protein, 160 aa, Oryza sativa
MAPVSISDERAVSVSAERVWKVFSDAPAMPKVCAGFIDAIEVEGDGGAGTVTTMKLNPAVDDGGSFKTRVVARDNAAHIIKSEVLDVPAGSKVGKLKSHVTETKIEAAGAGSCLAKINVEYELEDGGSLSPEKEKLILDGYFGMLKMIEDYLVAHPTEYA

SEQ ID NO: 467 - protein, 160 aa, Oryza sativa; identical to SEQ ID NO: 466

SEQ ID NO: 468 - protein, 390 aa, Arabidopsis thaliana
MRLRFPMKSAVLAFAIFLVFIPLFSVGIRMIPGRLTAVSATVGNGFDLGSFVEAPEYRNGKECVSQSLNRENFVSSCDASLVHVAMTLDSEYLRGSIAAVHSMLRHASCPENVFFHLIAAEFDPASPRVLSQLVRSTFPSLNFKVYIFREDTVINLISSSIRQALENPLNYARNYLGDILDPCVDRVIYLDSDIIVVDDITKLWNTSLTGSRIIGAPEYCHANFTKYFTSGFWSDPALPGFFSGRKPCYFNTGVMVMDLVRWREGNYREKLETWMQIQKKKRIYDLGSLPPFLLVFAGNVEAIDHRWNQHGLGGDNVRGSCRSLHKGPVSLLHWSGKGKPWVRLDEKRPCPLDHLWEPYDLYEHKIERAKDQSLFGFSSLSELTEDSSFF

SEQ ID NO: 469 - protein, 390 aa, Arabidopsis thaliana; identical to SEQ ID NO: 468

SEQ ID NO: 470 - protein, 474 aa, Glycine max
MSLPPPSLVTAATPTELPIRQIPGSYGFPLLGPISDRLDYFWFQKPESFFRKRVEKYKSTVFRTNVPPSFPFFVNVNPNVIAVLDVKSFSHLFDMDLVDKKDVLVGDFVPSVAFTGNMRVGVYQDTTEPQHSKVKNYIMDILKRSSGIWVSELESNLDTLWDNIEASLSKSSSVSYLFPLQQFLFTFLCKVLAGADPARDPKIAESGYSMLNSWLALQLLPTVSVGILQPLEEIFLHSFAYPFFLVGGNYNNLYNFIKQQGKDTINRGAIGFGLTEEEAIHNLLFVLGFNSYGGFSIFLPSLIDAIASNSALQEKLKKEAREKGGSTLTFDSVKEMDLIQSVVYETLRMNPPVPLQYGRARKDFRLSSHDSVFHVKKGELLCGFQKLVMRDSVIFDEPDRFKPDRFTQEKGAQLLNYLYWSNGPQTGSPSVSNKQCAGKDVVTLTAALIVAYLFRRYDSIQGDGSSITALQKTK

SEQ ID NO: 471 - protein, 474 aa, Glycine max; identical to SEQ ID NO: 470

SEQ ID NO: 472 - protein, 416 aa, Glycine max
MLEGGAKFPGIIDLNKNNNNYYDFSQGFYHKLGEGTNMSIDSVGSLQTSNGGGSVAMSIDNSSVGSNDSHTRMLDHQGLRRRANDNYSVAHSANRRGRVTHALSDDALAQALMDNSSPTEGLDNFDEWTIDLRKLNMGEPFAQGAFGKLYRGTYNGEDVAIKILERPENDPAKAQLMEQQFQQEVMMLATLKHPNIVRFIGACRKPMVWCIVTEYAKGGSVRQFLMKRQNRSVPLKLAVKQALDVARGMAYVHGLLLIHRDLKSDNLLIFGDKSIKIADFGVARIEVQTEGMTPETGTYRWMAPEMIQHRPYTQKVDVYSFGIVLWELITGMLPFQNMTAVQAAFAVVNKNVRPIIPNDCLPVLRDIMTRCWDPNPDVRPPFAEIVGMLENAENEIMTTVRKARFRCCMTQPMTAD

SEQ ID NO: 473 - protein, 416 aa, Glycine max; identical to SEQ ID NO: 472

SEQ ID NO: 474 - protein, 316 aa, Glycine max
MMSFAMDSVSVLNPKLSHSHSSLPFSRFPHSLNFHPLLKPRAVNAAVPRNGLAACFLTLHRRKPLTVAFTASHQDSEHREIEVEKERDVHAGSEESQEAWKQVLETFREQAEKFQGVSQEAYEVYSKKAAVILTDATEQLKVLADKTKNELSVAAKEITDEGKEYLSAAADSSPEVKEIVETFTSPPEDIQKLSGVRDFYVGVPYGLMLSLGGFLSFMVTGNTAAIRFGMILGGVLLALSILSLKSYKKGRTSPLALKGQAAIASILFLREISSIGKGSSYFTALISGAVVAFYIYRIVLERNHQKSSNLETEPGN

SEQ ID NO: 475 - protein, 731 aa, Arabidopsis thaliana
MMLVFLLIRRQWRSASVRREEVIRLIALATEESYLAEEVRPATVDYGGDSVSDVYRCAVCLYPTTTRCSQCKSVRYCSSKCQILHWRRGHKEECRSPDYDEEKEEYVQSDYDAKESNVDFPSRGTAYESSSNVSVDVACDMSTSRPSIHKVQPRSEAVDFTTSLNIKDNLYETRPLSRKKSRNRTDKVESASNYSKGKTDAKLRKLGNQNSRRSGDSANMSISDQFLSVGFEEEMNALKHERITSEPSSASAAMSSSSTLLLPSKANSKPKVSQASSSGLKTSVQKVVQHFRPPQSSKKSQPSSSIDEMSFSYELFVKLYCDRVELQPFGLVNLGNSCYANAVLQCLAFTRPLISYLIRGLHSKTCRKKSWCFVCEFEHLILKARGGESPLSPIKILSKLQKIGKHLGPGKEEDAHEFLRCAVDTMQSVFLKEAPAAGPFAEETTLVGLTFGGYLHSKIKCMACLHKSERPELMMDLTVEIDGDIGSLEEALAQFTAYEVLDGENRYFCGRCKSYQKAKKKLMILEGPNILTVVLKRFQSDNFGKLSKPIHFPELLDISPYMSDPNHGDHPVYSLYAVVVHLDAMSTLFSGHYVCYIKTLDGDWFKIDDSNVFPVQLETVLLEGAYMLLYARDSPRPVSKNGGRKSKQRRNLAAIPSRKGNKKQRDGDNNSLLPRVDWSSGSLSSMFSSSDTTSSCSTKDSSGIENLSDYLFGGVEPVWKWDRHNKSQTFD

SEQ ID NO: 476 - protein, 313 aa, Arabidopsis thaliana
MAALQTLREWIGIQQFPPATQSKLLEILGKYKEEDVSSLTVLVMGKGGVGKSSTVNSVIGEKAAAVSTFQSEGLRPTLVSRTRSGFTLNIIDTPGLIEGGYVNDQAINIIKRFLLNMTIDVLLYVDRLDVYRVDDLDRQVVGAITDAFGKEIWKKSALVLTHAQFSPPDGLNYNHFVSKRSNALLKVIQTGAQLKKQDLQGFSIPVILVENSGRCHKNESDEKILPCGTSWIPNLFNKITEISFNGNKAIHVDKKLVEGPNPNERGKKLIPLMFAFQYLLVMKPLVRAIKSDVSRESKPAWELRDSGLASRRS

SEQ ID NO: 477 - protein, 313 aa, Arabidopsis thaliana; identical to SEQ ID NO: 476

SEQ ID NO: 478 - protein, 346 aa, Zea mays
MGVDYYKVLQVGRGASDDELKKAYRKLAMKWHPDKNPSNKKEAEAKFKQISEAYEVLSDSQKRAIYDQAGEEGLKAQVPPTGAGGPSGSSFYGGNASTFQFNPRSADDIFAEFFGFSSPFSTMGGMGGGAERGMRGSRFGMFGDDIFGSHPQFPGEASMHVPQRSQKVPPIENRLPCNLADLYKGTTKKMKISREVLDASGRTLVVEEILTIDIKPGWKKGTKITFPEKGNEAPHIIPADIVFIIDEKPHDVFTRDGNDLVMTQKITLAEALTECTVNITTLDGRNLTVQINNIIYPGYEEVVPREGMPIQKDSSKKGNLRIKFSIKFPSRLTSEQKAEIKRLLGS

SEQ ID NO: 479 - protein, 188 aa, Zea mays
MVLVLALGDLHIPHRVPDLPAKFKSMLVPGKIQHIICSGNLCIKEVHDYLKSLCPDLHITGGEYDEYARYPETKTLTIGQFKLGLCHGHQVVPWGDLDSLAMLQRQLDVDILVTGHSHQFKAYKHEGGVVINPGSATGAYSSITYDVNPSFVLMDIEGLRVVVYVYELIDGEVKVDKIDFKKAATMQA

SEQ ID NO: 480 - protein, 98 aa, Zea mays
MMEALEKIEKDIKKPLLRSDKKNMATLLAEFDKINKKLGFRKEDLPKIEEELELEIAKSELTELKKECVEAMETQLKREEFQDEEMPDVRKLDIRNFL

SEQ ID NO: 481 - protein, 396 aa, Zea mays
MAAAASSALHAVGAVASAKPRSVAPAVATRRSVRVAPAAKRGPGSGGGRLVARSAVAAKADEAAAAAGSKSGGHELLMFEALREALIEEMNLDPTVCVMGEDVGHYGGSYKVTKGLAEMFGDLRVLDTPIAENSFTGMGVGAAMKGLRPVVEGMNMGFLLLAYNQISNNCGMLHYTSGGQFKIPVVIRGPGGVGRQLGAEHSQRLESYFQSIPGLQMVACSTPYNAKGLMKAAIRSENPVVLFEHVLLYNLKEKIPDEEYICCLEEAEMVRPGEHVTILTYSRMRYHVMQAAKTLVNKGYDPEVIDIRSLKPFDLHTIGNSIKKTHRVLIVEECMRTGGIGASLRSAIIDNFWDYLDAPIMCLSSQDVPTPYAATLEDATVVQPAQIVAAVEQICQ

SEQ ID NO: 482 - protein, 369 aa, Zea mays
MDDPHSKERLKQLNQEIDMLRQLSHPNIVQYHGSELSDESLSICLEYVSGGSIHKLLREYGSFKEPVIRNYTGQILAGLAYLHGRNTVHRDIKGANILVGPNGEVKLADFGMAKHISSFAEIRSFKGSPYWMAPEVIMNCKGYSLSVDIWSLGCTIIEMATARPPWHQYEGVAAIFKIANSKDIPEIPDSFSEEGKSFLQLCLKRNPASRASAVQLMDHPFVQDHPAVRAAKSSVLRNTPSSPADGRHTMSNRELPSRKIITPLKDIGLGMRDFTGFSTTVPSPHSPIPGRANMSTPVSPCSSPLRQFKQSNVRGMRSPPHPMLSPGLGNTVSYTQNQTRRNPAPAISDPWMDVGQMKLQSPNISPRRF

SEQ ID NO: 483 - protein, 140 aa, Zea mays
MTSPMVATPVQFHTTGRLSFCSFSFPSASGRRRFAAVRASAETMATEKLGIKVERNPPESRLSELGVRQWPKWGCEKSKFPWTYSAKETCYLLQGKVKVYPEGHGEEFVEIGAGDLVVFPKGMSCTWDVAEAVDKHYNFE

SEQ ID NO: 484 - protein, 243 aa, Zea mays
MEAYSRAGLPQGASEIFSLMEHMGCEPDRASYNILVDAFGRAGLHQAEAAFQELKQQGMRPTMKSHMLLLSAHARSGNVARCEEVMAQLHKSGLRPDTFALNAMLNAYGRAGRLDDMERLFAAMERGDGASAGAPDTSTYNVLVNAYGRAGYLDRMEAAFRSLAARGLAADVVTWTSRIGAYARKKEYGQCLRVFEEMVDAGCYPDAGTAKVLLAACSDERQVEQVTAIVRSMHKDAKTLFAL

SEQ ID NO: 485 - protein, 182 aa, Zea mays
MAPSDKIMEHRKEKIRKFMQLQQKEDDELFFVIVPAILQCLNDEKRPVHTSEYTGAKKMKEILEGHESWCKSEFRMEPEIFKATCNYLRREGLLRDTRRVTIEEQLGMFLFMISHNASNERLKKTFQHSGETVHRHIKAIFNIIPTLTHKFLKLPSSNQTHPKIATDPRFWPFFKEALLQVI

SEQ ID NO: 486 - protein, 243 aa, Zea mays
MKFKKVRTVQQALTSHFWVQDIQRNLSLAEIEQYLQLWEVIESFQLQNSNDQHVWIFSNDGLYTSKSAYKALFIGAESFEPWKRIWKSWAAPKCKTFVWLAINNKCWTADRLKKRGLQHPEICVLCDQEDETVQHILSNCVFTRQFWHNILTPIGLSSVGPKRRDSVFAEWWRKASTKIPKSKKKGFNSMIILGAWSIWKQRNRCVFEGARPCLNTLEDGFKDEMRLWVSAGAKNLRSLFDPG

SEQ ID NO: 487 - protein, 83 aa, Arabidopsis thaliana
MASLKLWVCLVLLLVLELTSVHECRPLVAEERFSGSSRLKKIRRELFERLKEMKGRSEGEETILGNTLDSKRLSPGGPDPRHH

SEQ ID NO: 488 - protein, 83 aa, Arabidopsis thaliana; identical to SEQ ID NO: 487

SEQ ID NO: 489 - protein, 106 aa, Arabidopsis thaliana
MAKSYGAIFLLTLIVLFMLQTMVMASSGSNVKWSQKRYGPGSLKRTQCPSECDRRCKKTQYHKACITFCNKCCRKCLCVPPGYYGNKQVCSCYNNWKTQEGGPKCP

SEQ ID NO: 490 - protein, 106 aa, Arabidopsis thaliana; identical to SEQ ID NO: 489

SEQ ID NO: 491 - protein, 423 aa, Arabidopsis thaliana
MERLISHPPLMIVSDLDHTMVDHQDHENLSLLRFNSLWEYAYRRDSLLVFSTARSPVLYKELRKEKPLLTPDIIITSIGTEIAFGNSMVPDHAWVESLNSCKWNREIVLEETSKFPELTLQPKTEQRLHKVSFYIDEGKGEALTKELSQLLEKRGLDVKIIYSWGKNVDVIPRGAGKGEALEYLLKKLQAEGIFPVNTLACGDSEHDAELFSIPDVHGVMVSNSQEELLKWRSENALNNLKVIHSTERCADGIIQAIGHFNLGPDLSPRDVSEFLDRKMDNVNPGHEVVRFYLFYERLRRGEIKNYETYIASFKDSCLHAAVLFHPSGAEKSLRDTIDELKKCYGDKRGKKFWVWVDQVLVTDTIPGKWIVKFDKWEQCEDESQCCKTTVEFTSKGGDLVWEKVKQIWSEESKVKDDNSSWIL

SEQ ID NO: 492 - protein, 423 aa, Arabidopsis thaliana; identical to SEQ ID NO: 491

SEQ ID NO: 493 - protein, 585 aa, Glycine max
MADEAKAKGNAAFSSGDYPAAIHHFSDAIALAPSNHVLYSNRSAAYASLKNYADALADAKKTVELKPDWSKGYSRLGAAHLGLSQYDDAISAYKRGLEIDPHNEPLKSGLADAQKALAAASRPRPSASNPFGDAFSGPEMWARLTADPTTRAYLQQPDFVKMMQDIQRDPNNLNLHLKDQRIMQALGVLLNVKIQTPPTGADTDMPDSPSPSAAASERKRAAEAEPAKQPEPEPEPEPVPMELTGEEKDAKQKKAEALKEKEAGNAAYKKKDFDTAIQHYTKALELDDEDISYLTNRAAVYLEMGKYEECIKDCDKAVERGRELRSDFKMIARALTRKGNALVKMAKCSKDYESAIETYQKALTEHRNPDTLKKLNEAEKAKKELEQQEYFDPKLADDEREKGNEFFKQQKYPDAVKHYTESIRRNPKDPRAYSNRAACYTKLGAMPEGLKDAEKCIELDPTFVKGYTRKGAVQYFMKEYDKALETYREGLKYDSNNQELLEGIRTCIQQINKASRGDLSPDELKERQAKAMQDPEIQNILQDPVMRQVLIDFQENPKAAQEHTKNPMVMNKIQKLVSAGIVQMK

SEQ ID NO: 494 - protein, 1249 aa, Zea mays
MSAAATSMQSLKFSNRLVPPSRRLSPVPNNVTCNNLPKSAAPVRTVKCCASSWNSTINGAAATTNGASAASNGASTTTTTYVSDATRFIDSSMSAKPIREYDAKLLLAYHLARAPTAGSKAVARDGFQSPEVKVAQVSWDPETNQVTPDAALPHWVFTEKLVVKPDQLIKRRGKAGLLALNKTWAEGKQWIAERAGKQVQVEKTTGTLNNFIVEPFCPHPSDAEYYICINSVREGDVILFTHEGGVDVGDVDAKALTLLVPVGGELPSRDEIRSQLLKHVTGAERQEALIDYIIRLYSVYVDLHFAYLEINPLVAVENPSTGKTDIFYLDMAAKLDQTAEYVVGPKWAIARDPSIINPAAAPMSNGKISADKGPPMFWPPPFGRDLTKEEAYIAKLDGSTGASLKLTVLNAEGRIWTMVAGGGASVVYSDAIAAHGFAHELANYGEYSGAPTQTQTYEYAKTILDLMTRGTPNPQGKLLFIGGGIANFTNVAATFKGIITALKEYQHRLQEHKVRIFVRRGGPNYQEGLKAMRLLGETLGVEIQVFGPETHITSIVPLGLGLIKSVDDALKVPGARAAADATGTLTPVPGSPKSRAAQLPTGASTPSRQQPQDNIVSFSDKVHAPDSGRPWYRPFDETTRSIVYGLQPRAIQGMLDFDFACGRETPSVAAMVYPFGGHHVQKFYWGTKETLLPVFTSMKEAVAKCPDADVVVNFASSRSVYQSTLEALEFPQIKAIALIAEGVPERHAREILHLAKKKEVIIIGPATVGGIKPGCFRIGNTGGMNENILSSKLYRAGSVGYVSKSGGMSNELNNILSLTTDGAYEGIAIGGDRYPGTTFIDHLLRYEADPNCKMLVLLGEVGGVEEYRVIEAVKSGQIKKPIVAWAIGTCAKMFATDVQFGHAGSMANSDLETAEAKNNAMRAAGFIVPPTFEELPQVLAETYQKLVGDGTIQPKPEVPPPQIPMDYNWAQTLGMVRKPAAFISTISDERGQELLYAGMPISKVFEEDIGIGGVVSLLWFKRRLPAYATKFLEMVLMLTADHGPAVSGAMTTVITTRAGKDLVSSLVAGLLTIGDRFGGALDGAAQEFTRAFEAGLTPREFVDSMRKANKLIPGIGHKVKSKANPDKRVELVKNYVFKHFPSAKLLEYALAVEDVTSAKKDTLILNVDGAIAVSFVDLLKNSGAFTAEEAAEYMKIGTLNGLFVLGRSIGFIAHHLDQKRLKQPLYRHPADDIFIQPFNTDRILVQQRQ

SEQ ID NO: 495 - protein, 320 aa, Arabidopsis thaliana
MGRKRKHSETEAPAPVKKSDEPAPDRPKRTLLGWKDKSEGEAEKAKALTSSGFKNKEKVLVTCSRRISFRYRSLMLNIVSLLPHCKKDSKVEAKSSKGATLNELIELKNSNSCLFFECRKHKDLYMWMVKSPNGPSVKFLVKAVHAMEEMKLTGNHLKGSRPLLTFSSNFDKDAHWKLLKEMLTQVFGIPKEHRKSKPYHDHVFVFSIVDEHIWFRNYQISVPHNESDKIAKGGLDKMTLIEVGPRFCLNPIKIFAGSFGGPTLYENPLYVSPNQIRALEKRNKAGKFAKKIKAKTRKKMHELSNPLEPDEFADMWKDDE

SEQ ID NO: 496 - protein, 320 aa, Arabidopsis thaliana; identical to SEQ ID NO: 495

SEQ ID NO: 497 - protein, 378 aa, Arabidopsis thaliana
MESDLIDLFEGAKKAADAAALDGVTSSGPEVSQCIDALKQLKKFPVTYDTLVATQVGKKLRSLAKHPVEDIKSVATDLLEIWKKVVIEETAKAKKTEGTNGCKEAKVNKMDVEKPSNPAPVKVQKLQRGDSAKSIKVERKEPDNKVVTGVKIERKVPDIKVTNGTKIDYRGQAVKDEKVSKDNQSSMKAPAKAANAPPKLTAMLKCNDPVRDKIRELLVEALCRVAGEADDYERESVNASDPLRVAVSVESLMFEKLGRSTGAQKLKYRSIMFNLRDSNNPDLRRRVLTGEISPEKLITLSAEDMASDKRKQENNQIKEKALFDCERGLAAKASTDQFKCGRCGQRKCTYYQMQTRSADEPMTTYVTCVNCDNHWKFC

SEQ ID NO: 498 - protein, 378 aa, Arabidopsis thaliana; identical to SEQ ID NO: 497

SEQ ID NO: 499 - protein, 430 aa, Arabidopsis thaliana
MQNQRLIKQQQQQQQQQHQQAMIQQAMMQQHPSLYHPGVMAPPQMEPLPSGNLPPGFDPTTCRSVYAGNIHTQVTEILLQEIFASTGPIESCKLIRKDKSSYGFVHYFDRRCASMAIMTLNGRHIFGQPMKVNWAYATGQREDTSSHFNIFVGDLSPEVTDAALFDSFSAFNSCSSYYRDARVMWDQKTGRSRGFGFVSFRNQQDAQTAINEMNGKWVSSRQIRCNWATKGATFGEDKHSSDGKSVVELTNGSSEDGRELSNEDAPENNPQFTTVYVGNLSPEVTQLDLHRLFYTLGAGVIEEVRVQRDKGFGFVRYNTHDEAALAIQMGNAQPFLFSRQIRCSWGNKPTPSGTASNPLPPPAPASVPSLSAMDLLAYERQLALAKMHPQAQHSLRQAGLGVNVAGGTAAMYDGGYQNVAAAHQQLMYYQ

SEQ ID NO: 500 - protein, 430 aa, Arabidopsis thaliana; identical to SEQ ID NO: 499

SEQ ID NO: 501 - protein, 257 aa, Arabidopsis thaliana
MDASNPNSSRKSNVSSFAQSSRSGGRGGGYERDNDRRRPQGRGDGGGGKDRIDALGRLLTRILRHMATELRLNMRGDGFVKVEDLLNLNLKTSANIQLKSHTIDEIREAVRRDNKQRFSLIDENGELLIRANQGHSITTVESEKLLKPILSPEEAPVCVHGTYRKNLESILASGLKRMNRMHVHFSCGLPTDGEVISGMRRNVNVIIFLDIKKALEDGIAFYISDNKVILTEGIDGVLPVDYFQKIESWPDRQSIPF

SEQ ID NO: 502 - protein, 257 aa, Arabidopsis thaliana; identical to SEQ ID NO: 501

SEQ ID NO: 503 - protein, 246 aa, Arabidopsis thaliana
MSSSNACASPSPFPAVTKLHVDSVTFVPSVKSPASSNPLFLGGAGVRGLDIQGKFVIFTVIGVYLEGNAVPSLSVKWKGKTTEELTESIPFFREIVTGAFEKFIKVTMKLPLTGQQYSEKVTENCVAIWKQLGLYTDCEAKAVEKFLEIFKEETFPPGSSILFALSPTGSLTVAFSKDDSIPETGIAVIENKLLAEAVLESIIGKNGVSPGTRLSVAERLSQLMMKNKDEKEVSDHSVEEKLAKEN

SEQ ID NO: 504 - protein, 246 aa, Arabidopsis thaliana; identical to SEQ ID NO: 503

SEQ ID NO: 505 - protein, 309 aa, Escherichia coli
MVRIYTLTLAPSLDSATITPQIYPEGKLRCTAPVFEPGGGGINVARAIAHLGGSATAIFPAGGATGEHLVSLLADENVPVATVEAKDWTRQNLHVHVEASGEQYRFVMPGAALNEDEFRQLEEQVLEIESGAILVISGSLPPGVKLEKLTQLISAAQKQGIRCIVDSSGEALSAALAIGNIELVKPNQKELSALVNRELTQPDDVRKAAQEIVNSGKAKRVVVSLGPQGALGVDSENCIQVVPPPVKSQSTVGAGDSMVGAMTLKLAENASLEEMVRFGVAAGSAATLNQGTRLCSHDDTQKIYAYLSR

SEQ ID NO: 506 - protein, 404 aa, Propionibacterium freudenreichii
MVKKVALLTAGGFAPCLSSAIAELIKRYTEVSPETTLIGYRYGYEGLLKGDSLEFSPAVRAHYDRLFSFGGSPIGNSRVKLTNVKDLVARGLVASGDDPLKVAADQLIADGVDVLHTIGGDDTNTTAADLAAYLAQHDYPLTVVGLPKTIDNDIVPIRQSLGAWTAADEGARFAANVIAEHNAAPRELIIHEIMGRNCGYLAAETSRRYVAWLDAQQWLPEAGLDRRGWDIHALYVPEATIDLDAEAERLRTVMDEVGSVNIFISEGAGVPDIVAQMQATGQEVPTDAFGHVQLDKINPGAWFAKQFAERIGAGKTMVQKSGYFSRSAKSNAQDLELIAATATMAVDAALAGTPGVVGQDEEAGDKLSVIDFKRIAGHKPFDITLDWYTQLLARIGQPAPIAAA

SEQ ID NO: 507 - protein, 404 aa, Propionibacterium freudenreichii; identical to SEQ ID NO: 506

SEQ ID NO: 508 - protein, 404 aa, Propionibacterium freudenreichii; identical to SEQ ID NO: 506

SEQ ID NO: 509 - protein, 942 aa, Schizosaccharomyces pombe
MSGETVHGISCYSVVANTEDTYNQTLDFYQKLGFKKVASFGTSDSDNARVCNESLREDWMHVAGNNSAESVTIKFRLVPGELSLSPAAEDSEWRGQKSSLVFYYPNLLDLLKQLSADAIKYQAFPNEKKPDEVYVEDPLGNLIGFSDRYNPFAHANLKKSEESGAASNLESGLATPVVETLKKATTSDKPAGVKKKIAVMTSGGDSPGMNAVVRAVARIAIHRGCDAFAIYEGYEGLVQGGDMIKQLQWGDVRGWLAEGGTLIGTARCMAFRERPGRLRAAKNLISAGIDSIIVCGGDGSLTGADIFRSDWPGLVKELEDTKAITPEQAKLYRHLTIVGLVGSIDNDMSSTDVTIGAFSSLHRICEAVDSISSTAISHSRAFIVEVMGRHCGWLAALAALATGADFVFIPERPAEVGKWQDELCNSLSSVRKLGKRKSIVIVAEGAIDSELNHISPEDIKNLLVERLHLDTRVTTLGHVQRGGIPCAYDRMLATLQGVDAVDAVLASTPDTPSPMIAINGNKINRKPLMEAVKLTHEVADAIEKKQFAHAMELRDPEFADYLHTWEGTTFIEDESHFVPKDERMRVAIIHVGAPAGGMNSATRAAVRYCLNRGHTPLAIDNGFSGFLRHDSIHELSWIDVDEWCIRGGSEIGTNRDTPDLDMGFTAFKFQQHKIDALIIIGGFEAFTALSQLESARVNYPSFRIPMAIIPATISNNVPGTEFSLGCDTCLNAVMEYCDTIKQSASASRRRVFVCEVQGGRSGYIATVGGLITGASAIYTPEDGISLDMLRKDIDHLKATFALEAGRNRAGQLILRNECASKVYTTEVIGNIISEEAHKRFSARTAVPGHVQQGGNPTPMDRARAARLAMRAIRFFETCRANDLGNDPSSAVVIGIRGTGVSFSSVADVENNETEIEMRRPKNAWWRDMHNLVNILAGKTFAD

SEQ ID NO: 510 - protein, 942 aa, Schizosaccharomyces pombe
MSGETVHGISCYSVVANTEDTYNQTLDFYQKLGFKKVASFGTSDSDNARVCNESLREDWMHVAGNNSAESVTIKFRLVPGELSLSPAAEDSEWRGQKSSLVFYYPNLLDLLKQLSADAIKYQAFPNEKKPDEVYVEDPLGNLIGFSDRYNPFAHANLKKSEESGAASNLESGLATPVVETLKKATTSDKPAGVKKKIAVMTSGGDSPGMNAVVRAVARIAIHRGCDAFAIYEGYEGLVQGGDMIKQLQWGDVRGWLAEGGTLIGTARCMAFRERPGRLRAAKNLISAGIDSIIVCGGDGSLTGADIFRSDWPGLVKELEDTKAITPEQAKLYRHLTIVGLVGSIDNDMSSTDVTIGAFSSLHRICEAVDSISSTAISHSRAFIVEVMGRHCGWLAVLAALATGADFVFIPERPAEVGKWQDELCNSLSSVRKLGKRKSIVIVAEGAIDSELNHISPEDIKNLLVERLHLDTRVTTLGHVQRGGIPCAYDRMLATLQGVDAVDAVLASTPDTPSPMIAINGNKINRKPLMEAVKLTHEVADAIEKKQFAHAMELRDPEFADYLHTWEGTTFIEDESHFVPKDERMRVAIIHVGAPAGGMNSATRAAVRYCLNRGHTPLAIDNGFSGFLRHDSIHELSWIDVDEWCIRGGSEIGTNRDTPDLDMGFTAFKFQQHKIDALIIIGGFEAFTALSQLESARVNYPSFRIPMAIIPATISNNVPGTEFSLGCDTCLNAVMEYCDTIKQSASASRRRVFVCEVQGGRSGYIATVGGLITGASAIYTPEDGISLDMLRKDIDHLKATFALEAGRNRAGQLILRNECASKVYTTEVIGNIISEEAHKRFSARTAVPGHVQQGGNPTPMDRARAARLAMRAIRFFETCRANDLGNDPSSAVVIGIRGTGVSFSSVADVENNETEIEMRRPKNAWWRDMHNLVNILAGKTFAD

SEQ ID NO: 511 - protein, 247 aa, Glycine max
MKFNIANPTTGCQKKLEIDDDQKLRAFWDKRISQEVSGDALGEEFKGYVFKITGGCDKQGFPMKQGVLTPGRVRLLLHRGTPCFRGYGRRNGERRRKSVRGCIVSPDLSVLNLVIVKKGENDLPGLTDVEKPRMRGPKRASKIRKLFNLSKEDDVRKYVNTYRRTFTTKAGKKVSKAPKIQRLVTPLTLQRKRARIADKKKRIAKAKSEAAEYQKLLASRLKEQRDRRSESLAKRRSKLSSAAKAAV

SEQ ID NO: 512 - protein, 414 aa, Saccharomyces cerevisiae
MAKTTKVKGNKKEVKASKQAKEEKAKAVSSSSSESSSSSSSSSESESESESESESSSSSSSSDSESSSSSSSDSESEAETKKEESKDSSSSSSDSSSDEEEEEEKEETKKEESKESSSSDSSSSSSSDSESEKEESNDKKRKSEDAEEEEDEESSNKKQKNEETEEPATIFVGRLSWSIDDEWLKKEFEHIGGVIGARVIYERGTDRSRGYGYVDFENKSYAEKAIQEMQGKEIDGRPINCDMSTSKPAGNNDRAKKFGDTPSEPSDTLFLGNLSFNADRDAIFELFAKHGEVVSVRIPTHPETEQPKGFGYVQFSNMEDAKKALDALQGEYIDNRPVRLDFSSPRPNNDGGRGGSRGFGGRGGGRGGNRGFGGRGGARGGRGGFRPSGSGANTAPLGRSRNTASFAGSKKTFD

SEQ ID NO: 513 - protein, 160 aa, Zea mays
MSDEEHQFESKADAGASKTYPQQAGTIRKNGYIVIKGRPCKVVEVSTSKTGKHGHAKCHFVGIDVFTGKKLEDIVPSSHNCDVPHVDRTEYQLIDITEDGFVSLLTDSGNTKDDLRLPTDEALEGQIKSGYDDGKDLLLTVMSSMGEEQICAVKEIGGKN

SEQ ID NO: 514 - protein, 119 aa, Zea mays
MVAAGVLGFVAHLLCLGTHIQGLSLGWIGQRHPRFCMRPTAAEFREPCTAMAIGNDRVTGVGEWFRDRQLFVGAALAKCRLSIVAIAGWMGSLWSALLVCSVAVCGLFRDSHAHTHADC

SEQ ID NO: 515 - protein, 155 aa, Zea mays
MADDEFESVGSGASTCFPMQCSAIKKNGYAVLKNRPCKVVETSTSKTGKHGHAKVHMVGIDIFTGKKYEEICPSTHNMMVPNVDRRDFQVINIEEGFVSLLKDDGSTKDDLKVPEGELGDKLKEAFDDGKDVVATVLAAMDEECIISWKEASNKS

SEQ ID NO: 516 - protein, 155 aa, Zea mays; identical to SEQ ID NO: 515

SEQ ID NO: 517 - protein, 251 aa, Zea mays
MALNGGKTTLVQDEEKQQLLLEKHTEKHFTAGEVVRDIIIGVSDGLTVPFALAAGLSGANASSALVLTAGLAEVAAGAISMGLGGYLAAKSEADHYNRELQREQDEIDTVPDVEAAEIADILSQYGLGPEEYGPVVTSLRNNPKAWLEFMMKFELGLERPEPRRALVSAATIALSYVAGGLVPLLPYMFVPEAARAMAVSVAVTLAALLFFGFVKGRFTGDRPFFSAVQTTVVGALASAAAFAMARAVQSI

SEQ ID NO: 518 - protein, 477 aa, Arabidopsis thaliana
MQSLLVPTAASAPVAAPRARRNLPMRLSVRASATAAAAPRRETHSHRRVVVTGLGMVTPLGRGVETTWRRLIDGECGIRGLTLDDLKMKSFDEETKLYTFDQLSSKVAAFVPYGSNPGEFDEALWLNSKAVANFIGYAVCAADEALRDAEWLPTEEEEKERTGVSIGGGIGSICDIVEAAQLICEKRLRRLSPFFIPKILVNMASGHVSMKYGFQGPNHAAVTACATGAHSIGDATRMIQFGDADVMVAGGTESSIDALSVAGFSRSRALSTKFNSSPQEASRPFDCDRDGFVIGEGSGVIVLEEYEHAKRRGAKIYAELCGYGMSGDAHHITQPPEDGKGAVLAMTRALRQSGLCPNQIDYVNAHATSTPIGDAVEARAIKTVFSEHATSGTLAFSSTKGATGHLLGAAGAVEAIFSILAIHHGVAPMTLNVKNPDPIFDKRFMPLTTSKKMLVRTAMSNSFGFGGTNASLLFASI

SEQ ID NO: 519 - protein, 477 aa, Arabidopsis thaliana; identical to SEQ ID NO: 518

SEQ ID NO: 520 - protein, 631 aa, Arabidopsis thaliana
MASSLLRNPNLYSSTTITTTSFLPTFSSKPTPISSSFRFQPSHHRSISLRSQTLRLSCSISDPSPLPPHTPRRPRPEYIPNRISDPNYVRVFDTTLRDGEQSPGATLTSKEKLDIARQLAKLGVDIIEAGFPAASKDDFEAVKTIAETVGNTVDENGYVPVICGLSRCNKKDIERAWDAVKYAKRPRIHTFIATSDIHLEYKLKKTKAEVIEIARSMVRFARSLGCEDVEFSPEDAGRSEREYLYEILGEVIKAGATTLNIPDTVGITLPSEFGQLITDLKANTPGIENVVISTHCQNDLGLSTANTLSGAHAGARQMEVTINGIGERAGNASLEEVVMAIKCRGDHVLGGLFTGIDTRHIVMTSKMVEEYTGMQTQPHKAIVGANAFAHESGIHQDGMLKHKGTYEIICPEEIGLERSNDAGIVLGKLSGRHALKDRLTELGYQLDDEQLSTIFWRFKTVAEQKKRVTDADIIALVSDEVFQPEAVWKLLDIQITCGTLGLSTATVKLADADGKEHVACSIGTGPVDSAYKAVDLIVKEPATLLEYSMNAVTEGIDAIATTRVLIRGSNKYSSTNAITGEEVQRTFSGTGAGMDIVVSSVKAYVGALNKMMDFKENSATKIPSQKNRVAA

SEQ ID NO: 521 - protein, 316 aa, Glycine max
MDFDLENPLGNFHDLPCDAVPSLFLIESDHIPPPNYCQSLKASDFDISVRRDVVSLISQLSCTFDPVLPYLAINYLDRFLANQGILQPKPWANKLLAVSCFSLAAKMLKTEYSATDVQVLMNHGDGGAIFETQTIQRMEGIVLGALQWRMRSITPFSFIPFFVNLFRLKDPALRQVLKDRASEIILKSQREIKVLEFKPSTVAASALLYASHELFPFQYPCFLRAISDCSYINKETVVQCYNVIQDIAREEYESVLNINSTSDTPVNVLDEHFLSLESEKTNGTNVVVTQEQDFKRRKTTDYGNNRRVPFSHFHQC

SEQ ID NO: 522 - protein, 316 aa, Glycine max; identical to SEQ ID NO: 521

SEQ ID NO: 523 - protein, 316 aa, Glycine max; identical to SEQ ID NO: 521

SEQ ID NO: 524 - protein, 269 aa, Oryza sativa
MAAAAAAATIGMMDSAYFVGRGEILSWINATLQLSLAKVEEAASGAVQCQLMDMVHPGVVPMHKVNFDAKTEYDMIQNYKILQDVFNKLRLSKNIEVNKLVKGRPLDNLEFLQWLKRYCDSVNGGIMNENYNPVERRSKGCKERSLKGSNKSSKSLQANRLSSANSADGGPCVGKVNVISEEHYIEQIQQLSEKIAGLKISMDSAEKERDFYFSKLRDIEILCQRPELEHLPMTKAVQKILYAADARDSPLPEANEIITRSPSMFPDEA

SEQ ID NO: 525 - protein, 564 aa, Oryza sativa
MAQPRRPEYVPNRIDDPNYVRIFDTTLRDGEQSPGATMTSAEKLVVARQLARLGVDIIEAGFPASSPDDLDAVRSIAIEVGNTPVGEDGHVPVICGLSRCNKRDIDAAWEAVRHARRPRIHTFIATSEIHMQHKLRKTPEQVVAIAKEMVAYARSLGCPDVEFSPEDAGRSNREFLYHILEEVIKAGATTLNIPDTVGYTLPYEFGKLIADIKANTPGIENAIISTHCQNDLGLATANTLAGAHAGARQLEVTINGIGERAGNASLEEVVMAIKCRRELLGGLYTGINTQHITMSSKMVQEHSGLHVQPHKAIVGANAFAHESGIHQDGMLKYKGTYEIISPDDIGLTRANEFGIVLGKLSGRHAVRSKLVELGYEITDKEFEDFFKRYKEVAEKKKRVTDEDIEALLSDEIFQPKVFWSLADVQATCGTLGLSTATVKLIGPDGDEKIACAVGTGPVDAAYKAVDDIIQIPTVLREYSMTSVTEGIDAIATTRVVVTGDVSDSKHALTGHSFNRAFSGSGAALDIVVSSVRAYLSALNKMSSFVGAIKASSEVSESQRVQTTE

SEQ ID NO: 526 - protein, 281 aa, Zea mays
MAPAPAALSAANALSLLAPARVSSGRWNNLSVSVSARRVVSVAPPAAATAQRRLVAAAAATEMAPAASGEEGSKPFVEEMRAVAMKLHTKDQAREGEKEPQAPPVAKWEPSVEGYLRFLVDSKLVFQTLEAIVERAAVPWYAEFRNTGLERSEALKNDLEWFRQQGHTIPEPSAPGTTYASLLEELSEEDPQAFICHFYNVYFAHTAGGRMIGKKVSEKILNNKELEFYKWEGNLSQLLQNVRNKLNQVALSWSREEKDHCLEETEKSFSYSGGLLRHIFT

SEQ ID NO: 527 - protein, 492 aa, Zea mays
MTSLPERGESPVPPLDSLRQDSAVTVLAAAAVASSSAGSDRKEDSGSRQPKASILSGVFSPPFAIFEGQQQGSSSPACDARSTKSSSGSYGLSRILRRFVGSGSMWRLLGCGRVLTSSDVWFLGKCYKVSPEEEESGDSESDSGHAAFLEDFSSRIWITYRKGFDAISDSKLTSDVNWGCMVRSSQMLVAQALIFHHLGRSWRKPPEKPYNPDYIGVLHLFGDSEACAFSIHNLLQAGRNYGLAAGSWLGPYAMCRAWQTLIRTNREQADAVDGKENFPMALYVVSGDEDGERGGAPVVCIDVAAQLCSDFNKGPSTWSPILLLVPLVLGLDKINPRYIPLLKETFMFPQSLGILGGKPGTSTYIAGVQDDRALYLDPHEVQMTVDIALDNLEADTSSYHCSVVRALALEQIDPSLAIGFYCRDKDDFDDFCSRASELAEKANGAPLFTVVQSIEPSKQMYKQDDGLGCSGSSMANDDDLDGSGEAEEWQIL

SEQ ID NO: 528 - protein, 307 aa, Zea mays
MATEEWELREEDAYAYEFEFDLENPFTSPADEPIASLLDAEGHHAPSISAAASATRRAAAAFISKVRFGGELAVHPRVAYLALNYVDRFLSKRQLACEQQPWAPRLLAISCLSLAAKMQRVATFSTADIQRDEDFMFDAVTIRRMERVVLGALEWRARSVTPLAFLGFFLSACYPPPQHPPQVAAVKARAVDLLLHAQPEVKMAEFSPSVVAAAALLAAAGEVAAANLHAFQASLAACPFVNSEKLRECGEVLAAAGGVGRGRAAPSADTPVTVLGHQRSASSASETDWINGGDAKKRCMGPPSQWG

SEQ ID NO: 529 - protein, 307 aa, Zea mays; identical to SEQ ID NO: 528

SEQ ID NO: 530 - protein, 319 aa, Lactobacillus delbrueckii subsp. bulgaricus
MKRIGILTSGGDAPGMNAAVRAVTRVAIANGLEVFGIRYGFAGLVAGDIFPLESEDVAHLINVSGTFLYSARYPEFAEEEGQLAGIEQLKKHGIDAVVVIGGDGSYHGALQLTRHGFNSIGLPGTIDNDIPYTDATIGYDTACMTAMDAIDKIRDTASSHHRVFIVNVMGRNCGDIAMRVGVACGADAIVIPERPYDVEEIANRLKQAQESGKDHGLVVVAEGVMTADQFMAELKKYGDFDVRANVLGHMQRGGTPTVSDRVLASKLGSEAVHLLLEGKGGLAVGIENGKVTSHDILDLFDESHRGDYDLLKLNADLSR

SEQ ID NO: 531 - protein, 488 aa, Oryza sativa
MAVTRLAVAAALSAKALRASAAPAVDEEAPASPPPSDLGKGVENLVIIGSGPAGYTAAIYAARANLKPVVFEGYQVGGVPGGQLMTTTEVENFPGFPDGVTGPDLMDKMRKQAERWGAELHQEDVEFVNVKSRPFVIRSSDREVKCHSVIIATGAAAKRLRLPREDEFWSRGISACAICDGASPLFKGQVLAVVGGGDTATEEAIYLTKYARHVHLLVRKDQLRASKAMQDRVLNNPNITVHFNTEAVDVVSNPKGQMSGIQLKRTDTGEESVLEVKGLFYGIGHTPNSQLLQGQIDLDDAGYILVEEGTAKTSVDGVFAAGDVQDHEWRQAVTAAGSGCVAALSVERYLVANDLLVEFHQPVREEKEKEITDRDVEMGFDISHTKHRGQYALRKVYHESPRLVCVLYTSPTCGPCRTLKPILSKVIDEYNEHVHFVEIDIEEDPEIAEAAGIMGTPCVQFFKNKEMLRTVSGVKMKKEYREFIESNK

SEQ ID NO: 532 - protein, 488 aa, Oryza sativa; identical to SEQ ID NO: 531

SEQ ID NO: 533 - protein, 488 aa, Oryza sativa; identical to SEQ ID NO: 531

SEQ ID NO: 534 - protein, 787 aa, Arabidopsis thaliana
MASFIDLFAGDITTQLLKLLALVANTVYSCKGIAERLITMIRDVQPTIREIQYSGAELSNHHQTQLGVFYEILEKARKLCEKVLRCNRWNLKHVYHANKMKDLEKQISRFLNSQILLFVLAEVCHLRVNGDRIERNMDRLLTERNDSLSFPETMMEIETVSDPEIQTVLELGKKKVKEMMFKFTDTHLFGISGMSGSGKTTLAIELSKDDDVRGLFKNKVLFLTVSRSPNFENLESCIREFLYDGVHQRKLVILDDVWTRESLDRLMSKIRGSTTLVVSRSKLADPRTTYNVELLKKDEAMSLLCLCAFEQKSPPSPFNKYLVKQVVDECKGLPLSLKVLGASLKNKPERYWEGVVKRLLRGEAADETHESRVFAHMEESLENLDPKIRDCFLDMGAFPEDKKIPLDLLTSVWVERHDIDEETAFSFVLRLADKNLLTIVNNPRFGDVHIGYYDVFVTQHDVLRDLALHMSNRVDVNRRERLLMPKTEPVLPREWEKNKDEPFDAKIVSLHTGEMDEMNWFDMDLPKAEVLILNFSSDNYVLPPFIGKMSRLRVLVIINNGMSPARLHGFSIFANLAKLRSLWLKRVHVPELTSCTIPLKNLHKIHLIFCKVKNSFVQTSFDISKIFPSLSDLTIDHCDDLLELKSIFGITSLNSLSITNCPRILELPKNLSNVQSLERLRLYACPELISLPVEVCELPCLKYVDISQCVSLVSLPEKFGKLGSLEKIDMRECSLLGLPSSVAALVSLRHVICDEETSSMWEMVKKVVPELCIEVAKKCFTVDWLDD

SEQ ID NO: 535 - protein, 868 aa, Oryza sativa
MMVTWPWRALPLAAVLFLFLSPAASVDTVTMEAPLAGNRTIVSAGGTFTLGFFTPDVAPAGRRYLGIWYSNILARTVVWVANRQSPVVGGSPTLKINGNGSLAIVDGQGRVVWASPVMSASVLSAGSAKAQLLDNGNFVLRFASAGVAWQSFDYPTDTLLPGMKLGIDFRTGLDRYMNSWRAADDPSPGEYSFRIDPSGSPEFFLYRWSTRTYGSGPWNGYQFSGVPNLRTNTLLSYQYVSTADEAYYRYEVDDSTTILTRFVMNSSGQIQRLMWIDTTRSWSVFSSYPMDECEAYRACGAYGVCNVEQSPMCGCAEGFEPRYPKAWALRDGSGGCIRRTALNCTGGDGFAVTRNMKLPESANATVDMALGLEECRLSCLSNCACRAYASANVTSADAKGCFMWTADLLDMRQFDNGGQDLFVRLAASDLPTNSVSDNSQTAKLVEIIVPSVVALLLLLAGLVICVIKAKKNRKAIPSALNNGQVTPFGQRNHTASALNNWEITPFWQRNHVAASNDAQDNNSMRPAGQGNHQDLDLPSFVIETILYATNNFSADNKLGQGGFGPVYMGRLDNGQDIAVKRLSRRSTQGLREFKNEVKLIAKLQHRNLVRLLGCCIDGSERMLIYEYMHNRSLNTFLFNEEKQSILNWSKRFNIINGIARGILYLHQDSALRIIHRDLKASNILLDRDMNPKISDFGVARIFGTDQTSAYTKKVVGTYGYMSPEYAMDGVFSMKSDVFSFGVLVLEIVSGKKNRGFYHNELDLNLLRYAWRLWKEGRSLEFLDQSIAGTSSNVTEVLRCIQIGLLCVQEQPRHRPTMSAVTMMLSSESPALLEPCEPAFCTGRSLSDDTEASRSNSARSWTVTVVEGR

SEQ ID NO: 536 - protein, 868 aa, Oryza sativa; identical to SEQ ID NO: 535

SEQ ID NO: 537 - protein, 422 aa, Zea mays
MPLLPLLPVMASTFSPTSAARALLPGSTSRPLFLAASASSGRIQPSRKGLDFRRGRFTVCNVAAPTAAEQEATASAAKETQRPVYPFAAIVGQDEMKLCLLLNVIDPKIGGVMIMGDRGTGKSTTVRSLVDLLPDIRVVVGDPFNSDPDDPEVMGPEVRQRVLQGDTGLPVTTAKITMVDLPLGATEDRVCGTIDIEKALTEGVKAFEPGLLAKANRGILYVDEVNLLDDHLVDVLLDSAASGWNTVEREGISISHPARFILIGSGNPEEGELRPQLLDRFGMHAQVGTVRDAELRVKIVEERARFDRDPKTFRESYHDEQEKLQQQISSARSNLGAVQIDHDLRVKISKVCSELNVDGLRGDIVTNRAAKALAALKGRDSVTVEDIATVIPNCLRHRLRKDPLESIDSGLLVIEKFYEVFS

SEQ ID NO: 538 - protein, 760 aa, Arabidopsis thaliana
MAMTPVASSSPVSTCRLFRCNLLPDLLPKPLFLSLPKRNRIASCRFTVRASANATVESPNGVPASTSDTDTETDTTSYGRQFFPLAAVVGQEGIKTALLLGAVDREIGGIAISGRRGTAKTVMARGLHEILPPIEVVVGSISNADPACPDEWEDDLDERIEYNADNTIKTEIVKSPFIQIPLGVTEDRLIGSVDVEESVKRGTTVFQPGLLAEAHRGVLYVDEINLLDEGISNLLLNVLTDGVNIVEREGISFRHPCKPLLIATYNPEEGAVREHLLDRVAINLSADLPMSFEDRVAAVGIATQFQERCNEVFRMVNEETETAKTQIILAREYLKDVKISREQLKYLVLEAVRGGVQGHRAELYAARVAKCLAAIEGREKVTIDDLRKAVELVILPRSSLDETPPEQQNQPPPPPPPPQNSESGEEENEEEQEEEEEDESNEENENEQQQDQIPEEFIFDAEGGLVDEKLLFFAQQAQKRRGKAGRAKNVIFSEDRGRYIKPMLPKGPVKRLAVDATLRAAAPYQKLRREKDISGTRKVFVEKTDMRAKRMARKAGALVIFVVDASGSMALNRMQNAKGAALKLLAESYTSRDQVSIIPFRGDAAEVLLPPSRSIAMARNRLERLPCGGGSPLAHGLTTAVRVGLNAEKSGDVGRIMIVAITDGRANITLKRSTDPESIAPDAPRPTSKELKDEILEVAGKIYKAGMSLLVIDTENKFVSTGFAKEIARVAQGKYYYLPNASDAVISATTRDALSDLKNS

SEQ ID NO: 539 - protein, 119 aa, Arabidopsis thaliana
MSTFLIRILLPLLIIAMTLPRRSEAESEQWCIADEQTPDDELQAALDWACGKGGADCSKMQQENQPCFLPNTIRDHASFAFNSYYQTYKNKGGSCYFKGAAMITELDPSHGSCQYEYNP

SEQ ID NO: 540 - protein, 324 aa, Oryza sativa
SAAGEAAVMADDGTTVFRGTAQPPVRTTVALALWLGAIHFNAFLLLASLFLFPRRVAAMVLATQLFFMFAPVNDMSRLGRKIARFISKCVIGYFPVTLHVEDYKAFDPNRAYVFGYEPHSVLPIALGVLLELVGFMPLPKIKVLASSAVFYTPFLRQIWTWLGLVPASRKNFYSYLKAGYSCVIVPGGVQEMLHMDHDSEVAFLKSRKGFVKIAMETGSPLVPVFAFGQSYVYKWWRPGGKLIVKIARAIKFTPIMFWGKFGTPIPFATPMHVVVGRPIEVKKNAQPTFDEINEVHEQFVVALQELFEKYKTKAGYPNLHLRVL

SEQ ID NO: 541 - protein, 352 aa, Neurospora crassa
MERDRANAYQAAGIRFAPFNIPLQRRLQTLAVLLHSLIIATTVSFFFFLCAIPLLWPLVIPYLLHMLLSKAASDGKLRFRSERFRHSRIWHFFADYFPAKLHKTHDLPADRKYIFGYHPHGIISHGAYAAFATEALGFSEKFPGITNSLLTLDSNFRIPIYRDYILSMGLRSVSKESITNILSRGGTDGHGAGRAVTIVIGGARESLEAQPGTLRLVLGERKGFVKVAMRTGADIVPVLAFGENDLYDQVSPKSHPYLHRLQMFVLRTLKFTLPFLHGRGIFNYDVGLMPYRRPLNIVVGKPIRVTKRAESDLETSEIDQLHGLYVKELEKMWERYKDGFAPERIEEMQILK

SEQ ID NO: 542 - protein, 282 aa, Arabidopsis thaliana
MAYLAPISSSLSIFKNPQLSRFQFSSSSPNPLFLRPRIQILSMTMNKSPSLVVVAATTAAEKQKKRYPGESKGFVEEMRFVAMRLHTKDQAKEGEKETKSIEERPVAKWEPTVEGYLRFLVDSKLVYDTLELIIQDSNFPTYAEFKNTGLERAEKLSTDLEWFKEQGYEIPEPTAPGKTYSQYLKELAEKDPQAFICHFYNIYFAHSAGGRMIGRKVAERILDNKELEFYKWDGELSQLLQNVREKLNKVAEEWTREEKNHCLEETEKSFKYSGEILRLILS

SEQ ID NO: 543 - protein, 738 aa, Arabidopsis thaliana
MEVCNCIEPQWPADELLMKYQYISDFFIAIAYFSIPLELIYFVKKSAVFPYRWVLVQFGAFIVLYGATHLINLWTFTTHSRTVALVMTTAKVLTAVVSCATALMLVHIIPDLLSVKTRELFLKNKAAELDREMGLIRTQEETGRHVRMLTHEIRSTLDRHTILKTTLVELGRTLALEECALWMPTRTGLELQLSYTLRHQHPVEYTVPIQLPVINQVFGTSRAVKISPNSPVARLRPVSGKYMLGEVVAVRVPLLHLSNFQINDWPELSTKRYALMVLMLPSDSARQWHVHELELVEVVADQVAVALSHAAILEESMRARDLLMEQNVALDLARREAETAIRARNDFLAVMNHEMRTPMHAIIALSSLLQETELTPEQRLMVETILKSSNLLATLMNDVLDLSRLEDGSLQLELGTFNLHTLFREVLNLIKPIAVVKKLPITLNLAPDLPEFVVGDEKRLMQIILNIVGNAVKFSKQGSISVTALVTKSDTRAADFFVVPTGSHFYLRVKVKDSGAGINPQDIPKIFTKFAQTQSLATRSSGGSGLGLAISKRFVNLMEGNIWIESDGLGKGCTAIFDVKLGISERSNESKQSGIPKVPAIPRHSNFTGLKVLVMDENGVSRMVTKGLLVHLGCEVTTVSSNEECLRVVSHEHKVVFMDVCMPGVENYQIALRIHEKFTKQRHQRPLLVALSGNTDKSTKEKCMSFGLDGVLLKPVSLDNIRDVLSDLLEPRVLYEGM

SEQ ID NO: 544 - protein, 518 aa, Arabidopsis thaliana
MASISTPFPISLHPKTVRSKPLKFRVLTRPIKASGSETPDLTVATRTGSKDLPIRNIPGNYGLPIVGPIKDRWDYFYDQGAEEFFKSRIRKYNSTVYRVNMPPGAFIAENPQVVALLDGKSFPVLFDVDKVEKKDLFTGTYMPSTELTGGYRILSYLDPSEPKHEKLKNLLFFLLKSSRNRIFPEFQATYSELFDSLEKELSLKGKADFGGSSDGTAFNFLARAFYGTNPADTKLKADAPGLITKWVLFNLHPLLSIGLPRVIEEPLIHTFSLPPALVKSDYQRLYEFFLESAGEILVEADKLGISREEATHNLLFATCFNTWGGMKILFPNMVKRIGRAGHQVHNRLAEEIRSVIKSNGGELTMGAIEKMELTKSVVYECLRFEPPVTAQYGRAKKDLVIESHDAAFKVKAGEMLYGYQPLATRDPKIFDRADEFVPERFVGEEGEKLLRHVLWSNGPETETPTVGNKQCAGKDFVVLVARLFVIEIFRRYDSFDIEVGTSPLGSSVNFSSLRKASF

SEQ ID NO: 545 - protein, 518 aa, Arabidopsis thaliana; identical to SEQ ID NO: 544

SEQ ID NO: 546 - protein, 144 aa, Arabidopsis thaliana
MKQPATPNAAEETKSEQKQKSKKFPTPTELISHYQKRGLEPAEASIKVIEDLQNALVRVVSSSRNASSKDKLVTDARKIDAINGRLAVVDAKLETKPGYVETFALGLASGATLNGISAVWPHVTRGIGQIWSAVRIGTDPSSTS

SEQ ID NO: 547 - protein, 144 aa, Arabidopsis thaliana; identical to SEQ ID NO: 546

SEQ ID NO: 548 - protein, 330 aa, Zea mays
MAALPFSTRRPFSSPCFILCFLLGFVAGLFPFAHRHLHLDLDLRHLPLADPPPAAPTQRALVRPPPTTTLIVVTPTRARPLQAYYLHRLAHTLRLVPQPLLWLVVDRGAATRETAALLRGCGLMYRHLPSQSHRDAPGARRTRPEHPAARGLRQRNAALDHIEHHRIHGLVYFADEDNVYSLDLFDQLRGIRSFGTWPVAMLGVGKSKTLVEGPVCDNSQVVGWHTNERTKRQRRFHVNTSGFAFNSSMLWDADKRARQAWNYIRLLDTVRDGFQATTFIEQLVEDETHMEGIPTGCSKIMNVNLRLEDKHLVYPKEWQMTENLDVLIPL

SEQ ID NO: 549 - protein, 135 aa, Escherichia coli
MRLLHTMLRVGDLQRSIDFYTKVLGMKLLRTSENPEYKYSLAFVGYGPETEEAVIELTYNWGVDKYELGTAYGHIALSVDNAAEACEKIRQNGGNVTREAGPVKGGTTVIAFVEDPDGYKIELIEEKDAGRGLGN

SEQ ID NO: 550 - protein, 135 aa, Escherichia coli; identical to SEQ ID NO: 549

SEQ ID NO: 551 - protein, 135 aa, Escherichia coli; identical to SEQ ID NO: 549

SEQ ID NO: 552 - protein, 506 aa, Oryza sativa
MEFFTEYGEASQYQIQEVIGKGSYGVVAAAVDTRTGERVAIKKINDVFEHVSDATRILREIKLLRLLRHPDIVEIKHIMLPPSRREFQDIYVVFELMESDLHQVIRANDDLTPEHYQFFLYQLLRALKYIHAANVFHRDLKPKNILANSDCKLKICDFGLARASFNDAPSAIFWTDYVATRWYRAPELCGSFFSKYTPAIDIWSIGCIFAELLTGRPLFPGKNVVHQLDIITDLLGTPSSETLSRIRNEKARRYLSTMRKKHAVPFSQKFRNTDPLALRLLERLLAFDPKDRSSAEEALADPYFASLANVEREPSRHPISKLEFEFERRKLTKDDVRELIYREILEYHPQMLQEYMKGGEQISFLYPSGVDRFKRQFAHLEENYSKGERGSPLQRKHASLPRERVGVSKDGYNQQNTNDQERSADSVARTTVSPPMSQDAQQHGSAGQNGVTSTDLSSRSYLKSASISASKCVAVKDNKEPEDDYISEEMEGSVDGLSEQVSRMHS

SEQ ID NO: 553 - protein, 322 aa, Arabidopsis thaliana
MVMRKLQLPLSQTQKVRFERAIERLQSLSSSANSDASVIVTDSIPVNHDDAFLKGHGTSEVDGELLATVCGVVERVDKLVYVRTLRARYKPEVGDIVVGRVIEVAQKRWRVELNFNQDGVLMLSSMNMPDGIQRRRTSVDELNMRNIFVEHDVVCAEVRNFQHDGSLQLQARSQKYGKLEKGQLLKVDPYLVKRSKHHFHYVESLGIDLIIGCNGFIWVGEHVEVRDPMAIDDQKDEEMISSSSTGKEQSHIPLETRQTICRIGNAIRVLSNLGFTVTLEVIMETVNLSNSKNIDIHDMLGSEFHVVVAENEAERRRTKRKK

SEQ ID NO: 554 - protein, 181 aa, Saccharomyces cerevisiae
MRQLTEEETKVVFEKLAGYIGRNISFLVDNKELPHVFRLQKDRVYYVPDHVAKLATSVARPNLMSLGICLGKFTKTGKFRLHITSLTVLAKHAKYKIWIKPNGEMPFLYGNHVLKAHVGKMSDDIPEHAGVIVFAMNDVPLGFGVSAKSTSESRNMQPTGIVAFRQADIGEYLRDEDTLFT

SEQ ID NO: 555 - protein, 181 aa, Saccharomyces cerevisiae; identical to SEQ ID NO: 554

SEQ ID NO: 556 - protein, 250 aa, Saccharomyces cerevisiae
MGLTTKPLSLKVNAALFDVDGTIIISQPAIAAFWRDFGKDKPYFDAEHVIQVSHGWRTFDAIAKFAPDFANEEYVNKLEAEIPVKYGEKSIEVPGAVKLCNALNALPKEKWAVATSGTRDMAQKWFEHLGIRRPKYFITANDVKQGKPHPEPYLKGRNGLGYPINEQDPSKSKVVVFEDAPAGIAAGKAAGCKIIGIATTFDLDFLKEKGCDIIVKNHESIRVGGYNAETDEVEFIFDDYLYAKDDLLKW

SEQ ID NO: 557 - protein, 151 aa, Arabidopsis thaliana
MESSSSTFLTTTSLDKKKPSPVSRKSPKQKKKTTSTNKPIKVRYISNPMRVQTCASKFRELVQELTGQDAVDLQPEPIYSPSSDDHNLSPPAENLAPRVLHQEPFGERDSDCYEPLNAEDMFLPDQMSAGFSGFFSNGFYNVNDFGSIDSM

SEQ ID NO: 558 - protein, 151 aa, Arabidopsis thaliana
MWFAGGGGGLRKLCRASAIFDNEISYNSLLVRYMSRERAVNVRKINPKVPIQEAYAISNSLYDLFKLHGPLSVPNTWLRAQEAGVSGLNSKTHMKLLLKWMRGKKMLKLICNQVGSSKKFFHTVLPEDPLQEQPAAPIENKKQAVKKKRSK

SEQ ID NO: 559 - protein, 388 aa, Arabidopsis thaliana
MLSSIKPSSSSFSTAISGSVRRSIPTKLKFSPLLIIKNCHNQSFNANVVSHQKPLHISSASNFKREVKVEAYEADRSRPLDINIELPDEQSAQKLKIGIYFATWWALNVVFNIYNKKVLNAFPYPWLTSTLSLACGSLMMLVSWATRIADAPKTDLEFWKTLFPVAVAHTIGHVAATVSMSKVAVSFTHIIKSGEPAFSVLVSRFFMGETFPLPVYLSLLPIIGGCALAAITELNFNITGFMGAMISNLAFVFRNIFSKKGMKGKSVSGMNYYACLSMMSLVILTPFSIAVEGPQMWAAGWQNAVSQVGPNFVWWVVAQSVFYHLYNQVSYMSLDQISPLTFSIGNTMKRISVIVASIIIFHTPIQPVNALGAAIAIFGTFLYSQAKQ

SEQ ID NO: 560 - protein, 126 aa, Saccharomyces cerevisiae
MLMHFIPRRSSKAVQFNWLEIGVWRGGVYVKKGIVNARTNNSNFYKMPVVFGIVKGMGALCVHAWGMGYGGIIDCSPVTEHGNISVLQLEYMPWICLSKIMSCSVASRHSNVWIMDETIAPLVGCL

SEQ ID NO: 561 - protein, 292 aa, Zea mays
MAGGSGEAAMSPPSSSASGKRGRDPEEDVYVDNLHSHKRYLSEIMASSLNGLSVGDSLPDNIMESPARSETASCYRDEILSQYSPMSEDSDDYRCYDTQLNPSGNHPDAMISPSTSPMSSPHRHQRPQSSLLPSNPYPLPSCSLSSVVCSHARRGSDNEGRFPSSPNDMCHVADLRRTALLRSVQMRVQGPHSYDLSFGIRQGQDHAHEHEGEHDHEHEHLEDLEGTEGSSCNKSIVNEVTYNQRRDHDFGRSEHEIDYINNSTSDDCVSDLKFKQEDKSHSKFDIPMHKNS

SEQ ID NO: 562 - protein, 147 aa, Arabidopsis thaliana
MSSMMETLQIRKPTSLPVSQRPNAAATADDEPGLIRRRLSSLSLNLSNQPAAIAARFPRSKSVSAMGEQAGSSVKEWWEWGWSWILSRKPIFIRDLELNKDEAKSIGSQNRGSIMHVFFKLRSQIRNFMGPSSEDSLPLSCKYKRQR

SEQ ID NO: 563 - protein, 208 aa, Arabidopsis thaliana
MDQNVPISKKLWNIVRFLLYMIRKGVSKNKLIADFNATLKRGKNLMFHQRRRVHAGSTASAALNATSATASSRQEYEFSCSNTPNYSFPFSNMAFMRKKSHNNLFTCGQTPQTLDDDVAAARAVLELLNGVGEKGNVTPADLTVALSPYFPGFGQTPLVRPLRVTDSPFPLTPENGDVANGHVDKAADDFIKKFYKNLNQQKKMIEFS

SEQ ID NO: 564 - protein, 413 aa, Arabidopsis thaliana
MSENCNSRHFSWLMKSCLPNPSDAKSLVQIHQPSSTAANSSATIASLPDDLLLECISRVPSSSIPSLAVVCRRWSRLLHSPYFLHLRRRLGLLRHSLFAISTVDSGLFAADLQFQSEIASWKVSLAVSSRSVGVDGSYGSLSHARAAAIGPRVYVVSRNAVLRYDSWMGTLNLRSPMIFPRKKFAIAVVSGKIYVAGGGGGSEVAAAVEEYDPELNRWEVVTQSARKRYGCIGAAVDGVFYVIGGLKIGNETSRAVAARAYASSMDLFDVESRQWLRSRSVPGGGCVVAACAAVGYVYVLTSHAVELSFWRFDARRRGGNSGFGEWQRLKSPPLPAQVRLDGTVRFSCVGVEDKVAVVQVVGCIDDLLRRSGRGERGIRESLVLLYDTTEGEWRRAADLPEMITRAACACVEW

SEQ ID NO: 565 - protein, 394 aa, Saccharomyces cerevisiae
MAESTTLETIEIHPITFPPEVLARISPELSLQRHLSLGIRPCLRKYEEFRDVAIENNTLSRYADAGNIDTKNNILGSNVLKSGKTIVITSITGGIIEETSAAIKDLDDFGEEELFEVTKEEDIIANYASVYPVVEVERGRVGACTDEEMTISQKLHDSILHSRILPKKALKVKAGVRSANEDGTFSVLYPDELEDDTLNETNLKMKRKWSYVLYAKIVVLSRTGPVFDLCWNSLMYALQSVKLPRAFIDERASDLRMTIRTRGRSATIRETYEIICDQTKSVPLMINAKNIAFASNYGIVELDPECQLQNSDNSEEEEVDIDMDKLNTVLIADLDTEAEETSIHSTISILAAPSGNYKQLTLVGGGAKITPEMIKRSLLLSRVRADDLSTRFNI

SEQ ID NO: 566 - protein, 394 aa, Saccharomyces cerevisiae; identical to SEQ ID NO: 565

SEQ ID NO: 567 - protein, 240 aa, Saccharomyces cerevisiae
MSTFIFPGDSFPVDPTTPVKLGPGIYCDPNTQEIRPVNTGVLHVSAKGKSGVQTAYIDYSSKRYIPSVNDFVIGVIIGTFSDSYKVSLQNFSSSVSLSYMAFPNASKKNRPTLQVGDLVYARVCTAEKELEAEIECFDSTTGRDAGFGILEDGMIIDVNLNFARQLLFNNDFPLLKVLAAHTKFEVAIGLNGKIWVKCEELSNTLACYRTIMECCQKNDTAAFKDIAKRQFKEILTVKEE

SEQ ID NO: 568 - protein, 240 aa, Saccharomyces cerevisiae; identical to SEQ ID NO: 567

SEQ ID NO: 569 - protein, 223 aa, Saccharomyces cerevisiae
MSVQAEIGILDHVDGSSEFVSQDTKVICSVTGPIEPKARQELPTQLALEIIVRPAKGVATTREKVLEDKLRAVLTPLITRHCYPRQLCQITCQILESGEDEAEFSLRELSCCINAAFLALVDAGIALNSMCASIPIAIIKDTSDIIVDPTAEQLKISLSVHTLALEFVNGGKVVKNVLLLDSNGDFNEDQLFSLLELGEQKCQELVTNIRRIIQDNISPRLVV

SEQ ID NO: 570 - protein, 223 aa, Saccharomyces cerevisiae; identical to SEQ ID NO: 569

SEQ ID NO: 571 - protein, 250 aa, Saccharomyces cerevisiae
MNVQDRRRLLGPAAAKPMAFSNTTTHVPEKKSTDLTPKGNESEQELSLHTGFIENCNGSALVEARSLGHQTSLITAVYGPRSIRGSFTSQGTISIQLKNGLLEKYNTNELKEVSSFLMGIFNSVVNLSRYPKSGIDIFVYLTYDKDLTNNPQDDDSQSKMMSSQISSLIPHCITSITLALADAGIELVDMAGAGEANGTVVSFIKNGEEIVGFWKDDGDDEDLLECLDRCKEQYNRYRDLMISCLMNQET

SEQ ID NO: 572 - protein, 250 aa, Saccharomyces cerevisiae; identical to SEQ ID NO: 571

SEQ ID NO: 573 - protein, 397 aa, Saccharomyces cerevisiae
MSKVFIATANAGKAHDADIFSVSACNSFTVSCSGDGYLKVWDNKLLDNENPKDKSYSHFVHKSGLHHVDVLQAIERDAFELCLVATTSFSGDLLFYRITREDETKKVIFEKLDLLDSDMKKHSFWALKWGASNDRLLSHRLVATDVKGTTYIWKFHPFADESNSLTLNWSPTLELQGTVESPMTPSQFATSVDISERGLIATGFNNGTVQISELSTLRPLYNFESQHSMINNSNSIRSVKFSPQGSLLAIAHDSNSFGCITLYETEFGERIGSLSVPTHSSQASLGEFAHSSWVMSLSFNDSGETLCSAGWDGKLRFWDVKTKERITTLNMHCDDIEIEEDILAVDEHGDSLAEPGVFDVKFLKKGWRSGMGADLNESLCCVCLDRSIRWFREAGGK

SEQ ID NO: 574 - protein, 397 aa, Saccharomyces cerevisiae; identical to SEQ ID NO: 573

SEQ ID NO: 575 - protein, 624 aa, Zea mays
MGSGVRALMRRKQVDSERTRAAGSAHQLRKELSVTQLVAIGVGSTIGAGVYVLVGTVAREHSGPALTLSFLIAGIAAALSAFCYAELASRCPSAGSAYHYSYICVGEGVAWLIGWALILEYTIGGSAVARGISPNLALFFGGQDSLPWILARHEIPWLDVVVDPCASFLVFVVTGLLCVGIKESSFVQGVVTVLNCFVMLFVIIAGSYIGFQTGWVGYKVAGGFFPYGANGMLAGSATVFFAYIGFDSVASTAEEVKNPQRDLPLGIGTALSICCSLYMLVSVVIVGLVPYFAMDPDTPISSAFAKHGMHWAMYLVTTGAVLALCSTLMGSILPQPRILMAMARDGLLPSFFSDVHKTTQVPVKSTVVTGICAAALAFFMDVSQLAGMVSVGTLLAFTIVAVSILILRYVPPDEVPLPSSLQASFRLSQENDEEKLRGTLGDDDHEQGSAEISDVVVEPITDPLIEKQLYASNLSEAKRRKTAACSITSVCIGVLILTTSASATFLPFPVRCSVCVLGGMLLLAGLGMLCWIDQDDGRHSFGHSGGFICPFVPLLPVMCILINTYLLINLGGGTWMRVGVWLVMGVFVYIFYGRTHSSLTDVVYVPVAEANEIYGSSSSLGFVA

SEQ ID NO: 576 - protein, 477 aa, Zea mays
MLSVFCYTEFAVEIPVAGGSFAYLRVELGDFMAFVAAGNILLEYCIGGAAVARAWTSYFATLLNHQPSDFRIHASSLSADYSELDPIAVVVIALVCIFAAASTKGTSRFNYVLSIVHIAVIVFIIVAGLTKADAANMRDFMPFGVRGIFSASAVLFFAYIGFDAVSTMAEETKNPARDIPIGLVGAMTLTTALYCVLAVTLCLMQPYASIDKDAPFSVAFSARGMDWAKYIVAFGALKGMTTVLLVSAVGQARYLTHIARTHMMPPWLAQVHPRTGTPVNATVVMLVATAIIAFFTDLGILSNLLSISTLFIFMLVAVALLVRRYYVAGETTVANRNKLAACIIAILATSSATATCWGVNVNGWVPYAVTVPAWFASTVCLWAFVPQARAPKLWGVPLVPWLPSASIAINVFLLGSIDYKSFMRFGFWTGGLLVYYLFIGLHASYDTAKALAAESAMAKVEDGDGKPARGAVHNGEY

SEQ ID NO: 577 - protein, 169 aa, Oryza sativa
MALVEGNNGVSGGAVSFSEEQEALVLKSWAIMKKDSANIGLRFFLKIFEVAPSASQMFSFLRNSDVPLEKNPKLKTHAMSVFVMTCEAAAQLRKAGKVTVRDTTLKRLGATHFKYGVGDAHFEVTRFALLETIKEAVPVDMWSPAMKSAWSEAYNQLVAAIKQEMKPAE

SEQ ID NO: 578 - protein, 166 aa, Oryza sativa
MALVEDNNAVAVSFSEEQEALVLKSWAILKKDSANIALRFFLKIFEVAPSASQMFSFLRNSDVPLEKNPKLKTHAMSVFVMTCEAAAQLRKAGKVTVRDTTLKRLGATHLKYGVGDAHFEVVKFALLDTIKEEVPADMWSPAMKSAWSEAYDHLVAAIKQEMKPAE

SEQ ID NO: 579 - protein, 294 aa, Arabidopsis thaliana
MSPPPQRIGLPWPELNDGLAYKDAISSSESELTTVSEFYFTKYKSSAPLLGWIQRIQNGQIQIDGEVVKDPNTLLRSGSKLVYSRLPWKEPDTPYSLEVLYEDDDLIALNKPSGLQVLPGGLFQQRTVLTQLQWCFGKNDSYIGSRESPHPVPVHRLGRGTSGILLCAKTKLAKTKLAAYFAEGTSLVGSGNLDQECGTGRKLSKIYRALADGIVEEDEVVIKQPIGVVRYPGVAQGLYVASPEGKPAFSKVFVLERDREKNCSLVKVEIQSGRPHQIRIHLAYMGHPLGTLFM

SEQ ID NO: 580 - protein, 103 aa, Zea mays
MMMRGGRLTGLTSQVLRCFSTEIFVSRLSFYTTEEEFKDIFSPFGTVEEARLMRDHQTGRMKGFGFVKYSSQAEAEKAVKAMDGRILRGRLIFVEMAKGHESK

SEQ ID NO: 581 - protein, 513 aa, Agrobacterium tumefaciens
MASSMLSSATMVASPAQATMVAPFNGLKSSAAFPATRKANNDITSITSNGGRVNCMQVWPPIGKKKFETLSYLPDLTDSGGRVNCMQAMAEFVITMPDVGEGVAEAELVEWNVKPGDIVHEDMVLAAVMTDKATVEIPSPVAGIITWLAVTVGNTVPVKAPLVRIETDVAAAAPNGSAPEAEAPSRMTEEEAPADMTEAPPPVETQPAARQTEEAPSAPVAEPHHKPLASPAVRQRADDLDIDLIKVKGTGPDGHITHADLDGFLTVRARPERPEPMTPHDSAVEEVKVTGLRRKIAEKMVLSVSRIPHITYVEEIDVTELEDLRATMNGNRRSGQPKLTILPFLMRALVKAVADHPGMNAIFDDEKGVVSHYEAVHIGIATQTPAGLTVPVVRHAETLGLWDCAEEVARVAEAARTGTAHREELMGSTITISSLGALGGVVSTPIINHPEVAIIGVNKIMTRPVWDGNRFVPRKMMNLSSSFDHRVVDGWDAAVFIQAVKALLEKPALIFIE

SEQ ID NO: 582 - protein, 513 aa, Agrobacterium tumefaciens; identical to SEQ ID NO: 581

SEQ ID NO: 583 - protein, 413 aa, Nicotiana tabacum
MATISNPAEIAASSPSFAFYHSSFIPKQCCFTKARRKSLCKPQRFSISSSFTPFDSAKIKVIGVGGGGNNAVNRMIGSGLQGVDFYAINTDAQALLQSAAENPLQIGELLTRGLGTGGNPLLGEQAAEESKEAIANSLKGSDMVFITAGMGGGTGSGAAPVVAQIAKEAGYLTVGVVTYPFSFEGRKRSVQALEAIEKLQKNVDTLIVIPNDRLLDIADEQTPLQDAFLLADDVLRQGVQGISDIITIPGLVNVDFADVKAVMKDSGTAMLGVGVSSSKNRAEEAAEQATLAPLIGSSIQSATGVVYNITGGKDITLQEVNRVSQVVTSLADPSANIIFGAVVDERYNGEIHVTIIATGFTQSFQKTLLSDPRGAKLADKGPVIQESMASPVTLRSSTSPSTTSRTPTRRLFF

SEQ ID NO: 584 - protein, 210 aa, Zea mays
MTSVWKTKVLPGLNKIFDKDGKKAAAAGFLKSFNKEEIDKEIEDKKTELEPKVVEAYEASPPEVKALFKDKKPVKVSKKNSAAVTKFLDELAKIDFPGAKVVSEAVAKSGTSPLLPAITFILDKVAPFIPKEEPKAEPAAEATSREVAVEEKKEEAEPAAATEAAPAPAETPSEEAVVEEKKEEEKKEEEDKPAAEEAAPPAAAAAAEEK

SEQ ID NO: 585 - protein, 391 aa, Arabidopsis thaliana
MVQISDLPRDLTEEVLSRIPVTSMRAVRFTCKKWNTLSKDRSFTKKHLRGARAAAKKKQTKEFQVIMMIQFRVYLYSVNLLNPSIERIGKLISLDVEDHVDISKIFHCGGLLLCITKDISRLVVWNPYSGQTRWIKPRNSYHRLDRYALGYEEKNKSCRCYKILRFMDDYEDDRALRLIREFEIYDLNSDSWKVVNVTPDWDVEFYHRGLSLKGNTYWFAQEKLPPLPRGRVITISDMADFLLCFDFTRERFGPRLPLPFHSFVEDTVTLSSVRDKKLAVLFQPCSASTVKIWISRKIEPNAVSWRKVFLAVDMKSLTGFQFDINAASFFVDEKKKVAMVLDKDRFSYKFTRNIAYIIGKKGYFEKVDLGESTVSSCASLVCSYVPSSVQI

SEQ ID NO: 586 - protein, 140 aa, Arabidopsis thaliana
MAASVMLSSVTLKPAGFTVEKTAARGLPSLTRARPSFKIVASGVKKIKTDKPFGINGSMDLRDGVDASGRKGKGYGVYKYVDKYGANVDGYSPIYNENEWSASGDVYKGGVTGLAIWAVTLAGILAGGALLVYNTSALAQ

SEQ ID NO: 587 - protein, 168 aa, Zea mays
MAALPLATAEVCDANPHLIMNGELRALQPIFQIYGRRQVFAGPIVTLKVYEDNVLVREFLEEKGHGRVLVVDGGGSMRCAILGGNPVQQAQNNGWAGILVNGCIRDVDEINGCDIGVRALSSHPMKANKKGMGEKHVPVNIAGTRICDGEWLYADPDGILVSRTELTV

SEQ ID NO: 588 - protein, 389 aa, Arabidopsis thaliana
MSPSWLRPTADHNHPPPQPPSQSPSPLSSGDPNLTTCLYQTDHGVFYLTWSRTFLGGHSVNLFLHSQDYYNHSSPLSFSSADLSLSSAVSFHLNLNTLAFWKKRGSRFVSPKIQVFWDLSKAKFDSGSEPRSGFYIAVVVDGEMGLLVGDSVKEAYARAKSAKPPTNPQALLLRKEHVFGARVFTTKARFGGKNREISIDCRVDEDAKLCFSVDSKQVLQIKRLRWKFRGNEKVEIDGVHVQISWDVYNWLFQSKSSGDGGGGGGHAVFMFRFESDPEAEEVCETKRKEEEDEKNRNGIVLWKPKKQCGNSFGIKGIVEWRKMRKRFVKSKRSSSSSSISMSSASSACSSSVMEWASSADEAEYGGGGCSGSGSGNGLGFSLLVYAWIK

SEQ ID NO: 589 - protein, 503 aa, Glycine max
MVLSKTASESDVSVHSTFASRYVRTSLPRFKMAEESIPKEAAYQIINDELMLDGNPRLNLASFVTTWMEPECDKLIMAAINKNYVDMDEYPVTTELQNRCVNMIAHLFNAPLEETEAAVGVGTVGSSEAIMLAGLAFKRKWQNRRKQEGKPYDKPNIVTGANVQVCWEKFARYFEVELKEVKLRDDYYVMDPEKAVELVDENTICVAAILGSTLNGEFEDVKRLNDLLIEKNKITGWDTPIHVDAASGGFIAPFIYPELEWDFRLQLVKSINVSGHKYGLVYAGIGWVIWRSKQDLPEELIFHINYLGADQPTFTLNFSKGSSQVIAQYYQLIRLGFEGYRNVMENCRDNMLVLKEGLEKTGRFSIVSKDNGVPLVAFTLKDHTHFDEFQISDFLRRFGWIVPAYTMPPDAQHVTVLRVVIREDFSRTLAERLVSDVEKVLHELDSLPARVISSTTVTLSAEENGKVVVAKKNPMETQREITAIWKKFVLERKKNNDKMNGVC

SEQ ID NO: 590 - protein, 503 aa, Glycine max; identical to SEQ ID NO: 589

SEQ ID NO: 591 - protein, 181 aa, Glycine max
MDAMTLSLPLPPVPVCTVPASASTSSSVSLTHSWSATARQRLSSHRTRPIFRNYSSAVPKLTVVTCGAAVTEINETQFKDTVLKANRPVLVEFVATWCGPCRLISPSMESLAKEYEDRLTVVKIDHDANPRLIEEYKVYGLPTLILFKNGQEVPESRREGAITKVKLKEYVDALLESISVS

SEQ ID NO: 592 - protein, 512 aa, Arabidopsis thaliana
MDHSSNRFGNNGVESILPNYKLGKTLGIGSFGKVKIAEHVVTGHKVAIKILNRRKIKNMEMEEKVRREIKILRLFMHPHIIRQYEVIETTSDIYVVMEYVKSGELFDYIVEKGRLQEDEARNFFQQIISGVEYCHRNMVVHRDLKPENLLLDSRCNIKIADFGLSNVMRDGHFLKTSCGSPNYAAPEVISGKLYAGPEVDVWSCGVILYALLCGTLPFDDENIPNLFKKIKGGIYTLPSHLSSEARDLIPRMLIVDPVKRITIPEIRQHRWFQTHLPRYLAVSPPDTVEQAKKINEEIVQEVVNMGFDRNQVLESLRNRTQNDATVTYYLLLDNRFRVPSGYLESEFQETTDSGSNPMRTPEAGASPVGHWIPAHVDHYGLGARSQVPVDRKWALGLQSHAHPREIMNEVLKALQELNVCWKKIGHYNMKCRWVPGLADGQNTMVNNQLHFRDESSIIEDDCAMTSPTVIKFELQLYKAREEKYLLDIQRVNGPQFLFLDLCAAFLTELRVI

SEQ ID NO: 593 - protein, 449 aa, Chlorella sorokiniana
MHGIKNPELRQLLTEIFMKDPEQQEFMQAVREVAVSLQPVFEKRPELLPIFKQIVEPERVITFRVSWLDDAGNLQVNRGFRVQYSSAIGPYKGGLRFHPSVNLSIMKFLAFEQIFKNSLTTLPMGGGKGGSDFDPKGKSDAEVMRFCQSFMTELQRHISYVQDVPAGDIGVGAREIGYLFGQYKRITKNYTGVLTGKGQEYGGSEIRPEATGYGAVLFVENVLKDKGESLKGKRCLVSGAGNVAQYCAELLLEKGAIVLSLSDSQGYVYEPNGFTREQLQAVQDMKKKNNSARISEYKSDTAVYVGDRRKPWELDCQVDIAFPCATQNEIDEHDAELLIKHGCQYVVEGANMPSTNEAIHKYNKAGIIYCPGKAANAGGVAVSGLEMTQNRMSLNWTREEVRDKLERIMKDIYDSAMGASREYNVDLAAGANIAGFTKVADAVKAQGAV

SEQ ID NO: 594 - protein, 476 aa, Zea mays
MGKRSGGRKLPFFTRSSSSSSKRNRSGRRLPSPSKQDNATRALLASPTAASPSATPDSAAAGQTAQPPSPLSVTAGAGGALSGKITKKKPGARLWMRLDRWGASEVVELDKATIIRRAGLPSRDLRILGPVFSRSSSILAREKTMVINLEFIRAIVTAEEVLLLDPLMHEVLPFVDQLRQHLPLRSLVGGNGECAPDGNGEKQGGSHGGQVPRLNEATGAEHEFPFEFHVLEVALEIVCSSLDLSVDDLERHATPVLDELTKNVSTRNLERVRSLKSHLTRLLARVQKVRDEIEHLLDDNEDMEHLYLTRKQVQNQQVEALMSSAASNSIVLAGPGVPRLNSSFRRSLSVATSMHLDNDVEDLEMLLEAYFMQLDGIRNRILSVREYIDDTEDYVNIQLDNQRNELIQLQLTLTIASFGIAANTFIVGAFAMNIPSSLYNTDNTLFWPFVGGTSSGCFVITILLFGYAWWKKLLGP

SEQ ID NO: 595 - protein, 476 aa, Zea mays; identical to SEQ ID NO: 594

SEQ ID NO: 596 - protein, 476 aa, Zea mays; identical to SEQ ID NO: 594

SEQ ID NO: 597 - protein, 476 aa, Zea mays; identical to SEQ ID NO: 594

SEQ ID NO: 598 - protein, 486 aa, Oryza sativa
MGRRSGGRKLPFFASNASTSSSTKRTRSARRLPSLTRPRASSSPSPASPSPPPPSASHPAPPSPPLAVSPAGAGKVGKKKAGARLWMRLDRWGVSETLHLDKGSIIRRAGLPPRDLRILGPVFSDSSSILAREKAMVINLEFIRAIVTADEILLLDPLTIDVIPFVEQLTHHLPLKNLVCGNGQPGGDDHGEKHDDSHGDQVPRLNEATGAEHELPFEFQVLELALETVCSSFDVNVSGLERRATPVLEELTKNVSTRNLDRVRTLKSDLTRLLAHVQKVRDEMEHLLDDNEDMAHLYLTRKQLQNQQVEALISSAASNSIVPGGTSLSRLNNSFRRSVSIATSMHLDNDVEDLEMLLEAYFMQLDGIRNRILSVREYIDDTEDYVNIQLDNQRNELIQLQLTLTIASFGIAVNTFIAGAFAMNIQSKLYSIDDGSFFWPFVGGTSSGCFMICIVLLWGSNHPEAAVCLLCREIADESLNFMDNTE

SEQ ID NO: 599 - protein, 486 aa, Oryza sativa; identical to SEQ ID NO: 598

SEQ ID NO: 600 - protein, 486 aa, Oryza sativa; identical to SEQ ID NO: 598

SEQ ID NO: 601 - protein, 249 aa, Anabaena sp.
MKPFLFVTDLDHTLVGNDAALAELSQILTHHRQEYGTKIVYATGRSPILYKELQVEKNLIEPDGLVLSVGTEIYLDGSGNPDSDWSEILNDGWNRELVLSVTKKFPELMLQPDSEQRPFKVSFFLHQEASFKVIPQLETELAKCKLNIKLIYSSGIDLDIVPLNSDKGQAMQFLRQKWKFAAERTVVCGDSGNDIALFAVGNERGIIVGNARPELLQWHSEYPADHRYLAKNFCAGGIIEGLQFFGFLE

SEQ ID NO: 602 - protein, 441 aa, Zea mays
MAGSRFGSFKSEKGDSASAAAAAGGAAQRRDPYEVLGVGRTATDQEIKSAFRRMALKYHPDKNGDDPVASDRFQEVTFSYNILSDPDKRRQYDTSGFDAIESDSQELELDLSSLNTVNTVFAALFSKLGVPIKTTVSATVLEEALNGSVMVSQLQLGNSVQRKVEKQSAHFYSVDITEKQAKMGLVCRVHSNDKSKFKLLYFELEENGGLSLALQEDSVKVGKVTAAGMYFLGFPVYRFEQNNLAAAAKDSDGAFFKRLDSFQPCDIHELKPGTHFFAVYGDNFFKSASYTIEVVCGESFPAEKEMLRNVEAKILTKRAELSKFESEYREVLAKFTEMTSKYTQEMQAIDGLLKERNEIHASYTNNPPLKRSSSRNKAKSPSKVAKTGTEKHHQKEKKVKDHCMEGCGSDSDNSSEKKSKERFPRKKWLNLPFKLDRRKTC

SEQ ID NO: 603 - protein, 292 aa, Zea mays
MAQIIDGKAIAADVRREVAADVAALSSAHGLVPGLAVVIVGSRKDSQTYVNMKRKACAEVGICSIDVDLPEDISETALVAEVHRLNADPAVHGILVQLPLPKHINEEKILSEISIEKDVDGFHPLNIGKLAMKGREPLFVPCTPKGCMELLSRSGVTVKGKRAVVVGRSNIVGLPVSLLLLKADATVSVVHSRTPDPESIVREADIVIAAAGQAMMIKGDWIKPGAAVIDVGTNSIDDPTRKSGYRLVGDVDFAAASKVAGYLTPVPGGVGPMTVAMLLKNTVDGAKRGIVE

SEQ ID NO: 604 - protein, 449 aa, Zea mays
MATHAALAASRIPAGARLHSRAAASSRHGVQRLDFADFSGLRPGSCSVSAAAREASFSDVLGAQLVAKATGENAVRAPAEAKLKVAINGFGRIGRNFLRCWHGREDSPIDVVVVNDSGGVRNASHLLKYDSMLGTFKADVKIVDDTTISVDGKPITVVSSRDPLKLPWGELGIDIVIEGTGVFVDGPGAGKHIQAGAKKVIITAPAKGADIPTYVVGVNEGDYDHSVADIISNASCTTNCLAPFVKILDEEFGIVKGTMTTTHSYTGDQRLLDASHRDLRRARAAALNIVPTSTGAAKAVALVLPQLKGKLNGIALRVPTPNVSVVDLVINTVKTGITADDVNAAFRKAAAGPLQGILDVCDVPLVSVDFRCSDVSCTIDASLSMVMGDDMVKVVAWYDNEWGYSQRVVDLAHLVAAKWPGAAAAGSGDPLEDFCKDNPETDECKVYEA

SEQ ID NO: 605 - protein, 948 aa, Oryza sativa
MLAPAKLSEDDKLVEYDALLLDRFLDILQDLHGDDLRELVQECYEIAAEYEGKHDSQKLDELGNMLTSLDPGDSIVMAKAFSHMLNLANLAEEVQIAYRRRIKLKKGDFADENSALTESDIEETFKRLVVDLKKSPAEVFDALKSQTVDLVLTAHPTQSVRRSLLQKHSRIRNCLVQLYSKDITPDDKQELDEALQREIQAAFRTDEIRRTQPTPQDEMRAGMSYFHETIWKGVPKFLRRLDTALKNIGIDERVPYNAPLIQFSSWMGGDRDGNPRVTPEVTRDVCLLARMMASNLYCSQIEDLMFELSMWRCNDELRARADELHLSSKKDAKHYIEFWKKVPPSEPYRVVLGDVRDKLYNTRERARQLLSSGYSDIPEETTLTSVEQFLEPLELCYRSLCDCGDRVIADGTLLDFLRQVSTFGLCLVRLDIRQESDRHTDVLDAITTYLGIGSYREWSEERRQDWLLSELNGKRPLFGPDLPKTDEIADVLDTFRVIAELPADNFGAYIISMATAPSDVLAVELLQRECHVKTPLRVVPLFEKLADLESAPAAVARLFSIDWYRERINGKQEVMIGYSDSGKDAGRLSAAWQLYKSQEELINVAKEFGVKLTMFHGRGGTVGRGGGPTHLAILSQPPDTIHGSLRVTVQGEVIEQSFGEEHLCFRTLQRFTAATLEHGMHPPIAPKPEWRALLDEMAVVATKEYRSIVFQEPRFVEYFRLATPEMEYGRMNIGSRPSKRKPSGGIESLRAIPWIFAWTQTRFHLPVWLGFGSAFKHILEKDIRNLHMLQEMYNEWPFFRVTIDLVEMVFAKGDPGIAALYDKLLVSEELWPLGEKLRANCEETKQLLLQVAGHKDLLEGDLYLKQRLRLRNAYITTLNVCQAYTMKRIRDPDYHVTLRPHMSKEIMDWSKPAAELVKLNPTSEYAPGLEDTLILTMKGIAAGMQNTG

SEQ ID NO: 606 - protein, 581 aa, Zea mays
MCGILAVLGCGDESQGKRVHVLELSRRLKHRGPDWSGLHQVADNYLCHQRLAIIDPASGDQPLYNEDKSIAVAVNGEVYNHEELRARLSGHRFRTGSDCEVIAHLYEEYGESFIDMLDGVFSFVLLDARDNSFIAARDAIGVTPLYIGWGIDGSVWISSEMKGLNDDCEHFEIFPPGNLYSSKEKSFKRWYNPPWFSEVIPSVPYDPLRLRSAFEKAVIKRLMTDVPFGVLLSGGLDSSLVAAVAARHFAGTKAAKRWGTRLHSFCVGLEGSPDLKAAKEVADHLGTVHHEFNFTVQDGIDAIEDVIYHIETYDVTTIRASTLMFQMSRKIKALGVKMVISGEGADEIFGGYLYFHKAPNKEEFHQETCRKIKALHQYDCLRANKATSAWGLEVRVPFLDKEFINEAMSIDPEWKMIRPDLGRIEKWILRKAFDDEERPFLPKHILYRQKEQFSDGVGYSWIDGLKDHAASNVSDKMMSNAKFIYPHNTPTTKEAYYYRMIFERYFPQSSAILTVPGGPSVACSTAKAIEWDAQWSGNLDPSGRAALGVHLSAYEQDTVAVGGSNKPGVMNTVVPGVAIET

SEQ ID NO: 607 - protein, 585 aa, Zea mays
MCGILAVLGCADDTQGKRVRVLELSRRLKHRGPDWSGMHQVGDCYLSHQRLAIIDPASGDQPLYNEDKSIVVTVNGEIYNHEQLRAQLSSHTFRTGSDCEVIAHLYEEHGENFIDMLDGVFSFVLLDTRDNSFIAARDAIGVTPLYIGWGIDGSVWISSEMKGLNDDCEHFEIFPPGHLYSSKQGGFKRWYNPPWFSEVIPSVPYDPLALRKAFEKAVIKRLMTDVPFGVLLSGGLDSSLVAAVTVRHLAGTKAAKRWGTKLHSFCVGLEGSPDLKAAKEVANYLGTMHHEFTFTVQDGIDAIEDVIYHTETYDVTTIRASTPMFLMSSKIKSLGVKMVISGEGSDEIFGGYLYFHKAPNKEELHRETCQKIKALHQYDCLRANKATSAWGLEARVPFLDKEFINEAMSIDPEWKMIRPDLGRIEKWVLRKAFDDEEQPFLPKHILYRQKEQFSDGVGYSWIDGLKAHAESNVTDKMMSNAKFIYPHNTPTTKEAYCYRMIFERFFPQNSAILTVPGGPSVACSTAKAVEWDAQWSGNLDPSGRAALGVHLSAYEQEHLPATILTGTSKKPRMIEVAAPGVAIES

SEQ ID NO: 608 - protein, 284 aa, Arabidopsis thaliana
MTCSQTLGNNNTNKYQICEEIGRGRFGTVSRVYAPATGDFFACKTIDKASLSDDLDRACLDNEPKLMALLSYHPNIVQIHDLIDTDSTLSIFMELVHPSVSIYDRLVSSGTFFEPQTASFAKQILQALSHCHRYGVVHRDIKPENILVDLRNDTVKICDFGSGIWLGEGETTEGVVGTPYYVAPEVLMGYSYGEKVDLWSAGVVLYTMLAGTPPFYGETAEEIFEAVLRGNLRFPTKIFRGVSSMAKDFLRKLICKDASRRFSAEQALRHPWIQRAGETEERFI

SEQ ID NO: 609 - protein, 302 aa, Schizosaccharomyces pombe
MASTTDMSTYKLNHTMIRVKDLDKSLKFYTEVFGMKLIDQWVFEENEFSLSFLAFDGPGALNHGVERSKREGILELTYNFGTEKKEGPVYINGNTEPKRGFGHICFTVDNIESACAYLESKGVSFKKKLSDGKMKHIAFALDPDNYWIELVSQSETKPKANISNFRFNHTMVRVKDPEPSIAFYEKLGMKVIDKADHPNGKFTNYFLAYPSDLPRHDREGLLELTHNWGTEKESGPVYHNGNDGDEKGYGHVCISVDNINAACSKFEAEGLPFKKKLTDGRMKDIAFLLDPDNYWVEVIEQK

SEQ ID NO: 610 - protein, 187 aa, Arabidopsis thaliana
MATASRFLLRKLPRFLKLSPTLLRSNGVRVSSNLIQDSIEPLDSFWRIGSRIRHDSLTTRSFSSQGPASVDYSSVLQEEEFHKLANFTINHLLEKIEDYGDNVQIDGFDIDYGNEVLTLKLGSLGTYVLNKQTPNRQIWMSSPVSGPSRFDWDRDANAWIYRRTEAKLHKLLEEELENLCGEPIQLS

SEQ ID NO: 611 - protein, 131 aa, Arabidopsis thaliana
MATIATGLNIATQRVFVTSENRPVCLAGPVHLNNSWNLGSRTTNRMMKLQPIKAAPEGGISDVVEKSIKEAQETCAGDPVSGECVAAWDEVEELSAAASHARDKKKADGSDPLEEYCKDNPETNECRTYDN

SEQ ID NO: 612 - protein, 179 aa, Arabidopsis thaliana
MAAYTCTSRPPISIRSEMRIASSPTGSFSTRQMFSVLPESSGLRTRVSLSSLSKNSRVSRLRRGVICEAQDTATGIPVVNDSTWDSLVLKADEPVFVDFWAPWCGPCKMIDPIVNELAQKYAGQFKFYKLNTDESPATPGQYGVRSIPTIMIFVNGEKKDTIIGAVSKDTLATSINKFL

SEQ ID NO: 613 - protein, 186 aa, Arabidopsis thaliana
MAAFTCTSRPPISLRSETRIVSSSPSASSLSSRRMFAVLPESSGLRIRLSLSPASLTSIHQPRVSRLRRAVVCEAQETTTDIQVVNDSTWDSLVLKATGPVVVDFWAPWCGPCKMIDPLVNDLAQHYTGKIKFYKLNTDESPNTPGQYGVRSIPTIMIFVGGEKKDTIIGAVPKTTLTSSLDKFLP

SEQ ID NO: 614 - protein, 193 aa, Arabidopsis thaliana
MASLLDSVTVTRVFSLPIAASVSSSSAAPSVSRRRISPARFLEFRGLKSSRSLVTQSASLGANRRTRIARGGRIACEAQDTTAAAVEVPNLSDSEWQTKVLESDVPVLVEFWAPWCGPCRMIHPIVDQLAKDFAGKFKFYKINTDESPNTANRYGIRSVPTVIIFKGGEKKDSIIGAVPRETLEKTIERFLVE

SEQ ID NO: 615 - protein, 343 aa, Arabidopsis thaliana
MRGLFKSKPRTPADIVRQTRDLLLYADRSNSFPDLRESKREEKMVELSKSIRDLKLILYGNSEAEPVAEACAQLTQEFFKADTLRRLLTSLPNLNLEARKDATQVVANLQRQQVNSRLIAADYLESNIDLMDFLVDGFENTDMALHYGTMFRECIRHQIVAKYVLDSEHVKKFFYYIQLPNFDIAADAAATFKELLTRHKSTVAEFLIKNEDWFFADYNSKLLESTNYITRRQAIKLLGDILLDRSNSAVMTKYVSSMDNLRILMNLLRESSKTIQIEAFHVFKLFVANQNKPSDIANILVANRNKLLRLLADIKPDKEDERFDADKAQVVREIANLKLRELA

SEQ ID NO: 616 - protein, 343 aa, Arabidopsis thaliana; identical to SEQ ID NO: 615

SEQ ID NO: 617 - protein, 191 aa, Arabidopsis thaliana
MCAPQPSNEFPLIFRKDGKTCVFWDVEDYPIPADLHPRSIRRRIVKDVKKYGCDAEVSIHAYANDNTVSVTMRRQFSAAGIKLEVFTQAGDKYARHCSLYGDIMLWSLENPPPSNIIVIAKIIDDDLADRIGCLTTVWSYGLLISQVKPEWLERLFPVGSYPSFLAAIFDGGLPKSSKANKDRFPLDESDD

SEQ ID NO: 618 - protein, 191 aa, Arabidopsis thaliana; identical to SEQ ID NO: 617

SEQ ID NO: 619 - protein, 176 aa, Arabidopsis thaliana
MAAPEDSKMSPANSFGAVVLGGTFDRLHDGHRMFLKAAAELARDRIVVGVCDGPMLTKKQFSDMIQPIEERMRNVETYVKSIKPELVVQAEPITDPYGPSIVDENLEAIVVSKETLPGGLSVNRKRAERGLSQLKIEVVEIVSDGSSGNKISSSTLRKMEAEKASKQKQPAEEKAS

SEQ ID NO: 620 - protein, 176 aa, Arabidopsis thaliana; identical to SEQ ID NO: 619

SEQ ID NO: 621 - protein, 460 aa, Arabidopsis thaliana
MNSASAHDLRLLEVDKEKQDPKSPRGALEACLTRCSISSASSSSDDPPPNREAIDNADADTDVQCKNHRASSNWGKFFKLWKRRSMKRLSSFPPLSGAAPPIIKQNKSADPNMNGMVLHDIYDFQSSLQNFSISDIEIATDNFSPENIIGRGGYADVYQGILPEGKLIAVKRLTKGTPDEQTAEFLSELGIIAHVDHPNTAKFIGCCIEGGMHLVFRLSPLGSLGSLLHGPSKYKLTWSRRYNVALGTADGLVYLHEGCQRRIIHRDIKADNILLTEDFQPQICDFGLAKWLPKQLTHHNVSKFEGTLGYFAPEYFMHGIVDEKTDVFAFGVLLLELITGHPALDESQQSLVLWAKPLLERKAIKELVDPSLGDEYNREELIRLTSTASLCIDQSSLLRPRMSQVVELLLGHEDVVMTPREAKIKMMQRTYSEELLDSVEYNSTKYLGDLDRIREVALAS

SEQ ID NO: 622 - protein, 224 aa, Arabidopsis thaliana
MDSNWINCPSVFSSSSSSSRRCQSRSDLYLGGGYEDLEGEDDLKAEFICPFCAEDFDIVGLCCHIDEEHPVEAKNGVCPVCTKRVGLDIVGHITTQHANFFKVQRRRRLRRGGYSSTYLALKKELREANLQSLLGGSSSFTSSTNIDSDPLLSSFMFNSPSVNQSANKSATPVTVGNAATKVSIKESLKRDIQEAPLSGEDQEKAKKSEFVRGLLLSTMLEDDF

SEQ ID NO: 623 - protein, 224 aa, Arabidopsis thaliana; identical to SEQ ID NO: 622

SEQ ID NO: 624 - protein, 102 aa, Arabidopsis thaliana
MMKKRQMVIKQRSRNSNTSSSWTTTSSSSSSSEISNVRYVECQKNHAANIGGYAVDGCREFMAAGVEGTVDALRCAACGCHRNFHRKEVDTEVVCEYSPPNA

SEQ ID NO: 625 - protein, 102 aa, Arabidopsis thaliana; identical to SEQ ID NO: 624

SEQ ID NO: 626 - protein, 361 aa, Xenorhabdus nematophila
MKKTFKIAAIPGDGIGHEVLPEGIRVLQAVAEKWDLHLSFEYFEWASCDYYLRHGKMMPDDWFNQLMQFDAIYFGAVGWPETVPDHISLWGSLLKFRRDFQQYVNLRPVRLLPGVPCPLANKKPEDIDFYVVRENTEGEYSAIGGRFNEGTEHEVVIQESVFTRRGVDRILKYAFELAQSRPRKLLTSATKSNGLSISMPYWDERVEKMAKQYPDIKWDKQHIDILCARFVLNPERFDVVVASNLFGDILSDLGPACTGTIGISPSANLNPERNFPSLFEPVHGSAPDIYGKNIANPIAMIWAGAMMLQFLGEGEQRYQDAHDDILAAIEAVIVQGIVTPDMKGKASTQQVGEAIVNHLNA

SEQ ID NO: 627 - protein, 201 aa, Arabidopsis thaliana
MGGKKTKIEIKKIINKPAKTVAFTKRREGLFRKASQLCLLSPATQIAILAAPMTSKSHASFYSFGHSSVDNVVSSLLYDHPPLTANQDNRSGLGFWWEDKRFDVSENVEELKEAVDAVSRMLNNVRCRLNDAVKSTQRDGGLEILHHQEEEVLQTRNDETKTNQTHEFEGGETSGSASWLENEDDILHFDDDFYTGIDPLF

SEQ ID NO: 628 - protein, 170 aa, Glycine max
MGASLSVSEKSIHEFMVKDAKGRDVNLSIYKGKVLLVVNVASKCGFTNTNYTQLTELYSKYKDRGLEILAFPCNQFLKQEPGSSQDVEEFACTRYKAAYPIFGKVRVNGPDTAPVYKFLKANKSGFLGSRIKWNFTKFLVDKEGNVLRRYGSTTSPFSIENDIKRALGEA

SEQ ID NO: 629 - protein, 234 aa, Glycine max
MSSMASSTAFFTPLHDFTQARTTPSPPLPFIKSSFASSKSTFFHPALSLQTSSNFPRLFGKPKFFSVHARAATEKTIYDFTVKDIDRKDVSLSKFKGKVLLIVNVASRCGLTSSNYSELSRLYEKYKNQGLEILAFPCNQFGMQEPGSNEDIKQFACTRYKAEFPIFDKVDVNGPFTTPVYQFLKSSAGGFLGDLIKWNFEKFLVDKNGKVIERYPPTTSPFQIEKDIQKLLAA

SEQ ID NO: 630 - protein, 170 aa, Glycine max
MGASQSISEKSFHEFTVKDARGKDVNLNAYRGKVLLVINVASKCGFADANYTQLTQLYSTYKSRGLEILAFPCNQFLKKEPGTSQEAQDFACTRYKAEYPIFGKIRVNGSDTAPVFKFLKTQKSGVMGSRIKWNFTKFLVDEEGRVIQRYSPTTKPLAIENDIKKALRVA

SEQ ID NO: 631 - protein, 226 aa, Zea mays
MASSLVLIAAALLALASSWQQAIAYDPSPLQDFCVADKNSPVRVNGFPCKDPMAVTPDDFFNAAMIIDKRRDTNNKVGSNVTNVNVESFPGLNTLGISLARIDYAPLGVNPPHIHPRATELLTVLEGTLYLGFVTSNPNRLFSKVVKKGDVFVFPKAMIHFQMNLDHDKPAAALSSLSSQNPGVITIASAVFGSKPPISDDVLAKAFQVEKKLIDWLQSQFWDTNY

SEQ ID NO: 632 - protein, 357 aa, Zea mays
MEGGAGASEKGTVLVTGASGFVGSWLVMKLLQAGYTVRATVRDPANVGKTKPLMDLPGATERLSIWKADLAEEGSFHDAIRGCTGVFHVATPMDFLSKDPENEVIKPTVEGMISIMRACKEAGTVRRIVFTSSAGTVNLEERQRPVYDEESWTDVDFCRRVKMTGWMYFVSKTLAEKAALAYAAEHGLDLVTIIPTLVVGPFISASMPPSLITALALITGNAPHYSILKQVQLIHLDDLCDAEIFLFENPAAAGRYVCSSHDVTIHGLAAMLRDRYPEYDVPQRFPGIQDDLQPVRFSSKKLQDLGFTFRYKTLEDMFDAAIRTCQEKGLIPLATAAGGDGFASVRAPGETEATIGA

SEQ ID NO: 633 - protein, 182 aa, Zea mays
MAAAAATRAGAWGVAWLLAATVAAALLASASAQSGCTTTLISLYPCLNYISGNVSAPPSSCCSQLASVVQTNPQCLCAALSGDSSSLGGVTVDKTRALQLPQACNVKTPPASKCNSAGGGSAPGAATPATPSAGVPSTAGTGTGSKATPTAPFLTSGAASTRGAVSLVLAFATVAVYGISAA

SEQ ID NO: 634 - protein, 387 aa, Zea mays
MAMATAKLNSPATSLLAGGRTRRSAPARCTTVIRAAAGSYSDELISTAKSVASPGRGILAIDESNATCGKRLSSIGLDNTEVNRQAYRQLLLTTAGLGEYISGAILFEETLYQSTTDGKKFVDCLKDQNIMPGIKVDKGLVPLPGSNNESWCQGLDGLASRCAEYYKQGARFAKWRTVVSIPCGPSALAVKEAAWGLARYAAIAQDNGLVPIVEPEILLDGDHGIEGALEVAEKVWSEVFFYLAENNVLFEGILLKPSMVTPGAEHKEKASPEAIAKYTLTMLRRRVPPAVPGIMFLSGGQSEVEATLNLNAMNQSLNPWHVSFSYARALQNSVLKTWQGRPENVEAAQKALLVRAKANSLAQLGRYTGEGESDDAKKGMFQKGYTY

SEQ ID NO: 635 - protein, 1018 aa, Schizosaccharomyces pombe
MAQVSRICNGVQNPSLISNLSKSSQRKSPLSVSLKTQQHPRAYPISSSWGLKKSGMTLIGSELRPLKVMSSVSTAEMSGETVHGISCYSVVANTEDTYNQTLDFYQKLGFKKVASFGTSDSDNARVCNESLREDWMHVAGNNSAESVTIKFRLVPGELSLSPAAEDSEWRGQKSSLVFYYPNLLDLLKQLSADAIKYQAFPNEKKPDEVYVEDPLGNLIGFSDRYNPFAHANLKKSEESGAASNLESGLATPVVETLKKATTSDKPAGVKKKIAVMTSGGDSPGMNAVVRAVARIAIHRGCDAFAIYEGYEGLVQGGDMIKQLQWGDVRGWLAEGGTLIGTARCMAFRERPGRLRAAKNLISAGIDSIIVCGGDGSLTGADIFRSDWPGLVKELEDTKAITPEQAKLYRHLTIVGLVGSIDNDMSSTDVTIGAFSSLHRICEAVDSISSTAISHSRAFIVEVMGRHCGWLAVLAALATGADFVFIPERPAEVGKWQDELCNSLSSVRKLGKRKSIVIVAEGAIDSELNHISPEDIKNLLVERLHLDTRVTTLGHVQRGGIPCAYDRMLATLQGVDAVDAVLASTPDTPSPMIAINGNKINRKPLMEAVKLTHEVADAIEKKQFAHAMELRDPEFADYLHTWEGTTFIEDESHFVPKDERMRVAIIHVGAPAGGMNSATRAAVRYCLNRGHTPLAIDNGFSGFLRHDSIHELSWIDVDEWCIRGGSEIGTNRDTPDLDMGFTAFKFQQHKIDALIIIGGFEAFTALSQLESARVNYPSFRIPMAIIPATISNNVPGTEFSLGCDTCLNAVMEYCDTIKQSASASRRRVFVCEVQGGRSGYIATVGGLITGASAIYTPEDGISLDMLRKDIDHLKATFALEAGRNRAGQLILRNECASKVYTTEVIGNIISEEAHKRFSARTAVPGHVQQGGNPTPMDRARAARLAMRAIRFFETCRANDLGNDPSSAVVIGIRGTGVSFSSVADVENNETEIEMRRPKNAWWRDMHNLVNILAGKTFAD

SEQ ID NO: 636 - protein, 385 aa, Escherichia coli
MAQVSRICNGVQNPSLISNLSKSSQRKSPLSVSLKTQQHPRAYPISSSWGLKKSGMTLIGSELRPLKVMSSVSTAEMVRIYTLTLAPSLDSATITPQIYPEGKLRCTAPVFEPGGGGINVARAIAHLGGSATAIFPAGGATGEHLVSLLADENVPVATVEAKDWTRQNLHVHVEASGEQYRFVMPGAALNEDEFRQLEEQVLEIESGAILVISGSLPPGVKLEKLTQLISAAQKQGIRCIVDSSGEALSAALAIGNIELVKPNQKELSALVNRELTQPDDVRKAAQEIVNSGKAKRVVVSLGPQGALGVDSENCIQVVPPPVKSQSTVGAGDSMVGAMTLKLAENASLEEMVRFGVAAGSAATLNQGTRLCSHDDTQKIYAYLSR

SEQ ID NO: 637 - protein, 620 aa, Arabidopsis thaliana
MVLEDRKDGSSLPGRSGSFSKSSPSELDVVDPYKRISSPGSILDAEKVEKKPGGWRAVSFILGNETLERLGSIGLLANFMVYLTKVFHLEQVDAANVINIWSGFTNLTPLVGAYISDTYVGRFKTIAFASFATLLGLITITLTASFPQLHPASCNSQDPLSCGGPNKLQIGVLLLGLCFLSVGSGGIRPCSIPFGVDQFDQRTEEGVKGVASFFNWYYMTFTVVLIITQTVVVYIQDQVSWIIGFSIPTGLMALAVVMFFAGMKRYVYVKPEGSIFSGIAQVIVAARKKRKLKLPAEDDGTVTYYDPAIKSSVLSKLHRSNQFRCLDKAAVVIEGDLTPEGPPADKWRLCSVQEVEEVKCLIRIVPIWSAGIISLAAMTTQGTFTVSQALKMDRNLGPKFEIPAGSLSVISLLTIGIFLPFYDRVFVPFMRRITGHKSGITLLQRIGTGIVFAIFSMIVAGIVERMRRIRSINAGDPTGMTPMSVFWLSPQLILMGLCEAFNIIGQIEFFNSQFPEHMRSIANSLFSLSFAGSSYLSSFLVTVVHKFSGGHDRPDWLNKNLNAGKLDYFYYLIAVLGVVNLVYFWYCARGYRYKVGLPIEDFEEDKSSDDVEMTSKKSMK

SEQ ID NO: 638 - protein, 373 aa, Zea mays
MLGVARRRLGSGCVLAQLAQALRPAAAPARTYSAAAKEITVREALNTALDEEMSADPSVFLMGEEVGEYQGAYKISKGLLDKYGPDRVLDTPITEAGFTGIGVGAAYHGLRPIVEFMTFNFSMQAIDHIINSAAKSNYMSAGQISVPIVFRGPNGAAAGVGAQHSQCYAAWYAHVPGLKVLAPYSAEDARGLLKAAIRDPDPVVFLENELLYGESFPVSAEVLDSSFCLPIGKAKIERQGKDVTITAFSKMVGYALQAADILAKEGISAEVINLRSIRPLDRATINASVRKTNRLVTVEEGFPQHGIGAEICMSVVEDSFEYLDAPVERIAGADVPMPYAANLERMAVPQVDDIVRAAKRACYRAAVPMAATA

SEQ ID NO: 639 - protein, 231 aa, Zea mays
MPKSKRNRPVTLSKTKKKPGLERKGKVVAEIKDAVDKYSSAYVFTYDNMRNQKLKDLREQLKSSSRIFLAGKKVMQIALGRSPADEAKTGLHKLSKFLQGNSGLLFTNLPRDDVERMFREFEEHDFARTGSTAIDTVELKEGPLEQFTHEMEPFLRKQGLPVRLNKGVVELVADHVVCEEGKPLSPEAAQTLRLLGIQMATFRLYLVCRWSGDDFEVYKEGLMHLGADESS

SEQ ID NO: 640 - protein, 367 aa, Zea mays
MFFLKDPPPTMSPPQPPHPVPRETVASAVASLTTWMKKRAAEARPNLLADERDDIVVLQLSLRRIPASRSTKPRLLPMPHPVVGHDGASVCVISDDRTKSRSPSASDLHASMSLHRFPVSEVIPLSTLRTDYRPYESRRRLAASHDLFVADRAILPLLPRVLGKAFYSTKKAPIGVDFTRIGWPEQVRRVLGSAFLYLRSGTCSGIKVGRLDMEEEDIVDNVMAAVEEAVEKVPKKWGNVRALHLKAVDSVALPIYQVVPELGMKIEVPEPDIVGSGEVIEKKANAGADGREVFANVSSKRKRNKKEQIEEGVVMQEEVQVDTEKKKKTKSIMVDDGHEVGKKGRVKGKRATEEGKKRKKSIKGDRL

SEQ ID NO: 641 - protein, 171 aa, Zea mays
MVKYSQEPGNPTKSAKAMGRDLRVHFKNTRETAFALRKLSLTKAKRYLEDVIAHKQAIPFRRYCGGVGRTAQAKSRHSNGQGRWPVKSAGFILDLLKNAESNADVKGLDVDNLYVSHIQVNQAQKQRRRTYRAHGRINPYMSSPCHIELILSEKEEPVKKEADNIVAARKQ

SEQ ID NO: 642 - protein, 133 aa, Zea mays
MAVPLLTKKVVKKRSAKFIRPQSDRRITVKESWRRPKGIDSRVRRKFKGVTLMPNVGYGSDKKTRHYLPNGFKKFVVHNTSDLELLMMHNRTYCAEIAHNVSTKKRKAIVERASQLDIVVTNRLARLRSQEDE

SEQ ID NO: 643 - protein, 392 aa, Arabidopsis thaliana
MEGTLDEENLVFETTKGIKPIKSFDDMGMNDKVLRGVYDYGYKKPSEIQQRALVPILKGRDVIAQAQSGTGKTSMIAISVCQIVNISSRKVQVLVLSPSRELASQTEKTIQAIGAHTNIQAHACIGGKSIGEDIKKLERGVHAVSGTPGRVYDMIKRGSLQTKAVKLLVLDESDEMLSKGLKDQIYDVYRALPHDIQVCLISATLPQEILEMTEKFMTDPVRILVKPDELTLEGIKQYYVDVDKEEWKFDTLCDLYGRLTINQAIIFCNTRQKVDWLTEKMRSSNFIVSSMHGDKRQKERDDIMNQFRSFKSRVLIASDVWARGIDVQTVSHVINYDIPNNPELYIHRIGRAGRFGREGVAINFVKSSDMKDLKDIERHYGTKIREMPADLV

SEQ ID NO: 644 - protein, 244 aa, Zea mays
MISPDAARNVVGIIGNVISFGLFLSPVLTFWRIYKAKDVEEFKPDPYLATLLNCMLWVFYGIPVVHPNSILVVTINGIGLVIEAVYLTIFFLYSDSQKRKKAFAILAVEILFMLAVVLGVILGAHTHEKRSMIVGILCVIFGSMMYASPLTIMSRVIKTKSVEYMPFLLSLVSFLNGCCWTAYALIRFDLYVTIPNALGAFFGLIQLILYFCYYKSTPKNEKNVELPTVSSNVGGGNVTVSVER

SEQ ID NO: 645 - protein, 289 aa, Arabidopsis thaliana
MGNVNAREEANSNNASAVEDEDAEICSREAMSAASDGNHVAPPELMGQSPPHSPRATQSPLMFAPQVPVLPLQRPDEIHIPNPSWMQSPSSLYEEASNEQGIPTMITWCHGGKEIAVEGSWDNWKTRSRLQRSGKDFTIMKVLPSGVYEYRFIVDGQWRHAPELPLARDDAGNTFNILDLQDYVPEDIQSISGFEPPQSPENSYSNLLLGAEDYSKEPPVVPPHLQMTLLNLPAANPDIPSPLPRPQHVILNHLYMQKGKSGPSVVALGSTHRFLAKYVTVVLYKSLQR

SEQ ID NO: 646 - protein, 79 aa, Arabidopsis thaliana
MSDKGRPLPKFGEWDVNDPASAEGFTVIFNKARDEKKTGGKPGSPGKSSEGHVKSGGGDPSKPQPKKWLCCMQAPAVDS

SEQ ID NO: 647 - protein, 157 aa, Zea mays
MAAPLRRSLPSLGRALLTPAPARMLSAEASDALVEIKPGEIGMVSGIPEEHLRRKVLIYSPARTASQQGSGKVGRWKINFLSTQKWENPLMGWTSTGGPYANVGEAGLTFDSAESAKAFAEKHGWNYVVRKRHAPLLRPKAYAENFKWRGPPKAEQA

SEQ ID NO: 648 - protein, 157 aa, Zea mays; identical to SEQ ID NO: 647

SEQ ID NO: 649 - protein, 989 aa, Arabidopsis thaliana
MSDYGEKTCPLCAEEMDLTDQQLKPCKCGYQICVWCWHHIMDMAEKDQSEGRCPACRTPYDKEKIVGMTVDQERLASEGNMDRKKIQKSKPKSSDGRKPLTSVRVVQRNLVYIVGLPLNLADEDLLQRKEYFGQYGKVLKVSMSRTATGLIQQFPNNTCSVYITYGKEEEAIRCIQSVHGFILDGKALKACFGTTKYCHAWLRNVACNNQDCLYLHEVGSQEDSFTKDEIISAHTRVQQITGATNTMQYRSGSMLPPPLDAYTSDSSTGNPIAKVPSSTSVSAPKSSPPSGSSGKSTALPAAASWGARLTNQHSLATSALSNGSLDNQRSTSENGTLATSTVVTKAANGPVSSSNSLQKAPLKEEIQSLAEKSKPGVLKPLQQKIVLDPESKRTTSPNRDPSSNQISCLVESSYNSRVIDKPSAVENSLEHTSEIAEDVFDVGKLSADVAWMGITTNSRDETPGVPVVIGTHCDLGSITQSDNDVQNLEQCRKQSPTNTYAEADISLNGIHGSRPEWDWRSGLQSQIDVKEPLEVNDFSSFNNNRRGIAEAVSHSTSKFSLSISILDSNHLASRSFQNRETSCGMDSKTGSSFEIGSDRLHLPNGFSEKAMSNMEHSLFANEGRSNIQNTEDDIISNILDFDPWDESLTSQHNFAKLLGQSDHRASTLESSNLLKQHNDQSRFSFARHEESNSQAYDNRSYSIYGQLSRDQPLQEFGANRDMYQDKLGSQNGFASNYSGGYEQFATSPGLSSYKSPVARTQVSAPPGFSAPNRLPPPGFSSHQRGDLSSDIASGTRLLDSANLLRNAYHVPPPSGNLNAAGDIEFIDPAILAVGRGRLHNGMETADFDLRSGFSSQLNSFDNDARLQLLAQRSLAAQQVNGFHDPRNVNNFSSSFSDPYGISSRPTDQTQGTGLSPFTQLPRQASANPLLSNGHWDNKWNEPQSGNNLGITQLLRNERMGFNDNVYSGFEEPKFRRPGPGDPYNRTYGI

SEQ ID NO: 650 - protein, 177 aa, Zea mays
MVLTSNISVQKTLYEVLSVSEDATYDEIRAAYRSAALNTHPDKAQTTLESSSVPSTEQQEFSSVQKAWEVLRHPTSRAYYDKQLQSSRQSIEIIASEIQVGDMIVESAAGALELLYPCRCGDYFSITSGELSGMGIVVTGDGEEVEGLQASDSGSASVVLGCGSCSLKIRLVIDGTS

SEQ ID NO: 651 - protein, 483 aa, Zea mays
MAARFLLVVAVALLLRPGDASVHEYRGLSFANKGNAFILHAGSEGLYAASHANTTAEDAAAVAEAFIRFDKITFRRSEDTNNSVKETSSAKVQVLIFEIEDREMIGGSAYGGQKAICCTSDLAKLGACTEGSVIYRPSQVNPGWPKLFVASFDGSDLIATLPSRTIPITKTGIYNMYFIHCDPSLASLEIEGKTIWKNPTGYLPGRMAPLKNFFGLMSFAFVVLGIYWFYQYMKSWREVLPLQNCITLVITLGMFEMALWYFEYAEFNETGVRPKGITFWAVTFGTVKRTAAEVIVLIVSMGYGVVTPTLGGLTSKVVMLGGTFFLATEILELVENLGAVNDLSGKARLFLVYPVAILDAAFVIWIFISLAKTIGKLQIYSKSTDVFNERWQHARIIPAFWHVLSFLLLCVICYLWAPSQNSMRFSYDASEFFDRKDNISLIRPAPSASKNGWNLSSTPEPKATKDVNTVADFEGDDEENKRE

SEQ ID NO: 652 - protein, 369 aa, Arabidopsis thaliana
MESTKIAPSFDRASELKAFDETKTGVKGLVDSGISKIPRIFHHSSVELANPKPLPSDLLHLKTIPTIDLGGRDFQDAIKHKNAIEGIKEAAAKWGFFQVINHGVSLELLEKMKDGVRDFHEQPPEVRKDLYSRDFGRKFIYLSNFDLYTAAAANWRDTFYCYMAPDPPEPQDLPEICRDVMMEYSKQVMILGEFLFELLSEALGLNPNHLKDMECLKGLRMLCHYFPPCPEPDLTFGTSKHSDGSFLTVLLPDNIEGLQVCREGYWFDVPHVPGALIINIGDLLQLITNDKFISLKHRVLANRATRARVSVACFFHTHVKPNPRVYGPIKELVSEENPPKYRETTIRDYATYFNGKGLGGTSALLDFKV

SEQ ID NO: 653 - protein, 369 aa, Arabidopsis thaliana; identical to SEQ ID NO: 652

SEQ ID NO: 654 - protein, 121 aa, Zea mays
MASTGRSMLLSLLLFAVTLSLLEMYRAKFASSELMTIAGGFVCSLLFLLLLTFIGNYQEASGDRTGWGAVVVAQLVALIVAGTVHRVCITTCFLFSAGLLYEVDKLSGMILARSESKVRRH

SEQ ID NO: 655 - protein, 121 aa, Zea mays; identical to SEQ ID NO: 654

SEQ ID NO: 656 - protein, 465 aa, Arabidopsis thaliana
MKSVIFTEEKNLQRQNPLQKSEQQRRNFEMPSPPTTTSLSVTQTINGSHSFTIKGYSLAKGIGIGKHIASDTFTVGGYQWAIYFYPDGKNPEDNSAYVSVFIALASDGTDVRALFELSLLDQSGKGKHKVHSHFDRALESGPYTLKYRGSMWGYKRFFRRLMLETSDFLKDDCLKINCTVGVVVSEIDCPRLHSIHVPASDIGSHFGMLLENEDGSDITFNVSGEKFRAHRLVLAARSPVFESEFLDVTGEEDRDIEVTDMEPKVFKALLHYIYKDALIEDAESSSSSGSSVGPSASDTLAAKLLGAADKYKLPRLSLMCESVLCKDISVDSVANILALADRYNASALKSVCLKFAAENLIAVMRSDGFDYLREHCPSLQSELLKTVAGCEEELSGGGGKTRSVWGQFSDGGAETNGRQAQTWGDINGGAERSQSVWVEVVNANGSGRNNNDNNNSDDPMAELED

SEQ ID NO: 657 - protein, 465 aa, Arabidopsis thaliana; identical to SEQ ID NO: 656

SEQ ID NO: 658 - protein, 554 aa, Pseudomonas fluorescens
MAYYRTPHDVTALPAWQALKDHRQAMQDFSMREAFNADPQRFNQFTLSSCGLFLDYSKNLINAETRNLLVGLANEVDLKGAIKALFDGEIVNSSEGRPALHTALRRPVGDKLSVNGVNVMPEVHKVLNQITDLVGRIHDGLWRGYTEKPITDVVNIGIGGSFLGPELVSEALLSYAQKGVRCHYLANIDGSEFHELTQKLRAETTLFIVSSKSFNTLETLKNAQAARAWYLAQGGSEAELYRHFIAVSSNNAAAVAFGIREENIFPMWDWVGGRYSLWSAIGLPIALAIGMSNFKELLSGAYTMDQHFQSAPFEQNMPVLLALLGVWYGNFWGAQSHAILPYDHYLRNITKHLQQLDMESNGKSVRQDGTPVSTDTGPVIWGGVGCNGQHAYHQLLHQGTQLIPADFIVPIVSFNPVSDHHQWLYANCLSQSQALMLGKTLPEAEAELRDKGMSEDQVQKLAPHKVIPGNRPSNTLVVERISPRRLGALVAMYEHKVFVQSVVWGINAFDQWGVELGKELGKGVYNRLVGSEETAAEDASTQGLINYFRGRHRG

SEQ ID NO: 659 - protein, 554 aa, Pseudomonas fluorescens; identical to SEQ ID NO: 658

SEQ ID NO: 660 - protein, 339 aa, Arabidopsis thaliana
MKGTLRYLAGIAGPNGFGSRSTAEQVTQHSFFPCSHLTAIITGGTSGIGAETARVLAKRGVRVVMAVRDMKKAEMVKERIIRENPEADIILFEIDLSSLSSVARFCSQFLSQDLPLNILINNAGVFSPNLEFSEEKIELTFATNFLGHYLLTEMLIEKMIDTAEKSGIEGRIINLSSVIHNWVKPDCFSFPKLLHPISRYNGTRAYAQSKLATILHAKALSKQLKDRNANVTINAVHPGIVKTGIIRAHKGLFTDSLFLIASKLLKSISQGAATTCYVALSNETKGLSGKYFADCNETNCSDLANDEYVALKLCTQSRALIHDHLHEFQIHALPNLCFL

SEQ ID NO: 661 - protein, 243 aa, Zea mays
MMSSSSDAAAALELQESGWEELRREARKLEGDLDVKLSSYARLAARSSSSASGAASPTADRSSWKSMEFEIQSLLGKLQDVNDAMSRCAASSATTTSVSQKLARHRDILHEFTQEFRRTRGNLSSMREHADLLNSVRDDITESRASGGMSPRVHLLRERASIHGSINQIDEVIGQAQSTRVALNNQRAMFGDIQGKVKQLGEKFPVIRGLLGAIKRKKSKDTIILSAVIAACTIFLIIYWLSK

SEQ ID NO: 662 - protein, 474 aa, Arabidopsis thaliana
MVMEEGRSIEEGLLQLKNKNDDSECRITACVILSTFVAVCGSFSFGVATGYTSGAETGVMKDLDLSIAQFSAFGSFATLGAAIGALFCGNLAMVIGRRGTMWVSDFLCITGWLSIAFAKEVVLLNFGRIISGIGFGLTSYVVPVYIAEITPKHVRGTFTFSNQLLQNAGLAMIYFCGNFITWRTLALLGALPCFIQVIGLFFVPESPRWLAKVGSDKELENSLFRLRGRDADISREASEIQVMTKMVENDSKSSFSDLFQRKYRYTLVVGIGLMLIQQFSGSAAVISYASTIFRKAGFSVAIGTTMLGIFVIPKAMIGLILVDKWGRRPLLMTSAFGMSMTCMLLGVAFTLQKMQLLSELTPILSFICVMMYIATYAIGLGGLPWVIMSEIFPINIKVTAGSIVTLVSFSSSSIVTYAFNFLFEWSTQGTFFIFAGIGGAALLFIWLLVPETKGLSLEEIQVSLIHQPDERNQT

SEQ ID NO: 663 - protein, 675 aa, Arabidopsis thaliana
MEEISTDPVVPAVKPDPRTSSVGEGANRHENDDGGSGGSEIGAPDLDKDLLCPICMQIIKDAFLTACGHSFCYMCIITHLRNKSDCPCCSQHLTNNQLYPNFLLDKLLKKTSARHVSKTASPLDQFREALQRGCDVSIKEVDNLLTLLAERKRKMEQEEAERNMQILLDFLHCLRKQKVDELNEVQTDLQYIKEDINAVERHRIDLYRARDRYSVKLRMLGDDPSTRNAWPHEKNQIGFNSNSLSIRGGNFVGNYQNKKVEGKAQGSSHGLPKKDALSGSDSQSLNQSTVSMARKKRIHAQFNDLQECYLQKRRQLADQPNSKQENDKSVVRREGYSNGLADFQSVLTTFTRYSRLRVIAEIRHGDIFHSANIVSSIEFDRDDELFATAGVSRCIKVFDFSSVVNEPADMQCPIVEMSTRSKLSCLSWNKHEKNHIASSDYEGIVTVWDVTTRQSLMEYEEHEKRAWSVDFSRTEPSMLVSGSDDCKVKVWCTRQEASVINIDMKANICCVKYNPGSSNYIAVGSADHHIHYYDLRNISQPLHVFSGHKKAVSYVKFLSNNELASASTDSTLRLWDVKDNLPVRTFRGHTNEKNFVGLTVNSEYLACGSETNEVYVYHKEITRPVTSHRFGSPDMDDAEEEAGSYFISAVCWKSDSPTMLTANSQGTIKVLVLAA

SEQ ID NO: 664 - protein, 585 aa, Arabidopsis thaliana
MVLPELLVILAEWVLYRLLAKSCYRAARKLRGYGFQLKNLLSLSKTQSLHNNSQHHLHNHHQQNHPNQTLQDSLDPLFPSLTKYQELLLDKNRACSVSSDHYRDTFFCDIDGVLLRQHSSKHFHTFFPYFMLVAFEGGSIIRAILLLLSCSFLWTLQQETKLRVLSFITFSGLRVKDMDNVSRSVLPKFFLENLNIQVYDIWARTEYSKVVFTSLPQVLVERFLREHLNADDVIGTKLQEIKVMGRKFYTGLASGSGFVLKHKSAEDYFFDSKKKPALGIGSSSSPQDHIFISICKEAYFWNEEESMSKNNALPRERYPKPLIFHDGRLAFLPTPLATLAMFIWLPIGFLLAVFRISVGVFLPYHVANFLASMSGVRITFKTHNLNNGRPEKGNSGVLYVCNHRTLLDPVFLTTSLGKPLTAVTYSLSKFSEFIAPLKTVSLKRDRKKDGEAMQRLLSKGDLVVCPEGTTCREPYLLRFSPLFAELTEDIVPVAVDARVSMFYGTTASGLKCLDPIFFLMNPRPVYCLEILKKLPKEMTCAGGKSSFEVANFIQGELARVLGFECTNLTRRDKYLVLAGNEGIVR

SEQ ID NO: 665 - protein, 230 aa, Arabidopsis thaliana
MNDGDVSRQIQQMVRFIRQEAEEKANEISVSAEEEFNIEKLQLVEAEKKKIRQDYEKKEKQADVRKKIDYSMQLNASRIKVLQAQDDIVNAMKDQAAKDLLNVSRDEYAYKQLLKDLIVQCLLRLKEPSVLLRCREEDLGLVEAVLDDAKEEYAGKAKVHAPEVAVDTKIFLPPPPKSNDPHGLHCSGGVVLASRDGKIVCENTLDARLDVAFRMKLPVIRKSLFGQVTA

SEQ ID NO: 666 - protein, 386 aa, Arabidopsis thaliana
MSVHVKEEPVLVPNCDVENTELAVFNGNGESELENFGTCVDEITDRVNQLEQKVVEVEHFYSTKDGAAQTNTSKSNSGGKKIAISQPNNSKGNSAGKEKSKGKHVSSPDLMRQFATMFRQIAQHKWAWPFLEPVDVKGLGLHDYYKVIEKPMDLGTIKKKMESSEYSNVREIYADVRLVFKNAMRYNEEKEDVYVMAESLLEKFEEKWLLIMPKLVEEEKKQVDEEAEKHANKQLTMEAAQAEMARDLSNELYEIDLQLEKLRESVVQRCRKLSTQEKKGLSAALGRLSPEDLSKALKMVSESNPSFPAGAPEVELDIDVQTDVTLWRLKVFVQEALKAANKSSGGTNAQNNNNTGTGEINKNNAKRRREISDAINKASIKRAKKA

SEQ ID NO: 667 - protein, 240 aa, Agrobacterium tumefaciens
MDLRLIFGPTCTGKTSTAVALAQQTGLPVLSLDRVQCCPQLSTGSGRPTVEELKGTSRLYLDDRPLVKGIIAAKQAHERLMGGVYNYEAHGGLILEGGSISLLKCMAQSSYWSADFRWHIIRHELADEETFMNVAKARVKQMLRPAAGLSIIQELVDLWKEPRLRPILKEIDGYRYAMLFASQNQITSDMLLQLDADMEDKLIHGIAQEYLIHARRQEQKFPRVNAAAYDGFEGHPFGMY

SEQ ID NO: 668 - protein, 572 aa, Escherichia coli
MKQTVAAYIAKTLESAGVKRIWGVTGDSLNGLSDSLNRMGTIEWMSTRHEEVAAFAAGAEAQLSGELAVCAGSCGPGNLHLINGLFDCHRNHVPVLAIAAHIPSSEIGSGYFQETHPQELFRECSHYCELVSSPEQIPQVLAIAMRKAVLNRGVSVVVLPGDVALKPAPEGATMHWYHAPQPVVTPEEEELRKLAQLLRYSSNIALMCGSGCAGAHKELVEFAGKIKAPIVHALRGKEHVEYDNPYDVGMTGLIGFSSGFHTMMNADTLVLLGTQFPYRAFYPTDAKIIQIDINPASIGAHSKVDMALVGDIKSTLRALLPLVEEKADRKFLDKALEDYRDARKGLDDLAKPSEKAIHPQYLAQQISHFAADDAIFTCDVGTPTVWAARYLKMNGKRRLLGSFNHGSMANAMPQALGAQATEPERQVVAMCGDGGFSMLMGDFLSVVQMKLPVKIVVFNNSVLGFVAMEMKAGGYLTDGTELHDTNFARIAEACGITGIRVEKASEVDEALQRAFSIDGPVLVDVVVAKEELAIPPQIKLEQAKGFSLYMLRAIISGRGDEVIELAKTNWLR

SEQ ID NO: 669 - protein, 407 aa, Zea mays
MAAPTTSRRGPGGARNMDDENLTFETSPGVEVVSSFDQMGIKDDLLRGIYGYGFEKPSAIQQRAVLPIINGRDVIAQAQSGTGKTSMISLTVCQIVDTAVREVQALILSPTRELASQTERVMLAIGDHLNVQVHACIGGKSIGEDIRRLENGVHVVSGTPGRVCDMIKRRTLRTRAIKLLVLDEADEMLSRGFKDQIYDVYRYLPPELQVVLISATLPHEILEMTSKFMTEPVRILVKRDELTLEGIKQFFVAVEKEEWKFDTLCDLYDTLTITQAVIFCNTKRKVDWLTEKMRTNNFTVSAMHGDMPQQERDAIMGEFRSGATRVLITTDVWARGLDVQQVSLVINYDLPNNRELYIHRIGRSGRFGRKGVAINFVRKDDIRILRDIEQYYSTQIDEMPMNVADLI

SEQ ID NO: 670 - protein, 407 aa, Zea mays; identical to SEQ ID NO: 669

SEQ ID NO: 671 - protein, 466 aa, Arabidopsis thaliana
MFIAMADFKILLLILILISLFELDLLHFHHDFFSPFPVKIGLLLISIFFYAYSTTRSKPVYLVDFSCHQPTDSCKISSETFFNMAKGAQLYTDETIQFMTRILNRSGLGDDTYSPRCMLTSPPTPSMYEARHESELVIFGALNSLFKKTGIEPREVGIFIVNCSLFNPNPSLSSMIVNRYKLKTDVKTYNLSGMGCSAGAISVDLATNLLKANPNTYAVIVSTENMTLSMYRGNDRSMLVPNCLFRVGGAAVMLSNRSQDRVRSKYELTHIVRTHKGSSDKHYTCAEQKEDSKGIVGVALSKELTVVAGDSLKTNLTALGPLVLPLSEKLRFILFLVKSKLFRLKVSPYVPDFKLCFKHFCIHAGGRALLDAVEKGLGLSEFDLEPSRMTLHRFGNTSSSSLWYELAYVEAKCRVKRGDRVWQLAFGSGFKCNSIVWRALRTIPANESLVGNPWGDSVHKYPVHVT

SEQ ID NO: 672 - protein, 206 aa, Arabidopsis thaliana
MPSRRRTLLKVIILGDSGVGKTSLMNQYVNKKFSNQYKATIGADFLTKEVQFEDRLFTLQIWDTAGQERFQSLGVAFYRGADCCVLVYDVNSAKSFEDLNNWREEFLIQASPSDPENFPFVVIGNKIDVDGGSSRVVSEKKARAWCASKGNIPYYETSAKVGTNVEDAFLCITTNAMKSGEEEEMYLPDTIDVGTSNPQRSTGCEC

SEQ ID NO: 673 - protein, 206 aa, Arabidopsis thaliana; identical to SEQ ID NO: 672

SEQ ID NO: 674 - protein, 114 aa, Lycopersicon esculentum
MEMFGKIACFVVFCMVVVAPHAESLSCGEVTSGLAPCLPYLEGRGPLGGCCGGVKGLLGAAKTPEDRKTACTCLKSAANSIKGIDTGKAAGLPGVCGVNIPYKISPSTDCSTVQ

SEQ ID NO: 675 - protein, 553 aa, Arabidopsis thaliana
MDVSNTMLLVAVVAAYWLWFQRISRWLKGPRVWPVLGSLPGLIEQRDRMHDWITENLRACGGTYQTCICAVPFLAKKQGLVTVTCDPKNIEHMLKTRFDNYPKGPTWQAVFHDFLGQGIFNSDGDTWLFQRKTAALEFTTRTLRQAMGRWVNRGIKLRFCPILETAQNNYEPVDLQDLILRLTFDNICGLAFGKDTRTCAPGLPENGFASAFDRATEASLQRFILPEFLWRLKKWLGLGLEVSLSRSLGEIDGYLDAVINTRKQELLSQRESGVQRHDDLLSRFMKKKDQSYSETFLRHVALNFILAGRDTSSVALSWFFWLITTHPTVEDKIVREICSVLIETRGTDVSSWTAEPLEFDEVDRLVYLKAALSETLRLYPSVPEDSKHVVNDDILPDGTFVPAGSSVTYSIYAAGRMKSTWGEDCLEFKPERWISPDDGKFVNHDQYRFVAFNAGPRICLGKDLAYLQMKTIAAAVLLRHRLTVAPGHKVEQKMSLTLFMKNGLLVNVHKRDLEVMMKSLVPKERNDVVVLNGKCNGGIGEGVAVNAAVAVAV

SEQ ID NO: 676 - protein, 201 aa, Arabidopsis thaliana
MNSLAIRVSKVLRSSSISPLAISAERGSKSWFSTGPIDEGVEEDFEENVTERPELQPHGVDPRKGWGFRGVHRAIICGKVGQAPLQKILRNGRTVTIFTVGTGGMFDQRLVGATNQPKPAQWHRIAVHNEVLGSYAVQKLAKNSSVYVEGDIETRVYNDSISSEVKSIPEICVRRDGKIRMIKYGESISKISFDELKEGLI

SEQ ID NO: 677 - protein, 113 aa, Escherichia coli
MTMNITSKQMEITPAIRQHVADRLAKLEKWQTHLINPHIILSKEPQGFVADATINTPNGVLVASGKHEDMYTAINELINKLERQLNKLQHKGEARRAATSVKDANFVEEVEEE

SEQ ID NO: 678 - protein, 124 aa, Synechocystis sp. PCC 6803
MSTLYEKLGGTTAVDLAVDKFYERVLQDDRIKHFFADVDMAKQRAHQKAFLTYAFGGTDKYDGRYMREAHKELVENHGLNGEHFDAVAEDLLATLKEMGVPEDLIAEVAAVAGAPAHKRDVLNQ

SEQ ID NO: 679 - protein, 316 aa, Zea mays
MPLIDAAASAVAPPPPRRVAQLRFFSTRRPGILSLTATSCSPSPPPPVAAEVPAPPQEAKSKPRPRRYPKQYPGESVGVAEEMRFVAMRLRNPKRTTIKDKSGTEDADAGAGVSEGEAEEDDGGGVKEEHEEEDEGELEEGEWMPSMEGFVRYLVDSRLVFGTIERVVAESTDVAYVYFRKSGLERSASISKDLEWFRKQGIAIPEPSTSGSTYAAYLTELAESNAPAFLSHYYNIYFAHITGGVTIGNKICEKILEGRDLEFYKWDTDAELLLKDAREKLNELSKHWTRKDRNLCLKEAAKCFQYLGKMVRLIIL

SEQ ID NO: 680 - protein, 245 aa, Arabidopsis thaliana
MAKVSFKDSLKALEADIQHANTVALDYPREKDGARVQMRLSYTPAAQFLLFLVQWTDCHLAGTLGLLRVLIYMTYADGKTTMSVYERKTSIKDFYAVIFPSLLQLERGITDLDDRKQKEVCKIRYRNKDETEKVKLSEIDIEREEECGICMEMNNMVVLPNCTHSLCIKCYRDWHGRSESCPFCRDSLKRVNSGDLWMLMEKSDTVNMYTIERENKKRLFVYIEKLPLVVPDQVFASSPYDCHVK

SEQ ID NO: 681 - protein, 366 aa, Agrobacterium tumefaciens
MAYDQKRVVDAIRAFEAGEIVVVTDDDDRENEGDLIISAVHCTPEKMALIVRHTSGIVCAPMPREEAKRLNLNAMVAENDSAHTTAFTVSVDFKHGTTTGISADDRTLTVRNLANPNVGASDFTRPGHIFPLISREGGVLMRSGHTEAAVDLCRLAGLPPIGVISELVNDDGSVMRGPQVLDFADKHGMKHVSVADLIAYRQRKETLVEMESSFTIETPFGPAMAQTYSLPWDPMQHMAVIFGDIRDGVDIPVRLHTENVADDVFGDRQPVRHYMQKIAEEGRGVIVYLREGSVGVGQVAGRRKARDPDEAHAQARSRENEWLEIGLGAQILKDLGISSIKLLTTRERHYVGLEGFGIQISATDIC

SEQ ID NO: 682 - protein, 92 aa, Arabidopsis thaliana [sequence omitted]

SEQ ID NO: 683 - protein, 278 aa, Zea mays
MSRLLPPVLSPLPAFSLPPPLLPRIHIRTSAVRGGAAENAMASGTTARERRLVKVREERRRREYDREHTYPGWAKVLENACRDDEELRAILGDSIGNPELMKQRIQERVRKKGRAQFNKSKTGSIVAFKVSFRDFNPLNSFIWFELFGEPTDRDVDLLGGVVQAWYVMGRLGAYNSSNLQLANSMMDYDPSYDSEEASTVMPSSFHDISDVEFQDNWARVWVDLGTSDYLGLDVLLNCLTQLSSEHLGIKQVVFGGKKMGDWEEGMTSSDYGYKHFKI

SEQ ID NO: 684 - protein, 140 aa, Zea mays; identical to SEQ ID NO: 483

SEQ ID NO: 685 - protein, 274 aa, Zea mays
MGSRRYDIDTRRCGIHSRPTKSMYLDAQQIVSCQTRVGDHDVGSCAVKHHFPSPIVSWIEDLSSFGNASFNPVSEYVDEQARASVGQSSASSNLHDMQISVRLTAEFMELAKENTSNNLETCGILGASFRDGTYFVTMLIIPKQEGTAHSCQAVSEEEIHAVLSEQSLYPAGWIHTHPSQTCFLSSIDLHTQYSYQVMLPEAVAIVVAPTDPTRSYGIFRLTEPGGMDVLRECDESGFHTHRETTNGSPIYETCSKVHFNPNLRFEIVDLRSAQ

SEQ ID NO: 686 - protein, 302 aa, Zea mays
MLGLRRLPAVSGRLAPEVTSVSAASSHSAVFFRTLQILVQQGPVRLQKLSAPDTGIVELRLERPEAKNAIGKEMLQGLRSAIQEVEADTAANVVLVTSSVPKVFCAGADLKERRLMGPSEVRDFVNSLRSTFSSFEALSIPTIAVVEGVAFGGGLELALSCDLRICGKDAKFSLPETGLAIIPGAGGTQRLPRIVGRSRAKELIFTGRRFDAVEAVTMGVVNYCVPAGDAYQKALELAREINQKGPLAVKMAKKAIDQGAEVDLPSALAVEEECYQQVLHTEDRLEGLAAFAEKRKPIYKGK

SEQ ID NO: 687 - protein, 499 aa, Zea mays
MYRAAGSHLRSLKHHGASRLASTSVAKQSSGGLFSWLLGGKSSELPPLDVPLPGISIPSPLPDFVEPSKTKVTTLPNGVKIASETSSSPAASVGLYIDCGSIYETPASSGVSHLLERMAFKSTVNRTHLRLVREVEAIGGNVSASASREQMSYTYDALKSYTPEMVEVLIDSVRNPAFLDWEVKEQLQNIKSEIADASANPQGLLLEALHSVGYSGALAKPLMASESAVNRLDVSSLEEFVAEHYTAPRMVLAASGVDHDALISVVEPLLSDLPCVKRPEEPKSVYVGGDYRCQADSPNTHIALAFEVPGGWNQEKTAMVVTVLQMLMGGGGSFSAGGPGKGMHSRLYLRVLTNFQQIESFSAFNSVYNNSGLFGIYAVTSPDFSSKAVDLAAGELLEIATPGKVTQEQLDRAKEATKSAVLMNLESRSIASEDIGRQVLTYGERKPIEYFLKTVEEITLNDILSTAKEMMSTPLTMASWGDVIHVPSYESVSRKFHSK

SEQ ID NO: 688 - protein, 337 aa, Glycine max
MSEAPPPPTADASPPPYWCYHCEKRVSVETLANLPDVVCGECKNGFVESMPTPSRSRSPSASSDDPYFGSQFLQVLRLIAQSARDDDASPPPPPSRSPENDFLRIELGGWDNDEENENDDDNGDEEFEEHEEAEDRSGNEDPHGGDDEDLRRRRRELLRLRIRDLATRTRSMRNRILDWAEILMGLEDNSIEFRLQLPESDRYVGNPEDYVDAAEYEALLQTLAESDGGGRRGAPPASKAALEALPTVKIASESEAVACAICKDLLGVGDAAKRLPCGHRYHGDCIVPWLSSRNSCPVCRFELPTDDKEYEEERVVIAASSNSNGASSSGGGGSAIV

SEQ ID NO: 689 - protein, 337 aa, Glycine max; identical to SEQ ID NO: 688

SEQ ID NO: 690 - protein, 447 aa, Bacillus halodurans
MNHRYLPMTTDDRQEMLQAIGVDSIEELFSDIPQDIRFKGKLNIPNALKEPELIRYFQQLANENVHLKDKASFLGAGVYDHYIPSIVDHVISRSEFYTAYTPYQPEISQGELQAIFEFQTMICELTGMEVANSSMYDGPTALAEAAMMSCGHTKKKKILVSKAVHPEARDVLMTNAYGQRLEVVEIDTNNGVTDVEHLKALYDEETACVIVQHPNFFGRLEPLAEIESVSHQGKATFVVSSNPLALGLLKPPGAFGADVVVGDAQPFGIPTQYGGPHCGYFATTKKLMRKVPGRLVGQTTDDQGQRGFVLTLQAREQHIRREKATSNICSNQALNALAAAVAMATIGKRGVKEMALQNVQKAAYAKSQLKANGVEIVAEGPCFNEFIIKLSSPLHEVEEALLAKGFIAGYDLGKVYPELEGHMLVAVTEVRTKEEIDQFAKEVGMFA

SEQ ID NO: 691 - protein, 447 aa, Bacillus halodurans; identical to SEQ ID NO: 690

SEQ ID NO: 692 - protein, 170 aa, Arabidopsis thaliana
MAMRLKSMATLPKLIQSMRKEVPKHSNPVLPSLRRAFSLYDQINLIDNVPEDQLRFQEFNDTSFTVNGVKYEGSLLCVGNLLMSWSPRKFSEITTDSLSIFQTVRPIPELLIVGCGRDIHPVTPEVRQFVKSLGMKLETVDSRNAASTYNILNEEGRVVAAALLPYGVTS

SEQ ID NO: 693 - protein, 170 aa, Arabidopsis thaliana; identical to SEQ ID NO: 692

SEQ ID NO: 694 - protein, 322 aa, Arabidopsis thaliana
MWFFGSKGASGFSSRSTAEEVTHGVDGTGLTAIVTGASSGIGVETARVLSLRGVHVVMAVRNTDSGAKVKEDIVKQVPGAKLDVMELDLSSMQSVRKFASEYKSTGLPLNLLINNAGIMACPFMLSKDNIELQFATNHLGHFLLTKLLLDTMKSTSRESKREGRIVNLSSEAHRFSYPEGVRFDKINDKSSYSSMRAYGQSKLCNVLHANELTKQLKEDGVNITANSLHPGAIMTNLGRYFNPYLAVAVGAVAKYILKSVPQGAATTCYVALNPQVAGVSGEYFQDSNIAKPLPLVKDTELAKKVWDFSTKLTDSQSGESSS

SEQ ID NO: 695 - protein, 435 aa, Zea mays
MPVPKPMERKQAAYSNLDERYAIQGEKYQGQQYSHIYFTRLHHMRNLLHALVPSWKPQLPVTTVLGLEEGKDCIIVGTLYKHMKLKPSILDEYAKERSAIPLVKPHNFMHPDDHLILEDESGRVTLAGAIPPAAFVTGVVVALHGKETSAGNFLVEDVLEAGLPPQSALSSAEEDKYVVFISGLSVGSDTFNPLQFQLLIDHVTGHLGDENEQSIASNIVRIVVVGNSVHISPRFVNGQTVPSKDQSRIAEPIKELDIMLTQLVASLPVDMMPGCHDPANFSLPQQPLHRCLFSGASTYNTFSSCSNPHQFELDSVQFLGTSGQNIDDLYKYSDAKDKLEFMERTLRWRHLAPTAPNSLGCYPYTDKDPFLVESCPHVYFVGNQDKYETRLLEGQEKQKVRLISIPRFSESGVAVMLNLRNLECSTLSFSTSFDA

SEQ ID NO: 696 - protein, 259 aa, Glycine max
MHKLGRGHRDKLQQFITITGASEKLALQALKASDWHLEGAFDFFYSQPQLKTFTDSRHLEELYNRYKDAYVDMILADGITLLCNDIQVDPQDIVMLVLSWHMKAGTMCEFSKKEFIEGLQSLGIDSLEKFREKIPYMRSELKDEQKFREIYNFAFGWAKEKGQKSLALDTAIGMWQLLFAEKQWPLVDHWCQFLQARHNKAISRDTWSQLLEFAKTVGSNLSDYDAEGAWPYLIDEFVEYLNENGIIQNDLINDSSLKR

SEQ ID NO: 697 - protein, 471 aa, Arabidopsis thaliana
MILKKVWGSVWNRSNSGKDLVNHQRAIDVPPLLLSSSSSLGAFDQLPMDILVQILMMMEPKDAVKLGLTCKAWKCVASGNRLWIFYLQCSQEPWDSIFFAETSLRSGYPLRMISSQSGELSFMHIYSQRAQVPGSIIIDGGSGYCKFGWSKYASPSGRSATFLEFGNIESPIYARLQQFFATIFTRMQVKPSMQPIVVSLPLCHFDDTESAKASRRQLKTAIFNVLFDMNVPAVCAVNQAVLALYAARRTSGIVVNIGFQVITILPILHGKVMRQVGVEVIGFGALKLTGFLKEKMQENNISFQSLYTVRTLKEKLCYVALDYKAELSKDTQASVEVSGEGWFTLSKERFQTGEILFQPRLAGMRAMSLHQAVSLCMDHCDAAGLTGDDSWFKTVVLTGGSACLPGLSERLERELQDHLPSSISNGIRVIPPPYGVDTSWHGAKLISNLSIFPGPWCITRKQFRRKSRLMW

SEQ ID NO: 698 - protein, 481 aa, Bacillus halodurans
MALQTEQFNANILRNGEWVESRTGERISISAPASGVALGSIPALSQEEVNDAIQGAKDAQKIWKIRPIHERVDLLYAWADLLEERKEIIGELIMHEVAKPKKSAIGEVSRTADIIRHTADEALRLNGETLKGDQFKGGSSKKIALVEREPLGVVLAISPFNYPVNLAAAKIAPALVTGNTVVFKPATQGSLSGIKMVEALADAGAPEGIIQVVTGRGSVIGDHLVEHPGIDMITFTGGTTTGERISEKAKMIPVVLELGGKDPAIVLDDADLKLTASQIVSGAFSYSGQRCTAIKRVFVQDSVADQLVANIKELVEQLTVGSPEDDADITPVIDEKSAAFIQGLIDDALENGATLLSGNKRQGNLLSPTLLDDVTPAMRVAWEEPFGPVLPIIRVKDANEAISLSNQSDYGLQASIFTKDTDRAINIGKHLEVGTVHINAKTERGPDHFPFLGVKKSGLGVQGIKPSLLSMTRERVTVLNL

SEQ ID NO: 699 - protein, 96 aa, Arabidopsis thaliana
MEIESHVSVPGKNLVKVEFKLGTESYTIDSIKGDTVLDQLVSMKEESMKILKDFITKHNVPDDDVPDQILSDDEEGDDDDASPVICPVKPPKKTKI

SEQ ID NO: 700 - protein, 441 aa, Arabidopsis thaliana
MGNSEMSASEVAAAKQKNVDDWLPITSSRNAKWWYSAFHNVTAMVGAGVLSLPYAMSNLGWGPGVTIMVMSWIITLYTLWQMVEMHEIVPGKRLDRYHELGQHAFGEKLGLWIVVPQQLIVEVGVDIVYMVTGGASLKKVHQLVCPDCKEIRTTFWIMIFASVHFVISHLPNFNSISIISLAAAVMSLTYSTIAWAASVHKGVHPDVDYSPRASTDVGKVFNFLNALGDVAFAYAGHNVVLEIQATIPSTPEMPSKVPMWRGVIVAYIVVAICYFPVAFLGYYIFGNSVDDNILITLEKPIWLIAMANMFVVIHVIGSYQIFAMPVFDMLETVLVKKMNFNPSFKLRFITRSLYVAFTMIVAICVPFFGGLLGFFGGFAFAPTTYYLPCIMWLVLKKPKRFGLSWTANWFCIIVGVLLTILAPIGGLRTIIINAKTYKFFS

SEQ ID NO: 701 - protein, 155 aa, Arabidopsis thaliana
MHYMGLFSRAGNIFRQPRALQASNAMLQGNLSLTPSKIFVGGLSPSTDVELLKEAFGSFGKIVDAVVVLDRESGLSRGFGFVTYDSIEVANNAMQAMQNKELDGRIIGVHPADSGGGGGGGGFARRGGYGGGRGGYARGGFGRGGFGGGGYGFVR

SEQ ID NO: 702 - protein, 155 aa, Arabidopsis thaliana; identical to SEQ ID NO: 701

SEQ ID NO: 703 - protein, 484 aa, Sinorhizobium meliloti
MNLKDPSLFRQAALVGETWIEADPKNAIEVNNPATGEIIGRVPKLGAADTRTAIEAAARVQKEWAARTAKERSAVLRRWFELMIENKDDLGRILTMEQGKPLAEATGEIVYGASFIEWFAEEARRVYGDLVPGHQKDKRILVMKQPIGVVAAITPWNFPNAMITRKAGPALAAGCAMVLKPAAQTPFSAIAIAVLAERAGMPKGLFSVITGSAREIGAEMTSNPTVRKLTFTGSTEVGAELYRQSAATIKKLGLELGGNAPFIVFDDADLDAAVEGALIAKFRNNGQTCVCANRIYVQDGVYEAFSDKLAQAVAKLKTGNGMEDGVILGPLIDQPALKKVEEHVADALAKGARVVQGGRRHSLGGTFYEATVLADVTQAMAVAREETFGPVAPLFRFKDESDVIAQANDTEFGLASYFYAKDLARVFRVAEALEYGMVGVNTGLISTAEAPFGGVKLSGLGREGSKYGIEEFMEIKYVCLGGIA

SEQ ID NO: 704 - protein, 484 aa, Sinorhizobium meliloti; identical to SEQ ID NO: 703

SEQ ID NO: 705 - protein, 335 aa, Saccharomyces cerevisiae
MASSMLSSATMVASPAQATMVAPFNGLKSSAAFPATRKANNDITSITSNGGRVNCMQVWPPIGKKKFETLSYLPDLTDSGGRVNCMQAMAKLVLVRHGQSEWNEKNLFTGWVDVKLSAKGQQEAARAGELLKEKKVYPDVLYTSKLSRAIQTANIALEKADRLWIPVNRSWRLNERHYGDLQGKDKAETLKKFGEEKFNTYRRSFDVPPPPIDASSPFSQKGDERYKYVDPNVLPETESLALVIDRLLPYWQDVIAKDLLSGKTVMIAAHGNSLRGLVKHLEGISDADIAKLNIPTGIPLVFELDENLKPSKPSYYLDPEAAAAGAAAVANQGKK

SEQ ID NO: 706 - protein, 159 aa, Arabidopsis thaliana
MGKARTVGVGMDYSPTSKLALRWAAENLLEDGDTVILIHVQPQNADHTRKILFEETGSPLIPLEEFREVNLSKQYGLAYDPEVLDVLDTLSRAKKVKVVAKVYWGDPREKLCDAVENLKLDSIVLGSRGLGSLKRILLGSVSNHVVTNATCPVTVVKAN

SEQ ID NO: 707 - protein, 67 aa, Arabidopsis thaliana
MTEWLPVVVATVLFVVLSPGLLFQVPGNNNFVDFGKMETSGYSILLHAFLYFGLVTVFTVVIHFPGT

SEQ ID NO: 708 - protein, 67 aa, Arabidopsis thaliana; identical to SEQ ID NO: 707

SEQ ID NO: 709 - protein, 828 aa, Escherichia coli
MKLSRRSFMKANAVAAAAAAAGLSVPGVARAVVGQQEAIKWDKAPCRFCGTGCGVLVGTQQGRVVACQGDPDAPVNRGLNCIKGYFLPKIMYGKDRLTQPLLRMKNGKYDKEGEFTPITWDQAFDVMEEKFKTALKEKGPESIGMFGSGQWTIWEGYAASKLFKAGFRSNNIDPNARHCMASAVVGFMRTFGMDEPMGCYDDIEQADAFVLWGANMAEMHPILWSRITNRRLSNQNVTVAVLSTYQHRSFELADNGIIFTPQSDLVILNYIANYIIQNNAINQDFFSKHVNLRKGATDIGYGLRPTHPLEKAAKNPGSDASEPMSFEDYKAFVAEYTLEKTAEMTGVPKDQLEQLAQLYADPNKKVISYWTMGFNQHTRGVWANNLVYNLHLLTGKISQPGCGPFSLTGQPSACGTAREVGTFAHRLPADMVVTNEKHRDICEKKWNIPSGTIPAKIGLHAVAQDRALKDGKLNVYWTMCTNNMQAGPNINEERMPGWRDPRNFIIVSDPYPTVSALAADLILPTAMWVEKEGAYGNAERRTQFWRQQVQAPGEAKSDLWQLVQFSRRFKTEEVWPEDLLAKKPELRGKTLYEVLYATPEVSKFPVSELAEDQLNDESRELGFYLQKGLFEEYAWFGRGHGHDLAPFDDYHKARGLRWPVVNGKETQWRYSEGNDPYVKAGEGYKFYGKPDGKAVIFALPFEPAAEAPDEEYDLWLSTGRVLEHWHTGSMTRRVPELHRAFPEAVLFIHPLDAKARDLRRGDKVKVVSRRGEVISIVETRGRNRPPQGLVYMPFFDAAQLVNKLTLDATDPLSKETDFKKCAVKLEKV

SEQ ID NO: 710 - protein, 847 aa, Escherichia coli
MSKVRLAIIGNGMVGHRFIEDLLDKSDAANFDITVFCEEPRIAYDRVHLSSYFSHHTAEELSLVREGFYEKHGIKVLVGERAITINRQEKVIHSSAGRTVFYDKLIMATGSYPWIPPIKGSDTQDCFVYRTIEDLNAIESCARRSKRGAVVGGGLLGLEAAGALKNLGIETHVIEFAPMLMAEQLDQMGGEQLRRKIESMGVRVHTSKNTLEIVQEGVEARKTMRFADGSELEVDFIVFSTGIRPRDKLATQCGLDVAPRGGIVINDSCQTSDPDIYAIGECASWNNRVFGLVAPGYKMAQVAVDHILGSENAFEGADLSAKLKLLGVDVGGIGDAHGRTPGARSYVYLDESKEIYKRLIVSEDNKTLLGAVLVGDTSDYGNLLQLVLNAIELPENPDSLILPAHSGSGKPSIGVDKLPDSAQICSCFDVTKGDLIAAINKGCHTVAALKAETKAGTGCGGCIPLVTQVLNAELAKQGIEVNNNLCEHFAYSRQELFHLIRVEGIKTFEELLAKHGKGYGCEVCKPTVGSLLASCWNEYILKPEHTPLQDSNDNFLANIQKDGTYSVIPRSPGGEITPEGLMAVGRIAREFNLYTKITGSQRLAMFGAQKDDLPEIWRQLIEAGFETGHAYAKALRMAKTCVGSTWCRYGVGDSVGLGVELENRYKGIRTPHKMKFGVSGCTRECSEAQGKDVGIIATEKGWNLYVCGNGGMKPRHADLLAADIDRETLIKYLDRFMMFYIRTADKLTRTAPWLENLEGGIDYLKAVIIDDKLGLNAHLEEEMARLREAVLCEWTETVNTPSAQTRFKHFINSDKRDPNVQMVPEREQHRPATPYERIPVTLVEDNA

SEQ ID NO: 711 - protein, 508 aa, Zea mays
MSTNKGSAAKGGGGKKKEVKKETKLGMAYKKDDNFGEWYSEVVVNSEMIEYYDISGCYILRPWAMEIWELLKEFFDAEIKKLKLKPYYFPLFVTENVLQKEKDHIEGFAPEVAWVTKSGKSDLEAPIAIRPTSETVMYPYFSKWIRSHRDLPLRCNQWCNVVRWEFSNPTPFIRSREFLWQEGHTAFATKEEADEEVLQILELYRRIYEEFLAVPVSKGRKSEMEKFAGGLYTTSVEAFIPNTGRGIQGATSHCLGQNFAKMFDITFENEKGVREMVWQNSWAYTTRSIGVMVMTHGDDKGLVLPPKVAPIQVIVIPVPYKDADTTAIKGACESTVYTLDQSGIRADQDTRENYSPGWKYSHWEMKGVPLRIEIGPKDLANKQVRVVRRDNGAKVDIPVTNLVEEVKVLLDEIQKNLFKTAQEKRDACVHVVNTWDEFTTALNNKKLILAPWCDEEEIEKDVKTRTKGELGAAKTLCTPFEQPELPEGTLCFASGKPAKKWSFWGRSY

SEQ ID NO: 712 - protein, 94 aa, Arabidopsis thaliana
MSSSRRSRQASSSSRISDDQITDLISKLRQSIPEIRQNRRSNTVSASKVLQETCNYIRNLNKEADDLSDRLTQLLESIDPNSPQAAVIRSLING

SEQ ID NO: 713 - protein, 227 aa, Arabidopsis thaliana
MVGVSPKIAPSMLSSDFANLAAEAKRMIDLGANWLHMDIMDGHFVSNLTIGAPVIESLRKHTNAYLDCHLMVTNPMDYVDQMAKAGASGFTFHVEVAQENWQELVKKIKAAGMRPGVALKPGTPVEQVYPLVEGTNPVEMVLVMTVEPGFGGQKFMPSMMDKVRALRNKYPTLDIEVDGGLGPSTIDAAAAAGANCIVAGSSVFGAPKPGDVISLLRASVEKAQPST

SEQ ID NO: 714 - protein, 422 aa, Zea mays
MGMFFSKAEPPPPMVLVPPLFDYPPIAARTRMAVPAYELMFGKVSLHNLFEDYFDQAGNMTSRIMLKPLEDPHVDLIATVSAAADRNSGTEVKGDALFRWQRELDDPHTFVDLLVSTSNPLLQLRLCAYHPKYRIGAFGTLPLLMGNRVRSEDYGVMGVRYGSENLSVGASFVPISLSSEVPFGAWLVGRKGSLSAGVQYKPLSGSKYPMPFTELENWNYAISYGVGSTSPLSPSFIFSLELARSTQLTASFYQHLVVQRRVKNPFEDDQVVGITNYIDFGLELAARVDKDKVSGDGNSFQLAGSWQANKNFLLKGKLGPSTSSVALAFKSWWRPSFTFSVTAVNDHSKGTTSYGFGLRVEDLRRASYQRADPNYVMLTPSKEHLAPGVLREYGKRPMFQTQIDSGNYDHLPTELKPLGRIF

SEQ ID NO: 715 - protein, 237 aa, Arabidopsis thaliana
MKKTNFVSSASGGDPMIRLTFVQVLELEKELEIKRKRLEMIKQKRLTLKSEVRFLRRRYEHLKQDQTLETSPEMLRLSESGGLEVPRKPSGERKKQSGVRASVPCFDLKLKNTICNEKEALANNVASCDLDKKRKRSRGSDVLTFPVSLPDLNGEGNTSGTDKVPGFDLNQISREEEEPEVNGEHMVAEAMKNAMLDNRISDLHVERKLPICGDVEKELNRAVKRKVTWQDPVALSV

SEQ ID NO: 716 - protein, 237 aa, Arabidopsis thaliana; identical to SEQ ID NO: 715

SEQ ID NO: 717 - protein, 110 aa, Oryza sativa
  misc_feature (6)..(11): Xaa can be any naturally occurring amino acid
  misc_feature (14)..(14): Xaa can be any naturally occurring amino acid
  misc_feature (17)..(17): Xaa can be any naturally occurring amino acid
  misc_feature (19)..(19): Xaa can be any naturally occurring amino acid
  misc_feature (23)..(23): Xaa can be any naturally occurring amino acid
  misc_feature (33)..(33): Xaa can be any naturally occurring amino acid
  misc_feature (58)..(58): Xaa can be any naturally occurring amino acid
  misc_feature (63)..(63): Xaa can be any naturally occurring amino acid
  misc_feature (75)..(75): Xaa can be any naturally occurring amino acid
  misc_feature (86)..(86): Xaa can be any naturally occurring amino acid
  misc_feature (98)..(98): Xaa can be any naturally occurring amino acid
  misc_feature (103)..(103): Xaa can be any naturally occurring amino acid
MRTMVXXXXXXPAXAVXPXHSPXPYLFGGLAAXLGLITLALLILACSYWKLNSYLGTXHSSSXAADAAAGDGGDXDGASKSPATAXAGFPVVYGDSVXVVMAXERMPTFF

SEQ ID NO: 718 - protein, 480 aa, Brucella suis 1330
MQTRYPDVKLFIDGTWRDGSRGETIEIFNPATDEVIGHIARATTADLDDALAAVDRGFEAWSKVSAFDRYKIMRRAADIFRSRGEEVARLLTMEQGKPLAEARIEAAAACDLIDWFAEEARRSYGRIVPPRQAYVMQAEVKEPVGPVAAFTPWNFPINQAVRKISAALAAGCSILLKAAEDTPAAPAELVRAFAEAGLPDGAINLVYGDPAEISAYLIPHPVIRKVSFTGSTQVGKQLAALAGLHMKRVTMELGGHAPVIIAADADVEQAIKVVSGSKFRNAGQVCISPTRFLIENSVYDQVVEGMAAYATSLKVGDGLEAGTTMGPLVNAKRVNAMERLVQDAREHKARVVTGGERIGNRGNFFEPTILADVPRDATIMNEEPFGPVALLNRFDALDEALSEANRLNYGLAAYAFTGSSAKAARISSTVRSGMITINHYGLALPEVPFGGINDSGYGTEGGADALEAYQNTKFVSFLQA

SEQ ID NO: 719 - protein, 505 aa, Desulfotalea psychrophila LSv54
MAAQFWERILMDKKAAVTERAELKKSIKPVQAWALALGAILGWGAFVLPGLRFLPQAGPLASCIGFVLGGVMLFSVAISYGNMVSKYKVTGGAFAFSFVGFGPTVAFICGWALVLGYICIIALNATAVSLLTRFVFPGVFEVGMLYSIVGWDVYAGEIAMLVGILCLCGFLNFRGADLVGKIQVFLAFALCASVFIVFGGSVSHETAAVSNLSPLFADNKSPLASIMAIVAIAPWLYVGFDTIPQAAEEFDFPHKRAEKLMLSAIGWGIVLYAMVTIAVACIMPYKELLAMNSPWATGTVANMALGRVGSVILATAVLAAIFTGINGFFIASSRLLFAMGRATILPSWFADIHPKYQTPHKAILFVLAIAVTAPFFGREVLNWVVDMSAVGTVIAYLISCLSAYKVMKHAQNKRGVMHAVLGSISSVVCILLLTVPGSPGAIGMQSWVALCLWVILGAWFYNARMGDFKALTTEEQSTLILGSSRRVFFGKGKKAPAQQPASKEA

SEQ ID NO: 720 - protein, 90 aa, Triticum aestivum
IDCGHVDSLVRPCLSYVQGGPGPSGQCCDGVKNLHNQARSQSDRQSACNCLKGIARGIHNLNEDNARSIPPKCGVNLPYTISLNIDCSRV

SEQ ID NO: 721 - protein, 568 aa, Desulfotalea psychrophila LSv54
MAQRVLIIGAVALGPKVACRLRRIDPDAEITVLDRDKLISYGGCGIPYYVGGDVSDIEGLRSTQSHTIRDSKFFGEVKGIDVRTQIEAIEILRKEKQVRIRDLRDNSEELLSYDKLVFATGASPIRPPFPGADLPNVSIVSNLHHAEAIKKRLAQGKIGKAVVIGAGAIGIEMAEALTDLWGVETTIIEMADQVLPQAIGGNLATVVQRHLEESNVEVLVSERVSGITKADDSDTLTVSITDRTIDCDIVILSTGIRPNTELAKAAGLAVGQFGGLLVDRRMRTSDPHIYAGGDCVEVRNLVSGANQMMPLGSLANRQGRIIATNINGGSAHFPGTVGTFCIKVFELGVATAGLTARQAKAAGFDPVVSIVTQADRAHFYPTYQAMYIALIADRNSRKVLGIEAVGKGGDAVKARVDAVASLLHLGVDVAEISNLEAGYAPPFASAMDIVNNAGNVLDNILNGFNKTVDPDEFLKELAETDIRVIDVRGAIQAKPYQEKFGERWLHFPQDDLRTRYTEIPTDEAFFVVCDTGTRSYEGQVVLAAKGITNTRNIQGGLALVKAIAPEFI

SEQ ID NO: 722 - protein, 137 aa, Arabidopsis thaliana
  misc_feature (91)..(91): Xaa can be any naturally occurring amino acid
  misc_feature (104)..(104): Xaa can be any naturally occurring amino acid
FFGPDHFFLRTLVEAFDWWEGPKKDNRRFFHVAYRVGDLDRPIEFYTEVLGLKLLRKRDFLGGKNSNAFLGLGPEPFNLVGELTFNYGVGXYDMGTGFGLFAIXTKDVSKLVENVRAKGGNVTGEPGPVKGGGSVIA

SEQ ID NO: 723 - protein, 326 aa, Pichia norvegensis
SVVGRPRHQGIMVGMGQKDSYVGDEAQSKRGILTLRYPIEHGIVTNWDDMEKIWHHTFYNELRVAPEEHPVLLTEAPMNPKSNREKMTQIMFETFNVPAFYVSIQAVLSLYSSGRTTGIVLDSGDGVTHVVPIYAGFSLPHAILRIDLAGRDLTDYLMKILSERGYTFSTTAEREIVRDIKEKLCYVALDYDQEIQTASQSSAIEKSYELPDGQVITIGNERFRAPEALFHPSVLGLEAAGIDQTTYNSIMKCDVDVRKELYGNIVMSGGTTMFPGIAERMQKEITALAPSSMKVKIIAPPERKYSVWIGGSILASLSTFQQMWIS

SEQ ID NO: 724 - protein, 135 aa, Legionella pneumophila subsp. pneumophila str. Philadelphia 1
MYFKYIFKEYIMTESLFERLGGQNAVNTAVDIFYRKMLMDDRVNYFFDDVDMEQQILKQKGFLTMVFGGPNQYTGKSMREGHQHLLARGLNDSHVDIVIEHLGETLKELGANEEDIQKVAAIANSVRGDVLGRSS

SEQ ID NO: 725 - protein, 326 aa, Pichia norvegensis
SIVGRPRHQGIMVGMGQKDSYVGDEAQSKRGILTLRYPIEHGIVTNWDDMEKIWHHTFYNELRVAPEEHPVLLTEAPMNPKSNREKMTQIMFETFNVPAFYVSIPAVLSLYSSGRTTGIVLDSGDGVTHVVPIYAGFSLPHAILRIDLAGRDLTDYLMKILSERGYTFSTTAEREIVRDIKEKLCYVALDYDQEIQTASQSSAIEKSYELPDGQVITIGNERFRAPEALFHPSVLGLEAAGIDQTTYNSIMKCDVDVRKELYGNIVMSGGTTMFPGIAERMQKEITALAPSSMKVKIIAPPERKYSVWIGGSILASLSTFQQMWIS

SEQ ID NO: 726 - protein, 293 aa, Sulfolobus solfataricus P2
MKILIAARGSKLSRVQVDMVGEKLRKIGIEYDVIDIKTKADLFSTEPLSKLGKGVFEKEVNEAVLEGKADVAVHSMKDILSEINPELEIFAVIERDPPYDILIAEKNLHKLDPNTTIGTSSIRRKNFIKYIRPEINTKDIRGNVDTRIRKYLSKEYDGLILAEASIKRLNISISYHRLNVYDFTPEANQGIIVVLGRKKDEKVKEVFKEITHKDTLDEALAERATISVVGGGCHSPIGVLFRKEGKEFYGIASYSDGKKKITVSISKAGDPYTIGSELGLLLKKEMKNEGIIP

SEQ ID NO: 727 - protein, 237 aa, Kluyveromyces lactis NRRL Y-1140
MVRAIIAPSILASDFTKLGCECHNVINSGADWLHIDIMDGHFVPNMSLGQPVVESLRKVIGKYNDPDTKLPRAFFDCHMMVSEPERWVEDFARIGCDQFTFHYEATKDPVALVKLIKKHGMKAACSVKPGTPVDVLYELAPSLDMALVMTVEPGFGGQKFMADMMSKVKDLRTRFPNLNIQVDGGLGKQNVELAAEAGANVIVAGTSVFRAHDPADVIGFMKTKVNDALVTKGLYEK

SEQ ID NO: 728 - protein, 431 aa, Xanthomonas oryzae pv. oryzae KACC10331
MRLPSPHFSLPAQEDTDMAHFELIEKMAPNAVIKVVGVGGGGGNAVAHMVNTNVDGVEFITANTDSQAIKNCGAKLQLQLGTNVTKGLGAGANPEVGRQAALEDRERIMDALQGADMVFITAGMGGGTGTGAAPVVAQLAKEMGILTVAVVTKPFPFEGRRRMQVALKGIEELSQHCDSLITIPNEKLITVLGRNATMIQAFRAANDVLQGAVQGIADLIVRPGLINVDFADVRTVMSEMGLAMMGTGSARGDDRAQAAAEAAIQNPLLDDVNLAGANGILVNITAGPDFTMSEFDEIGRTIEAFASEDATVVVGTVLDPDMQDEVRVTVVATGLNRAVARQPQRPDQRAPIKLVRNATTGQPEFGDFDTNSGDAVSKAVGGSMGLGLRRPSSDSAGSSSGNHTSGGSSAPAADLPNDYLDIPAFLRRQAD

SEQ ID NO: 729 - protein, 269 aa, Arabidopsis thaliana
  misc_feature (110)..(110): Xaa can be any naturally occurring amino acid
  misc_feature (125)..(125): Xaa can be any naturally occurring amino acid
  misc_feature (130)..(130): Xaa can be any naturally occurring amino acid
  misc_feature (198)..(198): Xaa can be any naturally occurring amino acid
  misc_feature (205)..(205): Xaa can be any naturally occurring amino acid
MKKTNFVSSASGGDPMIRLTFVQVLELVMELEIKRKRLEMIRQMRLTLTSEVRFLRRTYEHLRQDQTLETSPEMLRLSESGGLEVPRKPSGERKKQSGVRASVPCFDLKXSRNTISNEEEALANXVAKLXPSVKKAEKGAEVAMFCTSPVSLPAPNGGGDTSGTDKVPGFDLNQISVKPNNLCYFSVFLLVESIELYXLICVLVXREEEEPEVNGEHMVAEAMKNAMLDNRISDLHVERKLPICGDVEKELNRAVKRKVTWQDPVALSV

SEQ ID NO: 730 - protein, 483 aa, Agrobacterium tumefaciens str. C58
MKVVPMHTYPDIKLLIDGEWRDAVSGKTIAVSDPATDEIIGAIAHAEKEDLDLALAAAERGFKLWRDTSPYERSKIMRKAADILRERKDKIAYIMTREQGKPLAQSATEIMGAADTIDWFAEEARRTYGQVIPARATGVSQLAIKVPVGPVAAFTPWNFPLNQIVRKLSAALATGCSIIVKAPEETPASPAELIRAFVDAGVPAGVIGLVYGVPSEISEYLIPHPVIRKISFTGSTPIGKHLAALAGKHMKRATMELGGHAPVMIFDDADIEKAIEVTSLAKFRNAGQVCVAPTRFLVQDGVADRFLEGFVEATKAIKVGNGLEEGVIMGPLANERRIPALEGLINDAVSHGAELKTGGRRIGNKGNFFEPTVLANVPVTAKIMNDEPFGPVAIINRFSSFDDAITEANRLPFGLASYAFTGSVKTAHALGQQVEAGMLTINHNGLALPEVPFGGIKDSGYGTEGGSEAVQAYLETKFVSQMS

SEQ ID NO: 731 - protein, 421 aa, Bradyrhizobium sp. BTAi1
MRRVVVTGLGMVSPLGCGVETTWQRILQGKSGARKIETFDVSDLPAKVACQVPRGDGTDGTFNADQWMEPKDQRKVDDFIIFAMAAARQALDDADWHPSTEEDRCATGTLIGSGIGGLSGIADTAILLKERGPRKVSPFFIPGRLINLASGYVSIEHGLKGPNHSVVTACSTGAHAIGDASRLIALGDADVMVAGGTESPICRIGMAGFCAARALSTGFNETPEKASRPYDKDRDGFVMGEGAGIVVLEEYEHAKARGARIYAEVCGYGLSGDAYHITSPSPDGDGGFRSMSAAMKRAGITAADIDYINAHGTSTQVGDEIELGAVERLLGNAASRISMSSTKSSIGHLLGAAGAVEAIFSILAIRDNVAPPTINLENPSVATAIDLVPHSARKREINVALSNSFGFGGTNASVILRRVVG

SEQ ID NO: 732 - protein, 613 aa, Coccidioides immitis RS
MHELYSIKGHNSTPVRRRPSRAIGRTPKTGDHPRDLEPFFKLKGANGNNLLHSKCTTDGDNSSPGCYLSSFPASPNPAIRTSCPAHAQDIPLQFQPYTEDDDTQCTQFLHIADFGPSTSKLKDKSLLIGKCFVNGEWVDAKSGETFEVTDPSTGKLIGTCPEFTAEETQKAVDAASASFPSFRKTLARERARMLRRWYQLMMDNAEDLATLITWENGKPYADAKGEVVYAANFFEWFSEEAPRVYGDTIPSSVPGNRVMTLKEPIGVCGFITPWNFPAAMITRKIGPALAAGCTVVAKSPGETPFTANAIMELGRRAGIPKGVVNLVTALKNTQELGMCLTTHPDIRKVSFTGSTNVGKLLMKQSSSTVKKLSFELGGNAPFIVFDDCPDVDAAVAGAIASKFRSSGQTCVCANRIYVQKGIYDEFAAKFAEKVRGFKLGYGFDEGVTHGPVIHSRAVDKVTQHVRDAEAKGGKVILGGKPASELGPNFFHPTVVTGMTKDMLMASEETFGPVAGLFPFETEKDVVEWANKAEVGLAGYFYSKDIRRIYRVAEALEVGMIGVNTGIISDTASPFGGVKQSGFGREGSKYGIDEFLSVKTITFGGMGGELQGHL

SEQ ID NO: 733 - protein, 326 aa, Pichia membranifaciens
SIVGRPRHQGIMVGMGQKDSYVGDEAQSKRGILTLRYPIEHGIVTNWDDMEKIWHHTFYNELRVAPEEHPVLLTEAPMNPKSNREKMTQIMFETFNVPAFYVSIQAVLSLYSSGRTTGIVLDSGDGVTHVVPIYAGFSLPHAILRIDLAGRDLTDYLMKILSERGYTFSTTAEREIVRDIKEKLCYVALDYDQELQTASQSSAIEKSYELPDGQFITIGNERFRAPEALFHPSVLGLEAAGIDQTTYNSIMKCDVDVRKELYGNIVMSGGTTMFPGIAERMQKEITALAPSSMKVKIIAPPERKYSVWIGGSILASLSTFQQMWIS

SEQ ID NO: 734 - protein, 326 aa, Pichia membranifaciens
SIVGRPRHQGIMVGMGQKDSYVGDEAQSKRGILTLRYPIEHGIVTNWDDMEKIWHHTFYNELRVAPEEHPVLLTEAPMNPKSNREKMTQIMFETFNVPAFYVSIQAVLSLYSSGRTTGIVLDSGDGVTHVVPIYAGFSLPHAILRIDLAGRDLTDYLMKILSERGYTFSTTAEREIVRDIKEKLCYVALDYDQELQTASQSSAIEKSYELPDGQVITIGNERFRAPEALFHPSVLGLEAAGIDQTTYNSIMKCDVDVRKELYGNIVMSGGTTMFPGIAERMQKEITALAPSSMKVKIIAPPERKYSVWIGGSILASLSTFQQMWIS

SEQ ID NO: 735 - protein, 335 aa, Novosphingobium aromaticivorans DSM 12444
MAIKVAINGFGRIGRNVARAILERPDCGLELVSINDLADAKANALLFKRDSVHGAFSGEVSVDGNDLIVNGKRIQVTAERDPANLPHGANGIDIALECTGFFTNRDGGQKHLDAGAKRVLISAPAKNVDLTVVYGVNHDKLTGDHKIVSNASCTTNCLAPMAKVLHESIGIERGLMTTIHSYTNDQKILDQIHSDPRRARAAAMNMIPTSTGAAVAVGEVLPDLKGKLDGSSIRVPTPNVSVVDLTFTPKRDTSVEEVNGLLKAAAEGALKGVLGYTDEPLVSIDFNHDPHSSTIDSLETAVLEGKLVRVLSWYDNEWGFSNRMLDTAGAMAKFL

SEQ ID NO: 736 - protein, 210 aa, Brassica napus
  misc_feature (138)..(138): Xaa can be any naturally occurring amino acid
MGGFREFGGDEHSSSSSNIFHSVTAIVIWLGSVHLNVAIVISSLIFLPPSLSLLVLGLLFLLIFIPIDDRSKYGRMLARYICKHACSYFPVTLHVEDYEAFQPTRAYVFGYEPHSVWPIGAVALADLTGFMPLPNIKXVLLVLLYFYTPVLRQIWTWFGLAPASWKNFASYLDSGYSWILVPGGGQETFHMKHDVENLFLSSRRGFVRIA

SEQ ID NO: 737 - protein, 517 aa, Aspergillus nidulans FGSC A4
MLFLSVLLAFAAYLLIYQYAMTNWNHARRARLWGCSPLPRYPTDILGLATLRESLKADKEKKIPLLLQNRLKRMSAREKRPVTTFVIRQMGLDNIFTCDHGNVQAILATKFKNFELGVGRRHTLYPMFGVGIFTSDGETWSRSRALLRPQFTRDQISDLDLEESHVQQAMRAMNVDPATGWTSSIDIQAIMFRLTIDSATEFLFGESAGSQAEALRNGGTLPLNHFSGDFDLGQWYVAQRSRFEKFYWLVDNRESRAVVKRVHEYVDRFVHAVLTTAEDRIEKSQSSSYVFLEALAASTKDPIELRSQLLNILLAGRDTTASLLSWSILMLARYPEVFTKLRSVILADFGSYTSSRDKITFASLKSCRYLQYFLNEVLRLYPAVPINRRVATTATTLPKGGGPAGDKPIYLRAGQVVTYSPFVTHRRTDLWGEDAEVFNPERWVNKKVGWEYLPFNGGPRVCIGQQFALTEAGYVIVRLLQRFDAIMDCFPEREIRYGLTLTLAPADGVFVRLHAAE

SEQ ID NO: 738 - protein, 642 aa, Neisseria meningitidis MC58
MSRNQNHEEYQDDTRPLSIEEQRARLRQLIIMGKERGYITYSEINDALPDDMSDADQIDNIVSMISGLGIQVTEHAPDAEDILLSDNAAVTDDDAVEEAEAALSSADSEFGRTTDPVRMYMREMGQVDLLTREDEIIIAKKIENALKNMVQAISACPGSIAEILELIEKIRKDEIRVDEVVEAIIDPNEVLLNELGLGHLETTAPEKPSNDNSDENEDDEESEEDADEISAANLAELKQKVIGHFAQIEKDYKKMIGRLEKHHSRHKDYLAYRDAIANKLLEVRFATRQIDSLSSSLRGKVENIRKLEREIRDICLDRVHMERDYFIQNFLPEITNLEWIEEEIAKGRVWSDALDRFRHAILEKQTELADMEKETRISIEELKEINKNMVSSEKETAAAKQEMIQANLRLVISIAKKYTNRGLQFLDLIQEGNIGLMKAVDKFEYRRGYKFSTYATWWIRQAITRSIADQARTIRIPVHMIETINKMNRISRQHLQETGEEPDSAKLAELMQMPEDKIRKIMKIAKEPISMETPIGDDDDSHLGDFIEDANNVAPADAAMYTSLHEVTKEILESLTPREAKVLRMRFGIDMNTDHTLEEVGRQFDVTRERIRQIEAKALRKLRHPTRSDRLRSFLDSEDSKL

SEQ ID NO: 739 - protein, 161 aa, Vibrio angustum S14
MEYNTSELCDIYLEHVDVVEPMFSSYGGRSSFGGQITTIKCFEDNGVIRQVLEQSGVGRVLLIDGGGSLRRALIDIDLAHLAQENEWEGLIIYGCVRHVDELDELDLGIQALASTPVGADQRDIGEIDVAVNFGGVTFLPEDHIYADNTGVILSPEPLDID

SEQ ID NO: 740 - protein, 253 aa, Azospirillum brasilense
MINVTIPSIEPELKPRITVFGVGGAGGNAVNNMIKSNLEGVDFVVGNTDAQALKGSLCEKRVQLGTTMTRGLGAGSKPDVGRASAEEQLEEIIGHLEGANMVFITAGMGGGTGTGAAPVIARAARERGLLTVGVVTKPFHFEGAHRMRLAESGIAELQQYVDTLIIIPNQNLFRIANEKTTFADAFKMADDVLHSGVRGVTDLMVMPGLINLDFADIRSVMTEMGKAMMGTGEAGGERRAIEGRRGPHLQPAA

SEQ ID NO: 741 - protein, 178 aa, Triticum aestivum
FPRTSLYKKAGWYRSGIPGISSTHASEGLTKIRTGRLMSLSEQQLVDCDVNGDDEGCAGGLMDNAFEYMVRRGGLTTESSYPYRGTDGSCRRSASAASIRGYEDVPANNEAALMAAVAHQPVSVAINGGDSVFRFYDSGVLGGSGCGTELNHAITAVGYGTAGDGTKYWIMKNSWGGS

SEQ ID NO: 742 - protein, 353 aa, Guillardia theta
MTINITKTKERPVFPFTAIVGQEEMKLALTLNVIDPKIGGVIIMGDRGTGKSTTIRAITDILPEIPIVENDPFNSHPQDFDLMSDEVRSRIEKGESIPSVMKKVSMIDLPLGATEDRVCGTIDIEKALTEGVKAFEPGLLAKANRGILYVDEVNLLDDHLVDILLDSAASGWNTVEREGISIRHPARFVLVGSGNPEEGELRPQLLDRFGMHSEIRTVRDPELRVKIVEQRSEFDKNPSACLETYKNQQTEFKQRIIQAQKVLPTVELDYDLRIRISKICGELDVDGLRGDIVTNRAAKAHAAFNGKQTVTVDDIKAVITMCLRHRLRKDPLETIDSGSKVQKVFEDIFADLM

SEQ ID NO: 743 - protein, 1076 aa, Ustilago maydis 521
MECIFSDVGKSSPSCPNRTDQETMQGLLLREAISSEEQAHWKEAIKAEMDGLERMSIWEIVDKPRNTNLVDSKLGLTIKTDANLITVKYKARFCVDYDEIFAPVVPQDAIRAILAIAAQQDWELDSIDVTQAYLNANLHHDVYLKTPEGADVPKGKVYKLVKGLYGLKQSGREWNLELDAHLRSMGFSSLPCAPCVYLRGTGDSKIIIAVYVDDMLITGPDRKGVDAVKAAITTKWKITDNGRAKELLKIRISRNRQARTLTLDQRAYIESIIKQWLPKNSKSWCPMDSTPVPAPMDFVPSAALKEQYPALVGKLLCVSTPSDPTSISLSIALPVTWGQDTDATAIATYTDANWASDPNTERRSTSGSITEVSGSLPYLDESCRSQSDWEQERERGNGISLSKAARCYDTHDRGTSRGIHDLQLTPAQLNDWPIIQECDTLPHLRFVNLVLFALSSLPRSGPTLGLVATQSRCDPSIKLNASVVLSSSFSPLSIHDSTTTISVFAKSTVPTMRSVSLLRASSKAFSDTSAARCLSTSATSRLAQPAAAAATGAAKAQLSQIALSRAKDVESNWQGTSMLGGTTKNYIDGKFVESSTSSWLDVNDPSTQALLSRVPLTTKSEFEAAVANAQAAFPAWRETSLLSRQQVMFKLQALLRDHMDDIANAIVLEQGKTFADAKGDVLRGLQVVEVACGITSTLMEERIEVSKDMDTYARREPLGVTAAIAPFNFPAMIPLWSIPMATVTGNTLVLKPSERVPGASMIIAELCERAGMPKGVLNVVNGAVDIVNGICDDPRIKAISFVGSDKAGAHIYNRGTANGKRVQANLGAKNHAILMPDANKNFALNSIAGAAFGAAGQRCMALSVVVAVGEAQSWVPELVERAKQLKISGGFEEGADLGPLISPQARERVRSLTGSVEQEGGKILLDGRDFSCPDYPNGNFVGPSVIEAGPGMKAYDQEIFGPTLVVLKADTLDQAIDYINKNKYGNGAAIFTTNGATARKFEKNVNAGQLGVNVPVPVPLPMFAWSGNKGSVMGDIGFYGKSALNFYTSFKTSTSLWRSDDAQLSEKASVNMPTMS

SEQ ID NO: 744 - protein, 168 aa, Zea mays
MAAASSATSVHDFTVKDSSGKDVDLSVYRGKVLLIVNVASQCGLTNSNYTQQAQLYDKYKNQGFEILAFPCNQFGGQEPGTNEEIAQFACTRFKAEYPIFDKVDVNGNNAAPIYKFLKSSKGGLFGDSIKWNFSKFLVDKEGRVVDRYAPTTSPLSIEKDIKKLLGSS

SEQ ID NO: 745 - protein, 762 aa, Aspergillus oryzae
MASLLSMLVAKMNGHENTATNGVNTTSPPKSPTAPPEERKAPTTESSAIDEKTTGDSLTNSSGKPLADNTSTDNGTPQTSQPTPDSLKPAKEVGGSLQAQGSAAKTDLPHHPPTSSKAEGSSNNDLTNKAPSLPPLQSVDQEMRDAPDVPVSPTKLSRGREPDSRDEPAAKRTKIGGEGSAPSGFKPPGTPVAERRADAATNGDATMTRVQHKFLLKGIQSLKRMHDSRFYREPVDPEKMNIPHYPQIIRQPMDLGTIERRLKNNEYKSVKAVVDDFNLMVQNSLTFNGPDHIVAQEGQKLKSTFEKQMINCPRPDDIEERKPKKSSPKTSAARREPRTSIGQAPPRPTGGSPQATTFALGPEGLPVIRRDSTNADGRPKRSIHPPKRDLPYSTKPKKKKYQWELKFCQEVLDELHKPKHFNYAVPFYQPVDPVALNIPTYHSIIKKPMDLSTMQTKLKTGQYENAKEFELDMRLIFKNCFKFNIPGDPTYLAGQKFEEIFNSKWSQKARYLEAHEPHPEHHSGKSESESDESDEDADDSDDDEELQRLQQKIAEMTRQVEAIAQKKKKKTPPGSKKAGKLKSSTKEIKKPGSMNLPKKDKKSSIKPSKPEKQRWVTYQEKQIISNGISSLPDKKMQEALKIIQSNVPSLKGTQETEIELDIDELPNDVLLMLLRFVKKNAPQVMEDEDVATPTAMMNTAAAPKPKKNKPMSKFEQEAQINMLESNLSRFQGGGRSPDPVPSVEANESSDDSEDDSEESEEE

SEQ ID NO: 746 - protein, 260 aa, Brucella suis 1330
MSEATDVVIETRPADGVALLELNRPDALNAVNMDVRQKLAASADSLVEDPDIRVIVIAGRGGNFAAGSDVKVFAQTGAGSLLAQRMHRYWESLAHCPKPVIAAVEGYALGGGCELAMHADIIVAARTASFGQPEIKLGLMPGAGGTQRLLRAIGKYKTMLLALTGEMLPATEAEKYGLVSRLSEEGEALEEALKLARKIALMPALAAEQIKEAVMYGEDAPLETALRLERKAFQLLFDTEDKREGIDAFLTKRKPAFKGR

SEQ ID NO: 747 - protein, 237 aa, Oryza sativa
MWRRDDPAASLLPSSAFALRRLSSAANVSRFAQLKRFDRARRFAPAAAMSTSSGPKEAPANNPGLQAPSEKDPATKGYFMQQTMFRVKDPKVSLDFYSRVMGMSLLKRLDFPEMKFSLYFLGYEDVESAPTDPVKRTVWTFGQRATLELTHNWGTENDPEFKGYHNGNSDPRGFGHIGVTVHDVYKACERFERLGVEFVKKPDDGKMKGIAFIKDPDGYWIEIFDLNRIGAVTAEAS

SEQ ID NO: 748 - protein, 846 aa, Thiobacillus denitrificans ATCC 25259
MLPSPLRGLIFNVGLGFTAALLLMLAVIGLGVTQMAQLNAELERVVSVNNVKTRLASQMRDALRDRAVIMHNIVVSIDPWEKDALFLRFQRYGEQYAKDRGQLAAMLATPEEKRLMAELDAITFANQPVMFAVVEAALDENNYGALTQLQREAIPLQNRLVEALDNMTNLQRKANEVALGKTFDAYQATRTLMLVLGIFATLLATLVAVLVSRRMLTQTRQLETERQKYRTLFETNSDAVVILDDHGFTDCNPATLSMFGIDSVADFVNTPIPRLGTPMQANGVSASDHARQTIATARSTGHAVMDWQGRRADGTTFFAEIALHAMQLEGRPVIQAIMRDVSERRAAEAAKEAAREAALQMARAKSEFVANVSHEIRTPMHGILGMSSLLLKTPLDGRQREYVSTLKSSAESLLKIINDILDFSKIEAGKLAIEAVAFSPVALMQGVVALFQARALEKNLQLTLALHESPPPALLGDPTRIRQILLNLVDNAIKFTDRDHVELSGSFETLGDEVACRFSVTDSGIGMSAETQAGLFQAFSQADSSTTRRYGGTGLGLAISSQLAALMGGELTVESAPGRGSRFTLSVRLPTTDLPLAELPAPSSVELQGRILVVEDHPVNQKVLAHQLRAMGLQYTLAASGREALERLGSADFDLVLMDWQMPEMDGLEATRRIRQLPGRAGRTPVVALTANASVGFREACLAAGANDYLSKPYTEAALVALLMQWLPAPASATAEVKGSLLDRAALDARYPGNPELVGELERLFIATTKTSLATLKQAIAARNQAACRKEAHALKGAAASVMAVAVQDAAARIEACVQNADFGGAAAELAVLEALVAAYALTPAL

SEQ ID NO: 749 - protein, 1259 aa, Blastopirellula marina DSM 3645
MSAADPSLDIAWMLICAALVMLMQGGFCLLESGMARAKNSFNVALKNLIDFCVSSVIFWAFGFALMFGASYHGLFGTTNFLLEDSASPWLMAFLFFQLVFCGTATTIISGAVAERIRFQGYLLISLFVSAIIYPLFGHWAWGGAIEGTPTGWLAQLGFIDFAGSTVVHSVGGWVALAAVVVIGPRIGRFDGGEDRPISGHNLTLATFGALVLWFGWFGFNGGSTLSMNSDVPKILVNTNLAGAMGALTCLVLSKWVHKRPDVGQVMNGAIAGLVGVTASCHILAPWAAALVGAGSGLICSGVTYLLPKMKIDDVIGAVPAHACAGCFGTVALALLADPVHFGEGVTRWQQLGVQLLGVGTCFVWAFGGGYAFISLANLVMPFRVPRDHELRGLNISEHGASTELIDLLTDMQRQRNLGDFSDDVHVEPHTEVGQIAAEYNRVLAKVNCEMKQRSEAERRFREIFENAVEGIYQTTPEGFFVTANPALARMLGYPDLASLRDDIKNVATDVYVNRDRRDEFVDEIHQNGVVFNFESEIRRGDGTFAWISENASARRNQNGDVLYYEGTVEDITEHRKALQLTDEIKAAEAANEAKSTFLASMSHEIRTPLNGVIGFLDLLHTTKLDDQQGRFVELAKSSASSLLHLINDILDLSKIEAGGIELEQTEFVLTDLIESVPEMFAPQCRMTGLELNSSVATDVPQAAIGDCERIRQVLVNLFANAVKFTETGGVYLRVERERSVASSHDAIARIRFSVEDTGIGVPRSKMQRLFKAFSQVDASTTRSYGGTGLGLAICKQLVELMGGEIGVESEVGKGSTFWFTLPLQAIERSTCNLIPNIQGLRVLAVDDNHMNLQVIKEQLQSWGVEVSTAGNGRRALALLEDAAKRNVPYQLAILDHLMPELDGLRLAHLINDHQMLHETRLLMLTSYEHTIPHAELKKLEMVCLPKPVRQTRLLDALVALTGERSPKQKVEKVENQQPVRERAPLEGAILVVDDNEINRIVAKEILQSEGFQVSLAENGRQAVEKIQSGQFDLVLMDCEMPEMDGFAATRMIRNLAENGHPELANLPIVALTAQAVLGDKERCLAAGMNGYVMKPVNRSELIDTIVDCLSRKDSSVAEMDLLSLEEETDHLEEFVIDPTEIESSIDVDDLLARCGDNDDLARLILNKFRDRSTKDAAALAEEVAAGRADAVAQLAHSLKGMAANISAKQVAAAADLLEQAAKASQTEELADLFSSVVARLETCESAIDRLLAGTEIGER

SEQ ID NO: 750 - protein, 340 aa, Alnus glutinosa
MGFVSQCFCLVVMVTLGALASQLAAARSLQDASMRERHEEWMASYGRVYKDINEKQKRYKIFEENVALIESSNKDANKPYKLSVNQFADLTNEEFKASRNRFKGHICSTKSTSFKYGNVSAVPSAMDWRMKGAVTPVKDQGQCGCCWAFSAVAATEGITKLTTGELISLSEQELVDCDTSGVDQGCEGGLMDNAFTFIQHNHGLASEANYPYKGVDGTCNTNKQAIHAAEINGFEDVPANSEEALLNAVAHQPVSVAIDAGGSGFQFYSKGVFIGACGTQLDHGVTAVGYGTSDDGTKYWLVKNSWGTQWGEEGYIRMQRDVDAKEGLCGIAMKASYPTA

SEQ ID NO: 751 - protein, 318 aa, Trifolium repens
MENFPIVDMGKLNTEERKSTMEKIKDACENWGFFELVNHGISIEMMDKVEKLTKDHYKKCMEQRFKEMVSSKGLECVQSEINDLDWESTFFLRHLPFSNISEIPDLDDDYRKIMKEFAQKLENLAEELLDLLCENLGLEKGYLKKVFYGSKGPNFGTKVSNYPPCPKPDLIKGLRAHTDAGGIILLFQDDKVSGLQLLKDDQWIDVPPMRHSIVINLGDQLEVITNGKYKSVMHRVIAQTDGARMSLASFYNPSDDAIISPAPTLLKENETTSEIYPKFVFDDYMKLYMGLKFQAKEPRFEAMMKAMSSVDVGPVVSI

SEQ ID NO: 752 - protein, 314 aa, Trifolium repens
MENFPIINLENLNGEERKATMEKIKDACENWGFFELVNHGISHDLMDTVERLTKEHYRICMEQRFKDLVANKGLEAVQTEVKDMDWESTFHLRHLPESNISEVPDLTDEYRKAMKEFALKLEKLAEELLDLLCENLGLEKGYLKKAFYGSKGPTFGTKVANYPPCPKPDLVKGLRAHTDAGGIILLFQDDKVSGLQLLKDGKWVDVPPMHHSIVINLGDQLEVITNGKYKSVEHRVIAQSDGTRMSIASFYNPGSDAVIYPATTLIEENNEVYPKFVFEDYMNLYAGLKFQAKEPRFEAFKESSNVKLGPIATV

SEQ ID NO: 753 - protein, 190 aa, Arabidopsis thaliana
MVLVLALGDLHVPHRAADLPPKFKSMLVPGKIQHIICTGNLCIKEIHDYLKTICPDLHIVRGEFDEDARYPENKTLTIGQFKLGLCHGHQVIPWGDLDSLAMLQRQLGVDILVTGHTHQFTAYKHEGGVVINPGSATGAYSSINQDVNPSFVLMDIDGFRAVVYVYELIDGEVKVDKIEFKKPPTTSSGP

SEQ ID NO: 754 - protein, 453 aa, Nitrosomonas europaea ATCC 19718
MQVAEVKKVLVPDIGDFEDIPVIEIMVKPGDSVQVEDPLIVLESDKATVEVPSPYSGIIREIRVQMGSKVSKDSEILTMEVVSAESDNKTTSSQPQPSAGSQPAQPTRPIETGAGQSEEEPAAKPAATTTKPATPSAPIQIPDHTIDQHNKIIPHASPSVRRFARELGVDLSKVVGTGPKQRILKEDVQAFVKQALTGGRNARGGTLDLLPWPHVDFAKFGPIELKSLSRIREISGANLHRNWVMIPHVTQFDEADVTDLEALRKNHNETRQNNGTKLTILAFLIKAVTAALKKFPEFNASLDNSTTESQLIIKRYYHLGFAADTPNGLVVPVIRDADQKGVIGIAEELTRLSSLAREGKLKPGDMQGASFTISSLGGIGGTGFTPIINAPEVAILGVSRASLKPVYQNGQFVPRLVLPLSLSYDHRVIDGASAARFTAHLASILADMRLALF

SEQ ID NO: 755 - protein, 446 aa, Novosphingobium aromaticivorans DSM 12444
MGTYTFRLPDIGEGIAEAEIVAWHVKVGDTVEEDGRLADMMTDKATVEMESPVAGKVVSVAGEVGDVVAIGSALVVIETEGEDEAPAPAAAPAPKAAIVEERIEVETPEPPQPPSPPQPLFVSREVEAPPAVPATGSGVAPGPRASTAPDTIGGAGAKVLASPAVRQRARDLGIDLSEVRPSEEGRIRHADLDQFLSYNASGGYRAAGAERGDEVIRVIGMRRRIAENMAASKRHIPHFSYVEECDVTALEIMREQLNAGRGDKPKLTMLPLLITAICRALPQYPMINARYDDEAGVVTRYGAVHLGMAAQTPAGLMVPVIRNAQTLNLWQLAREIVRLAEAARSGSAKSDELSGSTLTVTSLGPLGGVATTPVINRPEVAIIGPNRIVERPMFVSDGMGGERIEKRKLMNISISCDHRVVDGHDAASFIQAVKKLIETPVLLLAD

SEQ ID NO: 756 - protein, 237 aa, Fragaria x ananassa
MAQSVTGIQIGGTSFPPAVKPPGSGNTLFLGGAGVRGMEIQGNFVKFTAIGVYLEDKAVPALSVKWKGKTAEELTESVEFFREIVTGPFEKFTQVTMILPLTGQQYSEKVSENCVAIWKKFGIYTDAEAKAIEKFIEVFKDQTFPPGASILFTQSPNGSLMIGISKDGSIPEVGNAVIENKLLSESVLESIIGKQGVSPEARKSVATRLSELLKESDHCVAGNEKVDECTKEAENKA

SEQ ID NO: 757 - protein, 295 aa, Nitrosomonas europaea ATCC 19718
MSATIISGSLIASKFREELKQRVKILSETWMQPGLAVILAGDNPASCVYVRNKAKTCEELGIRSEIFNFPGDISQKALLQQIQDLNVNPEIHGILVQLPLPGHIRIDEVIAAIAIGKDVDGFHPCNVGALVTGHALFHPCTPFGVMKMLAEYDIPLQGQHAVIIGRSNIVGKPMALMLLEKGATVTVCTSRTRDLASHTRNADIVVMAAGKANLLTSDMIRTGATVIDVGINRLADGRLCGDVEFSGVKEKAGYITPVPGGVGPMTIVMLMNNTIEAAERAKAVALAGGWHSSVQ

SEQ ID NO: 758 - protein, 237 aa, Fragaria x ananassa
MAQSVTGIQIGGMSFPPSVKPPGSGNTFFLGGAGVRGMEIQGNFVKFTAIGVYLEDKAVPALAVKWKGKTAEELTESVEFFREIVTGPFEKFTQVTMILPLTGQQYSEKVSENCVAIWKKFGIYTDAEAKAIEKFIEVFKDQTFPPGASILFTQSPDGSLTIGFSKDGCIPEVGNAVIENKLLSESVLESIIGKPGVSPEARKSVATRLSELLKESDHCVAGNGKVDECTKEAEVKA

SEQ ID NO: 759 - protein, 543 aa, Hypocrea lixii
MAIGNIYVIAGVSVVGGALFGFDISSVSAQLAEQSYLCYFNQDENPPTTADGKCGGPRSLVQGGITASMAAGSWLGALISGPLSDRLGRKYSIMVGCIIWVIGSTLSCASQNIGMLIVARIINGISVGIESAQVPVYIAEISPPSKRGRFIGMQQWAITWGILIMYYISYGCSFIGEDNPVSYNTAAWRIPWGLQMIPAFFLFFMMMPLPESPRWLARKDRWEDCRAVLTLVHGKGDPNHPFVAYELQDIKDMCEFERQHADVTYLDLFKPRMINRTFIGLFTQIWSQLTGMNVMMYYIANIFSMAGYSGNANLLASSIQYIINVLMTIPALLWVDKWGRRPTLLIGSVLMALWMYANAGILATYGEVVPGGIDHVAAQSMRVTGAPAKGLIACTYRFVASFAPTWGPVSWTYPPELFPLRLRGKGVAMATSGNWAFNTALGLFTPVAFANIKWKSYLIFAVFNTVAFFHVFFVFPETAGKTLEETEAMFEDPNGIPYMGTPAWKTKVATSLTVRAEQGDLEAKIAHDTEKPPIHTHEEETTQ

SEQ ID NO: 760 - protein, 678 aa, Oryza sativa
MAIHGVFHCSTTAILRVISVLCLLAVLVPDAGGRHHRHGCPPFTCGNLSSVSSPFRRRGDPSECGVLSYELNCADDKATIQIDNGTYYVTGINYTDSTFLIVDADISDSPSSCPLPRWNSLREPRFQVLWTRIASFVNCSQEIKNSSWIMYMPVACLSTSRSFVYVLTGQKSALIQSLEPSCGYLAMTPLGGRDSVAPVNESLSLSYADVVKSMRKGFRVQFPFRYRTGSFKQCPMDSIPASTSTGKTNWFGTILSADTNFLLCIPVHQIPSRYRMPLGIMLYVIAYALQIWKMIAATCRFLLTPLAVLVFLAHKYWKTRVTIDAVEKFLRMQQMLGPTRYAYTDITAITGHFREKLGQGGYGSVYKGVLLPGDLHVAVKMLNGNSNCNGEEFISEVATIGMIHHVNVVRLVGFCSEEMRRALVYEHMPRGSLDKYIYLSERSFSWDKINEIALGIARGINYLHQGCDMWILHFDIKPHNILLDDNFVPKVADFGLAKLYPRDKSFVPDRALRGTVGYMAPEMVSRSFGVISSKSDVYSFGMLLLEMAGGRRNVDPNADSSKSKAYYPSWVYDQLIADQQFDEISNVANMHELERKLCLVGLWCIQMKSHDRPTMSEAIEMLEGGVDALQVPPRPFFCDGDGIGNGMPPPQVMDSYFHSSKLTAISEEGDGIAKLASS

SEQ ID NO: 761 - protein, 320 aa, Vibrio angustum S14
MIKKIGVLTSGGDAPGMNAAVRGVVRAALTEGLEVYGIYDGYQGLYNNCIEKLDRKSVSDVINKGGTFLGSARFPEFREVEVREKAIENLKLHGIDALVVVGGDGSYMGAKKLTEMGYPCIGLPGTIDNDVAGTDYTIGYMTAMNTVIDAIDRLRDTSSSHQRISIVEVMGRHCGDLTLMSAIAGGCEYIITPETGLDKEKLLQHIREGIAKGKKHAIIAITELMTDVNELAKFIEAETGRETRATVLGHIQRGGQPTAFDRVLASRMGAYAVDLLQQGEGGRCVGIQCEQLVHHDIIDAIENMRRPVRNDLYELAEKLF

SEQ ID NO: 762 - protein, 207 aa, Zea mays
  misc_feature (111)..(111): Xaa can be any naturally occurring amino acid
  misc_feature (135)..(135): Xaa can be any naturally occurring amino acid
MASRRRTLLKVIILGDSGVGKTSLMNQYVNKKFSNQYKATIGADFLTKEVQFEDRLFTLQIWDTAGQERFQSLGVAFYRGADCCVLVYDVNSMKSFDNLHNWREEFLIQAXSPSDPDNFPFVLLGNKVDVDGGSXRVVSEKKAKAWCASKGSIPYFETSAKDGTNVEDAFQCIVKNALKNEPEEELYVPDTVDVVGGNRAQRSSGCC

SEQ ID NO: 763 - protein, 163 aa, Arabidopsis thaliana
  misc_feature (108)..(108): Xaa can be any naturally occurring amino acid
  misc_feature (113)..(113): Xaa can be any naturally occurring amino acid
  misc_feature (137)..(137): Xaa can be any naturally occurring amino acid
  misc_feature (146)..(146): Xaa can be any naturally occurring amino acid
  misc_feature (155)..(155): Xaa can be any naturally occurring amino acid
  misc_feature (159)..(161): Xaa can be any naturally occurring amino acid
MASSMLSSAAVVTSPAQATMVAPFTGLKSSAAFPVTRKTNKDITSIASNGGRVSCMKVWPPIGKKKFETLSYLPDLSDVELAKEVDYLLRNKWIPCVEFELEHGFVYXREHGXTLPGYYDGRYLDNFGSFPLFGCTXSVQGFKGGXRVQKGVPGXFIWXXXWK

SEQ ID NO: 764 - protein, 161 aa, Trema tomentosa
MSSSEVDKVFTEEQEALVVKSWAVMKKNSAELGLKFFLKIFEIAPSAKNLFSYLKDSPIPLEQNPKLKPHAMTVFVMTCESAVQLRKAGKVTVRESNLKRLGAIHFKNGVVNEHFETRFALLETIKEAVPEMWSPEMKNAWGEAYDQLVAAIKSEMKPSST

SEQ ID NO: 765 - protein, 237 aa, Synechococcus sp. CC9605
MAIDQLLEQKQAEKKEVKGYFETTGFDRWNRIYSDSDDVNKVQRNIRIGHQKTVDEVLAWIKESDELSGVSFCDAGCGVGSLSLPLAAMGAGSISASDISEAMAQEAERRAREAGLDMAKLNFFASDLESLSGSFHTVCCLDVFIHYPQQPAEEMVKHLCSLTEGRLIVSFAPYTPLLALLKGIGQLFPGPSKTTRAYTLKEDGIVKAAEACGFKLVRRSLNKAPFYFSRLIEFRKA

SEQ ID NO: 766 - protein, 324 aa, Escherichia coli
MKNEKIIELKNVGLVYREKKTLFTYDEYEALTNITFDVYRGETLGIIGRNGAGKSTLLRVLAGIIKPDSGQITIHSNSISLMALQAGFDPNLSGRQNTIFSGMVLGHRLSYIKSIIEDIKVYSELNEFFEKPIKNYSSGMLARLGFSIAMYTTPEVLLIDEVLGVGDVTFAEKAQKSIREKIKSDTTVVIVSHDEHQLKLLSDRLVCIENGVVLDEGPRDSVYNKYNLIMKLTSYGLKLLEYKNTETVAFKVGDINPTAEYSDVNFNIDVDVVSVSFKTTTSDWERVSIKDNSFWLRLNHNKIYKIKFKDTKDHDGVFELSVGY

SEQ ID NO: 767 - protein, 315 aa, Synechococcus sp. CC9605
MKPAALNDGWTYHDHVPRAAAGNLVSDWLADRYRHSDAAVWQQRIAAGELDWNGALLCSDRALQGGEALCWRRPPWLEEAIPDQWDTIHDDGDLLVINKPSGLPVMPGGGFLRHTLMALLEPTGARPVHRLGRFTSGLQVCACTPQTRALWSKQFRPDGGCRKVYQAWSQRVPGLELGQCLTVSSDVVERLHPLLGWIWGPEPLNDAPIRKRLSAHSEFELLERTAEGDRLQVTITTGRPHQIRIHLAQLGSPLLGDPLYLPDREISASATPGDGGYRLHAWRLSGLPHLGDKTFQVNPPSEGDQALRNSIKREK

SEQ ID NO: 768 - protein, 358 aa, Oryza sativa
MPPPPRCAATTAHHSLLGSPTCLARPRRRCCPVRAAVAVQAEAQAKVSLIRIGTRGSPLALAQAHETRDKLKAAHSELAEEGAVEIVIIKTTGDMILDKPLADIGGKGLFTKEIDDALLQGRIDIAVHSMKDVPTYLPEGTILPCNLPREDVRDAFICLTASSLAELPAGSVVGSASLRRQSQILYKYPSLKVVNFRGNVQTRLRKLKEGDVHATLLALAGLKRLNMAETATSVLSVDEMLPAVAQGAIGIACRSSDDTMMNYLSSLNHEDTRLAVACEREFLSVLDGNCRTPIAAYASRDKDGNCSFRGLLASPDGSTVYETSRTGPYDFDIMVEMGKDAGHELKAKAGPGFFDSLQ

SEQ ID NO: 769 - protein, 180 aa, Capsicum annuum
MASSVMSTATVATGANAAQASMIASFNGLKSAASFPVTRKQDLDITSIASNGGRVQCMLVWPPINKKKYETLSYLPDLSDEQLLKEIEYLLQKGWVPCLEFETEHGFVYREHHRSPGYYDGRYWTMWKLPMFGCTDATQVLNEVQEAKKAYPQAWIRIIGFDNVRQVQCISFIAYKPEGY

SEQ ID NO: 770 - protein, 441 aa, Aspergillus oryzae
MGTRPLPMAMNPHPSASRNPYGHNVGVTDFLSNVSRFKIIESTLREGEQFANAFFDTEKKIEIAKALDDFGVDYIELTSPCASEQSRLDCEAICKLGLKAKILTHIRCHMDDARVAVETGVDGVDVVIGTSSYLREHSHGKDMTYIKNTAIEVIEYVKSKGIEIRFSSEDSFRSDLVDLLSIYSAVDKVGVNRVGIADTVGCASPRQVYELVRVLRGVVGCDIETHFHNDTGCAIANAYCALEAGATHIDTSVLGIGERNGITPLGGLMARMMVADPAYVKGKYKLEKLKDIEDLVAEAVEVNIPFNNYITGFCAFTHKAGIHAKAILNNPSTYEIINPADFGMTRYVHFASRLTGWNAIKSRAQQLKIEMTDSQYKECTAKIKALADIRPIAVDDADSIIRAYYRNLKSGENKPLLDLTADEQAQFAAKEKELAASGVVA

SEQ ID NO: 771 - protein, 438 aa, Ehrlichia ruminantium str. Gardel
MVRFFVLFLIIFCITTNNAISVNVEVIHEKLDNGMEIYILPNNRSPAVMHMVLYKVGGSDDPVGYSGLAHFFEHLMFSGTEKFPNLISTLSSIGAQFNAGTSASFTMYHELVPKQYLPLVMDIESDRMKNLKITDNAFTREQKVVLEERKMRTESKASTILEEEMENAFYYNGYSRPVVGWEHEINQYNKKIAEAFYKSHYSPNNAILLVAGDVDSNEVIKLAKQYYGKIEPSTQEFPRVPRLEPQHKVNMTITLEDESVEVPELFLMNQIPSKLTKNYITNMITAEILGNGRFSMLYNDLVLNNPIVTSISTGYNHLVYSDTFLSIHAVPKDGITIQTVEEEIYKCINDYIENGIPEEYLEAAKYRTKATMTYAFDGLDFISQFYGISLVIGIPLSEINNMFNLIDNITIDDVNSTLQNIFQNKAKFAGHLLPKSGA

SEQ ID NO: 772 - protein, 258 aa, Colwellia psychrerythraea 34H
MSDLLKVEKRGHVAIVTFNNPPANTWTPESLNYLKQLIGVLNEDKDNYSLILTSDSEKFFSAGADLNQFNHDDKGLSFDFSAAFGGAFEALSNYQGVSIAAITGFAMGGGLEVALSCDVRICEEQAQMALPEAAVGLLPCGLGSQQLSWLIGEGWAKRMILLGERIKAPQAEKIGLVSEVVPTGTSLSRALALAEKAESQSPTSVAYCKSLIMEARNGDINSAYTKERELFVKLWDTEDQKEGVSAFIEKRKPQWKNN

SEQ ID NO: 773 - protein, 437 aa, Buchnera aphidicola
EKLQIALSLEKIGVDIMEVGFPISSPGDFKSVQTISKNIKNSRICSLARCLEKDIDAAGEAMSVCDNFRIHIFLATSTLHIESKLRKNFNEIIEMAIFSVKKALRYTNDVEFSCEDASRTNIDNLCRIVEKLIKSGVKTINIPDTVGYSTPDELTFIIKNLFERVPNIHKSIISVHCHDDLGMAVGNSIAAIQAGARQIEGTINGIGERAGNTALEEVIMAIKVRKNILGVSTNINHKEIYRTSQMISRICNMPIPSNKAIVGSNAFSHSSGIHQDGVLKNRENYEIMDPRSIGLKKVKLNLTSRSGRAAVKYYMSEMGYKDSDYNIDELYTDFLKLADKKGQVFDYDLESLAFINKQQDELEYFRLQFFSVQSISNNLSTASVKLLCGNKTYTESSTTSNGPVDAIYQALNRITHFPIILQKFQLIAKGKGKDALG

SEQ ID NO: 774 - protein, 381 aa, Methylococcus capsulatus str. Bath
MRIEISVPPLPESVSDAKLLDWHKNVGETVGKGENLVDLETDKVVLEVPAPEDGVVVEVRGGKGDVVVSGQPIAVIDTSVRPAAPAASAATEKPAPVLSPAVRRLVAEHALDPAVIPASGREGRLTKQDVLDFLETRPAAEKARLPAGGRSERRVPMSRLRARIAERMLEAQHRTATLTTFNEVNLQKVFDIRNAHKARFEQQHGIKLGFMSFFVKASVEALRRFPIVNASLEGEEIVYHDYYDIGIAVSTDRGLVVPILRDADRTDFAGIEKAIAEFGQKARSGKLSLDELSGGTFTITNGGIFGSMLSTPILNPPQSAILGMHAIKERPVVEDGQIVIRPMIYLALSYDHRLIDGRDAVSFLFTIKELLEDPVRLMLAV

SEQ ID NO: 775 - protein, 406 aa, Ralstonia eutropha JMP134
MLSAASRPYIDASVPVLREHGLAITTHFYREMFAARPELTQLFNMGNQANGSQQQSLASAVFAYAANIDNANALAPVVERIVHKHAAVGLKPAHYPIVGRHLLGAISAVLGEAATPDLIAAWDEAYWLLAGELIAAEARLYQSTGMAAGERIAVRVDRREVQSDTVVALTLSAVDGQPLRDFRPGQYVSVEVTLDDGNRQQRQYSLSAERGLPTWQISVKREDGDHATPAGAVSNWLHANAQPGTELSVSAPFGDFAPRLDNHRPIVLLSAGIGITPMLSVLRTLAAQGSRREILFAHAARDGRHHAHRADVAWARERLPQLRTHISYEQPQAADVAGRDYDHAGTMPVAALLDAPDNRLFIDGDFHLCGPLGFMQAQRHALISAGVPVGHIHREVFGPDLLDDLL

SEQ ID NO: 776 - protein, 502 aa, Buchnera aphidicola
DGEQALQASLSVKEKLQIALCLEKSGVDIMEVGFPISSPGDFKSVQTISQKIKHSRVCSLARCIEKDIDVAGEAMSASDSFRIHIFLATSTLHMESKLKKNFNEIIDMAIFSVKRALRYTDDVEFSCEDASRTTIDNLCRIVEKLISCGVKTINIPDTVGYTIPNELSFIIKNLFERVPNIHKSTISVHCHNDLGMAVGNSISAIQAGARQIEGTINGIGERAGNTALEEVIMAIKVREDILGLSTNINHKEIYRTSQIVSSICNMPIPSNKAIVGSNAFSHSSGIHQDGVLKNRENYEIIDPISIGLKKVKLNLTSRSGRAAVKYYMNEMGYKENDYNIDELYTDFLKLADKKGQVFDYDLEALAFINKQQDESEYFSLKFFSVQSISNNLSTASVTLLCGKKIYTEASTTSNGPVDAIYQALNRITHFPIVLQKFQLIAKGKGKDALGQVDILVEYKKRKFHGVGLATDIMESSAKAMVNVLNNIWIAKQVNKNLKNLKK

SEQ ID NO: 777 - protein, 363 aa, Pseudomonas syringae pv. syringae B728a
MALNSIEELVEDIRQGKMVILMDDEDRENEGDLIMAAECVKPEHINFMARFARGLICMPMTRERCETLKLPLMAARNGSGFGTKFTVSIEAAEGVTTGISAADRARTVQAAAAKDAKAEDIVSPGHIFPLMAQAGGTLARAGHTEAACDLARMAGFEPTGLICEVMNDDGTMSRRAELEAFALQHDIKIGTIADLIHYRMIHERTVQRIAEQPMDSELGSFNLVTYRDSVEGDVHLALTLGTICAEEPTLVRVHNMDPLRDLLMVNQPGRWSLRAAMRAVNEAGSGVVLLLGHPLDGDVLLAHIRETAGQQPIKTPTTYSTVGAGSQILRDLGVRKMRLMSSPMKFNAISGFDLEVVEYVPSE

SEQ ID NO: 778 - protein, 363 aa, Buchnera aphidicola
MKKKYRIAVLPGDGIGPEVMREAYKILNILKNHFSLPLETREFNIGGSAIDQEGTALPKKTLLGCENSDAILFGSVGGKKWDDLPINQRPERASLLPLRKHFNLFANLRPAKLYSELKYLSPLRSDIIKNGFDILCIRELTGGLYFGKPTGRLKKNNIEYAFDTEIYYNYEITRIAHLAFQLAQTRNFKICSIDKSNVLNSSVLWREIVKKVSKNYPDVHLSHLYIDNATMQIIKDPNQFDILLCSNLFGDIISDECAIITGSIGMLPSASLNEKKFGLYEPAGGSAPDIEGKNIANPIAQILSVSMLVRYGMNLKTIADKIDQSVISVLKKGYRTADISNNNNYLKTNEMGDVIANTLISGE

SEQ ID NO: 779 - protein, 306 aa, Trifolium repens
MMNSPIISLERLNGVERKDTMEKIKDACQNWGFFELVNHGIPHDLMDTLERLTKEHYRKCMEQRFKELVSSKGLDAVQTEVKDMDWESTFHVRHLPESNISELPDLSDEYRKVMKEFSLRLEKLAEELLDLLCENLGLEKGYLKKAFYGSRGPTFGTKVANYPQCPNPELVKGLRAHTDAGGIILLFQDDKVSGLQLLKDDEWIDVPPMRHSIVVNLGDQLEVITNGKYKSVEHRVIAQTNGTRMSIASFYNPGSDAVIYPAPELLEKETEEKTNVYPKFVFEEYMKIYAALKFQAKEPRFEALKA

SEQ ID NO: 780 - protein, 352 aa, Deinococcus radiodurans
MPKVITLPGDGIGPEVTAAAVQVLREVAPDVTVEEHAIGGGAYDAHGEPFPTSTRDALKEADAVLLGTVGGAHDSAWNQLPRHLRPESGLLALRKALGCYANLRPVRVQPGLEHLSPLKAELARGVDILIVRELLGGIYFDQDRKIEGDTAYNTMRYTTSEVERVAKVAFWAAEQRKGRVTSVDKANVLEVSELWRRDVQALRDRDYRSIHLNHEYVDSVAMLIVADPSRYDVILTENLFGDILSDLAAVIPGSLGLMPSASLGDGAGLFEPIHGSAPDIAGQGVANPAAAIMSVGMLLRHGLERSEAANQVDRAVALALREQPTRDLGGSADTQTFTRAVLKALGSSPSVG

SEQ ID NO: 781 - protein, 345 aa, Thiobacillus denitrificans ATCC 25259
MEMPLPVLVRISHCPIPPLGSQRTRAMSTQHHKLVILGSGPAGYSAAVYAARANLSPVVITGMQQGGQLMTTTEVDNWPADVDGVQGPELMDRFQRHAERFQTEIIFDQIHTAKLSEKPFTLIGDSATYTCDALIIATGASAMYLGLPSEQAFMGKGVSGCATCDGFFYKGQDVAVIGGGNSAVEEALYLANIARHVTLVHRRDTFKAEKILINNLMDKVKEGKITLALDSTLDEVLGDKTGVTGMRIKSTKDGATRDIALTGVFIAIGHKPNTGIFEGQLELEGGYIVTRGGNKGNATATSVEGVFAAGDVQDHIYRQAVTSAGTGCMAALDAERYLDALGKTK

SEQ ID NO: 782 - protein, 186 aa, Oryza sativa (indica cultivar-group)
MLSIMRACRDAGAVKRIVFTSSAGTVNIEERQRPSYDHDDWSDIDFCRRVKMAGWMYFVSKSLAEKAAMEYAREHRLGLISVIPTLVVGPFISNGMPPSHVTALALLTGNGAHYSILKQVQFVHLDDLCDAEIFLFESPEARGRYVCSSHDATIHGLATMLADMFPEYDVPRSFPGIDADHLQPVH

SEQ ID NO: 783 - protein, 452 aa, Streptococcus thermophilus CNRZ1066
MKVIKFGGSSLASATQLEKVLNIVKSDPERRFVVVSAPGKRNDEDTKVTDALIKYYKHYIKGADVKADQEWIINRYQAMVDELGFKSKEMVKIAKAITDLATLPIEDNDFLHDTFLAAGEDNNAKLIAEYFRNNDIEARYVHPREAGILVSSEPGNARILPGSYDKLEELRESDEVLIIPGFFGVTSDNQICTFSRGGSDITGSIVAAGVKADLYENFTDVDGIFAAHPGVVHEPHSIPELTYKEMRELAYAGFSVLHDEALLPAYRGKIPLVIKNTNNPDHPGTRIILEHQGATVPVVGIASDDKFVSINMSKYLMNREVGFGRKVLQILEDLNIRWEHMPSGIDDLSIIIRERELTPIKEQEILSYLTRELGVDEVEIEHGLSILVIVGENMRDHIGVTATAAKALSEKNINLEMISQGSSEVSVMFVIETEQEKEAVRALYDAFFRSNN

SEQ ID NO: 784 - protein, 131 aa, Elaeis guineensis
MADPIRRTDEYGNPIPEHQGHGGAVTGGTYGTTTTPHEGVLHGEGGRQQQVHPGKEEHPGGRHHRSGSSSSSSSSEDDGQGGRRKKGLKEKIKEKLPGGGHKSEEHGQTDEGQHEKKGMMEKIKEKLPGHH

SEQ ID NO: 785 - protein, 112 aa, Clostridium longisporum
MKKIEAVIRPEKLEELKDALKKGNINGITVDQVMGCGQQHGWTEHYRGSEIMVNFLPKVEVKVIVDDSKVQEVINLIIDTVKTGEVGDGKIFVSDVSECIRIRTGEKGLDAL

SEQ ID NO: 786 - protein, 341 aa, Fragaria x ananassa
MGLGAESGSVCVTGASGFVGSWLVMRLLEHGYTVRATVRDPANLKKVRHLLELPQAATRLTLWKADLDVEGSFDEAIKGCTGVFHVATPMDFESEDPENEVIKPTINGMLDIMKACLKAKAVRREVFTSSAGAVAIEEHRKEVYSENNWSDVVFCRKVKMTGWMYFVSKTLAEQAAWKFAKENNIDFITIIPTLVIGPFLAPSMPPSLISGLSPLTGNEAHYGIIKQCQYVHLDDLCQSHIFLYEHPKAKGRYICSSHDATIHDIAKLLNEKYPKYNVPKKFKGIEENLTNIHFSSKKLKEMGFEFKHSLEDMFTGAVDACREKGMIPLPQEEETEKRRAG

SEQ ID NO: 787 - protein, 327 aa, Solibacter usitatus Ellin6076
MRFPSVVFLAALSVSAIGVPVMAQEAPKAQPPVMTRPDGATVPLEVTPPPAPLPPNRVILQVGEIALTAGQLEQILEAYSEAQRVYVNGPGRPQFIQQLIRVLMLSQEGKRRKLDETDRYRNQLTYSAAGILSNHTEEDIRKKIKIDDAMLEDYLKAHPLDYMQVRARHILIRTPGSSLPLEPGQKELTDAEALTKAQELRAKIVAGADFADVAKIESNDISTNTKGGDLGFFKRGQMAPSIEEAAFALKPGEISQPVKTSMGYTVIKVEEIKPVKSFEELRPDLERNLRNELTRKYVDDLKALTKIEIDPEFAAPRKGSFPVKPAQ

SEQ ID NO: 788 - protein, 319 aa, Actinobacillus pleuropneumoniae serovar 1 str. 4074
MNTNKIGVLLANLGTPDEPTTPAVKRYLKQFLSDPRVIDLPKFKWQFILNYMILPKRSPKVAKLYREIWTEQGSPLLAISRQQQQALQDYFTRQNQNVLVELGMSYGNPSIESATDRLIKAGVSKIIVLPLYPQYSSTTTASVLDAFARGLTQQRNIVPFEFIHSYHNDPLYIQALANTIRLADDEKLLFSFHGIPKRYQTEGDFYPEHCQKTAQLVADKLSLSNEQWLVTYQSRFGDEEWLQPYTDETLEKLPSQGVKKIAVICAGFSADCLETLEEIAEENKENFLNAGGQSYRYIPALNANTDHINALAKLIEAKI

SEQ ID NO: 789 - protein, 817 aa, Xanthomonas campestris pv. campestris str. ATCC 33913
MKQPRLVVIGNGMAGIRTVEELLKLMPGMYHITVFGAEPHPNYNRILLSPVLAGEQEFDDIVLNPLQWYRDNGIHLHLNKEVTRIDRVRRRVIAADGTEAEYDRLLIATGSVPFVLPIPGNDLKGVIGYRDIQDTRTMIDTARTRQHAVVIGGGLLGLEAANGLKVRGMEVTVVHLAGWLLERQLDPVAGNLLQQALRARGLEFRLNTATSALLGNAQGEVIGVRFADGSEIPADLVVMAAGIRPNTRLAEEAGIHCSRGIVVNDSLQSFDPRVYAVGECANHRGIAYGLVAPLFEQAKVCANHLAQFGIGIYRGSVASTKLKVTGIDLFSAGDFMGGDGCEEIVLSDPAGGVYKKLVIRDDVLVGACLYGDTSDGGWYFKLLKDGTPIQAQRDQLIFGESALGDSGTGGQDRASAMSDSDEVCGCNGVCKGTIVKAISEQGLFTVDEVKKHTKAASSCGSCTGLVEQILMNCLGSNFQETPKTKAVCACTDLSHGEVRRAIREHKLLTHAQAYAFMEWRTPNGCATCRPAINYYMLSTWPHEAIDDPQSRFINERAHANIQKDGTFSVIPQMKGGVTNASELRRIADVADKYAVPMVKVTGGQRIDLLGVKKEDLVDVWRDLGMQSGHAYGKSIRTVKTCVGSEFCRFGTQNSTQMGIDLETMLANMWSPHKVKLAVSGCPRNCAESGIKDVGIIAVDSGWELHVGGNGGIKTEVARFLVKVTTAEEVREYTGAFLQLYREQAYYLDRTVHYIARVGLDYIRAQVVDDAANRRALYERLLYSLEGLVDPWKARIAGERRQEYQPLRIAAPAATVKE

SEQ ID NO: 790 - protein, 104 aa, Streptococcus suis 89/1591
MVQVITDANFEVETQEGVVLVDFWAPWCGPCRMQAPILEQLADEVDEDELRIYKMDVDENPNTARQFGIMSIPTLLFKKDGQVVKQVAGVHTKNQIKAILAEIG

SEQ ID NO: 791 - protein, 552 aa, Glycine max
MALAPPSVFALYIVIDLKIEIYMTISAMCGILAVLGCVDNSQTKRARIIELSRRLRHRGPDWSGIHCYEDCYLAHQRLAIVDPTSGDQPLYNEDKTVIVTYEEHGEEFVNMLDGMFAFILLDTRDKSFIAARDAIGITPLYLGWGHDGSTWFASEMKALSDDCERFISFPPGHIYSSKQGGLRRWYNPPWFSEDIPSTPYDPTLLRETFERAVVKRMMTDVPFGVLLSGGLDSSLVAAVVNRYLAESESARQWGSQLHTFCIGLKGSPDLKAAKEVADYLGTRHHELYFTVQEGIDALEEVIYHIETYDVTTIRASTAMFLMSRKIKALGVKMVLSGEGSDEIFGVFMALMIWQIKALHLYDCLRANKSTAAWGVEARVPFLDKEFINVAMSIDPEWKMIRPDLGRIEKWVLRNAFDDDKNPYLPKHILYRQKEQFSDGVGYSWIDGLKDHANKQVTDATMMAANFIYPENTPTTKEGYLYRTIFEKFFPKNAAKATVPGGPSVACSTAKAVEWDAAWSKNLDPSGRAALGIHDAAYDAVDTKIDEPKNGTL

SEQ ID NO: 792 - protein, 410 aa, Streptococcus thermophilus CNRZ1066
MSTNRVVVTGYGVTSPIGNTPEEFWNSLHDGKIGIKPITKFDASDIPVFNAGEIQDFPFDKYFVKKDTNRMDTYSLYAIYAAMEALENSGLNMEEVNRDRVGVIVSSGIGGLQELEDQIIRMYERGMKRIKPMFIPKALSNMGAGNIALKIGAQGVCKSVTTACASANDAIGEAFREIKFGFHDVVLAGGAEASITKIGIGGFNALTALSTTEDPERSSIPFDKDRNGFVMGEGAGVLVIESLEHAQKRGANILAEIVGYGSNCDAYHMTTPTPDGSGAAKAIKLAINEAGIKPEDVDYVNAHGTSTPANEKGESAAIVSVLGKDVPVSSTKSFTGHLLGAAGAVEAIATIEAIRHSFVPKTAGTKELSDYIEANVVYGEGKEADIEYAISNTFGFGGHNAVLAFKRWEG

SEQ ID NO: 793 - protein, 488 aa, Pseudoalteromonas tunicata D2
MFSPLSQPLVFTDSVIANQPFVTKTFITVDNPATEKLLTSVSCVDDAGIEHAVQSAELGFGTLKSMHSQARSDLLMRWYQLVIDYIDALAEIMTLEQGKPLAEAKGEVIYGAEFIRWFAEECKRSYGQQIPSNNNHQQLSTIRQPIGVVLAITPWNFPIAMITRKVAPAIAAGCSVILKPSELTPLSALALAHLAIRAGFPKGAFNVLLTDDAPSLVSKLLADHRVKKVTFTGSTQVGRILLAQAANTVKRTSMELGGNAPFIVFDSANLDQAVDGLIKSKFRNAGQACVATNRVLLDASIAGDFTAKLLTKVATLKTGNGLSNDTDLGPLINQAAKLRLVATIEQAICEGASWVFGETAFAEAKCSKDNFLPVVVLGNINQDMAIFQQELFGPVVLLSQFESEQQAIELANSTEYGLAAYFYSQNINQVHRVAESLTFGMVGINEGLISNAIAPFGGIKQSGLGREGGQAGLDEYLQQKYLCLNIKD

SEQ ID NO: 794 - protein, 444 aa, Bacillus anthracis str. 'Ames Ancestor'
MNYVIIGGDAAGMSAAMQIVRNDENANVVTLEKGEIYSYAQCGLPYVISGAIASTEKLIARNVKTFRDKYGIDAKVRHEVTKVDTEKKIVYAEHTKTKDVFEFSYDRLLIATGVRPVMPEWEGRDLQGVHLLKTIPDAERILKTLETNKVEDVTIIGGGAIGLEMAETFVELGKKVRMIERNDHIGTIYDGDMAEYIYKEADKHHIEILTNENVKAFKGNERVEAVETDKGTYKADLVLVSVGVKPNTDFLEGTNIRTNHKGAIEVNAYMQTNVQDVYAAGDCATHYHVIKEIHDHIPIGTTANKQGRLAGLNMLDKRRAFKGTLGTGIIKFMNLTLARTGLNEKEAKGLHIPYKTVKVDSTNMAGYYPNAKPLYLKLLYRSDTKQLLGGQVIGEEGVDKRIDVIAMALFNKMSIHDLEDVDLSYAPPYNSVWDPIQQAARRAE

SEQ ID NO: 795 - protein, 133 aa, Capsicum annuum
MAVPLLNKKVVKKRVKKFIRPQSDRRITVKESWRRPKGIDSRVRRKFKGCVLMPNIGYGSDKKTRHYLPNGFKKFVVHNASELEVLMMHNRTYCAEIAHNVSTRKRKEIVERAAQLDVVVTNKLARLRSQEDE

SEQ ID NO: 796 - protein, 128 aa, Glycine max
MATIATSLNIGTQGAVITSESRPVRLAGPVRLNNPWNLGSRTTNRMAAVRPVKATPEGVISDKVEKSIKDAEETCAGDPVSGECVAAWDEVEELSAAASHARDKKKDSDPLEEYCKDNPETSECRTYD

SEQ ID NO: 797 - protein, 319 aa, Silicibacter pomeroyi DSS-3
MKIALPSPASPLKIGTRGSPLALAQAYETRHRLGAAFDLPEDAFEIVVISTTGDNRAMIEADRPLKEIGNKGLFTKEIEEAMLRGDIDIAVHSTKDMPVEQPAGLVLDTFLPREDVRDAFISPGHSAIRDLPLGAVVGTSSLRRKAQLLNRRPDLKVVEFRGNVQTRLRKLSEGVAECTFLAMAGIRRLNMAEVPATAISPDDMLPAIAQGAIGIERRMDDTRAAEMLTAIHHGETGQRLAAERALLAALDGSCETPIAGLAELDGTTLRLRGEVLRPDGSEAITLDRSGDVADGPALGTEMARELLAQAGPGFFDWRG

SEQ ID NO: 798 - protein, 333 aa, Candidatus Kuenenia stuttgartiensis
MLKCRSKVLGFVLCGIASICFSYSAMASKEKEATAPKQQEKTTEAKQIGDSKKVVATINGESITKAEVERVLERFKNQLPPDRIASVEKQIIDGLVAQKLFLQFIKKNKIAIGDDALKTELDKVREDIKLNPGLQGKSLEEVLESHGSNIEDLKRDITISLSLEKYFADTVSDAKVKDYFEKNRQIYDGTEVQASHILVDTRNLQGEEDLAKAKQKIEKVKAEIAEGKKDFAKLAEEYSDCPSSKKGGDLGYFVRKGQMVEPFAEAAFALKVGEVSDVVTTQFGYHIIKVTDIKKGGEIDFNELKPEIKLDILKQNADSLLDRLKQQAKIEIK

SEQ ID NO: 799 - protein, 253 aa, Streptomyces coelicolor A3(2)
MADAPYKLILLRHGESEWNEKNLFTGWVDVNLTPKGEKEATRGGELLKDAGLLPDVVHTSVQKRAIRTAQLALEAADRHWIPVHRHWRLNERHYGALQGKDKAQTLAEFGEEQFMLWRRSYDTPPPALDRDAEYSQFSDPRYAMLPPELRPQTECLKDVVGRMLPYWFDAIVPDLLTGRTVLVAAHGNSLRALVKHLDGISDADIAGLNIPTGIPLSYELNAEFKPLNPGGTYLDPDAAAAAIEAVKNQGKKK

SEQ ID NO: 800 - protein, 183 aa, Idiomarina baltica OS145
MSRHFDQAKGLSEHHDPATHKFVFNQTMFRIKDPERTLKFYSEVLGMTLIKRLDFPEMKFTLYFMASISPEERSHWSTDHDERIVQTFGRPAMLELTHNWGDENDDNVSYHSGNQEPKGFGHIGFAVPDIDSACERFEELGVEFQKKPNDGNMKGIAFIKDPDGYWIEIFTPNRQPDLLREHL

SEQ ID NO: 801 - protein, 918 aa, Shigella flexneri 2a str. 301
MTNYSLRARMMILILAPTVLIGLLLSIFFVVHRYNDLQRQLEDAGASIIEPLAVSTEYGMSLQNRESIGQLISVLHRRHSDIVRAISVYDENNRLFVTSNFHLDPSSMQLGSNVPFPRQLTVTRDGDIMILRTPIISESYSPDESPSSDAKNSQNMLGYIALELDLKSVRLQQYKEIFISCVMMLFCIGIALIFGWRLMRDVTGPIRNMVNTVDRIRRGQLDSRVEGFMLGELDMLKNGINSMAMSLAAYHEEMQHNIDQATSDLRETLEQMEIQNVELDLAKKRAQEAARIKSEFLANMSHELRTPLNGVIGFTRLTLKTELTPTQRDHLNTIERSANNLLAIINDVLDFSKLEAGKLILESIPFPLRSTLDEVVTLLAHSSHDKGLELTLNIKSDVPDNVIGDPLRLQQIITNLVGNAIKFTENGNIDILVEKRALSNTKVQIEVQIRDTGIGIPERDQSRLFQAFRQADASISRRHGGTGLGLVITQKLVNEMGGDISFHSQPNRGSTFWFHINLDLNPNIIIEGPSIQCLAGKRLAYVEPNSAAAQCTLDILSETPLEVVYSPTFSALPPAHYDMMLLGIAVTFREPLTMQHERLAKAVSMTDFLMLALPCHAQVNAEKLKQDGIGACLLKPLTPTRLLPALTEFCHHKQNTLLPVTDESKLAMTVMAVDDNPANLKLIGALLEDMVQHVELCDSGHQAVERAKQMPFDLILMDIQMPDMDGIRACELIHQLPHQRQTPVIAVTAHAMAGQKEKLLGAGMSDYLAKPIEEERLHNLLLRYKPGSGISSRVVTPEVNEIVVNPNATLDWQLALRQAAGKTDLARDMLQMLLDFLPEVRNKVEEQLAGENPEGLVDLIHKLHGSCGYSGVPRMKNLCQLIEQQLRSGTKEEDLEPELLELLDEMDNVAREASKILG

SEQ ID NO: 802 - protein, 696 aa, Leptospira interrogans serovar Copenhageni str. Fiocruz L1-130
MNESSHKTFTDKINEFYKRSFELFSKGSYLEEMDKFYSLCKTTLYADFIILLESKDPLSIKIVESQPKFNFSIDQTNINLLSISYSENRPVLPYTLTRQEINFSNFDALEEIDFAQMIAVPIPNENIEDRRKNILLFLYSKNTEHISEFLKLITELSPRIYEIFSIKNKEILLNSVHSRLDSILKTIPQAIIFMDSGTGKTWINESAAKLLSLSEGGEVSSWKVSTSMTELIQSAVNQKEIFLEMNRNLSNMNLEKFSTQWMFTDPEKKVFEVTSLLLPGKTAPGRLWFFEDITSFHSQQETLALLNQALKEKSEIAQQENQAKTVFISNISHEIRTPMTGILGITELLLNTPLNPDQKDSLELIQRSGDKLLKIVNHLLDFSKADTGKIELESIPFNMQELLNDLVSLLRTEILKNKNELNILFPPNFPKLLKGDPVRIGQILTNLVSNATKFTKEGTVEVGFHILEKTNSELSFRTWVFDTGIGIPPTKFNSVFEPFVQSDKSITRHFGGTGLGLSITKKLIELMGGKIHVESQPGIGTRFWFELKLEIPESIDEESFTENSEAEVITDKSDLSRLKVLIVEDNLINQKLLGRILKKKKIEPFLVEDGMKAIEKARKFHYDLIFMDINMPGIDGLSATEIIRKFPKGDSIRIVGLTANAAPEIQKVATQRGMDDLLTKPYNVSQIEKILNLFEK

SEQ ID NO: 803 - protein, 483 aa, Bacillus clausii KSM-K16
MVQTYLNYIDGEWKPSISGNVFYGRNPANYEEILGAYQASTAEDARLAIKSAAAAFPNWKNKSAIERADVLYQLMPLLAAEKEKLAAIITKEVGKTMAAARKEVDASIQALKHFSGAANRLAGETVPAGNPETFAYTIKEPLGPVGVITPFNFPLGIGIYKIAPALIAGNTVVYKPHNDTVQIAARLVELFIEAGTPKGVLNLVTGDGDKVGQELGENRTLKAISFTGSSDVGLRLGRSVTNRGGKMQAEMGGKNATVILEDADLDKAVSGIVISGLLNNGQSCTGTSRVIVPKNIAKTVTSKLVEKATAIRVGDGFNENVENGPVANEAQLQKYLHYVDIAVKEGAKLECGGKRLFGEGKDKGYFVAPTVLSGVTPEMTIAQEEVFAPVVAIMEVDSFDEAIAVANQTDFGLSSAIYTTNLQKAHEFVRRVETGVTHINIPSNHYENQLPFGGKKNSSIGPREQGSTALDFWVDTKAVYLKP

SEQ ID NO: 804 - protein, 168 aa, Cucumis sativus
GSVRAKNTMNIMLTNVLDAAAGGLFYYLFGFAFAFGTPSNPFIGRHFFGLKSIPSTAADYSFFLYQWAFAIAAAGITSGSIAERTQFVAYLIYSSVLTGFVYPVVSHWFWSPDGWASPSRTDGDLLFGTGVIDFAGSGVVHMVGGIAGLWGALIEGPRIGRFDKTGRS

SEQ ID NO: 805 - protein, 288 aa, Glycine max
  misc_feature (24)..(24): Xaa can be any naturally occurring amino acid
MAEATQSNAELLEWPKKDKRRFLXHVVYRVGDLDRTIKFYTECFGMKLLRKRDIPEEKYANAFLGFGPEQSHFVVELTYNYGVTSYDIGTGFGHFAIATPDVYKLVEDIRAKGGNITREPGPVKGGKSVIAFVKDPDGYAFELIQRSSTPEPLCQVMLRVGDLERSIKFYEKTLGLRVVKKTDRPEYKYTVAMLGYAEEHETTVLELTYNYGVTEYTKGNAYAQVAIGTDDVYKSAEVVNIVTQELGGKITRQPGPVPGLNTKITSFLDPDGWKTVLVDNQDFLKELE

SEQ ID NO: 806 - protein, 119 aa, Armoracia rusticana
PGSFNKILVTYETGTYNGQWSAVGRTAVTTTLAGCTAALTTLFGKRLLSGHWNVTDVCNGLLGGFAAITGGCSVVEPWAAIICGFVAALVLLGCNKLAEKLRYDDPLEAAQLHGGCGAW

SEQ ID NO: 807 - protein, 297 aa, Triticum aestivum
  misc_feature (77)..(77): Xaa can be any naturally occurring amino acid
RAIRAPPHPWRPRQHLHRHPSPPPPRTTPSRPLAPPSPSPPPGGTAACPCRSACAPCRGFPVVNSQRRRMVAAAAAXEMAPAARGEGGGKPFVDEMRAVAMRLHTKDQAREGEKEPQAPPVARWEPTVEGYLRFLVDSKLVFQTLEDIVDRAAVPWYAEFRNTGLERSEPLKKDLEWFTEQGHTIPEPTAAGTAYASYLEELSEKDPQAFICHFYNVYFAHTAGGRMIGKKVAEKILDKKELEFYKWEGTLSQLLQNVRTTLNQVASSWSREEKDHCLEETEKSFAYSGDLLRQIFT

SEQ ID NO: 808 - protein, 368 aa, Vicia sativa
MASMTILPFFLFFSLITFSLALDIQLPTGRSNDEVMTMYEEWLVKHQKVYNGLREKDQRFQIFKDNLNFIDEHNAQNYTYIVGLNKFADMTNEEYRDMYLGTRSDIKRRIMKNKITGHRYAYNSGDRLPVHVDWRLKGAITHIKDQGSCGSCWAFSTIATVEAINKIVTGKLVSLSEQELVDCDRAFNEGCNGGLMDYAFEFIIGNGGIDTDQHYPYKGFEGRCDPTRKKAKIVSIDGYEDVPSNNENALKKAVAHQPVSVAIEASGRALQLYQSGVFTGKCGTSLDHAVVIVGYGSENGLDYWLVRNSWGTNWGEDGYFKMERNVKGTHTGKCGIAVEASYPVKYGKNSAVTTNSAYEKTEVLVSSA

SEQ ID NO: 809 - protein, 214 aa, Brassica rapa subsp. pekinensis
MTSVSAFSETLGSEYESPTLSGEYCPTLAASCPKKPAGRKKFRETRHPIYRGVRLRNSGKWVCEVREPNKKSRIWLGTFLTAEIAARAHDVAAIALRGKSACLNFADSAWRLRIPETTCPKDIQKAAAEAAVAFQAEINDTTKDHGLDVEETIVEAIFTEEDSDGFYMDEEESMFGMPTLLASMAEGMLLPPPSVQFEYNYDFDGDTDISLWSY

SEQ ID NO: 810 - protein, 257 aa, Brassica rapa subsp. pekinensis
MNSVSTLSEVLGSQNESPVGGDYCPMLAASCPKKPAGRKKFRETRHPIYRGVRLRKSGKWVCEVREPNKKSRIWLGTFKTAEIAARAHDVAALALRGRGACLNFADSAWRLRIPETTCAKDIQKAAAEAALAFEAEKSDTTTNDRGMNMEETSAVASPAELNDTTADHGLDMEETMVEAVFRDEQREGFYMAEETTVEGVVPEEQMSKGFYMDEEWTFEMPRLLADMAEGMLLPPPSVQWGHNDDFEGDVDMNLWSY

SEQ ID NO: 811 - protein, 106 aa, Blastopirellula marina DSM 3645
MAKEFNEANFETEVLQSTEPVLVDFWAPWCGPCRQLAPVIDQLSQEYESGAKVGKVDTDQNPSLARKYGIQSIPTVMIFKDGEVVSQFMGVQPKSKLQEAIDSAKG

SEQ ID NO: 812 - protein, 358 aa, Mannheimia succiniciproducens MBEL55E
MSTYNVAVLPGDGIGPEVMAEAIKVLDKVQAKFGFKLNFTQYLVGGAAIDAKGEPLPAETLQGCDNADAILFGSVGGPKWTHLPPDQQPERGALLPLRKHFKLFCNLRPATLYKGLEKFCPLRADIAAKGFDMVVVRELTGGIYFGQPKGRDGEGSDTRAFDTEVYYKYEIERIARAAFDAAMKRRKQVTSVDKANVLQSSILWRETVAEIAKEYPEVQVENMYIDNATMQLIKAPESFDVLLCSNIFGDIISDEAAMITGSMGMLPSASLNEEGFGLYEPAGGSAPDIAGKGIANPIAQILSAAMMLRYSFNLNEAATAIENAVQKVLADGHRTGDLADNSTPVSTAEMGTLIANAI

SEQ ID NO: 813 - protein, 447 aa, Agrobacterium tumefaciens str. C58
MGLFSGTRPRRACPRRRHGGLIMAEFVITMPDVGEGVAEAELVEWNVKPGDIVHEDMVLAAVMTDKATVEIPSPVAGIITWLAVTVGNTVPVKAPLVRIETDVAAAAPNGSAPEAEAPSRMTEEEAPADMTEAPPPVETQPAARQTEEAPSAPVAEPHHKPLASPAVRQRADDLDIDLIKVKGTGPDGHITHADLDGFLTVRARPERPEPMTPHDSAVEEVKVTGLRRKIAEKMVLSVSRIPHITYVEEIDVTELEDLRATMNGNRRSGQPKLTILPFLMRALVKAVADHPGMNAIFDDEKGVVSHYEAVHIGIATQTPAGLTVPVVRHAETLGLWDCAEEVARVAEAARTGTAHREELMGSTITISSLGALGGVVSTPIINHPEVAIIGVNKIMTRPVWDGNRFVPRKMMNLSSSFDHRVVDGWDAAVFIQAVKALLEKPALIFIE

SEQ ID NO: 814 - protein, 275 aa, Glycine max
MSTSAASLALPTLTLRTRQPLCSPQCFSSSLSLTPNNKPISISAVFLKPTTLSSSRFVPHVVVSSDLGQEEDTFSDGDGPSFSPDLKLFVGNLPFNVDSAQLAELFESAGNVEVVEVIYDKTTGRSRGFGFVTMSSVEEAEAAAQQFNGYELDGRALRVNSGPPPARNESAPRFRGGSSFGSRGGGPSDSENRVHVSNLAWGVDNVALKSLFREQGNVLEARVIYDRESGRSRGFGFVTFSSPDEVNSAIQSLNGVDLNGRAIRVSLADSKPKQF

SEQ ID NO: 815 - protein, 337 aa, Pseudomonas putida
MAKRAQSLTITDVTAQGSDAILLSLRVDDEQQPKFTFQPGQYLTLAVEVQGDEHWRCYSITSEPVTGQPISVLVRRVAGGRVSNWLCDNARPGLQLQVLPPAGHFTLARPGQPLLLYAGGSGIAPVFALAREALARGAARVRLFYANRDRATAMLLAELQALQDAAAGRLEIVHWYDAEQGLPTQAVLVAQAQGLDQADAYMCGPEPFMHAVGASLQVAGFDAQRVHREDFGAAVEGASEEAAGDGPEALLTVLMKGQTHAVPVRAGELLLSAMLRAGLPAPHACRVGECASCMCRLQAGEVQRLDSSVLDEDDVAAGWLLACRTRAASPALQVRFS

SEQ ID NO: 816 - protein, 530 aa, Mannheimia succiniciproducens MBEL55E
MNVHNKRIRTMANNRVIIFDTTLRDGEQALKASLTVKEKLQIALALERLGVDVMEVGFPVSSAGDFESVQTIAVHVKNSVVCGLSRAVNKDIDAAAEALKVAERFRIHTFIATSALHVEAKLKRSFDDVVEMAVAAVKRARRYTDDVEFSCEDAGRTGIDNICRVVEAAINAGATTVNIPDTVGFCLPTEYGNIIHQVMNRVPNIDKAVVSVHCHNDLGMATANSLTAVLNGARQIECTINGIGERAGNTALEEVVMSIKTRQDLFGVDTRINTQEIHRVSQMVSQICNMPIQPNKAIVGENAFSHSSGIHQDGMLKNKNTYEIMSPETIGLKKEKLNLTARSGRAAVKGHMADMGYTEQDYDLDKLYEAFLKLADKKGQVFDYDLEALAFIDMQQGDEDRLKLDVITSQTISTLPASAFVQVELDGKRINKTSNGGNGPVDAVYNAIMQIVGMDLKMSHYNLTAKGEGAEALGQVDIVVEYQGRKFHGVGLATDIVESSALALVHAINAIYRSQKVADLKKDLKHIHTV

SEQ ID NO: 817 - protein, 990 aa, Pichia pastoris
MPEPSISALSFTSFVTNDDKLFEETFNFYTKLGFHATRSYVKDNRSDFELTGISTDSIKEIWLESFPLSEVVETSAGRELRKPLQESVGYQSEALLGYSPYQSDGVVIKLRLSNHDLQKNKDLPGEVTFFTASIDKLRAKLIEIGAEIIPSEIDLVEFSTKDPMGDVISFSSYPSLSSKKKITSPDFFLHPKKEVRSQESIVEQVKSEEGKKKIAIITSGGDAPGMNAAVRAVTRAGIFYGCKVYACYEGYTGLVKGGDMLKELQWQDVRGLLSIGGTIIGTARSKEFRERWGRLQACYNMVSNGIDALVVCGGDGSLTGADLFRNEWPELIKELLGEGKITKEQYETHRNLTIVGLVGSIDNDMCGTDSTIGAYSSLERIIELVDYIDATAASHSRAFVVEVMGRHCGWLGLMSGIATGADYIFIPERPPSETNWKDDLKKVCLRHREKGRRKTTVIVAEGAIDDQLNPITSEEVKDVLVEIGLDTRITRLGHVQRGGAPCAFDRFLATVQGVDAVRAVLESTPAIPSPVISILENKIVRQPLVESVAQTKTVSDAIEAKDFDKALKLREQEFATSYESFLSVSKYDDGSYLVPESSRLNIAIIHVGAPTSALNPATRVATLNSLAKGHRVFAIRNGFAGLIRHGAVRELNWIDVEDWHNTGGSEIGTNRSLPSDDMGTVAYYFQQYKFDGLIIIGGFEAFTALYQLDAARAQYPIFNIPMCCLPATVSNNVPGTEYSLGSDTCLNTLSGYCDAVKQSASASRRRTFVVEVQGGYSGYLASYAGLITGALAVYTPENPINLQTVQEDIELLTRTYEEDDGKNRSGKIFIHNEKASKVYTTDLIAAIIGEAGKGRFESRTAVPGHVQQGKSPSSIDRVNACRLAIKCCNFIEDANFQVKHNANLSADERHLRFFCDDGVKTSAVSGKSSVIDDNTSVVIGIQGSEVTFTPVKQLWEKETHHKWRKGKNVHWEQLNIVSDLLSGRLSIRTT

SEQ ID NO: 818 - protein, 446 aa, Arabidopsis thaliana
MTTAVSPPPPQEQQLVHASQTSRVSPKTVESALNGLINWRSDKSKTEKPQLLEEDELVYLFVTLKKIPQKTRTNAYRIPLPHPLINPTVDSPEICLIIDDRPKSGLTKDDAMKKIKSENIPITKVIKLSKLKSDYKAFEAKRKLCDSYDMFFTDRRIIPLLPRVIGKKFFTSKKIPVALDLKHRNWKHQIEKACGSAMFFIRTGTCSVIKVGKLSMDICEITENVMATLNGLVEFLPNKWTYVRSLHLKLSESLALPIYQSVPDLKLKIDAFGSGKSVVQEEKEGEVEEVVAVDGGEKSVTGKGKKKKGRIHEVRYMDSNVAEVLDEDEIGGDEDNNEIVESEEKKMKKRKKEVSEVAESEKPMKKAAKGKLKPDVEKPMKKAAKGKSKPDVEKPMQKAAVKGKVKPDVVKLEKSKDGLKAKKTTMVAKDESGGGLKPKRKSVLRK

SEQ ID NO: 819 - protein, 296 aa, Silicibacter pomeroyi DSS-3
MAATVIDGKAFAARIRGQVAEHVAELKAGHGITPGLAVVLVGEDPASQVYVRSKGKQTVEVGMNSYEHKLDADTSEADLLALIDRLNGDPDVHGILVQLPLPGHLDEDLVINAIDPAKDVDGFHISNVGLLGTGQKSMVPCTPLGCLMMLRDHHGSLSGMDAVVIGRSNIVGKPMAQLLLGDSCTVTIAHSRTKDLADVVRRADIVVAAVGRPEMVPGDWIKPGATVIDVGINRIERDGKTRLVGDVHYDSCAQVAGAITPVPGGVGPMTIACLLANTLTACTRANKLTEPDGLTP

SEQ ID NO: 820 - protein, 115 aa, Oryza sativa (japonica cultivar-group)
MEIESVKCECCGLREDCTQDYIASVRASFYGQWLCGLCCEAVRDEAGRKKAHPGVEEAVRAHMAFCRMFRSNPAVRVADGMRQMLRRRSGDMSKPDTSKKYSTVQVVDESSVSLY

SEQ ID NO: 821 - protein, 129 aa, Zea mays
MGDWVPRGRPGSSSPPTRNRTEKGEEALYPAQPEHPSPRIGTPALRNPPMAEESGRPLPKFGDWDVNDPASADGFTVIFNKARDEKKGGNGQDTESPSKDTRTERVESYAAKPSTKKWFCCVTASPTQS

SEQ ID NO: 822 - protein, 447 aa, Oryza sativa
MNGAGGNHQQQQQQQQRLRQQQQQQALLMQQALQQQQQYQSGVLAAAAAAAMTQMEPISNGNLPPGFDPSTCRSVYVGNVHPNVTESLLIEVFQSSGLVERCKLIRKEKSSFGFVDYYDRRSAALAIMTLHGRHICGQAIKVNWAYASTQREDTSGHFHIFVGDLSSEVNDATLYACFSAYPSCSDARVMWDNKTGRSRGYGFVSFRNQQEAETAITEMTGKWLGSRQIRCNWATKNNAEEKQETDNHNAVVLTNGSSSNPGMEASQDTGSKENPENNPDCTTVYVGNLGHEVNRDELHRHFYNLGVGAIEEVRVQQDKGFGFVRYSNHGEAALAIQMANGLVVRGKPIKCSWGNKPTPPGTSSKPLPPPLPSYQPVPMAGVPQGFSAADIVAYQRQLTLSQVAAGQIAGQHGLAGQVSAGLLAAGSQALYDGYPNQSSAQQLMYYN

SEQ ID NO: 823 - protein, 431 aa, Ehrlichia ruminantium str. Gardel
MMGLLVIATFSIFILLILSAFFSAAETSITSLSSSLVHKLMLKGNKRAKIIHNLSQKKKVVINTVLIGNTIINITASSIATAISIKALGPQGILFSTVAMTFFILIFSEALPKSYAILNPEKTALLISYPLSFCVLILSPITLSIQYIIDCILKILHMHKDKEIISAADAMRNLISLHDSKGTMLKQDLDMLSSILDLAETEISQIMTHRKNLLAFNIDTNIHDLIKKILSSPHSRIPLWKNQEDQVVGVVHVKDVITLVREKGKNITQEDLHIVMTKPWFVPDSTLLSVQLHNFLRSRKHLALVIDEYGALQGIVTLEDVIEEIVGDITDEHDITKEAPIKKISDTTYHINGDTSIRDINRQLRWDLPDEDASTLAGAIVYEVERIPEEGEEFSLYGLLFKILKKNGHTISLIQVNVSPENTSITQLDEK

SEQ ID NO: 824 - protein, 422 aa, Streptomyces steffisburgensis
MNRRVVITGIGVVAPGGTGAKKFWDLISAGRTATRRITFFDPAPFRSQVAAECDFDPRDEGLSPQQIRRTDRSAQLALVSARECVEDSGLDLAALDPARTGAVVGSAVGCTMGLEEEYVVVSDGGRTWQVSEEYAVPHLFNYYVPSSLAAEVAWDVGAEGPVATVSTGCTSGLDSVGQAVELIAEGSADVMVAGAADAPISPITMACFDAIKATTPRNDDPSTASRPFDRTRNGFVLGEGSAMFVLEDLDHALRRGAYVYAEIAGFASRCNAFHMTGLRPDGKEMAEAIRVALARSGTAPEDIDYINAHGSGTLQNDRHETAAFKRSLGAHAYRTPVSSIKSMIGHSLGAIGSLEIAACALAMRNGMVPPTANLHTPDPDCDLDYVPLVARERRVDTVLSVGSGFGGFQSAMILRRPEGKPA

SEQ ID NO: 825 - protein, 563 aa, Xylella fastidiosa Temecula1
MCSIFGIFNLQPSDNLQILRHQALECSQRQRHRGPDWSGVYVDVGAILVHERLAIVDPAGGAQPLFSEDGTLALAVNGEIYNHAVLKGTLQQPYAFQTHSDCEVINALYREETPTSFLNRLNGIFAFALWDKTTGRGLIARDPMGVVPLYWGHDQDGRLRVASEMKALVEHCPDVAQFPPGHWYDTTTGTLVKYYERPWKNYSAVEGVQVSLQELREAFERAVHRQLMTDVPYGVLLSGGLDSSLVAAVAARYARHRIETNDQSEAWWPRLHSFAIGLKDSPDLSAANVAAEALNTVHHGFEYTFQEGLDVLPEVIRHIETYDVTTIRASTPMFLLARRIKAMGVKMVLSGEGSDEIFGGYLYFHKAPNAREFHEELVRKLNALYYYDCLRANKAMMAWGVEPRVPFLDREFLDVAMRMDAQHKMVDKTSNGPQRMEKGILRAAFDGYLPPSILWRQKEQFSDGVGYGWIDGLKAHAETQVSDHALATAETRFQVNPPQTKEAYYYRSIFERFFPSPAAAETVPGGKSIACSSPAAIAWDASFATMADPSGRAVSGVHQQALL

SEQ ID NO: 826 - protein, 354 aa, Bacillus anthracis str. 'Ames Ancestor'
MEKRIVCLAGDGVGPEVMESAKEVLHMVERLYGHHFHLQDEHFGGVAIDLTGQPLPQRTLAACLASDAVLLGAVGGPRWDGAKERPEKGLLALRKGLGVFANVRPVTVESATAHLSPLKKADEIDFVVVRELTGGIYFSYPKERTDEVATDTLTYHRHEIERIVSCAFQLASKRKKKVTSIDKANVLESSKLWRIVTEEVALRYPDVELEHILVDAAAMELIRNPGRFDVIVTENLFGDILSDEASVLAGSLGMLPSASHAEKGPSLYEPIHGSAPDIAGKNKANPIAMMRSVAMMLGQSFGLTREGCAIEEAISAVLKSGKCTADIGGTETTTSFTKAVMQEMEEQALVGRGR

SEQ ID NO: 827 - protein, 240 aa, Burkholderia xenovorans LB400
MTLQTGTLVVLRHGQSIWNRANRFTGWSDVGLSVQGVADAQRVGERLREAGFRFDLAVTSALLRATDTLAHVLRTLEQPPPRTVRSWRLNDRHYGMLTGMEKDEAALAYGAERVRQWRRGFDLAPPALDADLHAALVRALHDDAMPHADALPRTESLRDTLRRVLPLWDECVAPALTRGQSVLMVGHGNSLRALFKQLDNIGDDAIASVEVAHAEPLVMKFDATLSVISRTPLAALAASR

SEQ ID NO: 828 - protein, 275 aa, Candida albicans SC5314
MTLGVVENFNSNESEYATVYPCVEILRGRLGAPTDEEMILSQGLFETLYHTKIIPSTSLKINNLGISIKDDQTTTTSQTNSTIYYPDLNPGQWEYINLTSHHHKSYSFVLLSNIKVYSKSTSTSSLFDLCYLSMLEALKSLKLPRCYVSESFTTKVAMKSRRSNTRGLVDTNKASINIDLNKSLYEKIDLNIKSGTIASNFGVISHEGNTILLADLEGEAEESSVLSRLSIITNNDSINKISLVNGDPESEITLEMLKNAIEISKQRSREQGQQI

SEQ ID NO: 829 - protein, 357 aa, Xylella fastidiosa 9a5c
MSKQILILPGDGIGHEIVAEAVKVLEHVNVRHTLNLRLSFDALGGAAYEKYGSPLADETLARARDADAVLLGAVGGPQWDTIDPALRPERGLLKIRAQLGLFANLRPALLYPQLADASTLKPEVVAGLDILIVRELTGGLYFGQPRGSRISKNGEREAFDTLPYCESEIRRILKVGFEMARLRGKKLCSVDKANVLASSQLWRTVAGEMAKDYPDVTLSHMYVDNAAMQLVRHPKQFDVIVTENMFGDILSDQASMLTGSIGMLPSASLDANNKGMYEPCHGSAPDIAGQGVANPLATILSVAMLLRYSMGHIKTADAIEHAVGVVLDSGLRTADIWSEGMTKVGTVAMGDAVVAAL

SEQ ID NO: 830 - protein, 148 aa, Capsicum annuum
MASKRILKELKDLQKDPPTSCSAGPVAEDMFHWQATLMGPSDSPYAGGVFLVTIHFPPDYPFKPPKVAFRTKVFHPNINSNGSICLDILKEQWSPALTISKVLLSICSLLTDPNPDDPLVPEIAHMYKTDKSKYEATARSWTQKYAMG

SEQ ID NO: 831 - protein, 119 aa, Lepidium sativum
PGSFNKILITYETGTYNGQWSAVGRTAVTTTLAGCTAALTTLFGKRLLSGHWNVTDVCNGLLGGFAAITGGCSVVEPWAAIICGFVGALVLLGCNKLAEKLKYDDPLEAAQLHGGCGAW

SEQ ID NO: 832 - protein, 119 aa, Capsella bursa-pastoris
PGSFNKILVPYETGTYNGQWSAVGRTAVTTTLAGCTAALTTLFGKRLLSGHWNVTDVCNGLLGGFAAITGGCSVVEPWAAIICGFVAALVLLGCNKLAEKLRYDDPLEAAQLHGGCGAW

SEQ ID NO: 833 - protein, 451 aa, Oryza sativa
MAEPEFEQAYKELASTLESSTLFEKNPEYRKALEVVSVPERVIQFRVVWEDDSGKCQVNKGYRVQFNSALGPYKGGLRLHPTVNLSILKFLGFEQIFKNALTGLNMGGGKGGADFDPKGKSDNEIRKFCVAFMTELSKHIGADTDVPAGDINVGGREIGYMFGQYRRLRNQWEGVLTGKGLNWGGSLIRPEATGYGLVYYVDHMINYASGGKESFKGKKVAISGSGNVAQYAALKVIELGGTVVSLSDSKGSLIATEGKGFTPEDISQIAALKLKRQALTALEGHSYNYIEGARPWKHVGNVDVALPSATQNEVSQDEAEALIAAGCKFIAEGSNMGCTQEAIDAFENHRKSNKGSSIWYAPGKAANAGGVAVSGLEMAQNSQRLSWTNEEVDAKLAKIMKDCFENCLATAKEYITPAEGEFPSLVAGANVAGFKKVAAAMHDQGDWWGTA

SEQ ID NO: 834 - protein, 681 aa, Ustilago maydis 521
MSPVPTQDSSSMLPSTMQHAHTSLVEPAQKLGSDSFSYAHLCSTRSHSHPIQDHPFAAASEFSSLASPTSSASASDHPTCTPASSGIPSPFEELAESDMLKSSGQADCDSKNTLFDQWRPTSHFLGPHGWMNDPCGPSYDPRTGLYHLWYQWNPSGSTWGNISWGHAYSHDMVHWTCRHQPVLSPGANHDSEGVFTGCVLQRASIGAPEQAASSAEMSALYTAVSKLPIHHTLPYHYGSEKVVLSTSADGGETWTPQGIVVHGPPEHLDVISWRDPYIGEWPLLDALLARETRGLYALIAGGIKDTTPTTFAYSIDATDLSQWTFVGTLADVGVNYKAAPYGIDLGKNWEVANFFTITDKSNAARSTAAEYLLINVEGCTEPGPARQPVYMRLDLDATQQTDEGEIRLASAHVGLLDHGCLYAASSFHDQKHNRRIMWGWITEDDLPEEYYNTQGWAGLISLPRELFHHASSCELGIRPAIEVDELRRGAQRISVSSDCMVSHAILELAEAAATDATADADAVAVAKAEAEAEAVELGVVHVPQVNRRSYELQIELSADQPGLVVAHSKDLSTRTLVYISSCGQLVVDRSLSAGQTSVIAKQINVNTCTLRAPLSTQSPTHKLRMFLDNSVLEIFLDDLIALSTRIYPDPDDVHLSILTNPNAKPQGDVHIWQGLDRAILG

SEQ ID NO: 835 - protein, 500 aa, Desulfitobacterium hafniense Y51
MIELKQVSFAYGNGERDSGLEDIGLKVEEGEFLLLCGGSGCGKTTLTRLLNGLIPNFYGGVLKGQVWVGGLDVAKAPLYETAGKVGSVFQNPRSQFFNMDTTGELAFGCENMGLPLKEICARVERIALELGLEPLLDRNIFALSGGEKQKIACGAVAALGPQVYVLDEPSSNLDALAIEELRALLTKLKAQGKTVIIAEHRLYYLRELVDRVIYMKKGRIQQEYSGQEFRALPRGELDAMGLRSLSLEGLLEGAPVHLPRTEGAIALSGFSFAYPRGGRSLDIRETSFPQGAVVAVTGHNGAGKSTLARCLCGLEKKCRGRMGMQGESLGRKERLKRSYMVMQDVNHQLFTESVLDEVLISMGHPDVKQGEEILKGLDLLQFKERHPMSLSGGQKQRVAIASAIASRRELILFDEPTSGLDLLHMQGVARSLSQLAGIGKSVLVVTHDPEFILSCCTHILHMQEGKIIDNRPLDACGRGRMLSYFLEAVKEPGERRERVV

SEQ ID NO: 836 - protein, 121 aa, Oryza sativa
  misc_feature (22)..(22): Xaa can be any naturally occurring amino acid
MAAARGQKAVAALPNLVKSLRXEPVSNAPRLRHLPSLRRTFSLYDQINLIDSVPEDQLRFQSYDDTGFNINKVKYEGSLLIVENKIMTWAPKSFAEITAESLSIFKVVHPIPGNSAIGQHF

SEQ ID NO: 837 - protein, 414 aa, Coccidioides immitis RS
MAGDGNNLRHEALLLLPGATFPSFAALKLAYEQAISTALLALSSSVKGSRRSAILDIAVAVSGLSLPDAEMRTKSFDRLQRLLASIYRLVGVVGVKRSVDLDGPGGVDARIFFVDCTHGKPIESQTSGPPQIGPVVNLASLAAAGRSWEHIYSVDSPQGNEFLRDLREAIAPNLGNQLKIRKLPGTSGAQSLALHADRTTTHSTPHYSVAVGGTFDHLHTGHKLLLTATVLPLDPYVAQSPQKRRIVTIGITGDEMLVNKKYAEFLESWEERWRGVWEFLQSVVDFSSPSDRSQTKFERISDPGPNGQRVIVLVGSSLEFRFVQIADPFGPTITDEDITALVVSKETRSGGKSVNDEREKKGWATLEVFEVDVLDLSEAEAGTGETSAENFESKISSTEIRRRRMNVAKGSPSL

SEQ ID NO: 838 - protein, 544 aa, Oryza sativa
MAAAAASSTPLFSPCCAAATAKLGAACPSSYGSRRRPCTRRGRLSVVAVQTGPQKPSPSSSSQAGTESETLQNLLKREYKYGFVSDFESFSIPKGLSEATVRRISELKAEPAWMLDFRLAAYRRFLTMVQPTWSDNVYEPVDLQSICYYSAPKTKPKLNSLDEVDPELLNTFDRLGIPLSEQKRLANVAVDAVIDSTSIATTHREELMKKGVIFCSISEAIREYPDLVKRYLGSVVPPADNYYAALNSAVFSDGSFCYVPKDTVCPMEISTYFRINDKETGQFERTLIVADERSTVSYLEGCTAPAYDSNQLHAAVVELVCEEQAEIKYSTVQNWYSGDEEGKGGIYNFVTKRGRCKGRGSKISWTQVETGSAITWKYPSVELLGDDTVGEFYSVALTKDYQQADTGTKMIHKGKNSRSRIISKGISAGKSRNCYRGLVQINSGAENAYNSSQCDSLLIGDNAAANTYPTIQVGCISSRVEHEASTSKIGEDQLFYFQQRGIDHEKAVAAMIGGFCRAVFENLPYEFAHEMDALMNLKLEGSVG

SEQ ID NO: 839 - protein, 109 aa, Pseudomonas syringae pv. tomato str. DC3000
MSNDLIKHVTDASFEADVLKADGAVLVDYWAEWCGPCKMIAPVLDEIATTYAGKLTIAKLNIDENQETPAKHGVRGIPTLMLFKNGNVEATKVGALSKSQLAAFLDANI

SEQ ID NO: 840 - protein, 464 aa, Vibrio fischeri ES114
MPLHSKNAVRDDLLDDIYSSADLSLSMPKYKMPEQEHDPRHAYQVIHDELMMDGNSRQNLATFCQTWVEDEVHKLMDECIDKNMIDKDEYPQTAELESRCVHMLADLWNSPDAENTLGCSTTGSSEAAMLGGMALKWAWREKMKKLGKPTDKPNMICGPVQVCWHKFARYWDIELREIPMEGDRLIMTPEEVIKRCDENTIGVVPTLGVTFTCQYEPVKAVHEALDKLQEETGLDIPMHIDAASGGFLAPFCDPDLEWDFRLPRVKSINASGHKFGLSPLGVGWVIWRDASALHEDLIFNVNYLGGNMPTFALNFSRPGGQIVAQYYNFLRLGKEGYRKIHQACYDTAVYLSSEIEKLGMFEIIYDGKGGIPAMSWSLKEGVDPGFNLFDLSDRIRSRGWQIAAYAMPPKREDLVIMRILVRHGFSRDQADLLVADLKHCVEFFAKHPISHGSDELESSGFNHG

SEQ ID NO: 841 - protein, 463 aa, Streptococcus pyogenes MGAS315
MTIFRKKKKYSNKTEMQRHFKVIDLIFLGLGSMVGTGIFTVTGIGAAKYAGPALTISIIISAIAIGILALFYAEFASRMPSNGGAYSYVYATLGEFPAWLVGWYIIMEFLTAISSVAVGWGSYLKGLLANYNIVLPNALNGTFNLKNGTYIDILPVLVMFFVTGIVLMNSKLALRFNSFLVILKFSALALFIFVGIFFIDHNNWFHFAPYGVGQITGGKTGIFAGASVMFFAFLGFESISMAVDEVKEPQKTIPKGIILSLIIVTALYIVVTTILTGIVHYTKLNVPDAVAFALRNIRLYWAADYVSIVAILTLITVCISMTYALARTIYSISRDGLLPKSLYTLTKKNKVPQNATLVTGLLAMICAGIFPLSSLAEFVNICTLAYLIILSGAIIKLRRIEGEPKANEFKTPLVPFLPMLAIIICLSFMSQYKAFTWIAFAIATIIGTLIYLAYGYTHSIENK

SEQ ID NO: 842 - protein, 286 aa, Oryza sativa
MKAAASPLRAALLLFLSSSPSPRLALPMNPSSSSSSRGAASYHSKAAAFASPQPRGGGGGRGGRRGGGRGRGGDGSDRIDALGRLLTRILRHMASELNLEMRTDGYVRVRDLLKLNLQTFAKIPLKSHTVDEIKEAVRRDNKQRFGLLEEDGELLIRANQGHTVTTVTSESLLKPILSADEVSVCVHGTYRKNLDSILHQGLKRMARLHVHFSSGLPTDGGVISGMRQSVNILIYLDVSMALQDGMKLYISDNKVILTEGFDGVVPVKYFEKIETWPGRAPIPFEK

SEQ ID NO: 843 - protein, 275 aa, Glycine max
MASSIGMMDSAYFVGRNQILTWINNRLHLNLSRIEEAASGAVQCQMMDMTFPGVVPMHKVNFDAKTEYDMIQNYKILQDVFNKLKIDKHVEVSRLVKGRPLDNLEFLQWLKRYCDSVNGGIMNENYNPVERRVKVGKDRNHKCSVKSSKSLQTNMINSGSGNTLSPNRTSGTKQFRSNEAAGGVNSSVEIQALSKEITDLKSAVDLLEKERDFYFAKLRDIEILCQTPEVENFSMSVAIKKVLYADDPKESALEEAQDYLNQRLNAVEDEAEIEA

SEQ ID NO: 844 - protein, 586 aa, Securigera parviflora
MCGILAVLGCSDDSQAKRVRVLELSRRLKHRGPDWSGLHQHGDCFLAHQRLAIVDPASGDQPLFNEDQSIIVTVNGEIYNHEELRKQMPNHKFRTGSDCDVIAHLYEEHGENFVDMLDGIFSFVLLDTRDNSFIVARDAIGVTSLYIGWGLDGSVWIASELKGLNDDCEHFETFPPGHLYSSKEREFRRWYNPPWFSESIPSAPYDPLALRQAFEKAVVKRLMTDVPFGVLLSGGLDSSLVASITARHLADTKAAKQWGAKLHSFCVGLEGSPDLKAGKEVADYLGTVHHEFQYTVQDGIDALEDVIYHIETYDVTTIRASTPMFLMSRKIKSLGVKWVISGEGSDEIFGGYLYFHKAPNKEELHKETCRKIKALHKYDCLRANKSTFAWGLEARVPFLDKEFINVAMNIDPENKMIKLDEGRIEKWILRKAFDDEENPYLPKHILYRQKEQFSDGVGYGWIDGLKDHAAKHVTDRMMLNASNIYPFNTPTTKEAYYYRMIFERFYPQNSARLSVPGGASVACSTEKALEWDAEWSKNLDPSGRAALGVHVSAYENQLSSSVSKGVEPEKIIPKMEISPLGVAIQS

SEQ ID NO: 845 - protein, 1027 aa, Saccharum hybrid cultivar
  misc_feature (168)..(168): Xaa can be any naturally occurring amino acid
  misc_feature (432)..(432): Xaa can be any naturally occurring amino acid
TRPASRCSTGGSHGRLLCWLLLACSWVAATTGQQTARTDPAEVAALNTILGRWGLKASAAWNISGEPCSGVAVDTTNVDDNPNINPAIKCDCTYNNATVCHITKLKVYALNVVGQIPAELQNLTYLNNLNLMQNYLTGPVPSFIGKFPMQYLSLAINPLSGTLPKELXNLTNLISWGISLNNFTGELLLELGNLTKLEQIYFAGSGFSGHFPTFSRLKNLKILWASDNDFTGKMPDFIGSLTQLEDLRFQGNSFEGPIPKSLSNLTKLTSLRIGDIVNGSSSLSFISNLTSLNVLILRNCRISDTLATVNFSNLAGLTLLDLSFNNLTGQIPQSILNLEKLGFLFLGNNSLSGSLPDVKSPSLNDLDFSYNQLSGSFPSWATQNNLELNLVANNFILGSSNNSILPSGLNCLQQDIPCFRGSPEYSSFAVDXGSTRSMEGLRYTFYEIDPTNIGAASYYVTGQTRWGVSNVGKFNEAPNGSYIIYSSQQFQNALDSELFQTARMSPSSLRYYGIGLENGNYTVELQFAEFAYPESPTWQSTGRRVFDIYIQGGLKEKNFNIRKTAGGKSYVAVYKKYNATVSKNFLEIHLFWAGKGTCCIPTQGYYGPMISALSVTPSFTPTVRNGVPKKKSKAGAIAGIVIGAAVLGLAALAGTFMLVQKRRRVAQQQEELYNMVGRPNIFSNAELKLATDNFSSKNILGEGGYGPVYKGKLPDGRIIAVKQLSQTSHQGKSQFVTEVATISAVQHRNLVKLYGCCIDSNTPLLVYEYHENGSLDRALFGNSGLSLDWPTRFEIILGIARGLTYLHEESSVRIVHRDIKASNVLLDTDLTPKISDFGLAKLFDEKKTHVSTKIAGTFGYLAPEYAMRGHLTEKADVFAFGVVALETVAGRSNTDSSLEENRVYLFEWAWELYERDKALDILDARIEEFDSEEALRVISVALLCTQGSPHQRPPMSRVVKMLTGDVEVTEVVTKPSYITEWQRRGGNTSYVTSDYSGDTTGEFSMQRETIAPLTPSPAMTGVIDDGR

SEQ ID NO: 846 - protein, 745 aa, Candidatus Pelagibacter ubique HTCC1002
MTAADTQILLNKLQSNINQLELTNKGALNALEFRLDAILQANLDTFWLLICAILVFLMQAGFMCLETGLSRNKNSINVALKNVSDFGISVVVFWAFGFALMYGTSVSGLFGTKFFFFTTKVAGYQTYFVFQAMFVATAATIISGAVAERLKFFSYIIITLLVSGLFYPIVGHWSWAFNFENPDQKFGWLGQLGYLDFAGASVVHSVGGWIALSVLLVVGNRTGRFREDDKKKSFQGSNTPMAALGALILWFGWFGFNGGANGAMDLKIPLILINTFLSASFGLIFSSVMGIIVLKKPEPLFMITGPLAGLVSITASCAYVDPTHAIIIGSIGGIISGSTIVLLEKIKIDDVVSAIPVHLACGIWGTIAVALFANFELMGVEKTRLEQIYIQLIGISSIGAFCFIGSYLILKTINSFFPLRVSKIHEELGLNISEHNASTDTHELLEVLTNQAKSDNYSSRAPQDPFTESGIIGTQYNVIMNKLEQSEKQKNKWKNRVSKEIKLAMNVQQRLMPKRDIENYPIFGLNIPAREISGDFYDFYLHDDEVYFTLSDVSGKGVNAGMVMAKAITLFKIFAKQKFKPNEILLEMNNDLKETNPVGTFITSIVGRYNLKTDLVEIANAGHQPTLLKVGKDFKEYPSSSMPLAVIKHKDESVYQLESFKLNGGRIYCFTDGFSECMDENKQEIGIDGVKELILKHTNSSLQKELTSATEEIRLKSLKKEIVEDGVKKDNDILDDDLTIIAIGK

SEQ ID NO: 847 - protein, 473 aa, Bacillus megaterium
GAMTIKEMPQPKTFGELKNLPLLNTDKPVQALMKIADELGEIFKFEAPGRVTRYLSSQRLIKEACDESRFDKNLSQALKFVRDFAGDGLFTSWTHEKNWKKAHNILLPSFSQQAMKGYHAMMVDIAVQLVQKWERLNADEHIEVPEDMTRLTLDTIGLCGFNYRFNSFYRDQPHPFITSMVRALDEAMNKLQRANPDDPAYDENKRQFQEDIKVMNDLVDKIIADRKASGEQSDDLLTHMLNGKDPETGEPLDDENIRYQIITFLIAGHETTSGLLSFALYFLVKNPHVLQKAAEEAARVLVDPVPSYKQVKQLKYVGMVLNEALRLWPTAPAFSLYAKEDTVLGGEYPLEKGDELMVLIPQLHRDKTIWGDDVEEFRPERFENPSAIPQHAFKPFGNGQRACIGQQFALHEATLVLGMMLKHFDFEDHTNYELDIKETLTLKPEGFVVKAKSKKIPLGGIPSPSTEQSAKKV

SEQ ID NO: 848 - protein, 423 aa, Ehrlichia ruminantium str. Gardel
MAGKRVVITGLGLVTPLGNDIKTVWDLLCKGTSGIKKINRFDASDLDCKIGGQIIMKSDSEIHTFDPANWIEEKELKKMDIFIHFGIAAAIQAVNDSNLLAYSNLDYNRVGVIVGSGIGGLAFIEKTSICLQDRGPKRISPFFIPASLINLLPGHISIKYGFAGVNDGGVTACATSAQTIGNAARIIKSGEADVIIAGGAESAICRMGVAGFAALKALSTKFNDTPELASRPWDKQRDGFVMGEGSGIIVLEDYEHAKKRNAKIYAELIGYGMTADAYHITAPHPEGKGGKKSMELALSSAQLSPDSINYINAHGTSTPIGDSTEIHAIKEVFKDSTYKIPISSTKSSIGHLLGAAGSVEAIFCILAINTGIVPPTLNLYDSSEDPKLNLVPLTAQEHTINYALSNSFGFGGTNVSLVFSKLY

SEQ ID NO: 849 - protein, 583 aa, Xylella fastidiosa 9a5c
MNRSAHSATRNGASWLTHALEAEGVDTLFGYPGGTIMPFYDALVDSRLTHILVRHEQGAALAANGYARASGRVGVCVATSGPGASNLITGIADAMLDSVPMVCLTGQVASSLLGTDAFQELDVFGLTMPIVKHSFLVRSIQDLPSMVQDAFRIAREGRPGPVLIDLPKDVQMTDASHLQDHVSAAVMAPPQAEAAMIIEAAAAIASAEKPVIYGGGGIALADAVNVFRTFVDTTSIPTTLTLRGLGALPHAHPHYLGMLGMHGTRAANMAIQECDLLLVIGARFDDRATGKVNEFAPFARIVHLDADAYEINKLRNADIAVPGNLATTLTALSALLSPSTAHPHISSSRYEWQERCIGNRERFGVRYDAPGNDIYAPALLKRLSEMAPVDTIIACDVGQHQMWVAQHCKFEDPRNHLTSGGLGTMGFGLPAAMGAQFAYPERTVVLVSGDGSFMMNVQELTTIARCKLPLKIVLLDNNSLGMVRQWQELFFAERYSEIDLSDNPDFTALVQVFGIPAKRITVRSDVEQGLAYLLAQPGPALLHVQIDARANVWPLVPPNTANSTMLESNPAHVKKEAPHAIPA

SEQ ID NO: 850 - protein, 107 aa, Glycine max
MAKFFAAMILALIAISMLQTVVMAANEQGGHLYDNKSKYGSGSVKRYQCPSQCSRRCSQTQYHKPCMFFCQKCCRKCLCVPPGYYGNKAVCPCYNNWKTKEGGPKCP

SEQ ID NO: 851 - protein, 489 aa, Francisella tularensis subsp. holarctica
MVELKVPMFPESVADGTLAQWNKNEGDFVNEGDILAEIETDKVVLEVPATSSGVLKGIKKHAGDTVLSEESLAIIDTAVSTSEPNQQTTNQGNASEATATGQEIDIKAPVFPESVADGTISEWHKKEGEAVSEGDILAEIETDKVVLEVPATSNGVLTKILKTAGETVLSAELIAKITAGGATATAKSEASVGVSQANNDPHLVPSARKAFNASGLDTAANIEGTGKKGRITSEDVKKAVASVNKPQQQTVVINQGARYEKRVKMTRLRQTIANRLVEVQHTNAILTTFNEVDMSAVMELRNKYKDMFVKEHDTKLGFMSFFIKAATEALKKFPDVNASIDGDEIVYHNYFDIGIAVGTDRGLVVPVLRDTDTKSLAELEADVLDKAIKGRDGKLSLEDMQGGTFTITNGGTYGSMLSTPIINSPQSAILGMHNIVERPVVVKGEIKIRPIMYLALSYDHRIIDGGTSVRFLKMIKELIEDPNRILLQV

SEQ ID NO: 852 - protein, 493 aa, uncultured archaeon GZfos32G12
MQEVKTVKILDTTLRDGEQTPGVSLTPEQKLQIAKQLDILGVDFIEAGTAIISEGEQKAIKAIAAEGLKAEISSFARLLKGDIDAAIKCGVDTVNLVAPVSDDHIKKKLRKDRETLRDMTIEMSEYVKGHGLKVEISAEDASRADMGFLKSFFYDLGQIVDRLSFCDTVGVLYPERTKEMFQALCSCDTPVSVHCHNDFGLATANSVAAVMAGAKVVHVTVNGLGERAGNASLDEVVTALELLYGVKTNIAKEKMYETSRVVMNLTKMPIAPNKPLMGDNAFTHESGMHVHGTLADKSLYEPIDPGLIGRKRRFAIGKHTGKASVKMKLDEMGISADDEQMQKILTEVKELGDKAKLITDSDFQAIVDDVLHIEREEKIKLVDLSVVSGKNVYPTASLRLEIDGEEVVEAGVGIGPVDAAINALRKAMAGMEMNDLRLEEYHVDAITGGTDALVNVLVKMSRGDETITASGVSADIVIASVYALINGVNRLYR

SEQ ID NO: 853 - protein, 413 aa, Enterococcus hirae
MEFSIDNNINDGAVIKVIGVGGGGGNAVNRMIEENVKGVEFITANTDVQALKNSKAETVIQLGPKYTRGLGAGSQPEVGQKAAEESEQALREALDGADMIFITAGMGGGTGTGAAPIVAGIAKELGALTVGVVTRPFTFEGPKRGRFAAEGIARLKENVDTLLIISNNRLLEVVDKKTPMLEAFREADNVLRQGVQGISDLITAPGYVNLDFADVKTVMENQGTALMGIGVASGEERVIEATKKAISSPLLETSIDGAEQVLLNITGGLDMTLFEAQDASDIVANAATGDVNIILGTSINEEMGDEIRVTVIATGIDESKKERKSSRPARQTQMQSSTQKTVLDMDQAKPISAEEENSSFGDWDIRREQNVRPRVEETNFEPIEKKEFDTFNREETKAKGDDELSTPPFFRSK

SEQ ID NO: 854 - protein, 429 aa, Ralstonia metallidurans CH34
MSSAGFIVCKNMHFTCMIQGVLLMLSAASRPYIDASVPVLREHGLAITTHFYREMFAARPELKRIFNMGNQANGSQQQSLASAVFAYAANIDRADVLAPVVERIVHKHVAVGLTPAHYPIVGKYLLEAIAAVLGDAATPPLLAAWDEAYWLLAGELIAAEARLYERHGVAAGELLRVRVVNREQEGDQVVALTLAAEDGSPLRDFAPGQYISVEASFADGRRQLRQYSLSGERGLPTWRISVKREDGASDAPAGTVSNWLHENAQVGTTLHVSTPWGDFAPELDSRQPIVLMSAGIGVTPMVSVLRTLAHENPHRPVLFAHAARHGRQHAHRRDLAWARERMPNLRTHVSYETPQSVDASGRDYDHAGTMPVEALLKSGDNAAFNDARFYLCGPLGFMQEQRRALIASGVPVGHIHREVFGPDLLDDIL

SEQ ID NO: 855 - protein, 496 aa, Oryza sativa (japonica cultivar-group)
MHNIRQYQLPLQKYMAMMDLQEGNERLFYKLLIDNVEELLPVVYTPTVGEACQKYGSIFSRPQGLYISLKEKGKILEVLKNWPERSIQVIVVTDGERILGLGDLGCQGMGIPVGKLALYTALGGVRPSACLPITLDVGTNNEALLNDEFYIGLRQKRATAQEYADFLHEFMTAVKQNYGEKVLIQFEDFANHNAFELLAKYGTTHLVFNDDIQGTASVVLSGLVAALKLVGGSLSEHSYLFLGAGEAGTGIAELIALEISRQTKAPIEECRKKIWLVDSKGLIVSSRKETLQHFKKPWAHEHEPVGNLLDAVKTIKPTVLIGTSGKGQTFTQEVVEAISSFNERPVIFALSNPTSQSECTAEQAYTWSKGRAVFASGSPFDPVEYDGKIYVPGQANNAYIFPGFGLGVVMSGAIRVHDDMLLAASEALAQQVTQENFDKGLTYPPFSNIRKISAHIAANVAAKAYELGLASRRPRPKDLVKYAESCMYSPLYRNYR

SEQ ID NO: 856 - protein, 652 aa, Caulobacter crescentus CB15
MSNNSSAETEAPETTGGDGPLLDLTDAGVKKFIKQAKARGYVTMDELNKVLPSEEVSPDAIEDTLAMLSEMGVNVVEAEEDAENAEGGEVATRDENTTVIASDKPAAYDRTDDPVRMYLREMGSVELLSREGEIAIAKRIEAGRDTMIRGLCESALTFEAIMVWREELGTGRILLREVIDLEGTYAAINGVAAQPAAEDDEGPAEPVDDEAGEAKAEGAEGEDEDDFDDGAGPTVSAMEGELREGVMAILDAIASEFEAFRKLQDKLVGSRLKGEDLSDADRKAYEGLSATIIQHLKTLKLNNNRIEALVEQLYAINKRLIGLEGRLLRLADSYGISRGEFLKAYFGSELNPTWSEQVKAMGVRWTKFVENDSQSVTDIRSEIAALATETGVPIDDYRRIVQTVQKGEREARQAKKEMVEANLRLVISIAKKYTNRGLQFLDLIQEGNIGLMKAVDKFEYRRGYKFSTYATWWIRQAITRSIADQARTIRIPVHMIETINKIVRTSRQMLHEIGREPTPEELAEKLAMPLEKVRKVLKIAKEPISLETPIGDEEDSHLGDFIEDKNAILPIDAAIQSNLRETTTRVLASLTPREERVLRMRFGIGMNTDHTLEEVGQQFSVTRERIRQIEAKALRKLKHPSRSRKLRSFLDS

SEQ ID NO: 857 - protein, 640 aa, Corynebacterium efficiens YS-314
MCGLLGILSANGNAADYVPALQRALPCLHHRGPDEAGTWQDGDLAFGFNRLAIIDIAHSHQPLRWGPEGEPERYAMTFNGEIYNYIELREELTALGYAFETEGDGEPIMVGFHHWGADVVNHLRGMFAIAIWDTVDRSLFLARDQFGIKPLFYATTGVGTVFSSEKKAILEMAEELNLDLSLDRRAIEHYVDLQYVPEPETLHTGIRRLESGCTATIIPGGELVEKRYFTPRFPVKSVPKGREQDLFDRIARVLEDSVEKHMRADVTVGSFLSGGIDSTAIATLAKRHNPNLLTFTTGFEREGYSEVDVAAESAAAIGVEHIVKIVSPEEYANAIPKIMWYLDDPVADPSLVPLYFVAAEARKHVKVVLSGEGADELFGGYTIYREPLSLAPFEKIPTPLRRGLGRLSRVLPEGMKGKSLLERGSMTMEERYYGNARSFNFEQMQRVIPWARREWDHREVTAPIYAQSRDMDPVARMQHLDLFTWMRGDILVKADKINMANSLELRVPFLDKEVFKVAETIPYDLKIANGTTKYALRKAMEQIVPPHVLHRKKLGFPVPMRHWLAGDELFGWAQDTINESQTDEIFNKKAVLEMLNEHRAGVSDHSRRLWTVLAFMVWHGIFVENRIDPQIEQRDYPVEL

SEQ ID NO: 858 - protein, 305 aa, Lactobacillus reuteri
MTNKVIVGSRKSKLAMAQTELVIASLEKIFPDIKFEIKNVITEGDRNRHVSLAKIGGKGVFVKEIEDELKDGTIDFAVHSLKDVMPILPEELVLGAFPKRVSPYDCLVSRKNLSSLNDLPKGARIGTNSLRRQGQLLSIRPDLKIIPIRGNIDTRLRKIDTEALDGIILAEAGLTRLNIDLSSYHVLDLQNYIMPAVGQGCLAIECRKNDTRIRKMLDQINDEESAYCVQVEREFMRELGGSCNFPIGGHAYAKNGQILFDGLIASPNGEHVIKETKIPANNSGVGKKVADQLLAKDKFGIIEGE

SEQ ID NO: 859 - protein, 333 aa, Streptococcus pyogenes MGAS315
MMSETKLMALREAVNLAMTEEMRKDENIFLMGEDVGVYGGDFGTSVGMIEEFGPKRVKDTPISEAAISGAAIGAAITGLRPIVDVTFMDFLTIMMDAIVNNGAKNNYMFGGGLITPVTFRVASGSGIGSAAQHSQSLEAWLTHIPGIKAVAPGNANDAKGLLKSAIRDNNIVLFMEPKALYGKKEEVNQDPDFYIPLGKGDIKREGTDLTIVSYGRMLERVLQAAEEVAADGINVEVVDPRTLIPLDKELIIESVKKTGKLMLVNDAYKTGGFIGEIATMITESEAFDYLDHPIVRLASEDVPVPYARVLEQAILPDVEKIKAAIVKMANKGN

SEQ ID NO: 860 - protein, 502 aa, Coccidioides immitis RS
MSDLFTELTAPNGRKYTQPLGLFINNEFVAAKSGQKITSINPTNEAEIASVHAAGAEDVDIAVKAAKKALKDPSWKELPPTDRGKLMVKLAELVEQHIETLATIEAWDNGKPYSVAVSEDCVEVAETLRFYGGFADKVYGSTISTSPAKFAYTLRQPIGVVGQIIPWNYPLAMAAWKLGPALACGNTVVLKPAEQTPLSILYFANLIKEAGFPPGVVNILNGFGKDAGAAIASHLDIDKIAFTGSTATGRQIMKMAAVNMKNITLETGGKSPLLVFGDADLEQAAKWAHIGIMSNMGQICTATSRILVQDTVYDKFVAQFKEVVASTSKVGDPFADDTFQGPQVTKAQYDRVLSYIESGKSEGAKLESGGVPHKNVGDGKGFFIEPTIFTNVNDNMKIYREEVFGPFVVIAKFSTEEEALSKANDTTYGLGAAVFTRDIERAHRVAAEIEAGMVWINSSNDSDFRVPFGGVKQSGIGRELGEAGLEAYSQTKAVHVNMGTKL

SEQ ID NO: 861 - protein, 181 aa, Arabidopsis thaliana
MASSMLSSAVVVTSPAHATMVAPFTGLKSSASFPVTRKANNDITSITSSDGGRGCMKEGPPPVKKKMETIFYLPDVTDDELATEEDYLLRNKWIPCVEFELEHGFVYREHGNTPGYYEGRYWTMWKLPLFGCTDSAQVLKEVEECKKEYPGAFIRIIGFDNTRQVQCISFIAYKPPRFTEA

SEQ ID NO: 862 - protein, 605 aa, Rubrivivax gelatinosus PM1
MDTRTSPIRLRLERLRAAMAARQTDAVLLPSSDPHLSEYLPGHWQGRAWFSGFTGSMATLVVLADRAALFADSRYWVQAEAQLAGTGIELVKIATGTAATHIEWIAAALRPGQTLAADGAVLGLAAAKTLREAMDAAGIVLRTDADPLAAAWPERPALPAVPVYEHRAPHAPQSRSDKLAQLRAAMAARGASHHLISTLDDLAWLFNLRGADVDYNPVFLAHGLVSASDALLFIGEGKVDAALAAMLGAEGVQLRPYGQARIALAALPADARLLIDPRRVTLGLREAVPASVRLIEAVNPSTLAKSSKSAPEAAFIREAMARDGAAMCAFYAWFESALGREPITELTIDERLSAERARQPDYVSLSFPVIAGFNANGAMPHYRATPEAHAVISSTAGVAADGLLLIDSGAQYLGGTTDITRVWPIGEPTEAMKHDYTRVLKGTIALSQTRFPRGTASPMLDAIARAPLWAASLDYGHGTGHGVGYFLNVHEGPQSISKAVPTPDMAMEPGMVTSIEPGLYRPGRWGVRIENLVLNVTAPGDEFGDFLAFETLTLCPIDTRCLERSLLRADEIDWLNRYHATVRERLVPLVSGTARAWLLARTQPV

SEQ ID NO: 863 - protein, 245 aa, Triticum aestivum
  misc_feature (73)..(74): Xaa can be any naturally occurring amino acid
  misc_feature (76)..(76): Xaa can be any naturally occurring amino acid
  misc_feature (78)..(78): Xaa can be any naturally occurring amino acid
IEQVCTKKQAGTGPEFPGYRRPTRPGGAKGGIGCSPGDLSISELERLTRVFTQKIHDLIGIHTDVPAPDMGTXXAXQXGIWILDEYSKFHGYSPAVVTGKPVDLGGSLGRDAATGKGVLFATEALLAEHGKGIAGQRFVIQGFGNVGSWAAQLITEAGGKVIAISDVTGAVKNSNGIDIAKLMKHSAENRGIKGFDGGDAVDPTSLLTEECDVLIPAALGGVINKDNADAHQAKYIIEAANHPTD

SEQ ID NO: 864 - protein, 305 aa, Thermoanaerobacter tengcongensis MB4
MYDLIILGGGPAGLTAGLYAARSRLKTVLIEKTYLGGQIVNTYQLENYPGYEEITGADLVAKMEAQVRKHGLEIVLEDVESLDITGEIKRVKTANNKVYEAKAIILAMGATPRKLGVPNEDRFIGAGISFCATCDGAFYRDAVVAVIGGGNTAVEDALYLTKFAKKVYIIHRRDQLRATKIEQEKAFANEKIEFIWNTVVVDVEGEYGVERIRLKNVKTGEESTLNVDGVFVAIGYDPNTELVKGIVELDEYGYIITDDDMKTNIPGVFAAGDIRHKLLRQVITAAGDGATAAYAAEKYIESLKK

SEQ ID NO: 865 - protein, 336 aa, Schizosaccharomyces pombe
MSGKLVLVTGVTGFIGAHVAEQLLQAGYRVRGTVRSMEKADELIRLNPGLKDKIEFVIVKDVSASNAFDGVLKDVELICHIASPFFVENVTDNKSQLLDPAVKGTLGILEAAQGVKSIKRIVITSSFAAVGNFQIDPHNNKVYTEKDWNPITYEEALTTDNGIVAYCASKKLAEEAAREYVKEKKPSYDICTINPPYVYGPPIHPMKNMDSLNTSNQIFWKLIDGSKEATPFYYYYVDVRDVAAAHVFALENAKLSNGRMLVSKGVFTTGDICKVLRKEFPNKSDVIAEPVDITVDPSFFKLDNSFSKSLGFKYHSDEECYVDTAKKLWERAEEFK

SEQ ID NO: 866 - protein, 95 aa, Triticum aestivum
CKHPGCEPAYPTPVCEKKCKVQNQVWEEKKHFSINAYQVNSDPHDIMAEVYNDGIDGQVRNIPEICIRGDGKIRLVKSGESAASISLDELRDEFF

SEQ ID NO: 867 - protein, 406 aa, Thermomyces lanuginosus
MKRVVITGLGIVSSIGNNQQEVLASLREGRSGITFSQELKDSGMRSHVWGNVKLDTTGLIDRKVVRFMSDASIYAFLSMEQAIADAGLSPEAYQNNPRVGLIAGSGGGSPRFQVFGADAMRGPRGLKAVGPYVVTKAMASGVSACLATPFKIHGVNYSISSACATSAHCIGNAVEQIQLGKQDIVFAGGGEELCWEMACEFDAMGALSTKYNDTPEKASRTYDAHRDGFVIAGGGGMVVVEELEHALARGAHIYAEIVGYGATSDGADMVAPSGEGAVRCMKMAMHGVDTPIDYLNSHGTSTPVGDVKELAAIREVFGDKSPAISATKAMTGHSLGAAGVQEAIYSLLMLEHGFIAPSINIEELDEQAAGLNIVTETTDRELTTVMSNSFGFGGTNATLVMRKLKD

SEQ ID NO: 868 - protein, 1194 aa, Debaryomyces hansenii CBS767
MLNIKYTPEESPSPSRWGSSRGENYVLDKSSSGSNKRLSKNISKRDALEKYQEHDDGSSYMNDFDIEGSEDLNFSYSKFSRVSGISLISGDDSNRLNSISGSPFVKNIQTRLQDIKFEEERKLNSRDSGRPSTRLNRPKSSQGRDKLMYLIDEGTLKNANDENESPFLDHAPILKTPIEKIGSTFEDNFDLRPRNYDHLQNPKIRGSSEQLENNAANGSRIPISLTPDKRRQQRMSSVKVSLTPAQRFEKMPGTRLTNALENFQFSTLVGRGASANVFKGINLKTNQIVAIKQIILEKNQNVMELMGEIDLLKILKHPNIVKYHGFVKTSTSLNVFLEFCSKGSLRQLYQHTNHGLPEDQIIDFVRQILQGLHYLHEQGVVHRDVKAANVLITEDGFIKLADFGVATKVSSQHETVVGTPNWMAPETVLGGEGLCTASDIWSLGATIIELFTTNPPYHDLNPMATLHAIGTDDHPPLPKNISPLAKDFLLECFQKQPNLRISAKSLLRHKWVTKSTKEKHVLEVSSQLNSEKHIPNPVSIHNYSESNEENWENDFIDINLPRMKASSADLLHSPSNHNGNRSKVSKSELLNKFLDKNEDFGFELETPTMISKFEKTDDLQVNLESTNLEESPREEEEEDPFLEIDIEDFNTNELEVQSKMEFLTTKFSNRVDLCHSGNDEVISSLIKITGRMLHLIKKYNILHDVLIRDHGILSLLELLENAPELPKHQKLWFHTLSILNNIFEKNISQFENFCLLGGIPVVTHFRSSSYDPQVRLQVVKFIKFLNNSEKALSMFVSCGGLRVLSKFVEEDFDLTPEFPLTSIDCIYNILSKDLTRSKSNLCRILSKYGVIFWFVVLLNRLTKSHSKPAPDGVPQDQIYSTINKIIEIIKYFGQSETRVRVNISNSDLFKLLIKVYPNLQYQHQLVILKFFKSISQISDILKALYSADILEFLVRIMELYTPSREHYKEVINVVCPTLYNCCYLNHAREVDLVRLGAVPHLKALSKINLPFRQFVLPILCELVHCDDYVRQILVKQDILTVYFNLLIDPYWQSNALDSILSWSQQASDQVKLDTPKAINCFVGGFMLPKVSNLESTLDSYLKLITVDKAVCYLMVKESIINNILFKLNVHNKNPVVQLNLLRILKNLVNTGKKTRMLDNLDISQNLITTLNTLKSRKASVLVDELAMDIVSLVI

SEQ ID NO: 869 - protein, 188 aa, Planktothrix agardhii
MNRGLSFQDLIQEGSLGLIRAAEKFEHEKGYKFSTYATWWIRQAITRAIADQSRTIRLPVHLYETISRIKKTTKLLSQEMGRKPTEEEIATRMEMTIEKLRFIAKSAQLPISLETPIGKEEDSRLGDFIESDGETPEDQVSKNLLREDLENVLDTLSPRERDVLRLRYGLDDGRMKTLEEIGQIFNVT

SEQ ID NO: 870 - protein, 353 aa, Bacillus thuringiensis serovar konkukian str. 97-27
MEKIERLRSAFDEVGIDGILLTNEHSRRYMANFTGTAGVVLISKKRAQFITDFRYVEQASKQAVGYEIVQHAGLIIDEVAKQVKELGIQKLGFEQDTLTYSSYSAHKEAIDAEFIPTSGLVEKLRLIKTDSEIKILKEAAQIADAAFEHILSFIRPGVSEIEVSNELEFFMRKQGATSSSFDIIVASGLRSALPHGVASEKVIETGDFVTLDFGAYYKGYCSDITRTIAVGEPSDKLKEIYNIVLEAQLRGVNGIKAGLTGREADALTRDYITEKGYGEYFGHSTGHGIGLEIHEAPGLAFRSDTVLEPGMAVTVEPGIYIPGIGGVRIEDDIIVTSEGNEVITKSPKELIIL

SEQ ID NO: 871 - protein, 492 aa, Mycobacterium bovis AF2122/97
MATIHPPAYLLDQAKRRFTPSFNNFPGMSLVEHMLLNTKFPEKKLAEPPPGSGLKPVVGDAGLPILGHMIEMLRGGPDYLMFLYKTKGPVVFGDSAVLPGVAALGPDAAQVIYSNRNKDYSQQGWVPVIGPFFHRGLMLLDFEEHMFHRRIMQEAFVRSRLAGYLEQMDRVVSRVVADDWVVNDARFLVYPAMKALTLDIASMVFMGHEPGTDHELVTKVNKAFTITTRAGNAVIRTSVPPFTWWRGLRARELLENYFTARVKERREASGNDLLTVLCQTEDDDGNRFSDADIVNHMIFLMMAAHDTSTSTATTMAYQLAAHPEWQQRCRDESDRHGDGPLDIESLEQLESLDLVMNESIRLVTPVQWAMRQTVRDTELLGYYLPKGTNVIAYPGMNHRLPEIWTDPLTFDPERFTEPRNEHKRHRYAFTPFGGGVHKCIGMVFGQLEIKTILHRLLRRYRLELSRPDYQPRWDYSAMPIPMDGMPIVLRPR

SEQ ID NO: 872 - protein, 219 aa, Methanococcus maripaludis S2
MVMIGASILSADYGHMAEEVKKAEEGNVDFFHVDIMDGHFVPNLSMGLRVPHYLKSITDVPIDVHLMVENPDLFIPKLADAADMIAFHAESSKYLFRTVDMIKEHDAKPIVALNPSTPIGNVEYVLENLYGVLVMTVEPGFSGQSFINPMIKKIDNLKNKILTEGYDTKIFVDGGINLETAPKAVEAGADGLIAASAIYGKEDVKKAVNDLRNSANFRI

SEQ ID NO: 873 - protein, 313 aa, Desulfotalea psychrophila LSv54
MKNIINIGSRKSKLAMWQTNTIAGQLEAAGMETRINSMETKGDKILDRSIVKIGSKGVFTEELEVQLATGITDIAVHSAKDMQSQLPEDFELIAFSQREKVNDVLVSDDKEIDLADPTKKIRIGTSSVRRRAMLKQYYPHVQAVEMRGNLQTRIEKMRNGDCDALMLAYAGVKRMENDDMIVMEFDTARFTPPVGQGCIAIEAATNLDPARREAIRTALNDADSESCLLAERAYLKKLEGGCSIPAFGLACLEGEELVMRAGLSSLDGTRILVKEVRANRSEAETLGNNLGEYILENGGREMLAEIRRQQAGE

SEQ ID NO: 874 - protein, 677 aa, Oryza sativa
MAGAFRRSAALQAMAAFSVLALVVPDQVQGRGKCPSFSCGRLSYVHFPFRRQGDPAECGVPSYELTCADSNATIQIDKATYLVTDINYSDQYFWVVDASLDSANNCPLPRWSQTPYNENYRLGEDSHRRVQVQLSPDVDWFATFVKCSQEMNSSNVMYRPVACRSGNSSFVYVLTGLGSYLAENLEPSCGYLAMTPLALGGLENWRTATAAATLEDVNYEDVVRSMSEGFAVRFPFRSGGFIDCLRGLISDSNGEPTVYRIFVIVTNINSYFSICGRHATQLPHPFVVLLMLVPQTFWILRVISACRFVLVMLLMWTSVAYMYWKIKMRVDEVEKFLQLQQMLTPTRYSYTDIIAITSHYRDKLGQGGYGSVYKGVLLPGDVRVAIKMLKGDANCKGEEFISEVSTIGRIHHVNVVRLVGFCSEEIRRALVYEYMPQGSLDKYIFSSEKSFSWDKLNEIALGIARGINYLHHGCDMQILHFDIKPHNILLDNNFVPKVADFGLAKLYPRDKSFVPVSAARGTVGYIAPEMISRGFGAISSKSDVYSFGMLLLEMAGGRRNADPNAENSSQAYYPSRVYRQLTRQETGEITAAADMHELEKKLCIVGLWCIQMRSCDRPMMSEVIEMLEGGVDCLQIPPRPFFCDDDYIPAMESLYLSSEVELAAISEEEDESITELN

SEQ ID NO: 875 - protein, 313 aa, Yersinia pestis CO92
MLDKIIRIATRQSPLALWQAHYVQHLLQANHPGLQIELVPMVTRGDIILDTPLAKVGGKGLFVKELELALLDGRADIAVHSMKDVPIAFPEGLGLVTICEREDPRDAFVSSHYAHLDDLPAGSVVGTSSLRRQCQLRERRPDLIIRDLRGNVGTRLAKLDNGDYQAIILAVAGLKRLGLENRIRYAMSAEESLPAVGQGAVGIECRLDDDHTRQLLAPLNHRHTELRVCAERAMNIRLEGGCQVPIGSYAELEGDTLWLRALVGAPDGSQMIRGERRGPAAEAEQMGIELADELLSRGAREILAAVYLDNPAR

SEQ ID NO: 876 - protein, 517 aa, Yarrowia lipolytica CLIB122
MPPKAAKAKNDNMLIGITVNKEDDFSGWYQQIVTKGEMLDYYDVSGCYIMRPPSYFVWEQIQEWFNIKIKKLGVKNAYFPMFVSSRVLEKEKDHVEGFAPEVAWVTKAGSSDLEEPVAIRPTSETVMYPYYAKWVRSHRDLPLKLNQWNSVVRWEFKHPQPFLRTREFLWQEGHTAHLTAKEAEDEVMAILDNYEKIYSELLAVPVIKGKKSEKEKFAGALFTTTVEGFIPSTGRGIQGATSHCLGQNFSKMFDISVEDPNGGADKLFAWQNSWGLSTRVIGVMTMTHSDNKGLVLPPRVAHTQAIIIPCGLTAKLAAEKRAAVMDASAAIEKALSEADVRVASDTRDTYSPGWKFSDAELRGIPLRIEVGPRDVEQGKIVAVRRDNGEKIVMDIADLATSVPELLETIQKDLFSKAKETFDKHVIKATTWDDFVKALNAGNLVLAPWSASIETEEWIKDNSARTVDPNNEADDKAPSMGAKTLCIPFEQPELAADAVCVTGSGKKADNWCLFGRSY

SEQ ID NO: 877 - protein, 112 aa, Brassica napus
MASALSFFTCLVLTVCIVASVDAAISCGTVTSNLVPCAGYLMKGGPVPASCCAGVSKLNSMAKTTPDRQQACKCLKTAAKSVNPSLASSLPGKCGVSIPYPISMSTNCNTVK

SEQ ID NO: 878 - protein, 479 aa, Novosphingobium aromaticivorans
MTQIEHWIGGTAVAATGGAYFDDLNPVDDSVYSRVPAGTAEDVNRAVENAHQAYLQHRDLPAAVREGWIAKAAEIMERDTAKFADVLVDEIGSPIAKAGFETRFAVSFLRAAIGVPRRIRGETIPSDTPGRFSMSLRQPVGVVAGITPFNVPLIKGIKQSAMALATGNAFVLLPSEAAPMIADLLAKLWKEAGVPDGLFNVVYGNGAEIGDVLTGHPKVASITFTGSSRVGKHIAEIAARNLKKYTLELGGKSPLVICADADLDKAVNAALFSIFMYQGQVCMGASRIYVERSIFDQFTKAFAAATGRANSGDLRDPTTMLGPIISERQRDRVRRHIDDARSKGAAVLAGGEWSGNSCAATILSGVTAEMTVFEEETFGPVTSLFPFDTLEEALELANNTEYGLSASIFTRDLDKALAFAQRAEAGMVHINAPTLHDEPHVPFGGTKASGFGREGTEADLEIMTEWKWVTIQSATEGGH

SEQ ID NO: 879 - protein, 192 aa, Methanocaldococcus jannaschii
MRDGEGIWGRGRTGGHAHPKEAMHTTFFILGGTMLIGVISDTHLYDRAFELPKAVFDEFSNVDLIIHCGDVTDKEILDSLKDLAKVVAVKGNMDYLNLPRKEILEINDIKIGVIHGDVVYPRGDRLKLRLLGKEMGVDVLISGHTHTPFIDDCRDILLLNPGSPTVPRCPLKSIMKLSVEDKLEAKLIPIEE

SEQ ID NO: 880 - protein, 466 aa, Lentinula edodes
MLGRVLKSAARSQRGLRSFATTTNLGPFTEISTLSNGLTVATESQPHAQTATVGVWIDAGSRAETDKTNGTAHFLEHMAFKGTGRRSQHALELEVENIGAHLNAYTSREQTVYYAKSFSKDVPVAVDIISDILQNSKLESGAIERERDVILREQQEVDKQLEEVVFDHLHAVAFQGQPLGRTILGPKNNILSIQRDDLASYIQTNYTADRMVLVGTGGVDHQSLVKLAEKHFSSLPVSANPLALGRLSSERKPTFVGSEARIRDDELPTAHVAIAVEGVGWSSPDYFPMMVMQSIFGNWDRSLGASSLLSSRLSHIISSNSLANSFMSFSTSYSDTGLWGIYLVSENLMNLDDTLHFTLKEWTRMSIAPTEGEVERAKSQLKAGLLLSLDGTTAVAEDIGRQIVTSGKRMTPAQIENAVDAVSVDDIKRVAQKYLWDKDFALAAFGNIDGLKDYGRIRNDMSSMLY

SEQ ID NO: 881 - protein, 520 aa, Arabidopsis thaliana
MDRERLTAEMAFRDSSSAVIRIRRRLPDLLTSVKLKYVKLGLHNSCNVTTILFFLIILPLTGTVLVQLTGLTFDTFSELWSNQAVQLDTATRLTCLVFLSFVLTLYVANRSKPVYLVDFSCYKPEDERKISVDSFLTMTEENGSFTDDTVQFQQRISNRAGLGDETYLPRGITSTPPKLNMSEARAEAEAVMFGALDSLFEKTGIKPAEVGILIVNCSLFNPTPSLSAMIVNHYKMREDIKSYNLGGMGCSAGLISIDLANNLLKANPNSYAVVVSTENITLNWYFGNDRSMLLCNCIFRMGGAAILLSNRRQDRKKSKYSLVNVVRTHKGSDDKNYNCVYQKEDERGTIGVSLARELMSVAGDALKTNITTLGPMVLPLSEQLMFLISLVKRKMFKLKVKPYIPDFKLAFEHFCIHAGGRAVLDEVQKNLDLKDWHMEPSRMTLHRFGNTSSSSLWYEMAYTEAKGRVKAGDRLWQIAFGSGFKCNSAVWKALRPVSTEEMTGNAWAGSIDQYPVKVVQ

SEQ ID NO: 882 - protein, 175 aa, Triticum aestivum
IKILNRRKIKNMEMEEKVRREIKILRLFMHPHIIRLYEVIETPSDIYVVMEYVKSGELFDYIVEKGRLQEDEARNFFQQIISGVEYCHRNMVVHRDLKPENLLLDSHHNVKIADFGLSNIMRDGHFLKTSCGSPNYAAPEVISGKLYAGPEVDVWSCGVILYALLCGTLPFDDEN

SEQ ID NO: 883 - protein, 567 aa, Corynebacterium efficiens YS-314
MAFSVEMPELGESVTEGTITQWLKAVGDTVEVDEPLLEVSTDKVDTEIPSPVAGVILEIKAEEDDTVDVGGIIAIIGEEGEEGAESTEAPAEQEEAPAEEAPKEEPKKQAPASSGAATDVEMPELGESVTEGTITQWLKAVGDTIEVDEPLLEVSTDKVDTEIPSPVAGTIVEILAEEDDTVDVGAVIARIGDANAAPAEDAPAEEEAPAQNEAPVEETPDVTKDEAKKVEQDEPKAEKAEKKSEPKAAPQKTNTDNVPYVTPLVRKLAEKHGVDLNSVKGTGIGGRIRKQDVLAAASGESAPAEKEAASAAPASAASTKSVDPEKAKLRGTTQKVNRIREITARKTVEALQISAQLTQLHEVDMTRVAELRKSNKPAFQEKHGVNLTYLPFFVKAVVEALVAHPNVNASYNAETKEMTYHASVNMSIAVDTPAGLLTPVIHNAQDLSLPEIAKAIVDLADRARNNKLKPNDLSGGTFTITNIGSEGALSDTPILIPPQAGILGTGAIVKRPVVITEDGIDSIAIRQMVHLPLTYDHQVVDGADAGRFMTTIKDRLETANFEGDLEL

SEQ ID NO: 884 - protein, 484 aa, Xanthomonas campestris pv. campestris str. ATCC 33913
MLRGLTCRCRVCMSYAIVWFRRDLRLEDNPALRAALDAGHDPIPLYIDAPHEEGQWAPGAASRAWRHRSLAALDASLRARGSALLIRQGDSAQVLDAVIAQTEAVAVYWNRKYEPATQPRDAQIKRSLRERGLEVQSCNAALLFEPWTLATQQGRPYKVFTPFWRNALTQLRLPDAMPAPRSLPPLPASLDGVHVDALNLLPTPAWDQGFWEHWQPGEAGAHEMLEIFVDGALSGYRENRDRPDRVGTSQLSPHLHFGEIAPWRIASTLEAQRSARNGADIDGYIRQLGWRDFAYHLLHHFPDTTTQNLNPRFAGFDWATVDPVTLDAWQRGRTGIPIVDAGLRQLWHTGWMHNRVRMIVASLLCKHLRVHWLEGARWFWDTLVDADLANNTMGWQWVAGTGADAAPYFRVFNPVTQAEKFDPQATYITRWIPELAALPVKERFAPWLHPLSLARLAPTYPRAPIIGLAEGRDAALAAYAGTRG

SEQ ID NO: 885 - protein, 369 aa, Kluyveromyces lactis NRRL Y-1140
MMRTRFIQLSRRAYASNAKNLTIGLIPGDGIGKEVIPAGKKILESLNPKYGLSFKFIDLQAGWETFQNTGKALPDETIDILKNQCEGALFGAVQSPTTKVEGYSSPIVALRKNLGLFANVRPVKSVDGTKDRKVDLVIVRENTEDLYIKLEKSYIDEATGTRVADATKRITEIATKNIATIALQIAQQRLEQNGHATLTVTHKSNVLSQSDGLFREVCRETYEANKDKYGGVQYNEQIVDSMVYRMFREPECFDVVVAPNLYGDILSDGAAALVGSLGVVPSANVGPNIVIGEPCHGSAPDIAGKGISNPIATIRSTALMLEFLGYPEPAKDIHKAVDANIREGKYLTPDLGGNSTTQQVLEDVLSKLD

SEQ ID NO: 886 - protein, 708 aa, Prochlorococcus marinus str. NATL2A
MGLRLLHLNLHGLIRSHDLELGRDSDTGGQTLYVLELVKGLAARPEVEKVELITRLINDRKVSSDYSNPVEKISSCAEIIRLPFGPKRYVRKELLWPYLDDLADRIVERLQKENKFPDWIHAHYADAGYVGALVSRRLGLPLVFTGHSLGREKLRRLLAAGIDHDHIEQTYSISKRIDAEELALAHSNLLITSTKQESDEQYARYGRFSSKNVEIIPPGVDLNRFHPVDINSKDEEKELNKLFKPFLRDLNLPPLLAISRAVRRKNIPALIETYGRSSILQQRHNLILILGCREDSRQLEKQQREVFQQVFELVDKYNLYGKIAFPKQHKREQIPSIYRWAANRGGLFVNPALTEPFGLTLLEAAACGLPMVTTDDGGPREIHSRCENGLLVDVTDLEAFRDGLETAGSNLSLWKTWSNNGVEGVSRHFSWDAHVCNYIAFMQKRLKFLAPRHWTLGNIKEITPIGQKILFFDLDNYLEQSKSLSILRNKLENNSLNQDIQLGILTGRSIKAARYRYAETQLPKPSVWVCQAGTEIYYSEENKSDIFWQDSITVDWNRKGVEKVLFDLKDYLELQPSDHQAPYKVSYLLKEPSHAILPLVRKRLRQSGLAASPHLKCHWYLDVVPLRASRAEAIRYLTLRWGLSLEKVFVVASQQGDAELVRGLTTALIPFDHDSSLDALRSQQRVFFSDAQDGVLDGIKHFRFFKSH

SEQ ID NO: 887 - protein, 818 aa, Leptospira interrogans serovar Copenhageni str. Fiocruz L1-130
MERIYFGIYPTTRNSKKRSPRKTSPIKLRKNESFGNFMKNRVANRIVLILFLGINLPLFSESPALELSKTVDPIWLILCAALVFFMQAGFLMLETGLSRLKNTINVAVKNLMDYIVGTIAFFSVGFALMFGLSYEGWIGTNHFFLTGLKTGKDFSFFLFQVAFMGTAATIVSGAVAERIKFSAYLIVSVVVSLFIYPVFGHWTWGGGWIAKIGFVDFAGSTVVHSLGGWIALAGVIVLGPRKDKFKEDGTPRKIHGHNLTFSVLGVFILWFGWFGFNGGSALSFTDQVPLIILNTSLAGSVGGIFAITFSWIFYRVASVEDCMNGVLGGLVAITAGCHAFQPYASLIVGALAGISVVITSWVLEKILKLDDVVGAFPVHGVCGIIGTLLLPILSENQDIRIYPQFIGVLTCSFWAFGLGMILFLLLKISIGIRVNEEFEEKGLNVTEHGAGSSWIDLIHSLKDLAKGGGDLTRKIHVDSGTEAGAIAFLMNRYLANLGQMIYTIKEKSIELEYSSSEISVAWGKMSQGIQQQAANLGEVTSIFDSFRESFQTISSSAAQQKEMETSASELLNELVFGFQKFDSDLKNSSEKSEESVKAIDLSRKELNQLETDINDIGSSAKKVEGLVKLLNDISTKLGMLSINASIEAARSGAAGKGFGVVAEEISKLASSTQESTKKASEILGEIQSTVSRGKTTVQTSVEFFKNLTEEFRFLAETYITIRKSSLHYSNLIGNLNRLNTSITNQSEIIMTDIDKRFSEIGNLYESVDLINGAFHEISAQSEELNATGEFLKQLAEILNSLVRNFRVEQNSSQELIPG

SEQ ID NO: 888 - protein, 548 aa, Burkholderia sp. 383
MSQAIEVKVPDIGDYKDVPVIEIGVKVGDTVEPEQSLVTLESDKATMDVPSPVGGVVKEIKVKVGDSVSEGSLIILLEGGAAAQANGAAAPAAAPAPAAAPAPAAATPAAAPAATGGTLEVKVPDIGDYKDVPVIEIGVKVGDTVEKEQSLVTLESDKATMDVPSPAAGVVKEIKVKVGDSVSEGTLIVLLDAAGAAPAAAAPQASAPAPAAAAPAPAAAPAKAAAPAAAAPAPAAAPSGEYRASHASPSVRKFARELGVEVARVQGSGPKGRITKEDVTGFVKGVMTGQRTAPGAAAAPAGGGELNLLPWPKVDFSKFGPFEAKPLSRIKKISGANLHRNWVMIPHVTNNDEADITELEALRVQLNKEHEKAGVKFTMLAFVIKAVVAALKKFPTFNASLDGDNLVFKQYYHVGFAADTPNGLVVPVIRDADKKGLVDIAKEMAELSKAARDGKLKPDQMQGGCFSISSLGGIGGTNFTPIINAPEVAILGLSRGQMKPVWDGKQFVPRLTLPLSLSYDHRVIDGAEAARFNAYLGALLADFRRIIL

SEQ ID NO: 889 - protein, 413 aa, Bradyrhizobium sp. BTAi1
MTAQSVAAPADEPRLVRSLTLTHAVLYGMGVTIGAGIYVLVGIAAGRSGMHAPLAFIGAALVMSFSAASFAELGTRMPVSASEAAYVQAAFQRKWLSLGTGLLVVLTATVSAATVSRGSAGYVAVFVSAPAPLIVCGVVLAMGAVACLATVQSVTLAGIMTLVEVSGLVLIIVAGLLYGNGVITRLPEVWPATSDVGAWIGIAGTTLIAVFAFIGFEHLVNVAEELKNPSRTLPWALFLTLGLTALIYALVVWIAVTAVPPPELANSPAPLALVFKNLTGLPLPTMSAIAVTATLNGIIVHMIMIGRVIYGLADQGALPKVLARVNSRTKTPVLATAIGIGAILLLALAVPLAGLADLTARLTLVVFALVNIALIRIKSAGEPPPAGAFVCPKWVPFAGLLSSALLIVLDSIS

SEQ ID NO: 890 - protein, 231 aa, Bradyrhizobium sp. BTAi1
MPATPHIEKHFTASESVRDVVIGMADGLTVPFALAAGLSAAVTNTDVIVTAGLAEVVAGAIAMGLGGYLAARTDAEHYAAEEQREHHEIKVLHEREIEEVEHIFRQYGLDADTLQSVVGAIASHPQRWVDFMMRFELGLERPDPKRAPISAATIGGSYVVGGLIPLVPYIFTQNIGTALQISVAATGVALLCFGAVKGHFTGVNKSKSAIQTLLVGGLAAGAAYWLAHLFG

SEQ ID NO: 891 - protein, 695 aa, Zea mays
MNLLAMATMSAACFLPWRRSHRCCASSLRASTVLFVLAVLVSDVGGRHHRHICPPYFSCGGLSDISYPFRRQGDPSGCGVESYELVCTDTDATIRIGSGTYTVLSINSTYSYFWVVDADLDIQSSCPLPRWDYHLFPFILRIDNSHRRRIEFSHDTPFSSYMDSVWAIFVNCSQPLENNDTDKYHRYEPVSCLSNSSFIYLATGYRYDGYVSAGDLKPSCGYLAMTPLGGPGMPVPWNTSYPDVVKFMRSGFALRFPFSYGDNIRECLANNMRTFLKDPRSSTGIKELIVDILTVVDIFWACVIYQLQSTNNNGVTTVLIGIIETIQYVSGVLKYTAVVCRFVLMPLAVFVFLVYKYWKTRITVDAVEKFLRMQQMLVPMRYAYTNIIAITGHFRDKLGQGGYGSVYKGVLQPGEVHVAIKMLGNSNCNGDEFISEVATIGKIHHVNIVRLIGFCSEENSRALIYEFMPHGSLDKYIFSSEKSLSWDKLNEIALGIARGLNYLHHGCDMQIVHFDIKPHNILLDNNFVPKVADFGLAKLFPKDDNFVPLSAMRGTIGYIAPEMVSRSFGVISSKSDVYSFGMLLLEMTGGRRNADPHAGSSSQAYYPSLVYSQLSQGDANEISEGVDMHELEKKLCIIGLWCIQMKPQDRPMMSEVIEMFEDGVDGIQMPPRPFFCDDEGDSYYSAISKLDTIEE

SEQ ID NO: 892 - protein, 336 aa, Aspergillus niger
MAPKVGINGFGRIGRIVFRNAINHGEVDVVAVNDPFIETHYAAYMLKYDSTHGQFKGTIETYEEGLIVNGKKIRFFAERDPAAIPWGTTGADYIVESTGVFTTQEKAAAHLKGGAKKVVISAPSADAPMFVMGVNNTSYTKDINVLSNASCTTNCLAPLAKVINDKFGIVEGLMTTVHSYTATQKVVDAPSSKDWRGGRTAAQNIIPSSTGAAKAVGKVIPTLNGKLTGMAMRVPTSNVSVVDLTCRLEKATSYDEIKKALKDASENELKGILGYTEDDIVSSDLNGDDHSSIFDAKAGIALNSNFVKLVSWYDNEWGYSRRVVDLIAYISKVDAQ

SEQ ID NO: 893 - protein, 272 aa, Arabidopsis thaliana
MKVKLDVKIIYSWGKNVDVIPRGAGKGEALEYLLKKLQAEGIFPVNTLACGDSEHDAELFSIPDVHGVMVSNSQEELLKWRSENALNNLKVIHSTERCADGIIQAIGHFNLGPDLSPRDVSEFLDRKMDNVNPGHEVVRFYLFYERLRRGEIKNYETYIASFKDSCLHAAVLFHPSGAEKSLRDTIDELKKCYGDKRGKKFWVWVDQVLVTDTIPGKWIVKFDKWEQCEDESQCCKTTVEFTSKGGDLVWEKVKQIWSEESKVKDDNSSWIL

SEQ ID NO: 894 - protein, 495 aa, Candidatus Pelagibacter ubique HTCC1002
MTINFKSPEIKELQPRLLVVGVGGAGGNALNEMIDNGLQGVEFIAVNTDAQDLKLSKAKARIQIGLSLTKGLGAGAKHDIGQAAADESLNEIVNTLQGANMVFITAGMGGGTGTGAAHVIARAAKELNILTVGVVTLPFLYEGPSRMRRAQVGLEELRKHVDTIIVIPNQNLFKVANEQTTFEESFNLSNNVLMQGVQSVTDLMVRPGIVNLDFADVETVMASMGKAMMGTGEAEGEGRAAKAADMAISNPLIDDYTLKGAKGLLVNITGGKDLKLFEVDEVVNKIRAEVDPEAEVIIGAITSGDLDGKIRVSIVATALDGQQPESKSVINMVHRIQNRNPGYSDFNSASSAQSFNFSPTMTSPISHGANALKLENEIIAEPVTNTTSSEMMNEQTVSNQEVESIVENNQSNDYEQSFSEEALTTAKPEENSPMEEEHVSNGLENFGVEGEDALDLFSSDSATSETEGFLSTETSENTSEDDDLEIPAFLRRQKN

SEQ ID NO: 895 - protein, 636 aa, Sorghum bicolor
MISARAATVAAASPASPWKRGGGRSEGAGSCDGCSTYRKTVRRRAAAAKVRALPPKRVEAVAIGSAAETETEEVVVEVAAANEELPVMPWATSVASGYTLLRDPRHNKGLAFTEKERDAHYLRGLLPPAVVSQELQIKKFMNNLRQYQLPIQCYMAMMNLQETDERLFYKLLIENVVELLPYVYTPTVGEACQKYGSIFGRPQGLYVSLKDKGRVLEVLRNWPHRNVQVICVTDGERILGLGDLGCQGMGIPVGKLALYTALGGVDPSACLPITIDVGTNNEKLLNDEFYIGLRQKRARGEEYDELMEEFMAAVKTFYGEKVLIQFEDFANHNAFDLLEKYSKTHLVFNDDIQGTASVVLAGLLAALKMVGGTLAEQTYLFLGAGEAGTGIAELIALEMSKQTKAPIEECRKKVWLVDSKGLIVDSRKSSLAPFKKPWAHEHEPLTTLYDAVQSIKPTVLIGTSGVGRTFTKEIVEAMASINERPIIFSLSNPTSHSECTAEQAYTWTQGRAVFASGSPFAPVEYDGKTFVPGQSNNAYIFPGLGLGLVISGAVRVHEDMLLAASAALADQATEENFVTGSIFPPFTNIRKISAYIAAAVAAKAYELGLATRLPPPKDLVAYAESCMYSPVYRNYQ

SEQ ID NO: 896 - protein, 414 aa, Actinobacillus actinomycetemcomitans
MKRVVITGIGAVTAFGKTWQEIKTAFQRKQNAVQAKADWAERYPELEARLGAEIHGYQPPSHWNRKQLRSLGRVSQFAVEAAERALANADLLDENGDILAYLKDGRMGVACGSSTGSTNDIKDAAELLMTGKSDGFNANTYVRMMPHTTTANIGIFFGLTGRIIPTSSACSSGSQGIGYAYESIKYGLIPMMLAGGAEEFCPSEVYVFDSLYAASRNVNNPSKTPRPYDNDRDGLVIGEGAGIFVLEELEHALARGANIIAEVVGYGANSDGAHVTRPQKDTMQRCMELALKDAHLSAQKIGYVNGHGTATEQGDIAETLATEAVFGKVPLSSQKSYLGHTLGACGALESWFSIEMMRDGWFAPTINLDNIDERCGKLDYIQGDGRHIETDYVMNNNFAFGGVNTSLIFKRWQA

SEQ ID NO: 897 - protein, 179 aa, Eucalyptus amygdalina
EQMVEPAVIGTRNVIVAAAEAKVRRVVFTSSVGAITMDPNRGPDVVVDESCWSDLDFCKSTKNWYCYGKAVAEKSACAEAKERGVDLVVINPVLVLGPLLQSTVNASIIHILKYLTGSAKTYANSVQAYVHVKDVALAHILVFETPSASGRYLCAESVLHRGDVVEILAKFFPEYNLPT

SEQ ID NO: 898 - protein, 423 aa, Anaplasma phagocytophilum HZ
MAERKRVVVTGMGLVTPLGVAIPSVWDRLVKGESGIRQVVSRYDVSDLDCKIGGQVLLKGESDDYVFDPGTWLEEKEVKKIDLFILFGIAASSIALEDSGALESNFDPERFGVLLGSGIGGLPNIERNVTALNARGPRRISPFFVPGSLINLLPSHVSMRYGLKGYCNAVVGACATGAIAITEAARVIESGVCDIVVAGGSESALCRSGIAGFSIIKALSTKFNDTPQVASRPWDKDRDGFVMGEGAGVVVLEDYEYAKKRGARIYAELTGYGLTADAYHITAPHPQGEGGMRAMEMALRTANISPSEIDYINAHGTSTPTGDSVEIVAIKNLFQDHAYKVAISSTKSSIGHLLGAAGSVEAIFSMLALQHGVLPPTLNLHNSTEDSNVNLVPLVAEERKISHVLSNSFGFGGVNASLIFSKV

SEQ ID NO: 899 - protein, 205 aa, Glycine max
MLLCFGFLFLFAFGEGRTMSQQGPRKAHPIEKTLPCTLEELYKGTTKKMKISREIADASGKTLPVEEILTIDIKPGWKKGTKITFPEKGNEQPNVIASDLVFVIDEKPHPVFTRDGNDLVVTQKVSLEEALTGHIVHLTTLNGRVLKIPINNVIHPTYEEVVPREGMPIPKDPSKRGNLRIKFNIKFPAKLTSEQQAGIKKLLPY

SEQ ID NO: 900 - protein, 426 aa, Candida albicans SC5314
MLKTLTQTLRLTGKAFPKVRPALIRTYAAFDRSKPHVNIGTIGHVDHGKTTLTAAITKVLAEQGGANFLDYGSIDRAPEERARGITISTAHVEYETKNRHYAHVDCPGHADYIKNMITGAAQMDGAIIVVAATDGQMPQTREHLLLARQVGVQDLVVFVNKVDTIDDPEMLELVEMEMRELLSTYGFDGDNTPVIMGSALMALEDKKPEIGKEAILKLLDAVDEHIPTPSRDLEQPFLLPVEDVFSISGRGTVVTGRVERGVLKKGEEIEIVGGFDKPYKTTVTGIEMFKKELDSAMAGDNCGVLLRGVKRDEIKRGMVLAKPGTATSHKKFLASLYILTSEEGGRSTPFGEGYKPQCFFRTNDVTTTFSFPEGEGVDHSQMIMPGDNIEMVGELIKSCPLEVNQRFNLREGGKTVGTGLITRIIE

SEQ ID NO: 901 - protein, 210 aa, Solanum sogarandinum
MADQYEQNKPSVEETVGANVEATDRGLFDFIGKKEEEKPSHAHEEEAISSEFCEKVKVSEEEEHKEKEKKEEKKLHRSSSSSSSSSDEEEEIGEDGQIIKKKKKKGLKEKIKEKISGDHKEEVKTEDTSVPVEKYEETEEKKGFLEKIKEKLPGGGHKKTEEVAAPPPPPPAAVDHEAEGKEKKGFLDKIKEKLPGYHSKTEEEKEKEKD

SEQ ID NO: 902 - protein, 561 aa, Leuconostoc mesenteroides subsp. cremoris
MKNVVLTEWKNGAHILLDSLEKAGVNSLFGCPGGAVIPLYDALYESSHIKHILVRHEQAAAHAAEGYAKATGKPGVVLVTSGPGATNTVTGIADAFCDSVPLVVISGQVGSAAIGSDAFQELDILSITSSITKMSYQVRTVGELPLIVEEAFKVAVSGRPGPVLIDLPKSVMLAKDTEESQADIWLRQIDTQKPDVDAVQIHQLVAALSKARQPLIITGAGVLKSNAQDLLRTLIQHYHIPTVSTLLGLGAVESENPLFLGMVGMHGSIAANQAVDQADFVLNIGSRFDDRVVTNVDDFAKHATIAHIDIDETELGKVLPTAHAIHASADDALNAILTEIKNAKMTDTSKWQESICQAKRDSMFHYQKSETAIMPQVVIQAVGKVTKGEAVVVTDVGQHQMWVAQYYPFQNNYQMLTSGGLGTMGYGIPAAIGAKFARWDKEVVLFVGDGGFQMTSEELAILNDNDLNIKIILLNNHSLGMVRQWQTLFYNGRLSSTVFKSQPQFNQLAQAYGINYVRIEKPERILEDLQLAFQSDKSVLIEIIIPDDVKVLPMVNAGRLS

SEQ ID NO: 903 - protein, 447 aa, Bacillus thuringiensis serovar konkukian str. 97-27
MLHRYLPMTEEDKKEMLQTIGVQTIDELFSDIPESVRFKGDLKIKEAKSEPELLKELSQIASKNANLKEYASFLGAGVYDHYAPVIVDHVISRSEFYTAYTPYQPEISQGELQAIFEFQTMICELTGMDVANSSMYDGGTALAEAAMLAAGHTRKKKILVSSAVHPESRAVLETYAKGQHLEVVEINHKDGVTDLDVLQSEVDDTVACVIVQYPNFFGQVEKLADIEKIVHQQKSLFIVSSNPLSLGALTPPGKFGADIVIGDAQPFGIPTQFGGPHCGYFATTKAFMRKIPGRLVGQTVDSDGKRGFVLTLQAREQHIRRDKATSNICSNQALNALAASVAMTALGKQGVKEMARQNISKAQYAKRQFEAKGFTVTFAGPFFNEFVVDCKRPVKEVNDALLQKNIIGGYDLGRDYKEHENHMLVAVTELRTKEEIDTLVNEMGAIQ

SEQ ID NO: 904 - protein, 188 aa, Anabaena cylindrica
MNRGLSFQDLIQEGSLGLIRAAEKLDHEKGYKFSTYATWWIRQAITRAIADQSRTIRLPVHLYETISRIKKTTKLLSQEMGRKPTEEEIATRMEMTIEKLRFIAKSAQLPISLETPIGKEEDSRLGDFIESDGETPEDQVSKNLLREDLEKVLDSLSPRERDVLRLRYGLDDGRMKTLEEIGQIFNVT

SEQ ID NO: 905 - protein, 604 aa, Anabaena variabilis ATCC 29413
MALIVQKFGGSSVGSVERIQAVAQRVYKTVKAGNSLVVVVSAMGKTTDGLVKLANEISRNPNRREMDMLLSTGEQVTIALLSMALQELGQPAISMTGAQVGIVTEAEHTRARILHIETERVEGHIQEGKVVVVAGFQGISSNGSLEITTLGRGGSDTSAVALAAALQADFCEIYTDVPGILTTDPRIVPEAQLMGEITCNEMLELASLGAKVLHPRAVEIARNYGMPLVVKSSWTDDPGTWVTTPKPQGRSLINLELARPVDDVELDTDQAKVALLRVPDKPGVAAKLFGEISRQKVDVDLIIQSIHEGNSNDIAFTVTTPILKRAEAVAAAIAPSLRSPSHPKSDEAEVMVEQNIAKVSIAGAGMIGRPGVAAKMFTTLAEAGVNIQMISTSEVKVSCVIDAQDGDRAIIALRKAFEIETPLHSPTPPTLSTHNSPPVRGVALDLNQARLAIRQVPDRPGMAAQLFGILAQNNISVDMIIQSQRCRIVDGVPRRDIAFTVPRMDGETAQKLLCQVAPELGWGDVVLDSAIAKVSIVGAGMVGQPGVAAKMFEALAKHQINIQMIATSEIKISCVVSQEQGVQALQVIHTAFELAGTEKFVVPV

SEQ ID NO: 906 - protein, 112 aa, Desulfitobacterium hafniense Y51
MKKIEAIVRPGKLDDVQSALDDFGVSGLTVTQVLGCGNQKGHTQVYRGVEYKVYLLPKVKIEVVVTDQDVDQVISIITQAARTGEVGDGKIFVYPVEEAIRIRTGEKGDDVL

SEQ ID NO: 907 - protein, 602 aa, Oryza sativa
MCGILAVLGAADWSQAKRAHVLSCSRRLKHRGPDWSGLYQCEGNFLAQQRLAIVSPLSGDQPLYNADRTIVVVANGEIYNHKKIRKQFASKHTFSTGSDCEVIIPLYEEYGEDFVDMLDGVFAFVLYDTRTKTYMAARDAIGVNPLYIGRGSDGAVWISSEMKALNEDCVEFEIFPPGHLYSSAAGGLRRWYKPQWFAENVPATPYQPLLLREAFEKAVIKRLMTDVPFGVLLSGGLDSSLVAAVTKRHLIKTEAAEKFGAELHSFVVGLEGSPDLIAAREVADHLGTIHHEFHFTVQDGIDAIEEVIYHDETYDVTTIRASTPMFLMARKIKALGVKMVLSGEGSDELLGGYLYFHFAPNKEEFHKETCRKVKALHQYDCLRANKATSAWGLEVRVPFLDKEFINVAMSMDPEWKMYNADLGRIEKWVMRKAFDDEEHPYLPKHILYRQKEQFSDGVGYNWIDGLKAFTEQQVSDEMMKNAAKVYPHNTPVNKEAYYYRMIFERLFPQESARETVPWGPSIACSTPAAIEWVEQWKASHDPSGRLIASHNSASANHTNHANANANGNSNGKANGNCAMAANGTNGVGLVVANGTANGKMEA

SEQ ID NO: 908 - protein, 409 aa, Brassica napus
MKGVRKTYDNSCTLSFLLVFFVLILFHPALSIYINTLSSTESLTISNNRTLVSPGNVFELGFFRTTSSSRWYLGIWYKKVSERPYVWVANRDNPLSNSIGTLKISCNNLVLLGHSNKSVWSTNLTRRNERSPVVAELLANGNFVIRYSNNNDASGFLWQSFDFPTDTLLPEMKLGYDRKKGLNRFLTAWRNSDDPSSGEISYQLNTQRGMPEFYLLKNGLRVHRSGPWNGVRFNGIPEDQKLSYMVYNFIENSEEVAYTFRVTNNSIYSILKISSEGFLERLTWTPTSTAWNLFWSSPVDTRCDVYMTCGPNAYCDVSTSRVCNCIQGFMPSNAQQWDLREGSSGCIRRTRLTCSGDGFTRMRRMKLPETTKAIVDRSIGVKECEKRCLSDCNCTAFANADIVMVGRIV

SEQ ID NO: 909 - protein, 413 aa, Nicotiana tabacum
MATMLGLSSNTGIDILSSSSNSLSFYHSTRFTQCFSPKSLCKRQRRRFSICSSLSSAKIKVVGVGGGGNNAVNRMIGSGLQGVDFYAVNTDAQALLQSTVENPIQIGELLTRGLGTGGNPLLGEQAAEESKEHIANALKGSDMVFITAGMGGGTGSGAAPVVAQIAKEAGYLTVGVVTYPFSFEGRKRSLQALEAIEKLQKNVDTLIVIPNDRLLDIADEQTPLQNAFLLADDVLCQGVQGISDIITIPGLVNVDFADVKAIMKDSGTAMLGVGVSSSRNRAEEAAEQATLAPLIGSSIQSATGDVYNITGGKDITLQEVNKVSQVVTSLADPSANIIFGAVVDERYNGEIQVTLIATGFAQSFQNSLLTDPRGAKLVDKSKGTTERTVSPDTLRSSESPSTKPRPATRRLFF

SEQ ID NO: 910 - protein, 332 aa, Neorickettsia sennetsu str. Miyayama
MTEITVREAIRNAMAEEMRRDSDVFIIGEEVGKYQGAYKVTQGLLEEFGEKRVVDTPISEHAFAGIATGAAFVGLRPIVEFMSFNFSLQAMDQILNSAAKTHYMSGGRLSCPIVFRGPNGAAVQVGAQHSQCFAAWYSHVPGLKVVAPYFASDCRGLLKSAVRDNNPVIFLENERTYGLVHTLTAEQEAEDYLVPIGEANVLRNGTDVTIVTFSICVELALEAAEALESEHNISVEVIDLRTLRPLDFQTIIRSLEKTNKLVTLEQGFPVLSFGSEVSARIMEEGFDLLDAPVVRISGRDVPMPYSSALEKLALPQLPEVIEVVKKVATSGI

SEQ ID NO: 911 - protein, 112 aa, Desulfitobacterium hafniense Y51
MKKIEAIIRPSKLDEVQSALDRFGVSGLTVTHVIGCGKQKGHTQVYRGVEYKVFLLPKVKIEVVVNDQAVDEVVRIISDEARSGEVGDGKIFIYPVEGAIRIRTGEIGETVL

SEQ ID NO: 912 - protein, 352 aa, Arabidopsis thaliana
KRRQKGTHNNRLKANATHIQSLLNANNRVTVTTRKMVTLIVATTADPASINPAAALLAMPGWTAGPILPPDIKSFSNKQTRVIQHDRSIVKEDDLDLRWEEATGEVVDEVIFLSRHTAVSNRPALTVHPIGVLHLKDGESPPQGGKPGWAALPSTRIGPWFRLLKKMAEAHGLVPEFEITLEATHHGPITNKPTMFLEIGSTEEYWKRQDAAQVMALLMWEGLGLGGSEEVGKWKSETGKRKVLLGIGGGHYAPRHMDIALKDDIWVGHLLSGYSLPMEDPTQTKTTPGENYIGGNWRQSIKAAFEATKASFPGGEILAHLDHKSFKGWQKKAITEFLAEESINVGKPNDFT

SEQ ID NO: 913 - protein, 377 aa, Desulfitobacterium hafniense Y51
MKDSVWLCDTTLRDGEQTPGVAFRFKEKARIATCLAEAGIDEIEIGVPSVGADEMEIIKGLVDLRLPVRLATWNRTSKEDLEASFRTGVGAVSICIPVSDQHIERKLRKSRTWAMDSMGEAVELAKKEGKYVCVGFEDASRADVDFMIKMAKVAEGLRADRIRLADTLGILDPLELARRFAPLPQRTALPLEFHAHNDLGMATANALTALRIGFKAVSVTVGGLGERAGNAPLEEISVAIHHILQRPTAFDIQKVNDISLLVSDITQREVPRSKPVVGSDVFTHTSAVHLDGIRKDVENYQPFPPESISRKHSMVFGKYSGIKELVRLLEEERVPYTQDQLTELLIRVRLHSSIKKIPLQAEDVLSLARSLNQLRNA

SEQ ID NO: 914 - protein, 112 aa, Xylella fastidiosa 9a5c
MKLITAIIRPFKLDEVREALSQVGVSGITVTEVKGFGQQKGHTELYRGTEYVIDFLPKIKIETVVTDERLDSVIEAIRIAAVTGKIGDGKIFVTKIEQVVRIRTGEIDIDAL

SEQ ID NO: 915 - protein, 880 aa, Mycobacterium sp. KMS
MGPSHEATSRQYTIPSLAPMSTSISNGPARNVVVVGHGMVGHRFVEALRARDDADAWRITVLAEETDAAYDRVGLTGYTEHWDRALLALAGNDYAGDDLVDLRLGQRVTSIDRAARTVKTADGTAFAYDALVLATGSYAFVPPVPGRDLPACHVYRTFDDLDAIRADAARARETSRAPVGVVIGGGLLGLEAANALRGFGLTAHVVERSPRLMSQQLDDAGGALLSRMIADLGIEVHLDVSTDAITPAQRNRPLRRSEEDDSLRVMLGDGSFIDAGVVVFAAGVRPRDELARDAGLVIAERGGVLTDLGCKTSDPSIYAVGEVAAIEGRCYGLVGPGYTSAEVVADRLLGGAAEFPEADMSTKLKLLGVDVASFGDAMGRTPDCLEVVVNDAVNQTYAKLVLSDDAKTLLGGVLVGDASAYGVLRPMVGEQLPGDPMALIAPAGSGGADGGLGVGALPAAAQICSCNNVTKGDVTDAIAGGCCDVPGLKACTKAGTSCGSCVPLLKQLLEAEGVEQSKALCEHFSHSRAELFEIVSATEIRTFSGLLERFGTGKGCDICKPTVASILASTSSEHILDGEQAALQDSNDHFLANIQRNGSYSVVPRVPGGDITPEQLILIGEIARDFDLYTKITGGQRIDLFGARVEQLPEIWRRLVEGGMESGHAYGKALRTVKSCVGSDWCRYGQQDSVQMAINLELRYRGLRAPHKIKMGVSGCARECAEARGKDVGVIATEHGWNLYVGGNGGMTPKHAQLLAGDLDDETLIRYVDRFLMFYIRTADRLQRTAPWVEQLGLDHLREVVCDDSLGLASEFEAAMARHVEGYACEWKGVLEDPDKLSRFVSFVNAPDVPDPTVTFTENAGRKVPVPIGMPSIRPLQETP

SEQ ID NO: 916 - protein, 315 aa, Desulfovibrio vulgaris subsp. vulgaris str. Hildenborough
MKHLVIATRGSKLALWQAEHIKSLIETEHAGKVDVSLKIIKTKGDIILDVPLAKVGGKGLFVKEIEEALLDGSADLAVHSMKDVPMELPEGLFLGCIPEREEPSDTLLSVRYASLDALPHGARVGTSSLRRQSQLLALRPDLDIISLRGNVDTRLRKLMDGEFDAIVMATAGLKRLGLAAPHHEVLAPPRFLPAVGQGALGIEFREDRADLRDMLAFLDHRPTRIRVEAERGFLAGLEGGCQVPIAGHAVMTGDDNFRIEGLVADLKGERVIRRTLEGTGANARNRGLELASQVLADGAAEILDEVYASGAADRQ

SEQ ID NO: 917 - protein, 499 aa, Aspergillus oryzae
MSYLPLPPRQLFYDGKVQSASSGKTFQSVNPSDATPLAEIQVASHSDIDAAIAAADRVFPSWSQTPPIARARILQKASLILRERNDEIARVESLDSGKAFTETSTVDVVTGADVLEYYANLVGGGGLNGETTQLREDAWVFTKKAPLGVCAGIGAWNYPIQIALWKSAPCIAAGNTMVYKPSEFTPLHAQTLAEIYKEAGLPDGVFNIVYGAGDVGAYLTSHPTIAKVSFTGQVATGMKVAGSAAGNMKYVTMELGGKSPLVILPDAELENAVDGAMMANFYSTGQVCTNGTRVFVPSSMKAAFENRLLEKMQYIRPGPLFDEATNFGPLSSAIHLEKVISYIRHGIETDKATLLYGGLGKPQVSKELENGFWVRPTIFTDCKDDMLIVKEEIFGPVMSILYYETIEEAVRRANTTELGLAAGVFTKDVNLAHRIIDQLQAGITWVNTWGESPAEMAVGGWKKSGLGVENGRRGIEAWVKNKSTLVDMNGAVATVFAKL

SEQ ID NO: 918 - protein, 371 aa, Nicotiana tabacum
MAKRTLPLLRHLLSSPSHGFSHSLTSTRSVTYMPRPGDGTPRAVTLIPGDGIGPLVTGAVEQVMDAMHAPVYFERYDVHGDMKSVPPEVMESIRKNKVCLKGGLKTPVGGGVSSLNVQLRKELDLYASLVHCFNLQGLPTRHENVDIVVIRENTEGEYSGLEHEVVPGVVESLKVMTKFCSERIAKYAFEYAYLNNRKVLTAVHKANIMKLADGLFLESCPEVATKYPGIKYNEIIVDNCCMQLVSRPEQFDVMVTPNLYGNLVANTAAGIAGGTGVMPGGNVGADHAVFEQGASAGNVGNEKILEQKKANPVALFLSSAMMLRHLQFPSFADRLKTSVKRVIAEGKYMTKDLGGNCTTQEITDAVIANLD

SEQ ID NO: 919 - protein, 754 aa, Blastopirellula marina DSM 3645
MNRWSILPAALFVFGFGPSSLRADEVVEIVAATEPSSLDYVWVLLAASLVFLMQAGFMCLECGMARAKNSINVAVKNIADFLISVAAFWLFGFGIMFGASYYGLFGASDFCFSVGDNPWLAVFFVFQAVFCGTAATIDSGAVAERTRFVTYLTMSLICSALIYPVYGHWAWGSFFHGGAGGWLEQLGFIDFAGSTVVHSVGGWVALAGVICIGPRIGRFAKDGAPRKIPPHNLLMVFLGTFLLFFGWFGFNCGSTLAATTDIAGIAANTMLAACFGGLATSVLSWLGPTKRPEPDMIANGVLGGLVGITAGCASVDTMGAAAIGVGAGFVVFYGTWFLEHVLKLDDVVGAVPVHGFCGAFGTLAVALFIQSDKLPEGMTHLSLLQVQAIGVGAGFLWAFGVAFLILQALRLCMPLRVSEEDERIGLNVAEHGSVSSLLDLAEAMQRATRAKTYDHTLLVEVEHGTEVGDLARCYNELIETIRHEHSSAIQAMQNLEQQRNRIKNGLLSYQSNVEQNVAAIQSQNIEIERVLKLSSERSQQVTSSVRSVFTQIDGLVKSLREVAQQSDDSRQATDLGVSHSTESQQTIEKLDRSAAEIETVLALIDDIAEQTNLLALNATIEAARAGEMGKGFAVVAGEVKSLASQSSASARQISERIAAMQTDSQGAVKKISETLEVIQQVSEISSRVGNSIRLSMDEHEQASGNIHAIGGDVVQMIEEMMTGLTEVRQGTTDIAARVRQSYEELEGVLAGSEA

SEQ ID NO: 920 - protein, 584 aa, Arabidopsis thaliana
MCGILAVLGCSDDSQAKRVRVLELSRRLRHRGPDWSGLYQNGDNYLAHQRLAVIDPASGDQPLFNEDKTIVVTVNGEIYNHEELRKRLKNHKFRTGSDCEVIAHLYEEYGVDFVDMLDGIFSFVLLDTRDNSFMVARDAIGVTSLYIGWGLDGSVWISSEMKGLNDDCEHFETFPPGHFYSSKLGGFKQWYNPPWFNESVPSTPYEPLAIRRAFENAVIKRLMTDVPFGVLLSGGLDSSLVASITARHLAGTKAAKQWGPQLHSFCVGLEGSPDLKAGKEVAEYLGTVHHEFHFSVQDGIDAIEDVIYHVETYDVTTIRASTPMFLMSRKIKSLGVKMVLSGEGADEIFGGYLYFHKAPNKKEFHQETCRKIKALHKYDCLRANKSTSAFGLEARVPFLDKDFINTAMSLDPESKMIKPEEGRIEKWVLRRAFDDEERPYLPKHILYRQKEQFSDGVGYSWIDGLKDHAAQNVNDKMMSNAGHIFPHNTPNTKEAYYYRMIFERFFPQNSARLTVPGGATVACSTAKAVEWDASWSNNMDPSGRAAIGVHLSAYDGKNVALTIPPLKAIDNMPMMMGQGVVIQS

SEQ ID NO: 921 - protein, 91 aa, Oryza sativa (japonica cultivar-group)
MSRRSRSRASSAARITDEQIGDLVSKLQALLPEARLRSNDRVPSARVLQETCSYIRSLHREVDDLSERLAELLAAADVSTAQAAVIRGLLM

SEQ ID NO: 922 - protein, 314 aa, Bacillus subtilis subsp. subtilis str. 168
MMRTIKVGSRRSKLAMTQTKWVIQKLKEINPSFAFEIKEIVTKGDRIVDVTLSKVGGKGLFVKEIEQALLNEEIDMAVHSMKDMPAVLPEGLVIGCIPEREDPRDALISKNRVKLSEMKKGAVIGTSSLRRSAQLLIERPDLTIKWIRGNIDTRLQKLETEDYDAIILAAAGLSRMGWKQDVVTEFLEPERCLPAVGQGALAIECRESDEELLALFSQFTDEYTKRTVLAERAFLNAMEGGCQVPIAGYSVLNGQDEIEMTGLVASPDGKIIFKETVTGNDPEEVGKRCAALMADKGAKDLIDRVKRELDEDGK

SEQ ID NO: 923 - protein, 456 aa, Streptococcus thermophilus CNRZ1066
MKGNIDMTTGKEYVASVFEKVKAQNSHEAEFLQAVEEVFNSLVPVFDKYPKYIEENLLERLVEPERIVSFRVPWVDDKGQVQVNRGFRVQFSSAIGPYKGGLRFHPSVNQSIIKFLGFEQIFKNSLTGQPIGGGKGGSNFDPKGKSDNEIMRFCQSFMTELSKHIGADTDVPAGDIGVGGREIGYLYGQYKRIRNEYTGVLTGKGLNWGGSLARTEATGYGAVYFAEQMLNARGENFNGKTAVVSGAGNVAIYAIEKLQSLGAKAVTCSDSSGFVYDPDGIDVDLLKEIKEVKRERIVKYAEARPNATFTPAGGEKTVWSIKADLAFPCATQNELDETDAETLVANGVLAVSEGANMPSTLGAIDVFLKAGVSFGPAKAANAGGVAVSALEMAQNSGRTSWTFDEVDAKLYDIMKGIYENAAAAAKEFGQEGNLVVGANIAGFLKVADAMSAQGIV

SEQ ID NO: 924 - protein, 161 aa, Vibrio cholerae
MRDITPDLCDKYESQVTLLNLPLQNFGQRSAFWGEIVTVRCYHDNSKVRDVLSQNGKGKVLVVDGHGSCHKALMGDQLAILAIKNDWEGVIIYGAVRDVVAMSEMDLGIKALGTSPFKTEKRGAGQVNVTLTMQNQIVEPGDYLYADWNGILMSETALDVA

SEQ ID NO: 925 - protein, 524 aa, Oryza sativa (japonica cultivar-group)
MALKSPVDFAGSITSGQKDPCCFGVPGCNPRCVRYNKKSRTCRLVTRAISVDRPQLDFSNSDWKKQFQEDFDRRFSLPHLKDVIDVEPRPTTFSLKSRTPLENVNGSMQGSWNGYVNDDDRALLKVIKFASPTSAGADCIDPDCSWVEQWVHRAGPRKQIYFEPQYVKAGIVTCGGLCPGLNDVIRQIVLTLEKYGVKNIVGIQHGFRGFFEDHLAEVPLNRQVVQNINLAGGSFLGVSRGGANISDIVDSIQARRLDMLFVLGGNGTHAGANLIHEECRKRKLKVSIVGVPKTIDNDILLMDKTFGFDTAVEAAQRAINSAYIEAHSAFHGIGLVKLMGRSSGFITMHASLSSGQVDICLIPEVPFTLDGPNGVLQHLEHLIETKGFALICVAEGAGQEHLQQSNATDASGNMILGDIGVHLHQKIKAHFKEIGVHSDVKYIDPTYMVRAVRANASDAILCTVLGQNAVHGAFAGFSGITTGICNTHNVYLPISEVIKSTRFVDPNSRMWHRCLTSTGQPDFH

SEQ ID NO: 926 - protein, 439 aa, Pyrococcus horikoshii
  misc_feature (1)..(1): Xaa can be any naturally occurring amino acid
  misc_feature (90)..(90): Xaa can be any naturally occurring amino acid
  misc_feature (109)..(109): Xaa can be any naturally occurring amino acid
  misc_feature (286)..(286): Xaa can be any naturally occurring amino acid
  misc_feature (351)..(351): Xaa can be any naturally occurring amino acid
  misc_feature (393)..(393): Xaa can be any naturally occurring amino acid
XIREKALEFHKNNFPGNGKIEVIPKVSLESREELTLAYTPGVAEPCKEIARDPGKVYEYTSKGNLVAVVSDGSRILGLGNIGPLAGLPVXEGKALLFKRFGGVDAFPIXIKEQEPNKFIDIVKAIAPTFGGINLEDIASPKCFYILERLREELDIPVFHDDQQGTAAVVLAGLLNALKVVGKKISEITLALFGAGAAGFATLRILTEAGVKPENVRVVELVNGKPRILTSDLDLEKLFPYRGWLLKKTNGENIEGGPQEALKDADVLISFTRPGPGVIKPQWIEKXNEDAIVFPLANPVPEILPEEAKKAGARIVATGRSDYPNQINNLLGFPGIFRGALDVRARTITDSXIIAAAKAIASIVEEPSEENIIPSPLNPIVYAREARAVAEEAXKEGVARTKVKGEWVEEHTIRLIEFYENVIAPINKKRREYSKAITRA

SEQ ID NO: 927 - protein, 220 aa, Buchnera aphidicola (Cinara cedri)
MKKFLIIPSILSADFCYLGNELHKLLRAGCQLIHFDLMDNHYVPNFTIGPMILKSVKNNNIPVFFDVPLMASSGDSLIPLFADLNVKFISIHPETTNPFPRTIPLIKKIGCNVGLALNPSTSLNCLDYIINELDLILVMAVNPGFGGQVFLKNSFKKIKPIRYLINKKKSNILLSVDGGVNQSNILKIIDSGADYLVIGSAIFNFKNYLKTIKNFQNIFF

SEQ ID NO: 928 - protein, 391 aa, Roseovarius nubinhibens ISM
MAKEKFDRTKPHVNIGTIGHVDHGKTTLTAAITKYFGDFKAYDQIDGAPEEKARGITISTAHVEYETDTRHYAHVDCPGHADYVKNMITGAAQMDGAILVVNAADGPMPQTREHILLGRQVGIPYMVVFMNKVDQVDDEELLELVEMEIRELLSSYDYPGDDIPIIAGSALAAMEGNNPEIGEEKIRELMAAVDEYIPTPARAVDQPFLMPVEDVFSISGRGTVVTGRVERGVINVGDEIEIVGIRDTQKTTCTGVEMFRKLLDRGEAGDNIGALLRGIDREGVERGQVLCKPGSVTPHTKFEAEAYILTKDEGGRHTPFFANYRPQFYFRTTDVTGTVNLPSGTEMVMPGDNLKFEVELIAPIAMEDGLRFAIREGGRTVGAGVVSKIIE

SEQ ID NO: 929 - protein, 290 aa, Oryza sativa
MGNASGKEGEENGHVAAGAAAGVAGSAGAAARAPPPLMPPDAVMRELPPPVPYVFTPQVPVAPLHIPTEFSPVFNNSWINESDESTNNHPQEKGIPTLISWSQGGNEVFVEGSWDNWTSRRVLEKSGKDHTILLVLPSGVYHYRIIVDGEPKYVPELPHVADEGGQVANLLDVHDYIPESLGSVAGFDSPPSPEHSYDLQLPGDEEFAKEPPILPPQLVMSVLGDTDNSEEQTLKPKHVVLNHLYIEKGWGSQSLLALGVTHRFQSKYVSFVLYKPLRRSSTAKRTKNGG

SEQ ID NO: 930 - protein, 435 aa, Roseovarius nubinhibens ISM
MGILASLRSARRNILSIIPEIATKQPMVSGRTGKRWHMVMDPGAIRRILLEELDNYPKSLVTKNLLRPAVGESLFIAEGDHWRWQRRAAAPAFSHRNVLNLAPVMSGAAGRSADRVAAAGGQAIDMAEDMVRTTFDVISDVTFSGGDAFDADGVHRAIDDYISAAGKISLFDILGFPDWVPRPARVAAGPGMRQMKALADRAVNDRRARGHDGTPDLLDLLLAGEDPETKRKMNTAELRDNLLTFIVAGHETTALTLAWSLYLCAFDQEVQDRARAEAKAVLTDGQPATGEDVAKLPFIRQIADEALRLYPPAGMISRTALKKDRLCDRDIRPGDTVIIPIYALHRNHLLWDDPDHFRPERFADRKAVDRYAYLPFGDGPRICIGSSFALQEAVIILATLLARFRFRPIAGRDPKPVMILTLRPEGGVWLTAEEL

SEQ ID NO: 931 - protein, 813 aa, Rhodobacter sphaeroides 2.4.1
MIAEKSERFFPFAVSAELAPVGVSAAERSALADYLESSETLLTERVVAYASTRSYSHLVSTLPEAWRSSVQGLTDSVILMLDHQSAEAAIDYDADIGTDPSTAYGIEAGLRHRLRGISLETFIGAFKGYRDVYLNVTAEARVPAAMREGWLRLLRGFFDRAEIGICAHWSGELGTLDHDQLLSVNRALVNEKNKYLTIFESMNNPVLLVDDGGRIENMNFAAARLFLQDALPGSVYYGPEANLRFADLAGFDLEAVKLRGEAGDVLTCIGERWYSITAQEMLDVSRKFVGIVVTFHDVTEARRAREQAEALARAKTDFLATMSHEIRTPIHSIGGVTELLKQSELASRDRGYVDAIERSTEVLASIVSDVLDYARIESGLVELEQVDFSIDQILDDVARMMQPLVRRKPQLRIVIERTDLPPVLGDAGKLRQILINLTSNAVKFTPEGTVVIGAERLAGGHRFRFTVSDTGPGIAAEKLEEIFKPYIQSDSSISRRHGGTGLGLAICRRLAGHLGGRLDVRSTPGFGSRFTLEVALAPGGSEPPGDATADAPPPARALDLLVVEDDEVNALVAQSLLSAAGHGVRVAGTGEAALVALGEHRFDLVLTDLNLPDMDGLELARTIRRHADRHTAELPLVALSAHGPGVDPAALTEAGIDAFLGKPFHFARLEEILSRLVGSSSPTPLGKAAPARRALQSVDLCVLRGHAEALGRTSAARIVQTFRQSVLETARALELAMDEADMRSVTSLAHRLKGAARHLGFRGLSDKAEQVETAAAADGCEAALVLELVSDCRAAPALADLAWAEASAGVAES

SEQ ID NO: 932 - protein, 324 aa, Synechococcus sp. RS9917
MAGSGYRDYFKVLGVDRSADADAIKRAFRKLARQYHPDVNPGDATAEAKFKEVSEAYEVLSDPEKRRRYEQFGQYWNQVGGGAPGAGGAGFDVDFGRYGNFDDFINDLLGRFGGAGGGAGFPGGFGGGSGFPGGGFPRGAQQRQPINLDAEASVKVSFAEAFRGSERTLSVNDERVQVRIPAGVKNGSRLRLKGKGNSQPGTGRRGDLYLNLEVQPHPVWRLDGDQLRAELPVALDELTLGGTITVMTPDGEADVTIPAGTAPGRSLRLKGKGWPLKSGRGDLLLTLSLQWPESWSAEERQLLDQLRQARAQDPRRNWLSSARL

SEQ ID NO: 933 - protein, 373 aa, Oceanobacter sp. RED65
MKYFKLPDLGEGLHEAEIVEWHIKPGDQVAVDQLMVSVETAKAIVEVPSPQAGVVAAFFAEEGDTVHVGEALVEYEGEEDSGTVVGDLSKAPQGNSEQGFIVGSAYDPANSGANASVKATPSVRALAKRLGVDLSHLKPSGGDGRFTIEDVEKAAALNDEKGRSEVLKGVRKSMAKAMADSHANVVPVTLHDDVDIHQWKEGQDVTMRLVHAIAYACEVQPELNVWFDGEQMTRRMLNQVDLGIAVDTEQGLFVPVLRDIRNRNMFDLRDGLNALRQAVKERKIPPQEMQGASITLSNFGTLAGKYANPVVVPPMVAIVGAGGIRREAVVWEGEVCAHAIIPLSLTFDHRAATGGEAARFLKAMMQDLAKPEI

SEQ ID NO: 934 - protein, 483 aa, Gentiana lutea
MATSTSPCFTPYDIQSPSRVMTTFGGRISPMKMNLFHEKKVFWVFDQKGSRIYPHFKCSTNSHNVNQHQSKDPFLNLHPEISLLRGDGNNTLVDSRVDTAGSGRSVTESLRDSSSSNNYSEAKIKVVGVGGGGSNAVNRMIESAMKGVEFWIVNTDVQAIKMSPVYLENRLQIGQELTRGLGAGGNPDIGMNAAKESKEAIEEAVYGADMVFVTAGMGGGTGTGGAPVIAGIAKSMGILTVGIVTTPFSFEGRRRAVQAQEGIAALRDNVDTLIVIPNDKLLTAVSPSTPVTEAFNLADDILRQGVRGISDIITIPGLVNVDFADVRAIMANAGSSLMGIGTATGKTRARDAALNAIQSPLLDIGIERATGIVWNITGGSDLTLFEVNAAAEVIYDLVDPSANLIFGAVVDPSLCGQVSITLIATGFKRQEESDKRSIQAGGQLAPGDANQGINRRPSSFSESGSVEIPEFLRKKGRSRYPRA

SEQ ID NO: 935 - protein, 336 aa, Oceanobacter sp. RED65
MAEAIQDTHELVDTVLLEAVNLAIHWEMQHDENVVVLGEDVGSNGGVFRATDGLKQKFGFKRVMDTPLAEALIGGLAVGMSTQGLRPIAEIQFSGFIFPALEHLMCHAARMRNRTRGRLSCPMVLRAPYGGGIHAPEHHSESIEALMAHIPGLRVVIPSSPARAYGLLLAAIRDPDPVIFLEPKRVYRSSKQSYENNGEALPLDSCFTLRQGKDITLVSWGASIAETLQAADALAEHGIDAEVIDVASIKPLDMQTILISVARTGRCVIVHEAAKSFAVGAEIAAQVSEKCFLNLQAPVQRVAGFDTHMPYFQNEHYYMPNVQDILAAVDKSMKEE

SEQ ID NO: 936 - protein, 191 aa, Triticum aestivum
MATMVALSSFAVVGRSAARSLVVAPRRRALVVRAQTEPDSTKERRRGSTSSSSSPSTSATPTPIPAAPKPMTKKANPSVWDALAFRGPAPERINGRLAMVGFVAALTVEAARGGGLLDQAGSGAGLGWFLVTAGVFSVASLVPLLQGQSVESKFSGFWSADAELWNGRFAMLGLVALAATEFITGAPFVNI

SEQ ID NO: 937 - protein, 377 aa, Lilium hybrid cv. 'Star Gazer'
MENVKGPVVVTGASGYVGSWLVMKLLQYGYAIRATVRDPRDLRKTKPLLDIPGADERLTIWKADLSEDASFDEAINGCTGVYHVATPMDFDSKDPENEVIQPTINGVLGIMKSCKKAGTVKRVIFTSSAGTVNVQENQMPEYDESSWSDVDFCRRVKMTGWMYFVSKTLAEKAAWEFAKENDIQLISIIPTLVVGPFITSTMPPSMLTALSLITGNEAHYSILKQIQLVHLDDVCKAHIFLFENPEASGRYICSSYDATIYDLARKIKDRYPQYAIPQKFEGIDDQIKPVHFSSKKLMDLGFKYQYTFEEMFDEGIRSCIEKKLIPHQTQERYYVHDELDLGCSKMTNDKLDLGGSKLNSMDEMVRGHNEQVSVALQ

SEQ ID NO: 938 - protein, 362 aa, Anabaena variabilis ATCC 29413
MTQNYRITLLPGDGIGPEIMAVAVDVLKVVGQQFDIQFDFQEALIGGAAIDATGEPLPSATLDTCRQSDAVLLAAIGGYKWDSLPPHQRPEGGLLGLRAGLELFANLRPAQILPQLIDASTLKREVVEGVDIMVVRELTGGIYFGKPRGIFTTETGEKRGVNTMVYTESEIDRIGRIAFETARKRRGKLCSVDKANVLDVSQLWRDRITKLSQEYPDVELSHLYVDNAAMQLVRAPKQFDTIVTGNLFGDILSDAAAMLTGSIGMLPSASLGASGPGVFEPVHGSAPDIAGLDKANPLAQVLSAAMMLRYALNQPQAADKIEQAVLQVLEQGDRTGDIMSVGMNLLGCRAMGDSLIKALEKS

SEQ ID NO: 939 - protein, 627 aa, Ipomoea batatas
MEREWFLPFKVLGLGIWMLIATSCSATLSPSGVNYEVVALIAIKTGLHDPYNVLENWDVNSVDPCSWRMVTCSPDGYVSALGLPSQSLSGTLSPGIGNLTNLQSVLLQNNAISGHIPAEIGKLERLQTLDLSNNKFNGDIPSTLGDLRNLNYLRLNNNSLSGQIPESLSKVDGLTLVDVSFNNLSGRPPKLPARTFKVIGNPLICGQSSENNCSVIYPEPLSFPPDAGKGQSDAGAKKHHVAIAFGASFGALFLIIVLVSLIWWRYRRNQQIFFDLNDNYDPEVCLGHLRRYTYKELRTATDHFNSKNILGRGGFGIVYKGSLNDGTIVAVKRLKDYNAAGGEIQFQTEVEMISLAVHRNLLRLWGFCSTENERLLVYPYMPNGSVASRLKDHVHGRPVLDWSRRKRIALGTARGLVYLHEQCDPKIIHRDVKAANILLDEDFEAVVGDFGLAKLLDHRESHVSTAVRGTVGHIAPEYLSTGQSSEKTDVFGFGILLLELITGQKAVDFGRGANQKGVILDWVKTLHQEGKLNLMVDKDLKNNFDRVELEEMVQVALLCTQFNPSHRPKMSEVLRMLEGDGLAEKWEASQRNDTPRYRTHENTPQRYSDFIEESSLIVEAMELSGPR

SEQ ID NO: 940 - protein, 244 aa, Glycine max
  misc_feature (85)..(85): Xaa can be any naturally occurring amino acid
MVSAAIARNVVGVIGNIISFGLFFSPAPTFYGIVKKKTVEEFKPDPYIATVLNCAFWVFYGMPFVHPNSILVVTINSVGLAFESXYLVFFFLFVESLKKLLIFLLIEVVFFAAVALITMLALHGTRQRSLVVGVLSDIFNVMMYVSPLTIMAKVIKTKSVKYMPFWLSLANFLNGACWTTYALIHPFDLYVLISNGIGAISGLIQLILYACYCSCKSKNDEDGDQDLKPSGFQLSNLNGRAAVV

SEQ ID NO: 941 - protein, 357 aa, Nicotiana tabacum
MARKSFPILKQLIQQSTNRFFTTNASPRAVTLIPGDGVGPLVTDSVEQVMQAMKAPVYFERYEVRGDMKCIPEEVIDSIKKNKVCLKGGLKTPVGGGVSSLNVLMRKELDLSASIVHCFTFPGLPTRHEDVDIVVIRENTEGEYAGLEHEVVPGVVESLKVITKYCSERIAKFAFEYADVNKRKKVTAVHKANIMKLADGLFLKSCREVASKYPEIQYEEIIVDNCCMQLVSRPEQFDVMVTPNLYGNLIANTAAGLAGGTGVLPGGNVGLIKPVFEQGASPGNVGHEKILKLKKANPVALLLSSAMMLRHLEFPSFADRLETAVKRVIAEGKVRTKDLGGDSTTQEVVDAIIAALD

SEQ ID NO: 942 - protein, 978 aa, Burkholderia xenovorans LB400
MKLEHPDRLMNRTPLSLAALEVHDAFAERHIGPDSADQQAMLEALGFASRAALIDAVIPKTIRRTEPLPLGPFAQPKSEAEALATLRELADRNQVFRSYIGQGYYNAHTPTVILRNVLENPAWYTAYTPYQPEISQGRLEALLNFQQMIVDLTGLAISNASLLDEATAAAEAMTLLQRIGKPKSNVFYVADDVLPQTIEVVKTRATPVGIEVKVGPAADAANANAFGVLLQYPGVNGDVRDYRALAEAIHAAGGHVVVAADLLALTVLTPPGEWGADVAVGNTQRFGVPVGFGGPHAAYLAVRDEFKRQMPGRLVGVTVDAQGNPALRLALQTREQHIRREKATSNVCTAQALLAIMASMYAVYHGPHGLKTIALRVNRIAALLAEGAKQLGYTLVNETFFDTLTFETGARTQALHDAALAKRINLRRVSDTQVGLSVDETTTRRDLADLLEVFAQAAGAKIVPQVDALDSTIAASDTASVPPALERTSAYLTHHVFNRHHSETEMLRYLRSLSDKDLALDRSMIPLGSCTMKLNATSEMLPVTWPEFGQIHPFAPAEQTVGYREMIDQLEAMLVAATGYAAVSLQPNAGSQGEYAGLLIIHAYHASRGEAHRNVCLIPASAHGTNPASAHMAGMQVIVVACDAQGNVDIEDLKKKAEQHADKLAAIMITYPSTHGVFEQNVREICEIVHAHGGQVYVDGANMNAMVGLTAPGQFGGDVSHLNLHKTFCIPHGGGGPGVGPVAVGAHLAQFLPNQISSGYERAPNGIGAVSGAPYGSASILPISWMYIAMMGAKNLTAATETAILNANYVAKKLAPHYPVLYSGPGGLVAHECILDLRPIKETSGITVDDVAKRLADYGFHAPTMSFPVPGTLMVEPTESESKEELDRFIEAMIAIREEIRAVEEGRSDREDNPLKHAPHTAAVVIANDWKHAYARETAAYPLPTLIAKKYWPPVGRADNVYGDRNLFCSCVPIADYE

SEQ ID NO: 943 - protein, 261 aa, Ralstonia eutropha JMP134
MTSPVLYHASEGVATITLNRPEVLNALNAELLRELRAAVDRAAADESVRAVVLTGAGRGFSSGADLGARQNASGEMADSGTLLRERYHPIVLALRQMPKPVISAVNGVAAGAGMSLALAADVVLAGKSASFLQAFSKIGLVPDAGSTYFVPRYAGEMRARALAILAEKIDAEEAQRIGLVWKVHADDALQAEASKMASHLANMPTFAYGLIKEALNASSGNDLATQLELEASQQSRACRSEDFREGVAAFVAKRPPQFKGR

SEQ ID NO: 944 - protein, 138 aa, Oryza sativa (japonica cultivar-group)
MADGTTTELNITPTNMLPSRNISAKALQLVRLSKNSQVPPSSVGVRLLSSSPAPARMLSVAASDALVEIKPGKISMVSGIPKEHLRRKVLLWTYSDLCSVDRFASPHRSVWESLEMSRFGGFFWLLLGLGIEPGGVGS

SEQ ID NO: 945 - protein, 372 aa, Idiomarina baltica OS145
MSLHSTEEIIEDIKQGKMVILMDDEDRENEGDLILAADCVTPEAINFMARYGRGLICLTLSEERCKQLNLPLMVDRNNAPYSTAFTVSIEAAEGVTTGISAADRAQTVKAAVARNAQPEDLVMPGHIFPLKAKQGGVLNRAGHTEAGCDLARLAGYEPAAVIVEVLNEDGTMARRADLEKFAEAHDIKVGTIADLIEYRSVREKTIRRVAQCQLPTSFGKFNMITYQDSIDQQVHHALVHGEINAEKVTNVRVHLQDSLHDTLSTERAAKRSWPIAKAMQYIAENDGVLVLIGRQQTPEDIIAQVKEFEAQDQGQHKPTASASNASRNVGVGSQILADLGIHQMHLLSSPKRYSALSGFGLEVVDFIEDKAD

SEQ ID NO: 946 - protein, 256 aa, Ralstonia metallidurans CH34
MTSVSYEVRDNIAEILLDSPPVNALNEAMIDALLQGLRRAAEDDSVRAVILASAVPRRFCAGLQLDSLRDAPPSRGYALVEKLYSGLCEAQFHLGKPSIAAVGGTARGGGMTLAIHCDMIVAADTATFGYPEIDVGLVPAIHYTHLPRIIGRHRAFDLLFTGRSFDAAEAMSLGLVNRVVPEQRVMEEARALARSLCQKSPEIMRMGRQAFMRANDIDYRRGVAGAVETFGNIFATEDAQEGIAAFVERRKPRWQA

SEQ ID NO: 947 - protein, 422 aa, Geobacillus kaustophilus HTA426
MAEIKVPELAESITEGTIAQWLKKPGDYVEKGESICELETDKVNVEIMAEESGVLQQLLANEGDTVAVGQAIAIIGEGAAAPTAALQAAPQPADETETVAPADSNEQPAPQPVAVAQAPSQRPIASPAARKMAREKGIDLTQVPTVDPLGRVRKQDVASFAAQPAAAPQPAPQAAPTSTPAAVPAAEAGKPVIREKMSRRRQTIAKRLLEVTQTTAMLTTFNEIDMSAVIDLRKRKKDKFFEEHDVRLGFMSFFVKAAVAALKKYPYVNAEIQGDEILLKKYYDIGVAVSTDEGLVVPVVRDCDRKNFAEIERDIAELAAKARSNKLSLADLQGGTFTITNGGVFGSLLSTPLLNGPQVGILGMHSIKLRPVAVDEERIENRPMMYVALSYDHRIIDGKEAVGFLKTVKDLIENPEDLLLES

SEQ ID NO: 948 - protein, 171 aa, Kocuria rhizophila
NTDAQALLMSDADVKLDVGRELTRGLGAGANPDVGRQAAEDHEEEIQEVLKGADMVFVTAGEGGGTGTGGAPVVARIARSLGALTIGVVTRPFTFEGRRRSNQAENGIETLRDEVDTLIVIPNDRLLSISDRNVSMLDAFKSADQVLLSGVSGITDLITTPGLINLDFADV

SEQ ID NO: 949 - protein, 937 aa, Helicobacter hepaticus
MTSKIQGKKPTLSRRDFIKSAAAASAAASVGLSIPSVMSAEAQNAQKLWKWDKSVCRFCGTGCGIMVATQKDNTGQAKIVAIKGDPEAPVNRGLNCIKGYFCAKIMYGADRLTTPLLRVNSNGEFDKKGKFAPVSWKRAFDEMEKQFKKAYNELGPTGIAVFGSGQYTIQEGYAAVKLVKGGFRSNNIDPNARHCMASAVVGFMETFGIDEPAGCYDDIELTDTIVTWGANMAEMHPVLWSRVTDRKLSSSNVKVINLSTYTNRTSDLADIEIIFKPHTDLAIWNFLAREIINRNAVDEAFVKENCVFSTGFVNIGYGMRNNPQHPKFKPEERDIVAKEVSKIVSNDEGITLQYLGIKAGEEMKMDKAGAAGNHWGISFEDFKKGLEPYTLDFVANLAKGNPDESIESFKQKLQSLADYYIDKNRKIVSFWTMGMNQHQRGTWVNEQSYMVHMLLGKQAKPGSGAFSLTGQPSACGTAREVGTFSHRLPADMVVANPKHREITEKIWHLPSGTLNSKIGAPYLKIMRDLEDGNIKWAWVQVNNPWQNTANANHWIAAAREQDNFIVVSECYPGISAKVADLILPTAMIYEKWGAYGNAERRTQHWKQQVVAPGEAMPDIWQMAEFAKRFKLSEVWDKGYEALDIKPVLESAKAMGYTEEDTLFDVLFANKNAKNFSAQDALLKNEFNTEVLGDSRNVEDGNGEAFKGYGFFIQKYLWEEYRQFGLGHAHDLADFDTYHRVRGLRWPVVNGKETQWRFNAKYDFYAQKLGNGKAFAFYGNKGKDMPAGSLNAPSEEKVSIDNKAKIFLRPYMDPCEMPDKEYPMWLCTGRVLEHWHSGTMTMRVPELYRAVPEALCYMHPDDANAQNLEQNQVVWVESRRGKVKAKLDLRGRNRPPKGLIYVPWFDENVFINKVCLDATCPISKQTDFKKCAVKVYKA

SEQ ID NO: 950 - protein, 583 aa, Candida glabrata CBS 138
MTTADEYKQQGNAAFVAKDYEKAIDLFSKAIEVSETPNHVFYSNRSACYASLKKFPEALNDAEECVKINPTWSKGYNRLGAAHLGLGDLDEAEGSYKKALELDGSNQAAKDGLDQVKRTQESRQGMPDLGLSKIFADPNLIENLKKNPKTSEMMKDPELVAKLIKYKTNPQAMSQDLFTEPRLMTIMATLMGVDLNMPDLSSSNSMPKEPTETPEQSKETPAEQKSEPQAEATKAEPEPMEVDSAGNEETSKKEEAEKEKALGNKAYKARQFDEAIAHYDAAWNLHQDITYLNNRSAAEFEKGDAETALKTLDEAVEKGREMRTDYKLIAKSFARMGNVHHKTNNLKKAIEFYQKSLTEHRTPEILTKLRNTEKELKKQEAEEYINPEKAEEARLEGKDYFTKGDWPNAVKAYTEMIKRAPEDARGYSNRAAALSKLMSFPEAIEDCNKAIEKDPNFIRAYIRKATAQIAVKEFAAAIETLDAARTKDAEVNNSANVREIDQLYVKASQQRFQPASSNETPEQVYERAMKDPEVIAIMQDPVMQSILQQAQQNPAALQEHMKNPDVFKKIQTLIAAGIIRTGP

SEQ ID NO: 951 - protein, 526 aa, Yarrowia lipolytica CLIB122
MFQLFSILVLAFTTALVAQLAYNQYDYQRKVKKFGCGQLRVAENGLFGWKGLREVLRINKYKLGPAALKDRFEKYGKTHVFHVGPSPLITTMDPENIKAMLATQFKDFCLIARYKALGPMLGDGIFTLDGHGWTHSRALLRPQFAREQVSRLDSIEHHFQILKKCISKEMSDKRDTQRGFDIQNLFFLMTLDTATEFLFGSSVDSLVDFLDDPSIQTGDHGGIDEAARKGFSNAFNRAQELSSLRTRLHKLYWVIGTLAVREPYHRYNREVKTFVDHYAAKAIKARNEKNTDLLDNDKYIFMYELVKETSNPITLRDQMLNILLAGRDTTASMLSWIYFRLARDPKRYAKLRAAVLADFGPGPENITFESLKKCDYLRYVLNESLRVYPVVPINARTASRDTTLPRGGGPDGSQPIFVPKGQTVSYSVWWTHRDPEFWGQDAEEFIPERWDTKNGSIGRGWEYLPFNGGPRICLGQQFALTEVGYVLSRMVQTYETLESGDTKPLPPLYNHALTLCHQEGVWIKTE

SEQ ID NO: 952 - protein, 108 aa, Chlorobaculum thiosulfatiphilum
  misc_feature (16)..(17): Xaa can be any naturally occurring amino acid
  misc_feature (42)..(42): Xaa can be any naturally occurring amino acid
  misc_feature (45)..(45): Xaa can be any naturally occurring amino acid
  misc_feature (58)..(58): Xaa can be any naturally occurring amino acid
  misc_feature (66)..(66): Xaa can be any naturally occurring amino acid
  misc_feature (72)..(72): Xaa can be any naturally occurring amino acid
  misc_feature (75)..(75): Xaa can be any naturally occurring amino acid
  misc_feature (79)..(81): Xaa can be any naturally occurring amino acid
  misc_feature (94)..(94): Xaa can be any naturally occurring amino acid
  misc_feature (99)..(99): Xaa can be any naturally occurring amino acid
AGKYFEATDKNFQTEXXDSDKAVLVDFWASWCGPCMMLGPVXEQXADDYEGKAIIAKXNVDENPNXAGQYGXRSXPTMXXXKGGKVVDQMVGAXPKNMXAKKLDEHIG

SEQ ID NO: 953 - protein, 250 aa, Prochlorococcus marinus str. NATL2A
MSIFVGNLPFRAEQEDVMELFSPFGEVSNCSLPLERDTGRKRGFAFVEMADEAVEASAIESLQGAELMGRPLRINKAEPRGSAPRRGGGGYGGGGQGGYGGGGQGGYGGGQGGYGGGQGGYGGGYGGGGQGGYGGGGQGGYGGGGQGGYGGGGQGGYGGGGQGGYGGGGQGGYGGGGQGGYGGGGQGGYGGQADQSAQDRPSGAKGWEDRSHGNASQDVNDFDQGRSRRRRGASPEGGADSTADYGGAES

SEQ ID NO: 954 - protein, 365 aa, Bacillus subtilis subsp. subtilis str. 168
MKKRIALLPGDGIGPEVLESATDVLKSVAERFNHEFEFEYGLIGGAAIDEHHNPLPEETVAACKNADAILLGAVGGPKWDQNLSELRPEKGLLSIRKQLDLFANLRPVKVFESLSDRSPLKKEYIDNVDFVIVRELTGGLYFGQPSKRYVNTEGEQEAVDTLFYKRTEIERVIREGFKMAAARKGKVTSVDKANVLESSRLWREVAEDVAQEFPDVKLEHMLVDNAAMQLIYAPNQFDVVVTENMFGDILSDEASMLTGSLGMLPSASLSSSGLHLFEPVHGSAPDIAGKGMANPFAAILSAAMLLRTSFGLEEEAKAVEDAVNKVLASGKRTRDLARSEEFSSTQAITEEVKAAIMSENTISNV

SEQ ID NO: 955 - protein, 518 aa, Bacillus subtilis subsp. subtilis str. 168
MRKINFFDTTLRDGEQSPGVNLNTQEKLAIAKQLERLGADIIEAGFPASSRGDFLAVQEIARTIKNCSVTGLARCVKGDIDAAWEALKDGAQPRIHVFIATSDIHLKHKLKMTREQVIERAVGMVKYAKERFPIVQWSAEDACRTELPFLAEIVEKVIDAGASVINLPDTVGYLAPAEYGNIFKYMKENVPNIHKAKLSAHCHDDLGMAVANSLAAIENGADQIECAVNGIGERAGNAALEEIAVALHTRKDFYQVETGITLNEIKRTSDLVSKLTGMAVPRNKAVVGDNAFAHESGIHQDGFLKEKSTYEIISPELVGVTADALVLGKHSGRHAFKDRLTALGFQFDSEEINKFFTMFKELTEKKKEITDEDLVSLILEEKVTDRKIGYEFLSLQVHYGTSQVPTATLSLKNQENAQLIQEAATGAGSVEAIYNTLERCIDKDVELLDYRIQSNRKGEDAFAQVYVRVLVNGKESAGRGIAQDVLEASAKAYLNAVNRQLVFQSNMSGLKNHTAVGS

SEQ ID NO: 956 - protein, 465 aa, Blastopirellula marina DSM 3645
MVLHEKDTRREELDDDVYASTDLSVSMPKYKFPHVEQNPRHAYSVVHDELMLDGNSRQNLATFCQTWVEPEVHKLMDECLDKNMVDKDEYPQTAEIEARCVHMLADLWNSPSEANTIGCSTTGSSEAAMLGGMAMKNRWKAKRVAAGKPVDKPNLITGPVQVCWHKFARYWDIELREVPMEEGRLLLTPEEVIKRCDENTIGVVPTLGVTFTCQYEPVFEIAAALDKLEKEKGLDIPIHVDAASGGFLAPFCAPELVWDFRLPRVKSINTSGHKFGLAPLGVGWVIWREEKDLPDDLIFWVNYLGGNMRDLALNFSRPGGQIVCQYYNFLRLGRDGYRKIHSACYDTASYLAEEIDKIGLFDVIYDGDRRSGIPALCWKLKPGVKPGFSLYDLADRLCTRGWQVPAYSLPDDQSDQVIQRILVRHGVSRDLGSLLLEDIQRGIEYFENHPIDQPLTEEEAGGFHH

SEQ ID NO: 957 - protein, 564 aa, Candidatus Pelagibacter ubique HTCC1002
MILEKIKILRKKFKQYNIDGYIIPKNDEYFSEYAKNDRLKNITGFSGSAGFAVVLKKQNYLFVDGRYTIQAHQQSSKNFKIIEIHKKLPHTIIKNFNLGYDPTLFTSKLLNKYFKNNNLISIDQNLIDQIFKFKEKPTKPFYSLDTKIVGEPYSSKISKVVRFLKNNKADYCFISAPENVAWLLNIRGYDNPNSPIANARLILNKKKEFFLITNEKKLKNLLLDKKIKKKQILPIKSLPQFLDNLKGKNFIIDNKTCSIFYEKIIKSNFNILKFDDPVYELKSMKNSNEIKHMIEAHKKDGLALTRFIYWIKNVNKKKITEVYAQNKLEKFRKLNKDYLFPGFDTIAGAGSNGAIVHYRANKKTTKKIEQNDILLVDSGGQYHYGTTDVTRTISFSKQNKFIKNAYTNVLKGHIAVALTNLNKDDTGKKIDIRARKYLKKEGQDYAHGTGHGVGFFLNVHEGPQSISKHNSIKIKNGMILSNEPGFYKKNHFGIRIENLIYAKKTKRSFNFENLTLAPLEKDLINYKLLNKIEKDYLFKYHLNIYSEFSSLLNKKERKWLATLI

SEQ ID NO: 958 - protein, 362 aa, Gloeobacter violaceus PCC 7421
MGGRYKIAVLPGDGIGTEIVQVGVAMLEAAARRFDFAFDFEEAPIGGAAIDATGEPLPAATLELCKASDAVFLGAVGGPQWDTLPSDKRPEKALLGLRAGLGLFANLRPARILPQLVAASALKPEVVEGVDILVVRELTGGLYFGIPKGIFPEKKGGRRGVNTMSYSAFEIERIGRVAFEAARERRGKLCSVDKANVLEVSQLWREVLVGLAPEYPDVELTHMYVDNCAMQLVRRPRQFDTIVTENMFGDILSDEAAMLTGSIGMLPSASLGSGGPGLYEPVHGSAPDIAGQDKANPLAQVLSGAMLLRHSLRQPEAAQAVERAVQTVLEQGYRTGDIAAPGAQIVGCRAMGEQLLAAFERA

SEQ ID NO: 959 - protein, 299 aa, uncultured bacterium
MARVRLATRGSRLALWQAEWVAKQLVQQGAEVELVVVETQGDREKRPFAQMQGQGFFTKAVQEAVLEGRADFAVHSYKDLPSARPAGLEIAAVPPREDPRELLLVRLQAVDQVAPGLPLRAGARVGSSAARRQAQLAHLRPDLSLLELRGNVLTRVEKLRQGEYDAVLLAYAGVRRLGLDLSPFHWQVLPPTLLVPAPAQGALALECRQDDKRLRPLLEPLDDPSAGVRCGGAGLMARLAGGCQLALGALAQETPEGLQLLAWYRGRSYQARGSDPEAVAEAVFKEICSEYPEVVCESP

SEQ ID NO: 960 - protein, 326 aa, Zea mays
MAHYQQGRRQQVDEYGNPVPGGHGVQGQQLGEAAGGYGVAGTGSYGGQQQAGYGPTGTGTHDAGGYDGSDHPGYGATGTGVDDAGGPGAYGAATGTRAHGTHGGVTGIQDGAAGLTGGGLHGATGMGTTTGTGAHGATGMLDTGVLGGGGHAATGMPAGHGTRPGATGVAGTGGAFPHAAEHKTGGGILRRSGSSSSSSSSSSEDDGMGGRRKKGLKEKIKEKMPGGHREGQGQATATGAYGGTGYVAGPTTGGPHEKKGVVEKIKEKIPGGHKDYDQHQHTTAATGGGGGYGGTTDTTYGTTTTEGTHEKKGFMDKIKEKLPGQH

SEQ ID NO: 961 - protein, 847 aa, Brassica rapa
MKGAQSTCHHSYTLSLLLVSILLFHHPTVSVDVNTLSSTESLTISSNRTLVSPGGVFELGFFKPSALQRWYLRIWYRKVFDQKTYAWVANRDNPLSNSIGTLKISGNNLVLLGHSVLWSSNLTRGNVSSPVVAELLPNGNFVMRYSNKSGFLWQSFDFPTDTLLPGMKLGYHRKTGRSRFLTSWRSSDDPSSGYFTYELDTRRGLPEFFVMYNDIELYRGGPWNGIDFSGISKPKDQELYYNYTDNSEEVTYTFLSANQSIYSRFTIVYYGSLYLSTWIPPSSGWRDFDALPTAECDYYNICGPNAYCKLNNTCHCLEGFDPMNPRQWSARERSEGCVRRTPLSCSGNRFLLLKKTKLPDTKMASFDRRINLKKCEERCLRDCTCTSFAAADVRNGGTGCVMWTRQLNDTRTYSIGGQDLYVKLAAADTVFSSDEERDRNGKKIGWSVGVSLMLILSVIVFCFWKRRQKQAKPAATPIVQNQGLMIGVVLPRQIPSRRNLSEENAVEDLELPLMEFEAVLTATEHFSNCNKVGEGGFGAVYKGRLLDGQEIAVKRLSEMSAQGTNEFMNEVRLIARLQHINLVRLLGCCVDEGEKILIYEYLENLSLDSHLFGLTRSSMLNWQMRFDIINGIARGILYLHRDSSIRIIHRDLKASNILLDKDMTPKISDFGMARIFGRDETEANTRKVVGTYGYMSPEYAMEGIFSMKSDVFSFGVLLLEIISGKRNKGFNNLGRDNNLLDCVWRNWKEGQGLEIVDTVIIDSSSPTFRPRDIQRCLQIGLLCVQARPDDRPIMSAVVFMLESEAADIPQPKPPGYCVIGNYSTWSKQRDRESCTVNQITMSIIDAR

SEQ ID NO: 962 - protein, 142 aa, Arabidopsis thaliana
  misc_feature (102)..(103): Xaa can be any naturally occurring amino acid
  misc_feature (105)..(105): Xaa can be any naturally occurring amino acid
  misc_feature (110)..(110): Xaa can be any naturally occurring amino acid
  misc_feature (119)..(119): Xaa can be any naturally occurring amino acid
  misc_feature (123)..(124): Xaa can be any naturally occurring amino acid
  misc_feature (128)..(128): Xaa can be any naturally occurring amino acid
  misc_feature (131)..(131): Xaa can be any naturally occurring amino acid
MASSMLSSTAVVTSPAQATMVAPFTGLKSSASFPVTRKANNDITSITSNGGRVSCMKVWPPIGKKKFETLSYLPDLSDVELAKEVDYLLRNKWIPCVEFEFXXHXFLYRXHGNTSGYYXGRYXXMWEXPLXRMPLKVFEGLI

SEQ ID NO: 963 - protein, 124 aa, Bromus inermis
MAARRAHAAATLALLAAVLVLSAAPAPAEGAVSNCGQVVSYLAPCITYATGRAPGPNGGCCSGVRSLNAAASTTADRQATCSCLKQQTSGMGGIKPDLVAGIPSKCGVNIPYAIKPSTDCTKVR

SEQ ID NO: 964 - protein, 172 aa, Pisum sativum
MALESLFKSIHTKTSLSSSIVFIFKGKACLLTSKSRIQESFAELNSFTSLVLLIENHVLLHAREAVNEVQVVNDSSWDELVIGSETPVLVDFWAPWCGPCRMIAPIIDELAKEYAGKIKCYKLNTDESPNTATKYGIRSIPTVLFFKNGERKDSVIGAVPKATLSEKVEKYI

SEQ ID NO: 965 - protein, 227 aa, Brassica napus
  misc_feature (182)..(182): Xaa can be any naturally occurring amino acid
MMSDHGGRKVWGKTKRNREDLEENPNIPIAARVGRMMKKVSITSEEEEAVGPQQQFLTMNGKVYSLRYQDDFVDASVKEVDLLNELEVSKLYHCDGLVLCVGKDNSELLLWNPYLCQTRWIGPRESFHLSDRHAVGYDERRNHKILRFVDNFIKNMNKIEVVYEIYEIRSDSWRVLEEVNPXGSIDTHQRGVSVKGNTYFVAYRNGLVHEIFLLCFDFTKERFGPRL

SEQ ID NO: 966 - protein, 838 aa, Brassica rapa
MRGVLFSVLLLFPAFSFSANTLSATESLTISSNKTISSPGNIFELGFFKPSSSSRWYLGIWYKAISKRTYVWVANRDHPLSTSTGTLKISDSNLVVVDGSDTAVWSTNLTGGGDVRSPVVAELLDNGNLVLRDSNNNDPDGVLWQSFDFPTDTLLPEMKLGWDLKTGFNRFLRSWKSPDDPSSGDYSFKLETRGFPEAFLWNKASQVYRSGPWNGIRFSGVPEMQPFDYIEFNFTTSNQEVTYSFHITKDNMYSRLSLSSTGSLQRFTWIEAIQNWNQFWYAPKDQCDEYKECGTFGYCDSNTYPVCNCMRGFEPRNPQAWALRDGSDGCVRKTALSCNGGDGFVRLKKMKLPDTAATSVDRGIGIKECEEKCKSDCNCTAFANTDIRGGGSGCVVWTGDILDTRNYAKGGQDLYVRLAATDLEDTTNRNAKIIGSCIGVSVLLLLCFIFYRFWKRKQKRSIAIETSFVRSQDLLMNEVVIPSRRHISRENKTDDFELPLMDFEAVAIATDNFTNANKLGQGGFGIVYKGRLLDGQEIAVKRLSKMSVQGTDEFKNEVKLIARLQHINLVRLLGCCVDEGEKMLIYEYLENLSLDSHLFDKTRSCKLNWQKRFDITNGIARGLLYLHQDSRFRIIHRDLKASNVLLDKDMTPKISDFGMARIFGRDETEANTRKVVGTYGYMSPEYAMDGIFSTKSDVFSFGVLLLEIISGKRNKGFYNSDHDLNLLGCVWRNWKKGKGLDIVDPIILDSSPSTYRPLEILRCIKIGLLCVQERANDRPTMSSVVMMLGSETTAIPQPEPPGYCVGRSPLDTDSSSSNQRNDESWSVNQMTVSVIDPR

SEQ ID NO: 967 - protein, 554 aa, Bacillus cereus E33L
MSRKIVVVGGVAGGASVAARLRRLSEDDEIIMVERGEYISFANCGLPYYIGGVITERQKLLVQTVERMSKRFNLDIRVLSEVVKINKEEKTITIKNVTTNETYNEQYDILILSPGAKPIVPPIPCIEEAKALFTLRNVPDTDRIKAYIDEKKPRHATVIGGGFIGVEMVENLRERGIEVTLVEMANQVMPPIDYEMAAYVHEHMKNHDVELVFEDGVDALEENGTVVRLKSGSVIQTDMLILAIGVQPESSLAKDAGLALGVRGTIKVNEKFQTSDPHIYAIGDAIEVKDFVTETETMIPLAWPANRQGRMLADIIHGHTDSLYKGTLGTSVAKVFDLTVATNGVNEKILKRLNIPYEVVHVQANSHAGYYPNATPVLIKLIFNKDSGKIYGAQALGRDGVDKRMDVIATAIKANLTVLDLPDLELSYAPPYSSAKDPVNMVGYVASNIVDGFVDTVQWHEIDRIVENGGYLIDVREPNELKQGMIKGSINIPLDELRDRLEEVPVDKDIYITCQLGMRGYVAARMLMEKGYKVKNVDGGFKLYGTVLPERIVY

SEQ ID NO: 968 - protein, 319 aa, Triticum aestivum
MNISLKKTSQIRQAPGLRSPRNPSPLPTSASSQTQILLPLQPPLIRSREQGAPEPDRARRRRRATAMMHGVGPSDDAAAAAALELQESGWEELRREARKLEGDLDVKLSSYARLAARSSSASASASASAASPTADRSSWKSTELEIQALLDKLQDVNDAMSRCAAPAAPATASVSQKLARHRDILHEFTQEFRRTRGNLSSMREHADLLSSVRGDITESKATGGMSPRVHLLRERASIHGSVNQIDEVIGQAQSTRAALSNQRALFGDVQGKVKQLGEKFPVVRGLLGAIKRKKSKDTIILSAVIAACTIFLIIYWLSK

SEQ ID NO: 969 - protein, 422 aa, Oryza sativa
MAIGGWQDERYAIQGEKYQGQQYSHIYFTRLHHMRNLLHALVPSWKPHLPVTTVLGLEEGKDCIIVGTLYKHMKLKPSILDEYSKERSAIPLVKPHNFMHPDDHLILEDESGRVTLAGAIPPAAYVTDEDKYVVFVSGLSIGSEKFNPLQFQLLIDHITGHLGDENEQSIASNIVRVVVAGNSVHISPRFFNGQAVASKDQSRIAEPIKELDIMLTQLVASLPVDMMPGSNDPANFSLPQQPLHRCLFAGAATYNTFSSCSNPHQFELDSVRFIGTSGQNIDDLYKYSDAKDKLEFVERTLRWRHLAPTAPNSLGCYPYTDKDPFLVESCPHVYFVGNQDKYETQLLQGLEKQKVRLICIPRFCDSGVAVMVNTSSCMLTIAQFEELGVQHVEFLNKLRCLTMLYLSGVQICRCKIAQQTAE

SEQ ID NO: 970 - protein, 431 aa, Brucella suis 1330
MAHFAIKLPDVGEGVAEAELVEWHVKVGDIVREDDLLAAVMTDKATVEIPSSRAGKVIAINGEVGEKIAVGSELVRLEIEGGATEKAEEPQPQAAEPTAPAAAVPEAPVLLQTPVPEKPAAPKRENAGRPFTGAGPLRPEGEKPLATPSVRLRARDAGIDLRRVRGTGPAGRITHEDLDAFFQMESGAAPALSGYAADTSINEIKVIGLRRKIAERMAEAKRHIPHITIVEEVDVTQLEELRNGLNHEKKEGRPRLTLLPFIIRTIVKAVKEQPGLNAHFDDEADIIRQFGGVHVGIATQTPNGLIVPVVRHAESMSVFAAATELSRVTEAARNGTAKREELTGSTITITSLGPLGAIATTPIINRPEVAIVGINKMAVRPMWDGTQFVPRKMMNLSCSFDHRVIDGWDAAVFVQKLKSLLETPAMIFVEG

SEQ ID NO: 971 - protein, 342 aa, Candida albicans SC5314
MFKRFFSYTPRTFKMATFNNSFLMNHTCLRIKDPKVSIPFYTEKFGMKLIATFPFADFTLYMLNYETEANKHLNWSAREGVLELCHNHGVENDSNYKLNNGNGEKDRGFGHICMSVDNIEAFQDQLLKSEVKFQKKLSDGRQKNIAFALDPDGYWIELIENGINKVANKTEVSSYKLNHTMIRVKDPKKSLEFYRDVLGFKLLSTSEHEGAKFTLYFLGYDHDPNFKQDTLVRNEQAKREGVIELTHNWGTESDPEFKGYHNGNSTENGALQGFGHTCVSCEDPAKFCQELEEKFGDKLDWSLKWDQGKIKKIAFIRDPDGYSIEILGHDLFADSFKEQANL

SEQ ID NO: 972 - protein, 611 aa, Oryza sativa
  misc_feature (516)..(516): Xaa can be any naturally occurring amino acid
MESGTLNNVLVGELNEGVAHHVALPFGGGVSVGAGADGCIIHLREAVYWGKQSESAILAALGYGGDAAAGDDSAEGRERSHCLHHTPLHDGRTAYHFQPAKFWQNDPNGPLYHNGLYHFFYQYNPHGPLWDTGKLSWGHSVSGDLVNWAFLGTAIDPTDPFDVNGCWSGSATVLLGGRPAFLYTGRDAGGVQVQNVSFAKNPLDPLLREWEKPSCNPIIAFPADVINNNFRDPTTAWLGRDGLWRMVVAAEVAGAGSARVYRSADFLRWERNAAPMHSSAAVPVLECPDFFPVAEHGIDGLDTSANGGGTGVKHVLKLSEFDTHQDFYMVGRYDNEGTPSPRRTLTAATTAGRWRCLDYAQAKADDVAKGWAGVQAFPRKVWLDGDGKQLLQWPVDEIETLRTKRVGLQGTEVKAGGLHEIVGVASSQADVEVVFEIPNLEDEAESFDPDWLDPHKLCKDKGAASAHGGVGPFGLIVMASGDLQEQTAVFFRVFKHHGKYKVFMCTDLTRSSTKAXVYKDAYGGFVDVDIQKDKSISLRTLIDHSMIESFGGGGRACITTRVYPEHAATSSSHLYVFNNGSGTVNVSKLEAWEMATATVNSADALDAITRS

SEQ ID NO: 973 - protein, 1064 aa, Aspergillus oryzae
MAASWCALRGTRQLALRTRLRSAPSPIALRKATPSSPFRATHRALHTATQQPSRRPVYTSSVADHGDPHPRDLFQPLDTFPRRHIGPSPDAAKEMLATLDPPVASLDEFVKQVLPADILSKKDLKVTDPHAKTNLYRDNVGGGLGETDMLKLLDVYRKQIDVSGKTYIGTGYYGTIVPPVILRNVLENPAWYTSYTPYQPEISQGRLESLLNFQTLTADLTGLPFANASVLDEATAAAEAMTMSFATMPASKQKKPGKAYVVSHLCHPQTIAVMRSRAEGFGINLVIGDILADDFKLVKEQGDNLIGVLAQYPDTEGGIYDFQALSDNIHGAGGTFSVATDLMALTVLKAPGEFGADIAFGNAQRFGVPMGYGGPHAAFFACVDKYKRKVPGRVVGVSKDRLGNRALRLALQTREQHIRREKATSNICTAQALLANMSAMYAVYHGPTGLKSIAQRIMSMTSTLQAKLAALGYNVPIKTNVADGGAIFDTVTVELPTSQEADAIVAAAREQSIFLRRVNSTKVGISLDETSGRDEVKSILQVFATHASKGEVSIDGELGISPLPASLERTSEYLTHPVFNTHHSETEMLRYIRHLESKDLSLAHSMIPLGSCTMKLNATTEMIPISWPEFSQMHPFLPADVAKGYTQMIDDLEQQLADITGMAEVTVQPNSGAQGEFAGLRVIKKYLEAQGESKRNICLIPVSAHGTNPASAAMAGMKVVTIKCDTKTSNLDLEDLKAKCEKHKDELAAVMITYPSTFGVYEPGVKEACEIVHQHGGQVYMDGANMNAQIGLCSPGEIGADVCHLNLHKTFCIPHGGGGPGVGPIGVAEHLRPFLPSHPASEYLQSKRTESSSPPISAAPWGSASILPITFNYINMMGAKGLTHATKITLLNANYILSRLKEHYPILYTNENGRCAHEFILDVRKFKETCGVEAIDIAKRLQDYGFHAPTMSWPVSNTLMIEPTESESKAELDRFCDALISIRQEIAEVESGAQPREGNVLKMAPHTQRDLLSNEWNRPYTRETAAYPLPYLVEKKFWPSVTRVDDAYGDQNLFCTCGPVEETD

SEQ ID NO: 974 - protein, 203 aa, Phormidium sp. IAM M-99
VQSNFRLVVSIAKKYMNRGLSFQDLIQEGSLGLIRAAEKFDHEKGYKFSTYATWWIRQAITRAIADQSRTIRLPVHLYETISRIKKTTKLLSQEMGRKPTEEEIATRMEMTIEKLRFIAKSAQLPISLETPIGKEEDSRLGDFIESDGETPEDQVSKNLLREDLEGVLATLSPREKDVLRLHYGLDDGRMKTLEEIGQIFNVT

SEQ ID NO: 975 - protein, 337 aa, Rhodopirellula baltica SH 1
MAPTPPSDTTRLRIATRESPLAMWQAEHVAKLLKKHGFQTEIVPLVSKGDTDMRPIDGTRQVGLFTKRIQQALVDDEADVAVHSLKDLPTEPDSRFVLAAVPPRESVLDALVFADNSPHLESQTGAESPLDYLPQGARVGTGSTRRLAQLKQLRPDLEVLPIRGNVQTRLAKLNAGEFDAIVLAHAGILRLEMTDLPHRLFPLDEMIPAPGQGALGIEVRSDDAGAMDAIANLNDAAARLAATAERKVLSELHGGCLAPIACHAKLETSNHGTELCLRAIVMSADGEQRLQEDARITVQPNDADLHVAEAHELGTLVAKRLRDKGADKLISTVRENH

SEQ ID NO: 976 - protein, 396 aa, Thiobacillus denitrificans ATCC 25259
MAKEKFERTKPHVNVGTIGHVDHGKTTLTAAITTILSKKFGGAAKKYDEIDSSPEEKARGITINTAHVEYETASRHYAHVDCPGHADYVKNMITGAAQMDGAILVVSSADGPMPQTREHILLARQVGVPYIIVYMNKADMVDDAELLELVEMEVRELLSKYDFPGDDTPIIVGSALKALEGDQSDIGEPSIIKLAEALDTYIPEPERAIDKPFLMPVEDVFSISGRGTVVTGRVERGVIKVGEEIEIVGITPTVKTTCTGVEMFRKLLDQGQAGDNVGVLLRGTKREEVQRGQVLAKPGSIKPHTKFSAEIYVLSKDEGGRHTPFFNGYRPQFYFRTTDVTGSIELPAGTEMVMPGDNVSIKVSLIQPIAMDEGLRFAIREGGRTVGAGVVAKIEE

SEQ ID NO: 977 - protein, 203 aa, Pseudanabaena sp. PCC 7367
VQSNLRLVVSIAKKYMNRGLSFQDLIQEGSLGLIRAAEKFDHEKGYKFSTYATWWIRQAITRAIADQSRTIRLPVHLYETISRIKKTTKLLSQEMGRKPTEEEIATRMEMTIEKLRFIAKSAQLPISLETPIGKEEDSRLGDFIESDGETPDDQVAKNLLREDLENVLGTLSPRERDVLKLRYGLDDGRMKTLEEIGQIFNVT

SEQ ID NO: 978 - protein, 555 aa, Moritella marina
MCSIFGILDIKSDIKPLREQALELSKLLRHRGPDWSGIYTSDNAILVHERLAIVDVNNGAQPLYNEEKTHVLAVNGEIYNHKDLKKTLNVDFEFQTESDCEVILALYKEKGTQFLDDLNGIFAFALYDETEDAYLIGRDHIGIIPLYTGYDEHGNFYVASEMKALVPICTQIEEFPAGHYLWSKDGVVTPYYQRDWKDFDNVAQNGGDKSVVKQGLEDAVKRQLMCDVPYGVLLSGGLDSSVISAITQQYAKRRIEDGGKTEAWWPQLHSFSVGLNGSPDLAAAQKVADHLGTIHHSIEFTVQEGIDALRDVIYHIETYDVTTIRASTPMYLMARKIKAMGIKMVLSGEGADELFGGYLYFHKAPNAKEFHEETVRKVNKLHMFDCLRANKSMAAWGIEARVPFLDKEFVDASMRLNPELKMITGDRIEKNIIREAFEDLLPEEIVWRQKEQFSDGVGYSWIDQLKVHVEEAVTDQMLASAAFKFPINTPDTKEGYYYRAIFEDHFPGDSAAKCVPFGKSVACSTVEALAWDESFQNNADPSGRAAGVHNEAYED

SEQ ID NO: 979 - protein, 447 aa, Escherichia coli CFT073
MDQTYSLESFLNHVQKRDPNQTEFAQAVREVMTTLWPFLEQNPKYRQMSLLERLVEPERVIQFRVVWVDDRNQVQVNRAWRVQFSSAIGPYKGGMRFHPSVNLSILKFLGFEQTFKNALTTLPMGGGKGGSDFDPKGKSEGEVMRFCQALMTELYRHLGADTDVPAGDIGVGGREVGFMAGMMKKLSNNTACVFTGKGLSFGGSLIRPEATGYGLVYFTEAMLKRHGMGFEGMRVSVSGSGNVAQYAIEKAMEFGARVITASDSSGTVVDESGFTKEKLARLIEIKASRDGRVADYAKEFGLVYLEGQQPWSVPVDIALPCATQNELDVDAAHQLIANGVKAVAEGANMPTTIEATELFQQAGVLFAPGKAANAGGVATSGLEMAQNAARLGWKAEKVDARLHHIMLDIHHACVEHGGEGEQTNYVQGANIAGFVKVADAMLSQGVI

SEQ ID NO: 980 - protein, 1063 aa, Oryza sativa (indica cultivar-group)
MAAYKLGVEVASAHDLMPKDGQGSASACVELTFDGQRFRTAIKDKDLNPVWNERFYFNVSDPSNLPELALEAYVYNINRSVDGSRSFLGKVRIAGTSFVPFPDAVVMHYPLEKRGMFSRVKGELGLKVYITNDPSIKASNPLPAMDPVSNNPPPTPAEQIAADITSTNLSTTHEHRAEVKTLHTIAKEVQHQHHGHGHLPASFPDQPSKYAVDPMKPEPQQPKIVRMYSAASQQPMDYALKETSPFLGGGQVVGGRVIRAEKHASTYDLVERMQYLFVRVVKARDLPDMDVTGSLDPYVEVRVGNYRGITRHFEKQKNPEWNAVFAFSRDRMQATILEVVVKDKDLLKDDFVGLVRFDLNDVPMRVPPDSPLAPEWYRLVHKTGDKSRGELMLAVWIGTQADEAFPDAWHSDAATLEDPSAVTHMKSKVYHAPRLWYLRVNIIEAQDIAITDKTRYPDVFVRAQVGHQHGRTKPVQARNFNPFWNEDLMFVAAEPFEDHLILSLEDRVAPNKDEVLGRVIIPLTMIDRRADDRIVHGKWFNLEKPVLIDVDQLKKEKFSTRLHLRLCLDGGYHVLDESTNYSSDLRPTAKQLWKPSIGLLELGILGAQGIVPMKTRDGKGSSDTYCVAKYGSKWVRTRTIVNNPGPKFNEQYTWEVYDPATVLTVGVFDNGQLGEKGGEKTSSSKDAKIGKVRIRLSTLETGRVYTHSYPLLVLHPSGVKKMGELHLAIRFSSTSLVNMMYLYSRPLLPKMHYVRPIPVLQVDMLRHQAVQIVSARLSRMEPPLRKEVVEYMSDVDSHLWSMRRSKANFFRLMSVFSGLFAVSKWFNGVWNYRYRPRYPPHMNTKISHAEAVHPDELDEEFDTFPTSRSPDVIRMRYDRLRSVAGRIQTVWLVQESTSVLLKANMGAAESSSKLAGSIHEFTVKDARGSDVELSRYKGKVVLIVNAASRCGLTNSNYTELGQLYGKYKETGATEPGSNEQVVEFACTRFKAEYPILGKVDVNGGNAAPLYKFLKSERGGLFGERIKWNFTKFLVDKEGHVVNRYAPTSSPLSIENDIKNLLGA

SEQ ID NO: 981 - protein, 488 aa, Capsicum chinense
MSSITSSCYSNLILKKKESRINGGFHLQYNGLRAIESVQMPASSVAYKPKVVKWGRIRVMASPAVSAPKRETDPKKRIVITGMGLVSVFGSDIDNFYNKLLEGQSGISLIDRFDASSYTVRFAGQIRDFSSEGYIDGKNDRRLDDCWRYCLVAGKRALEDANLGQQVLDTMDKTRIGVLVGSSMGGSKVFADAVEALVQRGYKKINPFFIPYSITNMGSALLAIDTGLMGPTYSISTACATANYCFYASANHIRRGEADIMVAGGTDAFISAIGVGGLIACRALSQRNDEYEKASRPWDRNRDGFVIGEGSGVLVMENLEHALKRGAPIIAEYLGGAITCDAHHITDPRADGLGVSSCIVMSLVDAGVSPEEVNYINAHATSTLAGDLAEVNAIKKVFKDTSEIKMNGTKSMIGHGLGASGGLEAIATIKAITTGWLHPTINQYDLEPQVTIDTVPNVKKQHEVNVGISNSFGFGGHNSVVVFAPYKP

SEQ ID NO: 982 - protein, 528 aa, Stevia rebaudiana
MEFHLSLLTTVTAILVVTAFFLQISKRKKVDTTKNKLLPPKAKGAWPLIGHLPLLGKNRIAHRVLGDLADKYGPIFTIKLGVYQVLVVSSADAVKDCFTTSDKAFASRPKSTAVEIMGYNYAMFGLAPYGEYWRQVRKIAVLEILSQKRVDMLEWARVSEVRTSTNEVYDAWRVNKENEGSDMVLVDMKQWFTNLILNVLVRIISGKRFPFKSVEGIRFQKMEKKLFELLGAFVVSDLIPSMKRFDIGGYQKQMKMAAEEINDIMEGWLNNRKTQKESGEQKEGDQYFMDVLISVLKDASDADFPGYDHDTVIKATCMALLAAGSDTTSVTIIWALALLLNHPEKMKIAQDEIDKHVGRDRLVEESDLKNLVYINAIIKETMRLYPAAPLSVPHEAMEDCVVGGYHIPKGTRLLPNFWKIQHDPNIWPEPYEFKPERFLSTHKDVDVKGKHFELLPFGTGRRMCPAITFVLQILPLTLANLIQQFEIRKPSNDPIDMTESAGLTTKRATPLDVLIAPRLSLKMYPVDV

SEQ ID NO: 983 - protein, 408 aa, Desulfovibrio vulgaris subsp. vulgaris str. Hildenborough
MRILVQKFGGTSVANLECMKQVRAKVLAARERGYKVVVVLSAMSGETNRLLALADEWSSEPDPAETDALVVTGEQVSIALFSMLLKDSGIKARSFLGFQIPIVTSDTFGSARILSIDDSRLRAELETHDVLVVAGFQGCTADGRLTTLGRGGSDTSAVALAAALGSVECEIYTDVDGVYTTDPNLCSTARKLDRITYDEMLEMASMGAKVLQIRSVEFAKKYNVPVHVRSTFTDTTGTLVTQEDSSMEAVLVSGIAYDKDQARITLRSVPDRPGVAAAIFVPLSTNGVVVDMIVQNPSREGVTDMTFTVPRKDLKKTLTLMEGIREETEALEVLHDVSVAKVSAIGVGMRNHSGVAAKAFAALRKENINILMISTSEIKITCLIEEKYTELAVRVLHDAFGLSSNTEH

SEQ ID NO: 984 - protein, 340 aa, Prochlorococcus marinus str. NATL2A
MTLRVAINGFGRIGRNFMRCWLSRGANTNIEVVGINVTSDPKTCAHLLKYDSILGAIKDAEISHTDDTFQINGKTIKCYSDRNPLNLPWKEWGIDLVIESTGVFNTDVGASKHLQVGAKKVILTAPGKGDGVGTYVVGVNADSYSHEDFDILSNASCTTNCLAPIVKVLDQKLGINKGLMTTIHSYTGDQRILDNAHRDLRRARAAAMNLVPTSTGAAKAVALVYPQMKGKLTGIAMRVPTPNVSAVDLVFESGRKTSAEEVNSLLKTASQGEMKGIIKYGDLPLVSTDYAGTNESTIVDEALTMCIDDNMVKVLAWYDNEWGYSQRVVDLAEIVAQKWK

SEQ ID NO: 985 - protein, 439 aa, Bacillus clausii KSM-K16
MKYIIIGGDAAGMSAAMQLVRKDAQADITVLERGEHYSYAQCGLPYWIGGEIESDRKLIARDADTYRIKHGIDARINHEVKAVDTKQKTVSGDGFCLAYDKLLIASGASPVIPDWENGDLKGIYTLKTIPDAKKIIAALGTEKKTVTVIGGGSIGLEVAENLAKANHHVRILERAKRLAMNFDKEMADYIHEKAIDEGIELELNHEIIGFSGDKDGHVTGIRTNLTECPTDIVIVAVGVRPNTDFLRNTDIHLNNNGAIRVNRYMETNVPDVYAAGDCATQYHRLINKDMYYPLGTHANKQGRIAGLNMCGNTRVFMGIVGTQIYQFFDLALARTGLSSREIEEIGYPYKCVQAKLPHVAGYYPTNETIHIRLQFHAETGVVLGGQFIGTKGVDKRCDVLATALYHGMTMQDLEELDLGYSPPFNSVWDPLQQTARRRP

SEQ ID NO: 986 - protein, 217 aa, Photorhabdus luminescens subsp. laumondii TTO1
MNQTLLSEYGTSSERVEHAINALRDGKGVMVLDNEDRENEGDIIFAAETMTVEQMALTIRYGSGIVCLCLTEERRQQLQLPMMVENNSSPFQTAFTVTIEAAQGVTTGVSAADRITTIRAAIADNAKPSDLNRPGHVFPLRAQPGGVLVRQGHTEAAIDLVSLAGFKPAGVLCELTNDDGSMARTLEVVQFAKLHNMPVVTIEDLVIYRQAIEQKAS

SEQ ID NO: 987 - protein, 490 aa, Pseudomonas putida KT2440
MKDLAPSALNKLRRNDLLETRAYIDGRWVTGEGSLDVTDPANDQVIAQVAHCDESWVDLAVEAASRAFDGWRNTLPTQRGAVLRKWAALMRENQEDLAVIMTCEQGKPLSESRGEINYGANFVEWFAAEGERCYGETIPSHLPNSQLVTKLQPIGVTVAITPWNFPSAMITRKAAAALAAGCPMIVKPAPETPLSALALARLAEEAGIPGGVFQVLTGDAPKMSARLLAASAVRAFSFTGSTEVGRILLRQSADTVKKVSLELGGHAPFIVFDDASIAEAVEGCIGAKFATSGQDCLGANRIYVHRNIYGQFVEEFTKATEKLRVGHGLEEGVDIGPMTRVTVANKCREQISNALSLGAKLTCGGIDNHLGSSFVLPTVLADVTDKMDIAFEETFGPVAAILPFDSEDEVVTRANNTEFGLAAYVYTNDLRRACRVSDRLEYGMVALNTPKFTGAPIPFGGWKQSGLGREGSKHGLAEYMELKYVCIGGL

SEQ ID NO: 988 - protein, 949 aa, Zea mays
MASACGFGGVDALVDATVPPAIRAPPMRFPGRFDAGFTESQMLDHMRRLASMNRDFKSFIGMGYYGTHVPAVVLRNLMENPAWYTQYTPYQAEIAQGRLESLLNYQTMVADLTGLPMSNASLLDEATAAAEAMAMCSAILRGKKRTFLIASNCHPQTIDVCRTRSDGFGIRVVVADAKDLDYGGGDVCGVLVQYPGTEGEVLDYAEFVRDAHAHGVKVVMATDLLALTALRPPGEIGADIAVGSAQRFGVPMGYGGPHAAFLATSQEYKRLMPGRIIGVSVDSTGRPALRMAMQTREQHIRRDKATSNICTAQALLANMAAMYAVYHGPAGLKAIADRVHGLAGTFAHGLKKLGTVTVQDLPFFDTVRVTCSDARAIAKEAVKNEMNLRVVDANTITVAFDETSTLEDVDKLFKVFNNGKSASFTAESIAPEVSSSIPSSLARESPYLTHPVFNMYHTEHELLRYLHKLQSKDLSLCHSMIPLGSCTMKLNATVEMIPVTFPNFANLHPFAPTDQAAGYHEMFDDLGNLLCTITGFDSFSLQPNAGAAGEYAGLMVIRAYHNSRGDHHRDVCIIPVSAHGTNPASAAMVGMKIVAVGTDAKGNINIEELRKAAEAYKDNLAALMVTYPSTHGVYEEGIDEICKIIHENGGQVYMDGANMNAQVGLTSPGFIGADVCHLNLHKTFCIPHGGGGPGMGPIGVKKHLAPFLPSHPVIPTGGFPLPEKTDPLGTISAAPWGSALILPISYTYIAMMGSQGLTDASKIAILNANYMAKRLEKHYPVLFRGVNGTVAHEFIIDLRAFKTTAGIEPEDVAKRLMDYGFHAPTMSWPVPGTLMIEPTESESKAELDRFCDALISIREEIAEIESGKADVLNNVLKGAPHPPQLLMGDTWSKPYSREYAAFPAAWLRGAKFWPTTGRVDNVYGDRNLICTLQQATQVAEEAAAATATA

SEQ ID NO: 989 - protein, 144 aa, Gloeobacter violaceus PCC 7421
MRILHTMLRVRDLEASKAFYCDVLGMKLLRQKDYPDGKFTLAFVGYGSEADSAVIELTHNWERDHYDLGDAFGHIALGVEDIYRTCSELTARGGKVVRQPGPMQHGSTVIAFLEDPDGYKIELIQKSASPQTAEEVAMARAGNS

SEQ ID NO: 990 - protein, 382 aa, Arabidopsis thaliana
MVSQKETVCVTGASGFIGSWLVMRLLERGYFVRATVRDPGNLKKVQHLLDLPNAKTLLTLWKADLSEEGSYDDAINGCDGVFHVATPMDFESKDPENEVIKPTVNGMLGIMKACVKAKTVRRFVFTSSAGTVNVEEHQKNVYDENDWSDLEFIMSKKMTGWMYFVSKTLAEKAAWDFAEEKGLDFISIIPTLVVGPFITTSMPPSLITALSPITRNEAHYSIIRQGQYVHLDDLCNAHIFLYEQAAAKGRYICSSHDATILTISKFLRPKYPEYNVPSTFEGVDENLKSIEFSSKKLTDMGFNFKYSLEEMFIESIETCRQKGFLPVSLSYQSISEIKTKNENIDVKTGDGLTDGMKPCNKTETGITGERTDAPMLAQQMCA

SEQ ID NO: 991 - protein, 508 aa, Yersinia pseudotuberculosis IP 32953
METVANFINGKCVFSCGNSITSGSPRAQTIFNSATGEPIRQVMMSTAQETEQAITAAQQAFASWSRQAPLKRARVMFRFKSLLEQHLDALAQLISEEHGKVYSDAVGELTRGLEVVEFACGIPHLQKGEHSANVGTGVDNHSLMQPLGVCVGITPFNFPAMVPMWMFPIALATGNTFVLKPSEKDPSLAVRLAQLLTEAGLPDGVFNVVQGDKTAVDVLLTDPRVQAVSFVGSTPIAEYIYQTASAHGKRCQALGGAKNHCILMPDADMDMAASAIMGAAYGAAGERCMALSVVLAVGDETADNLCARLEQQISTLRVGPGLAQEPENDMGPLISAPHRAKVLGYIDSGVAQKATLRIDGRGLKVAGHEQGYFVGPTLFDHVTPAMTIYQEEIFGPVLSVVRIADYRSAVDLINRHEYGNGTAIFTRDGGTARRFCEEVQVGMVGVNVPIPVPVAFHSFGGWKRSIFGPLNVHGNDGVRFYTRMKTITARWPEAQHDQGAAFSMPTLG

SEQ ID NO: 992 - protein, 122 aa, Hordeum vulgare subsp. vulgare
MARLNSKAVAAAVVLAAVVLMMAGREASAALSCGQVDSKLAPCVAYVTGRASAISKECCSGVQGLNGLARSSPDRQTACRCLKSLATSIKAINMGKVSGVPGKCGVSVPFPISMSTDCNKVH

SEQ ID NO: 993 - protein, 588 aa, Candidatus Pelagibacter ubique HTCC1002
MPKLYSGAEIVFKCLEDQKVEHIFGYPGGAVLPIYDELKNHPTIKHILVRHEQGAGHAAEGYARSTGKPGVVLVTSGPGATNVVTALTDAYMDSVPLVCISGQVPTHLIGTDAFQECDTTGITRPCTKHNWLVKDINDLPRIMHEAFEVATTGRPGPVLVDIPKDIQFAKTKYSKQNKDKKVVTKNLNRFNQKDIDQLIDLMSKSKKPIFYTGGGVINSGPKASELLRELVSLTGFPITSTLQGLGAYPGNDNQFLGMLGMHGTYEANNAMHDCDLLINIGARFDDRITGKIDEFSPKSKKVHIDIDPSSINKIVKVDLSIVGDVSDVISSTTKTLKKKKLNLEKSNKQKISNWWLQIEKWRTKQSLSFVNSDTIIKPQYAVQRLYELTKNSDTYITTEVGQHQMWAAQHYKFDKPNRWMTSGGLGTMGYGLPAAIGVQVAHPKKLVVDIAGEASILMNMQEISTAVQYNLPIKIFILNNQYMGMVRQWQELLHEKNYSESYSKALPDFVKLAEAYGCVGIRAKDPSELDEKIEEMINTDRPVIFDCLVDQGENCFPMIPSGKPHNQMLLGPKDQDANKITGKGKALV

SEQ ID NO: 994 - protein, 345 aa, Mycoplasma hyopneumoniae 232
MNRKYLEKAFFDNHLDVIISFSFQSRLWLTKIAASDGILFIEKDQAFLFVDGRYIEKAEKDAKNCQVFLTTKANLEDFFKKKPYQKIGIESEYLTIEQFDKIKSWFPNADFVKLQAQLFRIIKTEEEIKNIEKAVEISLAAYNKIFPKIKPGMTEKSIDVNLNYQMKLLGAEKESFDSIIATGSNSAMPHWRASEAEILDNDLLKIDFGALFNGYCADITRTSYLGQISEKKLEILEIVEKAAEIGRKKVAPGVKASEIDLACRNFITEQGYGKYFIHSTGHGVGIDIHELPVVSSTSQTILEPGMVITVEPGIYIPGLGGARIEDVVLVTENGFRTLSRKGERI

SEQ ID NO: 995 - protein, 203 aa, Stanieria cyanosphaera PCC 7437
VQSNLRLVVSIAKKYMNRGLSFQDLIQEGSLGLIRAAEKFDHEKGYKFSTYATWWIRQAITRAIADQSRTIRLPVHLYETISRIKKTTKLLSQEMGRKPTEEEIATRMEMTIEKLRFIAKSAQLPISLETPIGKEEDSRLGDFIEADGETPEDQVSKSLLREDLENVLDTLSPSERDVLRLRYGLDDGRMKTLEEIGQIFNVT

SEQ ID NO: 996 - protein, 456 aa, Nocardioides sp. JS614
MRRRLVVVGAGAAGMSAASAARRVDNHLEVVVLEAGNHAAYGLCGLPYFLSHVVADVDSLRAYPPTYFRDQRDIDLRFGAEVVRIDAERQVVHHRTAGRTGLLHYDKLILTAGATAFLPAVPGLDDDHVFTVRDVAESVRLRGLLDAGHVGHATVVGGGYIGLEVAESLAERGISVTLVEALPRLMANLDPELSQRVQDEVEQHVVVRLNSALSSLVRTDRGLTLRLADGSAIETDVVIVATGVRPASTLGSSIGANTGPGGALLVDEHMRTSVPNVYAAGDCIAPNHIATGRPAFIPLGPTANKTGRVAGTVAAGGSACFAGIAGTAIVKVFGIGVGRTGLTLVEALSEGFDAQATDAVGRSRAKYFPGSAQVDVRLVHTGDGRLLGAQFVGQGDDVAKRVDVTAVALHAGLGVEDLADLDLSYAPPFAPVYEPVLLAANAAVAALKPLRLAAGE

SEQ ID NO: 997 - protein, 418 aa, Shewanella sp. MR-4
MLEKRKLSGSKLFVKKFGGTSVGSIERIEVVAEQIAKSAHNGEQQVLVLSAMAGETNRLFALAAQIDPRASARELDMLVSTGEQISIALMAMALQRRGINARSLTGDQVQIHTNSQFGRASIESVDTAYLTSLLSDGIVPIVAGFQGIDPNGDVTTLGRGGSDTTAVALAAALKADECQIFTDVPGVFTTDPNIDSSARRLDVIGFDVMLEMAKLGAKVLHPDSVEYAQRFKVPLRVLSSFEAGHGTLIQFGYESELAMAASVQGIAINKALATLTIEGLFTSSEHYQALLACLARLEIDVEFITPLKLNETSAAECVSFMLAEAKVDILLHELELLSESLDLGQLIVERQRAKVSLVGKGLQAKVGLLTKMLDVLGNETIHAKLLSTSESKLSTVIDERDLHKAVRALHHAFELNKV

SEQ ID NO: 998 - protein, 460 aa, Francisella tularensis subsp. tularensis SCHU S4
MQTEKKINFVVVHVAIIAALAGLLFGMDIGYVNGSLHFISETFGLSVEQSGHVSSVLLLGAACGALFSGFLSKRYGRRKVLLIAAAIFSIFTIVGILAPNYQIFISSRFILGIAVGIASFIAPLYLSEIAPKEFRGALIALYQLMITIGLFLVFLTNSALERTGSWRVMLAVLAIPSVIMFFGCLTLPRSPRWLILKGNDNEAALVLKKIRSSEAEALEEHNEIKQTTHRGVSVFSLLKQKFFIKVVLLGIALQAFQQFTGMNAFMYYSTDIFKLAGFTNPSTSTIVIGLLNMLTTFLAIKYVDKFGRKPILYFGLSLLIISCIIVGFIFKTHFVYGQAMVLSQTLQWTALIFCLLFIFGFAISMGPVIWILCSEIQPIEGRDFGVTASTMSNWICNAIIGNFALTWLTFHPDSTFFGFAISCIICILFVKFFVPETKDVSLEEIENNLRSGKSLAKIGR

SEQ ID NO: 999 - protein, 118 aa, Arabidopsis thaliana
MEGLLKLSTLVIVCMLVTAPMASEAAISCGAVTGSLGQCYNYLTRGGFIPRGCCSGVQRLNSLARTTRDRQQACRCIQGAARALGSRLNAGRAARLPGACRVRISYPISARTNCNTVR

SEQ ID NO: 1000 - protein, 691 aa, Burkholderia xenovorans LB400
MSANSTDNAVSPWHAGELKLQRAVGVAERMQEVGRRVIRRLMPDQHRAFFPQLPFVALGAVDHEGDVWATLVAGKPGFLHAPTARTLRVDLVRDPHDPASAGLDDGEAVGLLGIELHTRRRNRLNGTVSHSAGAGFNVDVTQSFGNCPQYIQMRDAEFVRDPASPPPVEAVQLEHLSERARTMIDTADTFFVASYVDDPAGRQVDVSHRGGKAGFVRLSEDGVLTIPDFAGNLFFATLGNFVINPRAGLVFADFESGDLLQLTGEAQVDLDSPEIAAFQGAERLWRFKPRRIVYRAGALPLRWKLQANGWSPNSLMTGSWDEVASRVKAQALADAWRPFKVTQVVDESSVIRSFYLEPLDGAGLIPHAAAQHLPIRVTLPGCTKPVIRTYTLSTAPADGSYRISVKRQGLVSAHLHDTLRVGSVIEARAPAGQFTIDAAARRSAVLLAAGVGVTPMLAMLRHIVYEGLRTRRVRPTWFFHSARTLAERAFTKEIDQLAASAGGAVRVVRTLTDTEGAQMGKDFDASGRLDVELLRATLPFNDYDFYLCGPAGFMQSLYDGLRELNVADNRIHAEAFGPAGLHRRADAGADAGLAHLPADKPVPVAFVKSGKEARWNPDSGSLLDLAESRGLSPEFGCRGGSCGTCRTRVLEGAVAYPVAPEFKVASDEALICCAVPAQAGTSGAERLLLDL

SEQ ID NO: 1001 - protein, 495 aa, Pseudomonas fluorescens Pf-5
MSVAIDPRVAAFIDSQHGLLIDGHSQPALSGARMAVYNPASGEQLAEVAAAAQADIDLAVNAARRAFEGSWKAQRPADRERLLLKLADLLEANGEELAQLETLNNGQSIHLARALEVGAAAEFTRYMAGWATKIEGKSLDVSIAAVPGAQYRAYTVPEPVGVVGAIVPWNFPLLMAIWKIVPALACGCTVVLKPADETPLTALRLGQLCLEAGIAPGVVNVVTGSGAQAGAALAAHSGIDKLAFTGSTQVGKLIGHAAVDNMTRFSLELGGKSPVIVLDDCDPQTAAAGAAGAIFFNQGQVCTAGSRLYIQRRIYNEVLERLVAIAGSLSIGPGLDEQAQINPLISAKQQKRVLQMVQRGVEEGARLLCGGVAHGERGFYVRPTVVADVHADQQLVREEIFGPVVVATPFDTLDEVVGLANDNQYGLGASIWSNDLGRVMQLIPQIKAGTVWVNTHNMLDPSMPFGGYKQSGIGREMGHAAIEAYTENKSVCIAY

SEQ ID NO: 1002 - protein, 489 aa, Burkholderia xenovorans LB400
MAVFAIQRLYIGGAYVDATSGETFDTLDPATGETLASVQQASAADVERAVQSAREGQREWAALTAMQRSRVLRRAVEILRERNDELAALETRDTGKPIAETLAVDIATGADVIEYYAGLATAIEGQQIPLRPTSFVYTRREPLGVCAGIGAWNYPIQIACWKSAPALAAGNAMIFKPSEITPLSALKLAEIYTEAGVPAGVFNVVQGDGRVGAMLAAHPDIEKISFTGGVETGKKVMSLAGASSLKEVTMELGGKSPLLVFDDADLERAADIAMSANFFSSGQVCTNGTRVFVQRGVLERFEALVLERVKRIRVGAPTNAATNFGPLASAAQLQKVLGYIESGKQEGARLMAGGKRLTEGHFGNGQYVEPTVFTGCHDDMRIVREEIFGPVMSILVFDDEDEAIARANRTAYGLAAGVVTGNLARAHRVIHRLEAGICWINTWGESPAEMPVGGYKQSGVGRENGLTTLEHYTRIKSVQVELGPYQPVF

SEQ ID NO: 1003 - protein, 250 aa, Pseudomonas aeruginosa UCBPP-PA14
MPAETPSPRPDADPPQCALPEARPDRDAGTKLRAAVLGANDGLVSNLCLVMGVAGASMAHSSIVLTGMAGLVSGACSMALGEWLSVTNAREMASKRIAEEERLLRLCPDTETQELIDIFTAKGLSEVSARRVALQLMNDGRGALDTLSREALGIDPTELGGNPWNAAGTSFLLFSLGALVPVAPFLFLDGAAALVASLLFSLLALLFSGAVTARFTGRPLAFSALRQVLVGTLAAAFTYGLGTALGVGLG

SEQ ID NO: 1004 - protein, 131 aa, Synechococcus sp. WH 8103
TGQPNAIGGREAGGLAHLLPGYRLVANPEHRAEVEQAWKLPAGQIAAKPGLAAWQQVEAMERGDLDLWWVAATNPLVSMPDLDRVKQAMGNCPLVVVSEAYADSETSHYAHLLLPAAQWSEKAGAMTNTER

SEQ ID NO: 1005 - protein, 188 aa, Oscillatoria sp. PCC 7112
MNRGLSFQDLIQEGSLGLIRAAEKFDHEKGYKFSTYATWWIRQAITRAIADQSRTIRLPVHLYETISRIKKTTKLLSQEMGRKPTEEEIATRMEMTIEKLRFIAKSAQLPISLETPIGKEEDSRLGDFIESDGETPEDQVSKNLLREDLESVLDTLSPRERDVLRLRYGLDDGRMKTLEEIGQIFNVT

SEQ ID NO: 1006 - protein, 538 aa, Desulfovibrio vulgaris subsp. vulgaris str. Hildenborough
MRRQIHLYDTTLRDGSQSEDINLNTPDKLKIALRLDELGIAYIEGGWPGSNPVDVAFFKEIRNYNLKQAKISAFGSTHHPSHTAENDPNLKAIAAARTDAAAIFGKSCERHAREALRLDGRRNLDIIHDSIAFLKKQVAEVFFDAEHFFDGYRHNAAYALEVLRRAHEAGGDVLVLCDTNGGTLPHEVHDIVTAVREQLPEAKLGIHAHNDCEVAVANSIAAVQAGAVQVQGTMNGVGERCGNANLSSVIPILELKSAGAYACLPEGRLQQLTAVSSYVSEVTNLPPFSRQPFVGRSAFAHKGGVHVSAVNRNATLYEHITPESVGNHQRVLITELAGRSNIVSLARRFGFHLDKDEPVVKGLMNELKKKASLGYDYAAAEASVELLLLRKLARRGVREFFKLIQFRVLESKQENDLEPMSEASVMVEVEGIIEHTAATGRGPVNALDNALRKALSSFYPRIREMRLLDFKVRVLTGTETDGGTASTVRVLIESGDADSRWVTVGVSYNIIEASWQALADSMTYKLYKDEHVQRGMTD

SEQ ID NO: 1007 - protein, 549 aa, Gibberella zeae PH-1
MRNNLLSTVVGLSQFYSVAIAQSSTTIAVPTGTPIAGNYNGTYRPQVHFSPPEHFMNDPNGMFRDADGLWHLYYQYNPTAVVAGNQHWGHATSKDLYHWVNQPIALFPPEEDTYVFSGSVVVDENNTSGFFPDQDNGVVAIYTLSSPEVQDQAIAYSRDGGYTFEPYKGNPVINSTSTQFRDPKVIRYNDSWIMVVAYPQDFAIGIFESSDLKEWTATSNFSHHGLLGLQYECPNMISIPYIDEDGKKQDDMWLMAISINPGAPLGGSITEYFPGHFNGTHFEAVDGAARIADFGKDNYAGQWFYGLSEDENPVSIAWASNWQYTQIVPTGDEGWRSAMSLPRENYLTKAKRVGWKLVSKPYDLEPVMGRELASNDSFGNSTITVDYSDVESNAIYWEVNVTGIPDFGISSTASMNFTFLSPVSGESVKAGYYFGGDPVYFLDRGNTRGFDNVFFTDKTSLASLAASDGSWNTSGVIDRSIFEGFLNGGVDSVTNTFFATEPLTLMIFSTSDLPEDVKVSISVYSLDSAWQKMEGKDGLVHGNTTSKAD

SEQ ID NO: 1008 - protein, 183 aa, Aspergillus oryzae
MVRYAAQDIPAAKSARARGSYLRVSFKNTRETAQAINGMKLQRALTFLDNVTNKLEAVPMRRFAGSTGRCAQGKQFGVSKARWPEKSAKFLIDLLKNAEANADTKGLDTGNLVVKHIQVNQAPKGRRRTYRAHGRINPYMTNPCHIELILTEGEEVVQKGPVAKEAHLSSRQRGLQVRRAIQA

SEQ ID NO: 1009 - protein, 216 aa, Escherichia coli CFT073
MRCKGFLFDLDGTLVDSLPAVERAWSNWARRHGLSPEEVLAFIHGKQAITSLRHFMAGKSEADIAAEFTRLEHIEATETEGITALPGAIALLNHLNKAGIPWAIVTSGSMPVARARHKIAGLPAPEVFVTAERVKRGKPEPDAYLLGAQLLGLAPQECVVVEDAPAGVLSGLAAGCHVIAVNAPADTPRLNEVDLVLHSLEQITVTKQPNGDVIIQ

SEQ ID NO: 1010 - protein, 251 aa, Brassica napus
  misc_feature (169)..(169): Xaa can be any naturally occurring amino acid
MAAARLVFSLSLPSSTHGINRKFQPFLLTQTVAPSRVRALRCQATPESSEPQEKLVVDNGSTSETSPATKEASSGFPESPNRDVNRRVAVASVVAALALFLSTRLDFGISLKDLTASALPYEEALSNGKPTVVEFYADWCEVCRELAPDVYKIEQQYKDKVNFVMLNVXNTKWEQELDEFGVEGIPHFAFLDRQGNEEGNVVGRLPRQYLVENVNALAAGKQSIPHARAVGQYSSAEARKVHQVTDPLSHG

SEQ ID NO: 1011 - protein, 442 aa, Silicibacter pomeroyi DSS-3
MTLIKTLLPAAAVIALPTLGLAQEATADITPPNEEIGYIFTTFMFLVSGFLVMWMAAGFTMLEAGLVRQKNVTMQLTKNIALFSLAALMYYLIGYNLMYPGDGWSIDGVLGAFSPAAMEPVGLADTETDLTYASVGSDFYFQLMFCATTASIVSGTLAERIKLWPFLVFVLVLTGLIYPIQASWKWGGGFLDAAGFLDFAGSTVVHSVGGWAALAGALILGPRLGKYKDGRVIPFMGSNLPLATLGTFILWLGWFGFNGGSQLYMDTAGNVADISRIFANTNTAAAGGAVAALLLTQLLYKKVDLTMVLNGALAGLVSITAEPLTPGLGSATLIGAVGGVIVVFAVPFLDRLKIDDVVGAIPVHLMAGVWGTLAVCLTNGDANLGTQLYAIVVVGLFTFVVSGAVWFILKMVMGIRVSEEEEINGLDMAELGMEAYPEFSKS

SEQ ID NO: 1012 - protein, 354 aa, Ustilago maydis 521
MSHAHGQQPNHSTTFKVGETYKVVDVVGEGAYGVVCSAIHVPSSSRVAIKKITPFDHSMFCLRTLREIKLLRHFNHENIISILDIVKPDDYDSFSEVYLIQELMETDMHRVIRTQELSDDHCQYFIYQTLRGLKALHSAQVLHRDLKPSNLLLNANCDLKICDFGLARSANQPEAEGTGFMTEYVATRWYRAPEIMLTFKEYTKAIDVWSVGCILAEMLAGKPLFPGRDYHHQLSLTLEILGTPSLDDFYAITSTRSRDYIRALPFRKRRNLSLMFPNANPLAVDLMEKCLTFSPRKRITVEEALAHPYLEPYHDPEDEPTAEPLDPSFFDFDYCKEQLSRSELKRLIYNEIMR

SEQ ID NO: 1013 - protein, 112 aa, Silicibacter pomeroyi DSS-3
MKLIIATIKPFKLDEVREALTEAGIRGMMVTEIKGFGTQSGHTEIYRGAEYTVNFVPKIKLELVVADQIAEQIADTIARTARTGKIGDGKIFVLDVEQALRVRTGETDDDAL

SEQ ID NO: 1014 - protein, 149 aa, Oryza sativa
MASSMLSSAAVVTSPAQATMVAPFTGLKSSAAFPVTRKTNKDITSIASNGGRVSCMKVWPPIGKKKFETLSYLPDLSDVELAKEVDYLLRNKWIPCVEFELEHGFVYREHGNTPGYYEGRYWTMWKLPLFGCTDSAQVLKEVEECKKEY

SEQ ID NO: 1015 - protein, 475 aa, Kluyveromyces lactis NRRL Y-1140
MSAEESQQAQTETAAPVPVPAPAVEQDHSNEATTTVEEKSPGAATTAPATEEAPASEKPASQDNNGDGEKQQEEGDEEDDSAAPVLATQGGREKSDKILYVGNLPKSIDDDLLKQYFQIGGSISSVKIIPDKNSQECNYAFVEYFEPHDANVAYQTLNGKEVEGKVLKINWAFQSQQVNSDETFNLFVGDLNVDVDDATLAGTFKEFPSFIQAHVMWDMQSGRSRGYGFVSFGEQDQAQVAMETKQGFELNGRALRINWASKREPQQSQQGQRRFNGPASGRGGFRNNNNQNQNHHNHNGINRHAGPPPHHQMQSHLPPQLQQQPPIGIPPIHQAPLVPPPVDPEAVEDMMRRAPPRVTTAYIGNIPHFAQEHDLIPLLQNFGFIIDFKHYPEKGCCFIKYDTHEQAALCIVALTNFPFQGRNLRTGWGKEKPTFIRPQQQMGPIPGQLPLEEQQQQFENAPQQHDQQQPQQQEQ

SEQ ID NO: 1016 - protein, 224 aa, Arabidopsis thaliana
  misc_feature (86)..(86): Xaa can be any naturally occurring amino acid
  misc_feature (101)..(101): Xaa can be any naturally occurring amino acid
  misc_feature (107)..(107): Xaa can be any naturally occurring amino acid
  misc_feature (113)..(113): Xaa can be any naturally occurring amino acid
  misc_feature (155)..(155): Xaa can be any naturally occurring amino acid
  misc_feature (159)..(159): Xaa can be any naturally occurring amino acid
  misc_feature (188)..(188): Xaa can be any naturally occurring amino acid
  misc_feature (193)..(193): Xaa can be any naturally occurring amino acid
  misc_feature (196)..(197): Xaa can be any naturally occurring amino acid
  misc_feature (200)..(200): Xaa can be any naturally occurring amino acid
MKFNVANPTTGCQKKLEIDDDQKLRAFFDKRLSQEVSGDALGEEFKGYVFKIMGGCDKQGFPMKQGVLTPGRVRLLLHRGTPCFRXGHGRRTGERRRKPVXRGCIVXSPDLSXFLNLGNCEEGCKGSSPGLPTTGSPRMRGPKRASKIRKLFNLXKKGXVVRKFVNTLPAFLQQTRRGKKVSKVPKIXQRLVXPLXXPEXRARILLARRESPRVLGAGFPSFPQ

SEQ ID NO: 1017 - protein, 396 aa, Photorhabdus luminescens subsp. laumondii TTO1
MLDNQTIATVKSTIPLLSATGPKLTAHFYERMFKHNPELKNIFNMSHQLNGDQREALFNAICAYAANIDNLKVLLPAVEKIAHKHASLNIQPEHYQIVGTHLLATLNEMFQPGNEILDAWGKAYGVLADIFINREEQIYHSGELTDGGWRGLRPFRINRKEVKSEVICSFEFAPQDGGKVMDYKPGQYLSIYLQDDSFANREIRQYSLTAAPNGSSYRIAIKREPQGIVSNHMHDKMQEGDTVWLTAPRGDFFLDIKPETPVTLISAGVGLTPMMSMLYHLHQQNHNSPINWLHAAEHGGHHAFSHEVAAIAQAMPNFAGTIWYREPRDEDQQGIHYQHKGFMDLTVLNEALKTEGMHFYFCGPVAFMQYVAKQLLDMGIDKQFIHYECFGPHKVI

SEQ ID NO: 1018 - protein, 409 aa, Photobacterium sp. SKA34
MELSTTVIELRYALDTFFFLISGALVMWMAAGFAMLEAGLVRSKNTTEILTKNICLYAIACTMYLLVGYNIMYVDNSAGGWLPSFGALIGTQAEGADHSLESDFFFQVVFVATAMSVVSGAVAERMKLWSFLIFSVVLTAVIYPVEGYWTWGGGFLSEAGFSDFAGSGIVHMAGASAALAGVILLGARKGKYGKNGEIYPIPGSNMPLATLGTFILWFGWFGFNGGSQLMVSDFENATAVGQIFLNTNAAAAAGAIAALAVCKTTWGKADLTMVLNGALAGLVAITADPLSPSPVAAVIIGVVAGALVVFSIIVLDKVKIDDPVGAISVHGVCGLFGLMVVPFSNADASFMTQLFGAAVIFGWVFAASLAVWGVLKATIGIRVTEEEELEGMDSHDCGVDAYPEFVSVK

SEQ ID NO: 1019 - protein, 335 aa, Xylella fastidiosa Ann-1
MTQTITVIRGDGIGPEIMDATLSVLNALQANLNYEFADAGLSALEKHGDLLPEATLNSISKNKIALKSPLTTPVGEGFSSINVALRRKFDLYANVRPAKSFPNTKSRFSDNVDLITVRENTEGAYLSEGQTISPDGEVATSRARVTRKGSERIVRYAFDLARTTGRKKVTAVHKANIIKSTSGLFLKTARDVASQYPEIDFQEMIVDNTCMQLVMRPEQFDIIVTTNLFGDILSDLCAGLVGGLGLAPGANIGNEQAIFEAVHGSAPDIAGQGKANPCALLLGAVQMLDHIGQPQNAERLRNAIVATLNAKDSLTPDLGGNGNTMGFAKAIASRL

SEQ ID NO: 1020 - protein, 522 aa, Candidatus Pelagibacter ubique HTCC1002
MSDKDKVIIFDTTMRDGEQSPGASMSIEEKIQIARIFDELGIDVIEAGFPIASPGDFEAVTAISKILKNSIPCGLSRASKKDIDACHEALKASPRFRIHTFISTSPLHMKHKLNKTPEQVLDAIKESVTYARNLTDDVEWSCEDGTRTDMDFMCKIVETAISSGAKTINIPDTVGYTIPSEFTKIITTLKNKVPNIDKAILSVHCHNDLGLAVANSLAGVQAGARQVECTINGIGERAGNAALEEIVMAIRTRNDLMPFTTGIKTELLSKASKVVSNATFPVQFNKAIVGKNAFAHEAGIHQDGMLKNRETYEIMTPESVGVKKTSLVMGKHSGRHAFKEKLNDLGYADVTDDVIQSAFGKFKVLADKKKHVYDDDIMALVDDSLISDNKINAINLKSLKVFAGTGEPQKAEMTLDVYGEVKSTSETGDGPVDAIFKCIKVLYPHDVKLQLYQVHAVTEGTDAQATVSVRIEEEGKTTVGQAADTDTLVASANAYLSALNKMIIKRKKTVPMEHETQKVKGI

SEQ ID NO: 1021 - protein, 394 aa, Oryza sativa
MAPPAPATARRPMAAVRCSAAKRSYNVTLLPGDGIGPEVVAVAKDEKLMGGAAVDAYGVPLPEETLAAAQASDAVLLGAIGGYKWDNNEKHLKPETGLLQIRAGLGVFANLRPAAVLPQLVDASTLKKEVAEGVDIMVVRELTGGIYFGQPRGFGKNDKGEDTGFNTEVYSASEASMLWRKRVTSLASEFPDIELSHMYVDNAAMQLIRNPKQFDTIVTNNIFGDILSDEASMLTGSIGMLPSASVGESGPGLFEPIHGSAPDIAGQDKANPLATILSAAMLLRYGLGEENAAKRVEAAVTETLNNGFRTGDIYSPGTTLVGCKRMGEEVLKTVESQSAVALNSSSIENSRTDEKLLSVFREGVYDIHSPRIPSTEEIADRINKMLAVLDTNIL

SEQ ID NO: 1022 - protein, 101 aa, Lavatera thuringiaca
MAISKALIASLLISLLIIQIVEADHQLVTSASKGSSFPKKIDCGGACAARCQLSSRPHLCKRACGTCCARSRCVPPGTAGNQEMCPCYASLTTHGGKRKCP

SEQ ID NO: 1023 - protein, 399 aa, Candida tropicalis
MMNIDQHHQQLQQQSQAQAQAQAQAQAQAQAQAQAQAQAQAAAAAVAASSQRQVSFNVSDHYQILEIVGEGAYGIVCSAIHKPSNQKVAIKKIEPFERSMLCLRTLRELKLLKHFNHENIISILAIQRPLNFESFNEIYLIQELMETDLHRVIRTQNLTDDHIQYFIYQTLRALKAMHSANVLHRDLKPSNLLLNSNCDLKVCDFGLARSIASQEDNYGFMTEYVATRWYRAPEIMLTFQEYTTAIDVWSVGCILAEMLSGRPLFPGRDYHNQLWLIMEVLGTPNMEDYYNIKSKRAREYIRSLPFCKKIPFQELFSNKPGINPLALDLLEKLLIFNPAKRITVEDALKHPYLQLYHDPNDEPISDKIPEDFFDFDKKKDSLTIEDLKKMLYEEIMKPL

SEQ ID NO: 1024 - protein, 312 aa, Glycine max
MGKKRKHSETTQAVAQPKKEEAAPERPARTLLGWKDKNQVEDDSPIFRNKEKLLVTCSRRINYRYRHLMLNLVTLLPHCKKDNKVESKETKGATLNELVELKNCSSCLFFECRKHKDLYLWMAKCPNGPSVKFLVSAVHTMEELKLTGNHLQGSRPILTFSANFEKDAHWKLLKEMLLQIFETPKDHRKAKPFHDHVFVFSIVDDHIWFRNYQISAHHNESDKLPRGGLDKMTLIEVGPRFCLNPIKIFGGSFGGPTLYENPLYVSPNQIRALEKKKKSGKFAKKVKAKTRRKMHEMSNPLEPDEFADMWKD

SEQ ID NO: 1025 - protein, 631 aa, Francisella tularensis subsp. tularensis SCHU S4
MSIEIVKVPDIGDYDNVDVIEVNVAVGDVIAEEDSLITLETDKASMEVPSPFAGKITKLTVKVGDKVSQGTAIMEVEVESAADQAATTQSQPQTTSSAPVAATTNLIVDVEVPDIGDYDSVDVIEVSVKVGDEIAEEDSLITLETYKASMEVPSPVAGKVVEVITKVGDKVSQGSLILKVETGSSAQAPAQEQSQQSAPVKSAAEEIIDVKVPDIGDYDSVDVIEVSVAVGDKIEEEDSLITLETDKASMEVPSPVAGEVVEIITKVGDKVSQGSLILKVKTQGSAPVEQTSSQPAPAKQEQAKQQAATPAAPTPASSSVNEYAVDNSNAHASPAVRKLARILNIDLSKVKATGRKGRVTKEDCYNYIKHAVTQVQTGKVAASGSGLDLLDDPVVDFAKFGEIETQPLSRINKISAKNLHRNWVKIPHVTFYDDADVTDLEEFRNAKKAFAEKKGIKITPLSFLVKAAAVALQEFPRFNSSLSNDGENLIIKKYYNIGFAADTPAGLMVPVVKDADKKGIIEISKDIMELAGKARDGKLGAKDMTGATFTISSLGVLGTTSFTPIINMPEVAIMGVSKTAVKPIWNGKEFIPRTMLPLSLSTDHRVIDGALAAKFLTRYCQILSDLREIIM

SEQ ID NO: 1026 - protein, 295 aa, Oceanobacter sp. RED65
MTQRDGDMFELVDEPQHHAVIKVVGVGGGGGNAVEHMVTNDVNGVDFICANTDSQALKNMSARSVLQLGSTVTKGLGAGANPEVGRQAAMEDRERIAEALAGADMVFITAGMGGGTGTGAAPVVAEVAKELGILTVAVVTRPFPFEGRKRINVADGGLSELAKHVDSLITIPNEKLLAVLGKSTSLLDAFSAANDVLLGAVQGIADLIIRPGMINVDFADVRTVMSEMGQAMMGTGHSTGENRAREAAEAAIRSPLLEDVNLQGARGILVNITAGTNLSLGEFTEVGDHNRRVFF

SEQ ID NO: 1027 - protein, 203 aa, Xenococcus sp. PCC 7307
VQSNLRLVVSIAKKYMNRGLSFQDLIQEGSLGLIRAAEKFDHEKGYKFSTYATWWIRQAITRAIADQSRTIRLPVHLYETISRIKKTTKLLSQERGRKPTEEEIATRMEMTIEKLRFIAKSAQLPISLETPIGKEEDSRLGDFIEADGETPEDQVSKSLLREDLESVLDTLSPRERDVLRLRYGLDDGRMKTLEEIGQIFNVT

SEQ ID NO: 1028 - protein, 137 aa, Brassica napus
EELHNSVIDDSMSGTTAITVLVVGDKIYVANVGDSRAVLAVKDGSHRNRILAEDLSYDQTPFRTDECERVKGCGARVLSVDQVEGLKDPSVQTWASEENEGGDPPRLWVQNGMYPGTAFTRSVGDSLAEGIGVTAEP

SEQ ID NO: 1029 - protein, 392 aa, Candidatus Phytoplasma mali
MSSKVFLRDKVHVNVGTIGHVDHGKTTLTAAITKILSTKGLAENKSYDQIDKTKEEKERGITINTTHVSYETVKRHYAHVDCPGHADYVKNMITGAAQMDAGILVVSAYHGVMPQTREHVLLAGQVGISKLIVFLNKCDLVKEEEWIHLVEMEVRELLNEYKFDGDKTPFVRGSALKALEGTDVEGINKLLEVLDEYIEDPIRDVEKPFLMPVEGVHTITGRGTVATGRVERGKIKISEEVEIIGLKETKKAIITGLEMFKKELDFAQAGDNVGILLRGITRDQIERGQVLAKPGSLNAYHKFLSQVYILTQQEGGRHTAFFSNYRPQFYFRTTDVTGFIKLKKDVKMVLPGDRTELIVELNHPIAIEAGTKFSIREGGRTIGAGTVTEIIE

SEQ ID NO: 1030 - protein, 295 aa, Nicotiana tabacum
KGGIRYHPEVDLDEVNALAQLMTWKTAVADIPYGGAKGGIGCKPKDLSRSELEPLTRVFTPKIHELIGINTDVPAPDMGTNAQTMAWILDEYSKFHGHSPAIVTGKPIDLGGSLGREAATGRGVVYATEALLAEYGKNIKDLTFAIQGFGNVGAWAAKLIHERGGKVIAVSDITGAVKNPNGLDIPALLNHKEATGKLIDFCGGDVMNSDEVLTHECDVLIPCALGGVLNRENADNVKAKFIIEAANHPTDPEADEILSKKGIVILPDIYANAGGVTVSYFEWVQNIQGFMWDEE

SEQ ID NO: 1031 - protein, 339 aa, Burkholderia xenovorans LB400
MEHSIALQFEDGVTRFITCRDNETLSDAAYRQKVNIPLDCRDGACGTCRGFCESGQYDLPASSYIEDALTADEAAQGYVLACQTRPRSDCVIRVPASSAACKTGVSKHAGKLAAIDRLTDSTIHFSIDVDEPQQLGFLPGQYVNVDIPDSDTFRSYSFSSAPGAAQAAFVVRNVPDGRMSRYLCEQAQPGQRITFSGPYGSFYLREPVRPVLFLAGGTGIAPFLSMLQVLSASGSPQPVRMVYGVTHDRDLVGTAQLDEAQRAIGQFEYRTCVADAASDHARKGYVTQHVDPAWLNGGDVDVYLCGPVAMVDAVQTWLRETGITPAHFFYEKFSASNLA

SEQ ID NO: 1032 - protein, 430 aa, Desulfitobacterium hafniense Y51
MSEDKFDAIVVGGGIAGTVAAYLLAKEGLEVILVERGNYAGSKNMTGGRIYSHSLEKIMPDFAREAPVERRITREKISLMTDESNVTLDFYSSKLGVQGSDSYSILRGVFDQWLAEKAEEAGVQIIPGIRVDDLIIREGKVCGVVAGEDELEANITILADGVNSLLAQKLGFRGELAAHHVAVGAKEIIELPPQVIEDRFNCNGNEGTAWLFAGYPSDGRVGGGFLYTNKSSISLGVVTTLSDVIKGNKTVPQMLEDFKHHPAVQPLIKDGKMIEYSGHLVPEAGLAMIPKIVGNGVLVVGDAAGFCINLGYMVRGMDFAVASAECAAKAVLKAKEAQDFSEGYLHCYQGLLEQSFVMQDLKRYKDFPHFLEETPRIFNEYPKMADDLLTDMFVVKGEPAQPLRKTLMQHVSKIGVLNIAKDGWKGVRSL

SEQ ID NO: 1033 - protein, 71 aa, Arabidopsis thaliana
  misc_feature (62)..(62): Xaa can be any naturally occurring amino acid
MASSMLSSGAVDTSPAQATMDLHLTGLKSSAAFPVTRKTNKDIISYSGNGGRVSSMKVWPPXGKKKFGTLF

SEQ ID NO: 1034 - protein, 295 aa, Nicotiana tabacum
KGGIRYHPEVDPDEVNALAQLMTWKTAVANIPYGGAKGGTGCSPSDLSISELERLTRVFTQKIHDLIGIHTDVPAPDMGTNPQTMAWILDEYSKFHGYSPAVVTGKPIDLGGSLGRGAATGRGVLFAAEALLRDHGKSIAGQRFVVQGFGNVGSWAAQLITEQGGKIVAVSDITGAIKNKNGIDIASLLKHVKENRGVKGFHGADSIDPNSILVEDCDVLIPAALGGVINRDNARDIKAKFIVEAANHPTDPEADEILAKKGVVILPDIYANSGGVTVSYFEWVQNIQGFMWDEE

SEQ ID NO: 1035 - protein, 418 aa, Burkholderia xenovorans LB400
MRDHATLQLSPEPAPDHAASRVTQPRFWETLPARWNSDTDDTLVCCQVRQETHDVKSFLFRAPSGRAFVFEPGQFITLELEIDGEPINRCYTISSPPTRPHTISITVKRVPGGKVSNWLHDNLHAGAEVRVLGPAGEFTCARHPARKFLFLSAGSGITPLMSMSRAHHELGEDSDIVFVHSARTPDDIIFARELDLIASNQAHFRTAFVCERLGARTNWPGVTGFLTLPLLKLIAPDFLEREIFICGPAPYMQAVRKLLDEGGFDRRHYHEESFSFGTVSEVAAQLTTAHVADALQSASAPVTAGSFTEAREEAAGFTPASAPTPADVEAETRFKVSFAKSHREIECGSGQNVLDAAKKAGVRLPASCTQGMCGTCKVKLVSGEVAMKHAGGIRQREIDQGMVLLCCSKPLTDLVVDK

SEQ ID NO: 1036 - protein, 188 aa, Nodularia spumigena PCC 73104
MNRGLSFQDLIQEGSLGLIRAAEKFDHEKGYRFSTYATWWIRQAITRAIADQSRTIRLPVHLYETISRIKKTTKLLSQEMGRKPTEEEIATRMEMTIEKLRFIAKSAQLPISLETPIGKEEDSRLGDFIESDGETPEDQVSKNLLREDLEKVLDSLSPRERDVLRLRYGLDDGRMKTLEEIGQIFNVT

SEQ ID NO: 1037 - protein, 418 aa, Methanococcus maripaludis S2
MLSEKKLQQVREMAEKYKDVPAKFGEDIDLSMYPTPKENLLKVESLKDLNEDHKQALANVGVDIEEKSTVGSYVQVNSDAIYSKMYSDIILMPITEALEKFELDDYYWNAVQMSDKYGARVAKELTEGYFIRAPKGVKKTIPLQTCLLIGSEEVSQNVHNIIIVEEGAELNVITGCTTSPHVKSGLHLGVSEIYLEKNAKLTFTMIHNWGENVHVRPRTAIKMDDDSIFINNYVTMMPVKSIQSYPTAYCEGKNAKATFQTIVYGKGSSNLDMGSRVILSGENSAADMISRVIVVDDAKVISRGHLIGAESNVKGHLECRGLILSNDGHILAVPELEAEKTDLELSHEAAVGKIAEDQIQYLMSRGLSEDEASSLIIKGFLSVDISGLPPELAKSVKEMMDDTRKCNVKSMFFTFLNI

SEQ ID NO: 1038 - protein, 503 aa, Zea mays
  misc_feature (242)..(242): Xaa can be any naturally occurring amino acid
MEGAGRDANPLSGYRIGKTLGIGSFGKVKIAEHILTGHKVAIKILNRKKIRSMDMEEKVKREIKILRLFMHPHIIRLYEVIDTPADICVVMEYVKSGELFDYIVEKGRLHEEEARHFFQQIISGVEYCHRNMVAHRDLKPENLLLDSKCNVKIADFGLSNIMRDGHFLKTSCGSPNYAAPEVISGKLYAGPEVDVWSCGVILYALLCGTLPFDDENIPNLFKKIKGGIYTLPSHLSPSARDXFPRMLVVDPMKRITIREIREHVWFKIRLPRYLAVPPPDTAQQVKKVDEETLNDVIKMGWDKNQLIESLQNRKENEATVAYYLLLDNRLRTTSGYLGSEFQESMDSSFSQVIAETPTSATELRQHGFSESPGSGLRQHFAAERKWALGLQSRAHPREIISEVLKALQELNVYWKKIGHYNMKCRWSPGCLESMMHNSDSFSAESAIIETDVFMEKSTPTVKFEIQLYKTRDEKYLLDLQRVSGSHLLFLDLCSAFLTQLRVL

SEQ ID NO: 1039 - protein, 662 aa, Triticum aestivum
MDSSRVILIPGTPPLPYAYEQLPSSSADAKGIEEERAGGGGLRWRACAAVLAASAVVALVVAAAVFGASGAGWDAVAASVPATPATEFPRSRGKEHGVSEKTSGAYSANAFPWSNAMLQWQRTGYHFQPDKYYQNDPNGPVYYGGWYHFFYQYNPSGSVWEPQIVWGHAVSKDLIHWRHLPPALVPDQWYDIKGVLTGSITVLPDGKVILLYTGNTETFAQVTCLAEPADPSDPLLREWVKHPANPVVFPPPGIGMKDFRDPTTAWFDESDGTWRTIIGSKNDSDHSGIVFSYKTKDFLSYELMPGYMYRGPKGTGEYECIDLYAVGGGRKASDMYNSTAEDVLYVLKESSDDDRHDWYSLGRFDAAANKWTPIDEELELGVGLRYDWGKYYASKSFYDPVKKRRVVWAYVGETDSERADITKGWANLQSIPRTVELDEKTRTNLVQWPVEELDALRINTTDLSGITVGAGSVAFLPLHQTAQLDIEATFRIDASAIEALNEADVSYNCTTSSGAATRGALGPFGLLVLANRALTEQTGVYFYVSKGLDGGLRTHFCHDELRSSHASDVVKRVVGSTVPVLDGEDFSVRVLVDHSIVQSFAMGGRLTATSRAYPTEAIYAAAGVYMFNNATGTSVTAEKLVVHDMDSSYNHIYTDDDLVVVD

SEQ ID NO: 1040 - protein, 338 aa, Rubrivivax gelatinosus PM1
MTIKVAINGYGRIGRNVLRAHYEGGKKHDIQIVAINDLGDPKTNAHLTQYDTAHGRFPGTVSVDGDYMVINGDKIRVLANRNPAELPWGELGVDVVMECTGFFTTKEKASAHLKGGAKKVIISAPGGKDVDATIVFGVNHGVLKATDTVISNASCTTNCLAPLVKPLHEKIGLESGLMTTIHAYTNDQVLTDVYHEDLRRARSATQSMIPTKTGAAAAVGLVLPELNGKLDGFAIRVPTINVSVVDLTFTAKRATTLEEVNAVLKAAAEGELKGILAYNTAPLVSVDFNHDPASSTFDSTQTRVSPDGKLVKVLSWYDNEWGFSNRMLDTTVALMAAK

SEQ ID NO: 1041 - protein, 1080 aa, Frankia sp. EAN1pec
MTIETTAQTPISDTAASAAAADGVREIDPGTASENGGDTQARQAPPRPESAGPARPESTGSARPDTAGPGLPAGFVPRFTDRHVGPDQADRRAMLDLLGLGSLKGLTDAAVPAAIRDTELDLPPAVDETEVLAELRGLAGYNRRVTSMIGLGFHPAVMPGVIQRNVLENPAWYTAYTPYQPEISQGRLEALLNFQTVITDLTGLAVAGASLLDEPTAAAEAMQIAHRAARGRRSTFVIDADTLPQTIAVVRTRAEALGITVLVADLRDGLTGRPSPAPGERPAAGPAAPAQPAAPSAPSEVPSVVPSDVLGDAFGVLLSYPGAGGEVRDLRGVIAQARERDIVVTVAADLLALTLVRSPGALGADIAVGSTQRFGLPLSFGGPHAGYLAVRSGLERTLPGRLVGVSVDAAGNPAYRLTLQTREQHIRREKATSNICTAQVLPAVLASMYAVYHGPEGLAGIAARVHGHAVSLAAGLRAGGVEIVHDGFFDTVLARVPGRAAQVVADALAHGVNLRLVDGDHVGVSCNETTVAADLRAVWSAFGVGGADGPAAAVGPAAGPALPAALIRTGEEPYLAHPVFHAHRSETAMLRYLRRLADVDFALDRGMIPLGSCTMKLNATTEMAAVTWPDFADIHPFAPLDQAAGYVSMIRDLEEWLARITGYAGVSVQPNAGSQGELAGLLAIRAYHRDHAAAGNPVRDVCLIPSSAHGTNAASAAMAGMRVVVVACDAEGNVDLDDLTAKAAAHAPALAALMVTYPSTHGVYEEGIARACAVVHDAGGLVYVDGANLNALVGLSKPGRFGADVSHLNLHKTFCIPHGGGGPGVGPVAVGAKLLPYLPNHPLRPEAGPETGVGPISGAPWGSAGILMIPWAYIRLMGAEGLREATSVAVLNANYVARRLAPHYPVLYTGRNGLVAHECILDLRPLTKETGVTVDDVAKRLIDYGFHAPTMSFPVAGTLMVEPTESEDLGEIDRFCDAMIAIRAEAAKVGAGEWPREDNPLRNAPHTAEMVTGDEWAHPYPRSVAAYPVASLRAAKYWPPVRRIDGAYGDRNLVCTCPPVEAFDATAEPVRVPLPAATPA

SEQ ID NO: 1042 - protein, 434 aa, Geobacillus kaustophilus HTA426
MAFEFKLPDIGEGIHEGEIVKWFVKPGDEVNEDDVLCEVQNDKAVVEIPSPVKGKVLEILVPEGTVATVGQTLITLDAPGYENMTFKGQEHEEVKKEEKAETVSKKEMVEIAAPSAPAAEAEADPNRRVIAMPSVRKYAREKGVDIRLVQGTGKNGRILKEDIDAFLAGGAKAAAEPTPQAAEEKAAPQAPAAKPVVPEGEFPETREKMSGIRRAIAKAMVHSKHTAPHVTLMDEADVTKLVAHRKKFKAIAAEKGIKLTFLPYVVKALVSALREYPVLNTSIDDATEEIIHKHYYNIGIAADTDRGLLVPVIKHADRKPIFALAKEINELAEKAREGKLMPNEMKGASCTITNIGSAGGQWFTPVINHPEVAILGIGRIAEKPIVRDGEIVAAPVLALSLSFDHRMIDGATAQKALNHIKQLLSDPELLLMEA

SEQ ID NO: 1043 - protein, 631 aa, Photobacterium sp. SKA34
MAIEINVPDIGADEVEVTEILVSVGDKVEEEQSLITVEGDKASMEVPASQSGIVKEIKVAEGDTVSTGSLIMIFEAESAADAAPAPVAEAATAAPAPAAAAELKEVHVPDIGGDEVECTEIMVSVGDTVEEEQSLITVEGDKASMEVPAPFAGTVKEIKIVEGDKVSTGSLIMVFEVASSGSAPAAPVAQAAAPAPAAPAASAAKEVNVPDIGGDEVEVTEIMVSVGDTVEEEQSLITVEGDKASMEVPAPFSGTVKEIKIVEGDKVSTGSLIMVFEVAGAAPAAAPVAQAAAPAPTAAPAAAPAKAEASAATGDFVENNEYAHASPVVRRLAREFGVNLAKVKGTGRKNRVLKEDVQNFVKDALKRLESGAAASASGKGDGAALGLLPWPKIDFSKFGETEVKPLSRIKKISGANLHRNWVMIPHVTQWDNADITALEAFRKEQNAIEAKKDTGMKITPLVFIMKAAAKALEAFPSFNSSLSDDGESLILKKYVNIGIAVDTPNGLVVPVFKDVNKKGIYELSEELMAISKKARAGKLTASDMQGGCFTISSLGGLGGTAFTPIVNAPEVGILGVSKSEMKPVWNGKEFEPRLQLPLSLSYDHRVIDGAEGARFITYLNGCLSDIRRLVL

SEQ ID NO: 1044 - protein, 547 aa, Xanthobacter autotrophicus Py2
MTSNAHATDAAFKALAIAWTTREGRILDLFAQPDRFERFSVAYGDLLIDFSKTAITDDILSQLLELARAGGVEAQRDAMFAGDHINLTEDRAVLHTALRDQASDTIQVDGIDVKPGVVETLARLGDFATGVREGRIAGARGGVITDVVNIGIGGSDLGPAMVTLALAPYHDGPRCHFVSNVDSAHITDVLKGLDPATTLFIVASKTFTTVETMTNAATARAFIVNALGEDAVGAHFAAVSTALDKVGAFGIPADRIFGFWDWVGGRYSVWSAIGLPLMLAIGPDRFREFLAGAAAMDEHFRSAVLDQNLPVLLGLIGLWHRNACGFPSRAIIPYDQRLARLPAYLQQLDMESNGKSVTRDGAAVSRPTGPIVWGEPGTNAQHAFFQLLHQGTDIVPVEFLVGAQSHEPALKDHQDLLVANCLAQSEALMRGRTLEEATAQLRAKGISEDKVAEIAPHRVFPGDRPSLTIAYATLDPFTLGRIIALYEHRVFVEAAVWGINGFDQWGVELGKELATQFLPAVTGGALPPSASASTSGLIAHLDAVAGG

SEQ ID NO: 1045 - protein, 396 aa, Candida glabrata CBS 138
MSTDQMTQLDESQIETNYDKVVYEFDDMNLNEKLLRGVFGYGFNKPSAIQQRAIMPIIEGNDVLAQAQSGTGKTGTFSIAALQRIDPAIKAPQALMLAPTRELALQIQKVVMALGFHMDIKVHACIGGTSFVEDAEGLRDAQIVVGTPGRVFDNIQRRKFKVDNIKMFILDEADEMLSTGFKEQIYQIFTMLPPTTQVVLLSATMPRDVLEVTAKFMQNPVRILVKKDELTLEGIKQFYVNVEEEQFKYDCLTDLYDSISVTQAVIFCNTRRKVEELTQRLTADNFTVSSIYSDLPQQERDTIMKEFRSGSSRILISTDLLARGIDVQQVSLVINYDLPTNKENYIHRIGRGGRFGRKGVAINFIVNEDVQALRELEQFYSTQIEELPSDIGTLFT

SEQ ID NO: 1046 - protein, 112 aa, Rhodospirillum rubrum ATCC 11170
MKFVIAITKPFKLDEVREALGALGIQGMTVTEVKGFGRQKGQTEVYRGAEYVVNFLPKVKIELAVPDNLLDQVVETIQSTAQTGKIGDGKIFVFDLGEAVRIRTGERGEEAL

SEQ ID NO: 1047 - protein, 117 aa, Zea mays
MAGLVKLACLVLACMIVAGPIATNAALSCGTVSGNLAACIGYLTQNGPLPRGCCTGVTNLNNMARTTPDRQQACRCLVGAANSFPTLNAARAAGLPKACGVNIPYKISKSTNCNSVR

SEQ ID NO: 1048 - protein, 404 aa, Xanthomonas campestris pv. campestris str. ATCC 33913
MATEVKVPVLPESVSDATIASWHKKAGEAVKRDENLVDLETDKVVLEVPSPVDGVLKEIKFEAGSTVTSNQILAIIEEGAVAAAAPAEEKKADATAAAAAPAAAPAPAAAAAAAPVASKSSADSLPPGARFSAITQGVDPSQVDGTGRRGAVTKEDIVNFAKAGGVGKASGARPEERVAMTRVRKTIAKRLMESKNSTAMLTTFNEVNLAKVSAARKELQDEFQKAHGIKLGFMSFFVKAAANALQRFPLVNASIDGDDIIYHGYSDISIAVSTEKGLVTPVLRNVERQSFAEVEQGIADYAAKARAGKLGLDDLQGGTFTITNGGTFGSLLSTPIINPPQSAILGMHAIKERPIAENGQVVIAPMMYLALSYDHRIIDGKDSVQFLVDIKNQLENPGRMLFGL

SEQ ID NO: 1049 - protein, 307 aa, Cryptococcus neoformans var. neoformans B-3501A
MASIVSVSHGHSPQLILHSPSPPRTRSSSPSSEQSQAHRTSTAPPTPSPLTHHRSAEAAKYIKRYKHIEAAVDAFYNNEPAPRADPAQERKLGEIWEKFKDPSDPKLIKIDGTMELCEELDIDPGTDAVLFCLAADLGSKATGEWEKAPFVAGIASYPGNIDSLPKLKAYLPTLRKKLVSDPEYFKKVYNHAFQLARGGPQSLTRSLPLDTAIDLWTLFFPPAFNHSPSALSHLPDNSPPQFTQPEFDLWIEFMQQKNKAVSKDTWALLVDFARGIDKDFKEYDEDGAWPSMIDDFVEYVREQKRGQ

SEQ ID NO: 1050 - protein, 351 aa, Rhodobacter sphaeroides 2.4.1
MAEVKRIIGWFGEKRGVSFDVSEDLVGGAAYDAHGTPLADETMARAQEVDAVLLGAVGGPKYDVLDFSVKPERGLLRLRKEMDLYANLRPAQCFDALADFSSLKRDIVAGLDIMIVRELTSGVYFGEPRGIFPDNEGGRFGVNTQRYTTEEIRRVARSAFELARRRNNRVCSMEKANVMESGILWREEVQWVHDNEYPDVELSHMYADNGAMQLVRWPRQFDVIVTDNLFGDILSDCAAMLTGSLGMLPSASLGAPMANGRPKALYEPVHGSAPDIAGQGKANPIACILSFAMALRYSFDMGEEATRLEKAVETVLADGVRTADLMGPEGGTPVSTSGMGDAVLAALDASL

SEQ ID NO: 1051 - protein, 460 aa, Arabidopsis thaliana
MNSASAHDLRLLEVDKEKQDPKSPRGALEACLTRCSISSASSSSDDPPPNREAIDNADADTDVQCKNHRASSNWGKFFKLWKRRSMKRLSSFPPLSGAAPPIIKQNKSADPNMNGMVLHDIYDFQSSLQNFSISDIEIATDNFSPENIIGRGGYADVYQGILPEGKLIAVKRLTKGTPDEQTAEFLSELGIIAHVDHPNTAKFIGCCIEGGMHLVFRLSPLGSLGSLLHGPSKYKLTWSRRYNVALGTADGLVYLHEGCQRRIIHRDIKADNILLTEDFQPQICDFGLAKWLPKQLTHHNVSKFEGTFGYFAPEYFMHGIVDEKTDVFAFGVLLLELITGHPALDESQQSLVLWAKPLLERKAIKELVDPSLGDEYNREELIRLTSTASLCIDQSSLLRPRMSQVVELLLGHEDVVMTPREAKIKMMQRTYSEELLDSVEYNSTKYLGDLDRIREVALAS

SEQ ID NO: 1052 - protein, 603 aa, Solanum tuberosum
MNSKEEGAYRLFSEPSPRYYDEKKVFQKSNLFHMLPKGIPVPPSGPSRRHNGDATVAPIQWMKPCNMSSLKGVQLTFQQLPKELKRPFQLDKYQLPSIRRRFDKANFFVLQNMGLGGDGEKGESWDVEKSKGKKKKEVTEEETGCWTKLWFIGSCISSRSKVDSSISGISTHCDKSTYVLTSCIALAESKSTNTSRDQPVAPIISSTTTSNAESNSSTSKLEEELKVSSRLRKFAFNDLKLATRNFRPESLLGEGGFGCVFKGWIEENGTAPVKPGTGLTVAVKTLNHDGLQVLSIWQAEVNFLGDLVHPNLVKLIGYCIEDDQRLLVYEFMPRGSLENHLFRRSMPLPWSIRMKIALGAAKGLAFLHEEAERPVIYRDFKTSNILLDADYNAKLSDFGLAKDGPEGDKTHVSTRVMGTYGYAAPEYVMTGHLTSKSDVYSFGVVLLEMITGRRSMDKNRPNGEHNLVEWARPHLGERRRFYRLVDPRLEGHFSIKGAQKAAQLAARCLSRDPKARPMMSDVVEALKPLPNLKDMASSSYYFQTMQADRVGSSPSTKNGVRTQGSFSRNGQQHPRSLSIPNGSHASPYHQQFPQNSPKPNGKT

SEQ ID NO: 1053 - protein, 417 aa, Bacillus subtilis
ILFNFQQLLSQHKEELAHLITIENGKNTKEALGEVGRGIENVEFAAGAPSLMMGDSLASIATDVEAANYRYPIGVVGGIAPFNFPMMVPCWMFPMAIALGNTFILKPSERTPLLTEKLVELFEKAGLPKGVFNVVYGAHDVVNGILEHPEIKAISFVGSKPVGEYVYKKGSENLKRVQSLTGAKNHTIVLNDANLEDTVTNIVGAAFGSAGERCMACAVVTVEEGIADEFMAKLQEKVADIKIGNGLDDGVFLGPVIREDNKKRTLSYIEKGLEEGARLVCDGRENVSDDGYFVGPTIFDNVTTEMTIWKDEIFAPVLSVIRVKNLKEAIEIANKSEFANGACLFTSNSNAIRYFRENIDAGMLGINLGVPAPMAFFPFSGWKSSFFGTLHANGKDSVDFYTRKKVVTARYPAPDFN

SEQ ID NO: 1054 - protein, 308 aa, Schizosaccharomyces pombe
MSESRQELLAWINQVTSLGLTRIEDCGKGYAMIQIFDSIYQDIPLKKVNFECNNEYQYINNWKVLQQVFLKKGIDKVVDPERLSRCKMQDNLEFVQWAKRFWDQYYPGGDYDALARRGNRGPANTRVMNSSAGATGPSRRRQVSSGSSTPSMTKSSANNNNVSSTANTAAVLRAKQAQQQITSLETQLYEVNETMFGLERERDFYFNKLREIEILVQTHLTTSPMSMENMLERIQAILYSTEDGFELPPDQPADLTTALTDHDTNNVAEEAQMTDLKDSETQRVPSAPDFVHARLQSLEVDDDENITF

SEQ ID NO: 1055 - protein, 203 aa, Pleurocapsa sp. PCC 7314
VHSNLRLVVSIAKKYMNRGLSFQDLIQEGSLGLIRAAEKFDHEKGYKFSTYATWWIRQAITRAIADQSRTIRLPVHLYETISRIKKTTKLLSQERGRKPTEEEIATRMEMTIEKLRFIAKSAQLPISLETPIGKEEDSRLGDFIEADGETPEDQVSKSLLREDLESVLDTLSPRERDVLRLRYGLDDGRMKTLEEIGQIFNVT

SEQ ID NO: 1056 - protein, 671 aa, Hypocrea jecorina
MARADQPQDKTKTEQRIGAYTVVRTLGEGSFGKVRLAIHNGTGQKVALKIITRKKLISRDMAGRVEREIEYLQLLRHPHIIKLYTVIKTPSEIIMVLEYAGGELFDYIVQNGRMKEAEARRFFQQMICAVEYCHRHKIVHRDLKPENLLLDENLNVKIADFGLSNIMTDGNFLKTSCGSPNYAAPEVIGGKLYAGSEVDVWSCGVILYVLLVGRLPFDDEHIPSLFAKIARGTYSMPQWMPPGAAALIKGMLVVNPVQRMTIDEIRADPWFNTDLPAYLQPPVEEFFNTGVDPNKAIKKSDIAPNAPEKVQEKLHNEVTEKISKTMGYGKDDVEEALQSDEPSAIKDAYMIVRENKLMLANNPDAGLTGDEGSPMMSISSTRSAISPGGASPRPYVTKIGILPSSLPAYHKDYMEREKNGTGHDPVTPAITINDELPVTRTEVEKEEAARRLNPHSRSALRLDESSKRPQGMTPITAPVKKPKPVRWQFGIRSRNAPWEALLCIHKALNKLGASHLRDEGYDEAQRRGVEDATSRDSSFANGAPLERDPNGHDKDPTKRYKLPADPWHIQVRWPSTSMQAGADRRDELGSKAGSPDSFVYTRGDAASRKDFVALHMDIQIYEMEQGVYLVDFKCSGYETQDGRLLEEKEVTSPFPFLDRAAKLIMQLAEAD

SEQ ID NO: 1057 - protein, 334 aa, Escherichia coli CFT073
MEYMTIKVGINGFGRIGRIVFRAAQKRSDIEIVAINDLLDADYMAYMLKYDSTHGRFDGTVEVKDGHLIVNGKKIRVTAERDPANLKWDEVGVDVVAEATGLFLTDETARKHITAGAKKVVMTGPSKDNTPMFVKGANFDKYAGQDIVSNASCTTNCLAPLAKVINDNFGIIEGLMTTVHATTATQKTVDGPSHKDWRGGRGASQNIIPSSTGAAKAVGKVLPELNGKLTGMAFRVPTPNVSVVDLTVRLEKAATYEQIKAAVKAAAEGEMKGVLGYTEDDVVSTDFNGEVCTSVFDAKAGIALNDNFVKLVSWYDNETGYSNKVLDLIAHISK

SEQ ID NO: 1058 - protein, 318 aa, Ralstonia solanacearum
MAKHAKVLILGSGPAGYTAAIYAARANLNPMLITGLAQGGQLMTTTEVENWPADREGLQGPELMQRFLEHAERFSTDVVFDHIHTAHLTEKPIRLVGDSGEYTCDALIISTGASAQYLGLPSEETFSGRGVSACATCDGFFYKGQEVAVVGGGNTAVEEALYLANIASKVTLIHRRDKFRAEPILVDRLLEQQKKGKIEIKYNTVLDEVLGDDSGVTGVRLRGVNGNATGAEEVRLAGVFIAIGHKPNTDLFKGQLDMNETGYLRTQSGLVGNATATNIPGVFAAGDVQDHIYRQAITSAGTGCMAALDAQRYLENQE

SEQ ID NO: 1059 - protein, 403 aa, Silicibacter pomeroyi DSS-3
MSHIVVIGAGQAGASLVARLRKDGFEGEITLIGAEPVPPYQRPPLSKAYLLGEMEKERLFLRPESFYAEQNIALRLNARVSAIDPAAKTVSLGGEVIPYDQLALTTGSEPRRLPAAIGGDLAGVHVVRDLADIDAMAPSVTEGARALIVGGGYIGLEAAAVCAKRGVQVTLVEMADRILQRVAAPETSAYFRALHTGHGVDIREGVGLTRLIGAQGRVTGAVLTDGSELPVDLVVVGVGIAPATALAEAAGLVLENGIRTDAQGRTSDPSIWAAGDCASFPYKGGRIRLESVPNAIDQAETVAQNMQGAGKDYVAQPWFWSDQYDVKLQIAGLNTGYDRVVTRPGEGQTVSFWYYTGDQLVAVDAMNDPRAYMVGKRLIDSGKTADPAIVADPAADLKPLLKA

SEQ ID NO: 1060 - protein, 353 aa, Burkholderia xenovorans LB400
MAPAASPAKWARSRAAARLQRRALSPDRLNGERFDVVVVGAGPAGLAAAVYAASEGLRVAVLDTKAPGGQAGTSSKIENYFGFPTGISGQALAGRGLSQCRKFGAEVGVPIEVLGIECESAPPFHLRLNYDEHVYASSVVIATGARYRKPLLPRLEQFEGRGIYYSATFMEAAFCNNEEVVIVGGGNSAGQAAVFLSGLARHVHIAIRGDGLNASMSNYLIRRIEATANITVHSRTQIVQLNGETQLESIKWDTQGYIEEKPIRHVFLFLGAQPNTGWLGDCIALDRNGFVLTGPDAVHQWPSERAPYYLETSRPGIFAVGDVRSGSVKRVAAAVGEGAAAIQSLHQYLALNR

SEQ ID NO: 1061 - protein, 203 aa, Leptolyngbya sp. PCC 7375
VQSNLRLVVSIAKKYMNRGLSFQDLIQEGSLGLIRAAEKFDHEKGYKFSTYATWWIRQAITRAIADQSRTIRLPVHLYETISRIKKTTKLLSQELGRKPTEEEIATRMEMTIEKLRFIAKSAQLPISLETPIGKEEDSRLGDFIESDGETPEDEVSKSLLREDLEGVLSTLSPSERDVLRLRYGLDDGRMKTLEEIGQIFNVT

SEQ ID NO: 1062 - protein, 597 aa, Mycobacterium avium subsp. paratuberculosis K-10
MSKQEVSDYLLERLRAWGVEHVFGYPGDGINGLLAAWGRADNKPQFIQSRHEEMSAFQAVGYAKFTGRVGVCAATSGPGAIHLLNGLYDAKLDHVPVVAIVGQTNRTAMGGNYQQEVDLLSLFKDVASDYVQMVTVPEQLPNVLDRAIRIAMTQRAPTALIIPADVQELPYSPPEHAFKMVPSSLGIEYPAIAPEDAAIARAAEILNAGKKVAMLVGTGARGAHHELAEVADLLGAGAAKALLGKDVLSDELPWVTGSIGLLGTRPSYELMRDCDTLLTVGSSFPYTQFLPEFGQCRAVQIDIDGRLIGMCYPYEVNLVADAKAALRALIPHLKRKEDRSWREGIEKNVARWWETMDKEAMVSADPINPLRLFSELSPLLPDNAIVTADSGSSANWYARNLRFRGNMRGSLSGTLATMGPGVPYGIGAKFGQPDRPVIVFSGDGAMQMNGMAELITVKRYWNEWKDPRLIIAVLHNNDLNQVTWEMRAMAGAPKFAESQNLPDVDFAAFAAGLGLNAMAIKDPDELSDAWRSALSADRPTVLDVYTDPDMPPIPPHATWEQFKSATAAVLSGDEDRTGFVKVGLKTKMQEFLPHKKS

SEQ ID NO: 1063 - protein, 237 aa, Oryza sativa
MEPGFGKRLMHVLRAVYHMLRRGLCRKRLMMDLHLLLGRGKLAGRALRDVLLAHQPHGGAAAVAVMGGGAGVARGGDSSSSPLSASFFHHNPRDVEFSCTTTPSYAPGVFPFRFRGRGGSRHAGGGASNYGGLDASAVARVFEMLNADAAAAAGAGGETPLSSMPGATPSPLLALSLGRSPAGTRQLRVTDSPFPVEPPEGAVDGRVDDKATDFIEWFRRQLLQQQASAAPTPDYRG

SEQ ID NO: 1064 - protein, 316 aa, Geobacter sulfurreducens PCA
MQATHHRLLILGSGPAGYTAAVYAARANLSPALITGLQQGGQLMTTTEVDNWPGDPDGVLGPDLMDRMRRHAERFNTAMIYDHIHTANLRERPFRLEGDSGIYTCDALIIATGASARYLGLPSEEAFKGKGVSACATCDGFFYRGKPVAVIGGGNTAVEEALYLSNIASHVTLVHRRDKLRAEKILADKLIEKTRGGNVTIEWNHVLDEVLGDQAGVTGVRIRHTSGSTKELDVHGCFIAIGHTPNTHLFEGQLEMDEGYIRTQCGAEGNFTATSIPGVFAAGDVQDQHYRQAITSAGTGCMAALDAERYLDMLKP

SEQ ID NO: 1065 - protein, 112 aa, Ralstonia solanacearum
MKQITAIIKPFKLDEVRESLADVGVTGLTVTEVKGFGRQKGHTELYRGAEYVVDFLPKIKIEVVVADSQVDQVLDTIVKAAKTGKIGDGKIFVTAVEQVIRIRTGETNEAAV

SEQ ID NO: 1066 - protein, 585 aa, Anabaena variabilis ATCC 29413
MTITANSQLPNRFPQNLESMNHKADGLLATLGAELVYVQDGVGRYLSFYWQKSELLGFNQEQIVCDGNGQEIFVPLDKVSYMKRLHYVMANLAPEKFSCWFSCHQNLFELELAITPIIPPLGTAATTVLVMGRLLQVKVNNQEVNVAITTPTQTDLASRSQQHQRLVNKITRNIRRTLDLDVIWQQTVDSLGKALRLERCIICPYQPSSSKVRVIAEYHQPDRPSMLGLEIDVTSEPAFAQALTTLEPIIMEVPGYKLCPQQKILVVATCYQDQANGLIAINLRHECYPLTNAELELAKEVADQLGTAIAHATLYKELEAARQKAEEASRLKSEFLANVSHEIRTPLNGMIGFLKLILEGMADDVEEKNQFLSEAHQLSLHLLNIINDILDIAKIEAGKMELVCAPIKLEELFSDVDNFMRPQAEVKNLSFRMQLPPTSDEIVVQGNYQRLLQVMLNIVGNAIKFTHEGGITVSADVVLKKGKLQEQHFPGMVRVRIADTGIGVSLDQQDKLFQLFSQVDGSRTRQYGGTGLGLAISQKLVETMGGEVHFYSLGEGLGSTVTFTVPLYQQPVMLSSNDADAECIG

SEQ ID NO: 1067 - protein, 300 aa, Aspergillus oryzae
MSISSIRGLLSTYSPVSEFSPDLEKEYQLPLRNDSSSDLESSTEEAKPSRPKTEKADSKVIDGRLVSDAIIGLSDGMTVPFALTAGLSALGDTKVVVFGGMAELIAGAISMGLGGYLGAKSEEESYRATLKETESQTMTDPAGVTDTISDIFAPYDLPPHLVSELTRHLSTSPMLPSFLMNFHHTLQEPSGSRAFICALTIALGYFIGGFIPLLPYFFVGPNDAFIALRWSIATMVVALFLFGYGKTCFVSGWKGSRNVRRGLIGGLQMVLVGGVAAGSAMGLVKGFQLMASGGSDGGEH

SEQ ID NO: 1068 - protein, 203 aa, Pseudanabaena sp. PCC 7403
VQSNLRLVVSIAKKYMNRGLSFQDLIQEGSLGLIRAAEKFDHEKGYKFSTYATWWIRQAITRAIADQSRTIRLPVHLYETISRIKKTTKLLSQEMGRKPTEEEIATRMEMTIEKLRFIAKSAQLPISLETPIGKEEDSRLGDFIESDGETPDDQVAKSLLREDLESVLGTLSPRERDVLRLRYGLDDGRMKTLEEIGQIFNVT

SEQ ID NO: 1069 - protein, 512 aa, Burkholderia xenovorans LB400
MSETYQDEAVRSTKSASALTHFINGKTVEGTSGRFGDVFNPAQGSVSARVPLASVAEVDAAVAAAKDAFAAWSETAPIKRARVLFRFKELLDRHHDELAELITREHGKVFSDAKGEVMRGIEIVEFACGIPNLLKTDFTDQIGGGIDNWNLRQPLGVVAGITPFNFPMMVPCWMFPVAIACGNTFVLKPSERDPSCSNRLAELLKEAGLPDGVFNVVHGDKVAVDALLVHPDVSALSFVGSTPIAEYIYTEGTKHGKRVQALGGAKNHLVVMPDANLDQAVDALIGAAYGSAGERCMAISVAVAVGHIADELVERLTPRVKSLKILNGMESDAEMGPLVTAVHREKVVGYIDSGVAAGATLVVDGRGHQVSGHEKGFFLGGTLFDNVSTDMKIYREEIFGPVLCVVRVPDFASAVELINANEFANGVSLFTSDGGVARAFSRQIQIGMVGINVPIPVPMAWHSFGGWKKSLFGDHHAYGEEGVRFYTRYKSIMQRWPDSIAKGAEFTMPVAR

SEQ ID NO: 1070 - protein, 393 aa, Anaplasma phagocytophilum HZ
MTEGRKPHINVGTIGHVDHGKTTLTAALTTVLARKLSGANKVVKYDEIDKAPEEKARGITISTAHVEYETEGRHYAHVDCPGHADYIKNMITGAAQMDVAILVVSATDGAMPQTREHILLAKQVGVKDIVVWINKCDVVEDEEMLSLVDMEIRELLSQYGYDGDSIDAVRGSAVKALEEDADGPWSDKIMELVGALEKIELPMREKDKPFLMSVEDVFSIPGRGTVVTGRIERGVVRVGDKIDIVGLRELQSTVCTGVEMFHKALEAGEAGDNAGILLRGIKKEDVERGQVLSAPGQMKSYKKFKAEVYVLKKEEGGRHTPFFANYQPQFYVRTTDVTGSISLPAGVEMVMPGDNLSIEVALDKPVAIDKGLRFAVREGGRTVGSGIITEILE

SEQ ID NO: 1071 - protein, 173 aa, Silicibacter pomeroyi DSS-3
MVRIIFLIVLLLVGRSVQAGAVSGSFPSIDGGTLSLEEWRGQPVLVVNTASQCGFTGQYAGLQALWERYQSAGLVVLAVPSDDFNQELATAAEVKEFCALNYALTLPMTNILHVKGADAHPFYKAVKAETGFEPAWNFNKVLVAPDGSIAATFGSAVKPDSARMQREIEALLN

SEQ ID NO: 1072 - protein, 255 aa, Oryza sativa (indica cultivar-group)
MVLCSMRKSFKDSLKVLEADIQHANTLASDFSRDYDGACLQMRMSYSPAAQFFLFLVQWTDCSLAGALGLLRILIYKVYVDGTTTLSTHERKASIREFYAVIFPSLMQLHKGISDVDDRRQKAICTERYRRRDEDESKRHVSEIDVEREEECGICMEMNNKVVLPNCSHAMCMKCYRQWRSRSQSCPFCRDSLKRVNSGDLWMLTDDRDVIDMATITRENLRRLFMYIEKLPLVAPDNIFYAYDSHRMFLVVGCG

SEQ ID NO: 1073 - protein, 539 aa, Enterococcus faecalis
MAYQFKLPDIGEGIAEGEIVKWFVKPGDTINEDDTLLEVQNDKSVEEIPSPVTGTVKNIVVPEGTVANVGDVLIEIDAPGHEDNDAAPAAPAQEQTPAQPAAVPTTEAAGGFFQFKLPDIGEGIAEGEIVKWFVKAGDTINEDDSLLEVQNDKSVEEIPSPVTGTVKNIVVPEGTVANVGDVLVEIDAPGHNSAAPAAAAPATNAPKAEASAPAASTGVVAAADPNKRVLAMPSVRQYAREKNVDITQVTATGKGGRVIKADIDAFVSGGSQAAPATEAAATEAAPKAEAAAPKAAPKAFTSDLGEMETREKMTPTRKAIAKAMVNSKHTAPHVTLHDEVEVSKLWDHRKKFKDVAAANGTKLTFLPYVVKALTSTVQKFPILNASIDDAAQEIVYKNYFNIGIATDTDHGLYVPNVKNANTKSMFAIADEINEKAALAIEGKLTAQDMRDGTITISNIGSVGGGWFTPVINYPEVAILGVGTIAQEPVVNADGEIVVGRMMKLSLSFDHRIVDGATAQKAMNNIKRLLADPELLLMEG

SEQ ID NO: 1074 - protein, 138 aa, Enterococcus faecalis
AYEVPLDKAAVTREGTDVSIITYGAMVREAIKAADSLAKDNISAEIIDLRTVAPLDVETIINSVEKTGRVVVVQEAQKQAGVGAMVVSEISERAVLSLEAPIGRVSAPDTIFPFGQAENIWLPNAKDIEAKAREIVEF

SEQ ID NO: 1075 - protein, 372 aa, Rubrivivax gelatinosus PM1
MKPHRIAVIPGDGIGQEVMPEGLRVLEAAAQRFELPLQFDHFDWACAAYWQRTGQMLPDDWFATLSGYDAIYFGAVGWPAVVPDHVSLWGSLLKFRREFDQYVNLRPVRLFDGVPCPLVDRDGRPRKPGDIDFFVVRENTEGEYTHLGGRLFEGTEREIVIQESVFSRHGTDRVMKFAFELAQSRPRKHLTVATKSNGIAISMPWWDERADAMAQGYPEVTVDKQHIDILSARFVLQPTRFDVVVASNLFGDILSDLGPACTGTIGLAPSANLNPQRHFPSLFEPVHGSAPDIFGRAIANPVAMIWSGALMLDFLGGAIGADTARHLQAHDAIVAAIERVLVTGPRTPDLGGHASTTVMGRAIAEQVAAGAP

SEQ ID NO: 1076 - protein, 112 aa, Photorhabdus luminescens subsp. laumondii TTO1
MKKIDAIIKPFKLDDVREALAEVGITGMTVTEVKGFGRQKGHTELYRGAEYMVDFLPKVKIEIVVPDDIVDTCVETIMQTAQTGKIGDGKIFVFDVARVVRIRTGEQDEEAI

SEQ ID NO: 1077 - protein, 476 aa, Desulfovibrio vulgaris subsp. vulgaris str. Hildenborough
MNSDKKGRSLQPRVPMPCQPAHERVGNFHEVALGYSREDAMREASRCLQCKKPKCVKGCPVEVQIPQFIAALAKGDVESAYRTLRETNSLPAVCGRVCPQENQCEGACILGAKGQPVAIGRLERYAADTYMALDACDQLTGRPECPLIDPDLKVACIGSGPASLTVAGYLSSRGFKVTVYEALHELGGVLVYGIPEFRLPKSDIVEKEIAALRQQEVEFVTNWVGGRTFSIDDLFAEGYKAVFIGVGAGLPRFLDIPGENLVGVFSANEYLTRVNLGRAYGFPDYDTPVYRGREVTVFGGGNVAMDAARTALRLGAESVRIVYRRTRDEMPARLEELEHAEEEGVRLELLAAPLGFKGDADGRLTAVTLQRMELGEPDASGRRSPRPVEGAVYDLPTDLAVIAVGTRPNPILLEATPGLTLDRRGYIAVDEATGMTSIPGVYAGGDIVTGAATVILAMGAGRRAAKDIEARLRPAT

SEQ ID NO: 1078 - protein, 396 aa, Xanthomonas campestris pv. campestris str. ATCC 33913
MARAKFLREKLHVNVGTIGHVDHGKTTLTAALTKIGAERFGGEFKAYDAIDAAPEEKARGITISTAHVEYESAVRHYAHVDCPGHADYVKNMITGAAQMDGAILVCSAADGPMPQTREHILLSRQVGVPHIVVFLNKADMVDDAELLELVEMEVRELLSKYDFPGDDTPIIHGSARLALEGDQSDIGVPAILKLVEALDTFIPDPTRDVDRPFLMPVEDVFSISGRGTVVTGRIERGIIKVGDEIEIVGIRDTQKTTVTGVEMFRKLLDQGQAGDNAGLLLRGTKRDDVERGQVLCKPGSIKPHTEFEAEVYVLSKDEGGRHTPFFKGYRPQFYFRTTDITGACQLPEGVEMVMPGDNVKMVVTLINPVAMDEGLRFAIREGGRTVGAGVVAKIIK

SEQ ID NO: 1079 - protein, 485 aa, Clostridium beijerinckii
MPNPKSYQEINQNLNNYYSNKEMSIWRNNFHIEMPFGLINDPNGLSYYDNKFHIFYQWNPFGCEHKTKHWGLVTTTNFINFTKPQMALKPQDWFDRNGCYSGCGLVKDNELKLYYTGNVKGPNGERESYQCLAIYRKDGIIEKHGVIIDKQPNGYTAHFRDPYVFIEDDTYYMILGVQSEDLKGRALIYESIDSVKWNLLGELKTDMKDFGYMWECPNIIRISKGKHAFIFSPQGLEKEELKNQNLYQSGYVIGELDIESVELKNHSRFKELDMGFDFYAPQIFKHNGENIMIGWIGMPDRDSEYPTYEHGWMYSLTMPRVLEYKNNVLYQKPINEMRNLRENELINIKGLILNNYNLALESRSVEIMISIEVEDIESTEVKFKFNDEYILITYDNKRQLCTVDRSNMNIGGKGIRKFKLNSSKELKMNVFIDNSVMEIYYQDGLEVTTLTYYPKSEGLELQIRNDSKITINELNMWNLRSVKYE

SEQ ID NO: 1080 - protein, 164 aa, Triticum aestivum
MATVMAMGSFAGAAVLPRGSAGRFGARSLPALGRRTLIVRAQTNKPKTSTSIWNALAFSGPAPERINGRLAMVGFVTALAVEAGRGDGLLSQLGSGTGQAWFAYCVAVLSVASLVPLLQGESAEGRAGAIMNANAELWNGRFAMLGLVALAATEIITGAPFINV

SEQ ID NO: 1081 - protein, 217 aa, Glycine max
SLSSQTRKPCLPPQLPSHSQPSLSEPDLKLFVGNLPFNVDSAQLAELFESAGNVEVVEVIYDKTTGRSRGFGFVTMSSVEEAEAAAQQFNGYELDGRALRVNSGPPPARNESAPRFRGGSSFGSRGGGPSDSENRVHVSNLAWGVDNVALKSLFREQGNVLEARVIYDRESGRSRGFGFVTFSSPDEVNSAIQSLNGVDLNGRAIRVSLADSKPKQF

SEQ ID NO: 1082 - protein, 710 aa, Xanthobacter autotrophicus Py2
MRSGWFNGMASKKPLPGAKAKGGTAEAPRRRSAVGTQQDPQEKSMAKQSSEATEAPEKETDAPDGPLLDLSDAAVRKMIKNAKRRGYVTYEQLNEVMPSEEVTSEQIEDTLAMLNDMGINVIEAEEAEAEEGAEETETAEEPEEAEGGELAEPAPRAVARSETKSEPAERTDDPVRMYLREMGSVELLSREGEIAIAKRIEAGREAMIAGLCESPLTFQAIIIWRDELTEGRVLLRDIIDLEATYAGPEGKNPPAALGEEAALAPEAGEDGLLGDAPGPEGEDDDMENSMSLAAMEAEIKPKVLETFDRIASSYTKLRRLQDQNVESKLKNETLSPAQERKAKKLKEDLVGDVKSLSLNQARIDALVEQLYEINKRLVGLEGRLLRLADSYGVTRDDFLKNYMGAELDPKWLLRVSKLGTKGWKGFVGHEKDTIHEIRGDIHALATETGLEIAEFRKIVQMVQKGEKEARQAKKEMVEANLRLVISIAKKYTNRGLQFLDLIQEGNIGLMKAVDKFEYRRGYKFSTYATWWIRQAITRSIADQARTIRIPVHMIETINKIVRTSRQMLHEIGREPTPEELAEKLGMPLEKVRKVLKIAKEPISLETPIGDEEDSHLGDFIEDKNAILPIDAAIQSNLRETTTRVLASLTPREERVLRMRFGIGMNTDHTLEEVGQQFSVTRERIRQIEAKALRKLKHPSRSRKLRSFLDN

SEQ ID NO: 1083 - protein, 313 aa, Haemophilus influenzae R2846
MASVVTITLNAAYDLVGRLNRIQLGEVNTVETLGLFPAGKGINVAKVLKDLGVNVAVGGFLGKDNSADFEQMFNQHGLEDKFHRVDGKTRINVKITETEADVTDLNFLGYQISPQVWQQFVTDSLAYCLDYDIVAVCGSLPRGVSPELFADWLKQLHQAGVKVVLDSSNAALTAGLKAKPWLVKPNHRELEAWVGHSLNRLEEIIAAAQQLKAEGIENVIISMGAKGSLWINNEGVLKAEPAKCENVVSTVGAGDSMVAGLIYGFEKGLSKAGTLAFATAVSAFAVSQSNVGVSDLSLLDPILEKVQITMIKG

SEQ ID NO: 1084 - protein, 236 aa, Aspergillus nidulans FGSC A4
MAATGSFSAPPQVLTFDGLLSDFDGTIVDSTDAIVKHWHKIGAELGVDPKTILATSHGRRSIDTLQLYDPAKANWEYVSYIEGLIPKEYGSDAIEIPGARSILAALEETGATWGVVTSGTRALIDGWLGVLKLTHPDVLVVAEDVELGKPDPRCYLLGRKKMGLEHSSSIVVLEDAPSGIKAGKAAGFTVIALTTTHTLEQLQAAGADVIVEDLRSISVKGVVDGRVQLEVRNAFQ

SEQ ID NO: 1085 - protein, 113 aa, Lilium longiflorum
MARSSAVCFLLLLAFLIGTASAITCGQVDSDLTSCLGYARKGGVIPPGCCAGVRTLNNLAKTTPDRQTACNCLKSLVNPSLGLNAAIVAGIPGKCGVNIPYPIRMQTDCNKVR

SEQ ID NO: 1086 - protein, 519 aa, Roseovarius nubinhibens ISM
MTKPDNDRVVIFDTTLRDGEQSPGATMTHDEKLEIAGLLDEMGVDIIEAGFPIASEGDFRAVSEIAKQAQNAVICGLARANLKDIDRCWEAVKHARQPRIHTFIGTSPLHRAIPDLTRDEMAERIHETVTHARNLCDNVQWSPMDATRTEWDYLCRVVEIAIKAGASTINIPDTVGYTAPVESADLIKRLIETVPGADDVVFATHCHNDLGMATANSLAAVAGGARQIECTINGLGERAGNTALEEVVMALKVRNDIMPWHTGIDTTKIMNISRRVSTVSGFVVQPNKAIVGKNAFAHESGIHQDGMLKNAETFEIMRPEDVGISGTSLPLGKHSGRAALRAKLKDLGIEVGDNQLKDIFVRFKDLADRKKEVYDDDILALVSVTGETSNHLELINLKVICGTGPAEAVLEMDVGGEEKSATCQGDGPVDATFKAVREIWPNDAKLQLYQVNAVTEGTDAQATVSVRLEEAGKIATGQSADTDTVVASARAYIHALNRLMVRQSRGGSDIPEVSYKDLT

SEQ ID NO: 1087 - protein, 255 aa, Bordetella bronchiseptica RB50
MSELVKVEIADGIQIITVNRPEARNAINFETAQAMAAALDQLDERDDVRIGILTGAGGTFSAGMDLKAFARTGQRPSLPERGFAALTERPPKKPLIAAVEGYALAGGCEMALSCDLLVAADNAKFGLPEVKRGLVPGAGGMLRLPRRLPYHIAMEIILTGDFLDASRAHALGLVNRLTAAGGALEGALALARVIVENGPLAVQVAKSIVAQSGDWDQETMFDRQRPQVTEIFTSADAKEGATAFAEKRKPVWQGK

SEQ ID NO: 1088 - protein, 438 aa, Mycobacterium tuberculosis H37Rv
MGVPPLAGASRTDMEGTFARPMTELVTGKAFPYVVVTGIAMTTALATDAETTWKLLLDRQSGIRTLDDPFVEEFDLPVRIGGHLLEEFDHQLTRIELRRMGYLQRMSTVLSRRLWENAGSPEVDTNRLMVSIGTGLGSAEELVFSYDDMRARGMKAVSPLTVQKYMPNGAAAAVGLERHAKAGVMTPVSACASGAEAIARAWQQIVLGEADAAICGGVETRIEAVPIAGFAQMRIVMSTNNDDPAGACRPFDRDRDGFVFGEGGALLLIETEEHAKARGANILARIMGASITSDGFHMVAPDPNGERAGHAITRAIQLAGLAPGDIDHVNAHATGTQVGDLAEGRAINNALGGNRPAVYAPKSALGHSVGAVGAVESILTVLALRDQVIPPTLNLVNLDPEIDLDVVAGEPRPGNYRYAINNSFGFGGHNVAIAFGRY

SEQ ID NO: 1089 - protein, 217 aa, Triticum aestivum
APIDEFIEKALEECENDLDSAMKYLLPLHLEPTEYNVDPVYQSPNEMSTEVQVPNEGIVECNNEVPAPIGSVPGAENLQSGITQWVEILMNEMASASSSDDAKARASRVLEAYGKSTSSCIRTEAMQKYQKEILLYKEQFEAVIKENTILKKAVAIQHERQKEHEERNQELQQLNQLVMQYREQIRNLEINNYALSMHLRQSQQGNSIPGHFHRDIL

SEQ ID NO: 1090 - protein, 460 aa, Roseovarius nubinhibens ISM
MEQELATLAATVAELQAKAAATGSIFSETFYYLTIPLMVLIHVGFLAYEMGASRSKNALASGIKNILAFAMIVPFFYYVGWWIYWAFPTGLSGAMGAMEISGFAYANEIASPTSPYMGPNLGDQASGVFWGAFVLFAATTASILSGAVIERIQLTGFIALAVVLGAFIWILAAAWGWHADGWLVTKLGYHDFGASGVVHMIAGFFALGVLINLGPRIGKFNADGSANQIAGHSMPMTLIGLMLIIAGFWGFLMGCVIVPGEAWSWSGKIETSIYGTPMTMSGMTFNVLMAFAGGIIGAWMTTRDPFWMMSGALGGIISAAAGIDLWWPPLAFVIGFIGASMMPFVASFIERMKIDDAVGAFTVHGFLGLWGVLAVGIVGSGYPALFGEADVIEISFMGQLGGAAVMALLGFVPGYAVSFVLKAMGMLRVPESAELLGLDLTKVPSSAYPESIHPSVSPAE

SEQ ID NO: 1091 - protein, 282 aa, Francisella tularensis subsp. holarctica
MILIDGKSLSKDLKERLATQVQEYKHHTAITPKLVAIIVGNDPASKTYVASKEKACAQVGIDSQVITLPEHTTESELLELIDQLNNDSSVHAILVQLPLPAHINKNNVIYSIKPEKDVDGFHPTNVGRLQLRDKKCLESCTPKGIMTMLREYGIKTEGAYVVVVGASNVVGKPVSQLLLNAKATVTTCHRFTTDLKSHTTKADILIVAVGKPNFITADMVKEGAVVIDVGINHVDGKIVGDVDFAAVKDKVAAITPVPGGVGPMTITELLYNTFQCAQELNR

SEQ ID NO: 1092 - protein, 419 aa, Francisella tularensis subsp. holarctica
MKSNRRVVVTGLGMVTPLGNDVPTTWANILAGKSGVETITGFDTPAPDISEFKVRFAARIKNFDVDALVGKKDAKRVDPFCYYGIAAANEALKDAGIDKVSEEDSYKFGVCVSSGIGGIETLETTKAVIDTKGPSKISPFCIPSSIVNMLSGIISINHGLRGPNIPIVTACTTGTHNIGMAARLIASGDADAMLAGGSEKASNAIGMGGFAAARALSTRNDDPQGASRPWDKDRDGFVLGDGAGVVVLEEYERAKARGAKIYAEVVGFGMSADGYHMTMPYAPGQERCIQNALADAGLENNPDAIDYVNAHGTSTPLGDVQESQVVEKVIGQYRKDLVMSSTKSMTGHLLGAAGAIESIFSVLAIRDQVAPPTINLHNLDDGCNLDYAANAAKKMKIDYVLNNSFGFGGTNGSVIFKKI

SEQ ID NO: 1093 - protein, 261 aa, Candida albicans SC5314
MLTLAIGDLFVPERAVDLPSKFRKLLAPQPNNTPSNSKINQVICLGNITNSSTILQFLTNISPQFNLVKGEFDNPVVLSQQLSSLNKSSNIPLYNRFVHDNLKIGYTNGFQVIPRGDPLALSAFARELDVDVLIWGGTHKVEAYTLDGKFFINPGSATGAFNFDWPENDEEEREEADKSQDDDEATDKESHDTEEAEPKVENETSTSASDDFKQTLHEVSEINSNIPSFCLLDTHGSTCILYIYTQIDGEVKVDKVTYTKD

SEQ ID NO: 1094 - protein, 203 aa, Cyanobium sp. PCC 7001
VQSKFRLVVSIAKKYMNRGLSFQDLIQEGSLGLIRAAEKFDHEKGYKFSTYATWWIRQAITRAIADQSRTIRLPVHLYETISRIKKTTKTLSQEFGRKPTEEEIAESMEMTIEKLRFIAKSAQLPISLETPIGKEEDSRLGDFIEADIENPEQDVAKNLLREDLEGVLATLSPRERDVLRLRYGLDDGRMKTLEEIGQIFDVT

SEQ ID NO: 1095 - protein, 315 aa, Roseovarius nubinhibens ISM
MSARLLRVTEVAPLTPLVTRFRFEDPDGAPLPLFSGGAHVVVEMPDEGVLRRNAYSLISAPDDGSGYEIAVRREDTGRGGSRYMHSQVTPGTLMTVTSPVNLFSLDLRARKHVLIAGGIGITPFLSQLRQLARMQAPFELHYAARSRAEAAGLAFLPSAPNIHLHISDEGNRMDLGAILTGQPLGTHVYTCGPEGLITSVEQAAARLNWPKAALHSEAFLSPPPGKPFDVTLARSGRTLTVGPNQSLLEALEAAEIDIPWSCRGGACGQCETAVTACHGRIDHNDHWLSDDDRAAQQKIMPCVSRFQGQHLAIDR

SEQ ID NO: 1096 - protein, 519 aa, Cryptococcus neoformans var. neoformans JEC21
MFRSLVPVTIAGLAYVLQSLAQSTTSSAASVPTGVPIDGDYSGPYRPRVHFSPPKGFMNDPNGLHKDGNGTWHLYYQYNPTDIVAGNQHWGHATSPDLYHWTNQPIALFPPNSSSGVFSGSAVIDTNNTSGFFPDQDNGVVAIYTLNTPTAQVQQIAYSKDGGYSFEEYEGNPVLDVGLTQFRDPKVIWYEDHWVMVVAFPVDYVIGVYTSPDLKSWTHASNITHVGFLGLQYECPNMVSIPIANSSDSSWVLTISINPGSPLGGSITQYFPGEFNGTHFTPYDSAARLTNFGKDDYAGQFFYDEPVSIGWASNWQYTNFVPTGEEGWRSAMTLPRKNYFTNITAAGWDLVQEVYDLSPVLGDQLDTQQLVNKSSTATITEAAYIDVNFTIPDDASFAEYASLNFTVSTNSSGETVKGGYFFAEPYSIAAWLDRRDTKAFESPFFTDKFSVAPAQQAKRLQVIIDRSLIEIYIDNGALVGTMVAFPEEPFTKLEVTTAGLPDGMEVEVGVWDLKDSWTS

SEQ ID NO: 1097 - protein, 752 aa, Zea mays
MELDRLLLDQLAGEALRELLHAVQGTLFCRSTAERLRRSVEPLLPLVQGLGPHAQRSAGDLGELAARVREALDLARRAATSPRWNVYRSAQLSRRMEAADRGIARWLERHAPAHVIGNVRGLRDESHARIARLERRVDEIAASAAQPPPPALSVPVAPHKGVTMPMEVPTHKGMAMPMPMPVPVQAVPAKAGVVAMDMDLTEGHENEGMVGAGVKVAKEKVKEMVMSGGGGGWEVVGISGMGGSGKTTLAMEIFRDHKVRAYFNDRIFFETISQSANLEAIKMKLWEQISGNMVLGAYNQIPEWQLKLGPRDRGPVLVILDDVWSLPQLEELTFRFPGCKTLVVSRFKFPTLPPKIWLSAKNRLSRGEAISDSHETKLLERMAASVECLSEKVFLTLLFYTCRNKAGDLYSSYHDYSVTQHDVLRDLALHMSGRDPLNKRRRLVMPRREETLPRDWQRNKDAPFEAQIVSIHTGEMKESDWFQMSFPKAEVLILNFASSLYYLPPFIATMQNLKALVLINYGSSSSSAALDNLSAFTTLSGLRSLWLEKIRLPPLPKTTIPLRNLHKISLVLCELNSSLRGSTMDLSTTFPRLSNLTIDHCIDLKELPPSVCEIGSLETISISNCHDLTELPYELGRLRCLSILRVYACPALWRLPASVCSLKRLKYLDISQCINLTDLPEELGHLTSLEKIDMRECSRLRSLPRSSSSLKSLGHVVCDEETALLWREAEQVIPDLRVQVAEECYNLDWLAD

SEQ ID NO: 1098 - protein, 334 aa, Ralstonia solanacearum
MSSNARPTSVESPLAAQAPTKLVIASRESRLAMWQAEYVRAALQKYYPACDVSILGMTTRGDQILDRSLAKVGGKGLFVKELEVALAEGRADLAVHSLKDVPMELPPGFVLSAILEREDPRDAFVSNDYADLAALPAGAVVGTSSLRREASLRARFPHLVIQPLRGNLDTRLSKLDRGDYAAIILAAAGLKRLGLSERIRAVIAPETSLPAAGQGALGIESRVDRHDVQAWLAPLHHAPTALAVTAERAVSRQLGGSCQVPLAAFAQWTDAGALRLRAFVASPDGRRKLAAEAEATPATPAEAEALGARVAQQMLDGGAHDILATLGADAPPAT

SEQ ID NO: 1099 - protein, 357 aa, Anabaena variabilis ATCC 29413
MRKKIGILTSGGDCPGLNCVIRAVVSHATLTYDWEVFGIPYATQGLLERQAIALNMHGWDLRGIDPLLNMGGTILGTINKGDTLAHVDEMLASYEALALDALIVIGGDGSLGILHELASRGNWNLVAIPKTIDSDVALTERAVGFDTAVNTIVDALNRLTFTAASHDRVMIVEVMGRSAGHLALHAGIAGGADVILIPEISYTISGLCQYIAELRDRWQRKFAIVVVAEGAKLCLEDVQENIASACVSPKCGRGQYIAEQIARCSKNLIDTRVSVLGHIQRGGIPSALDRLTATVFGKTAVDLVAQGKFGQMVAWQNGEAIPVPIQDVVAQSPLHVNPQGSLVQSARCLGIYVGEKT

SEQ ID NO: 1100 - protein, 190 aa, Xylella fastidiosa 9a5c
MHTHVSHAFASKLSLLSLDRFPMSSIYTFTFTRLDGRPQALADWRGQVLLLVNVASRCGFTPQYAGLEMLWQRYRDAGLIVIGFPCDQFAGQEPGDEAKIAEFCTLNYGVDFPMAAKIKVNGADAHPLWQWLKHRRRGLFGMAAIKWNFTKFLIGRNGQPIARYSPIKSPEQLEVHIVRALGEEGGGNTH

SEQ ID NO: 1101 - protein, 985 aa, Ralstonia solanacearum
MTQSAARRASSRATPARKTPPAPASQTPAPSPGGTAGTALGPTSRRSSGSAAAKDQPLKEDIRFLGRLLGDVLREQEGAAAFETVETIRQTAVRFRRDGDRQAEQELDRLLKTLSRDQTTSVVRAFSYFSHLANIAEDQHHNRRRRVHALAGSSPQPGSLLRALLSAADEGLSGDALRRFFDAALIVPVLTAHPTEVQRKSILDAQREIARLLAERDAPLTVRERERNVTLLRAHVTKLWQTRMLRTTRLMVADEIENALSYYQTTFLREIPALYRELEEDVATVFPRRGARGEPAPLPAFFQMGSWIGGDRDGNPFVTAQTLRHAAQRQASVILTWYLDEIHALGAELSMSTLLVDVSADLLALAERSPDHSEHRADEPYRRALIGVYARLAATCRELTGEDAGRHAVGPAPAYTRAEELRADLQIVIDSLAAHHGEALADARLASLARAIDVFGFHLASIDLRQVSDVHEATVAELLRVAGVEGAYAALSEADKRTLLLRELQQPRLLTLPFHTYSETTASELDIFRAAREVRARYGSRIVRNYIISHTETLSDLLEVMLLQKEAGMFRHGTNGSGGAGLDVMVIPLFETIEDLRNAPQIMGELLALPGFDAVLAAQGNEQEVMLGYSDSNKDGGFLTSNWELYKTELALVELFERKGVRLRLFHGRGGTVGRGGGPTYQAILSQPPGTVNGQIRLTEQGEIISSKFANPEIGRRNLETIVAATLEATLLPTRNRPKGLEEFEAAMQALSDHAFSAYRHLVYETPGFKDYFFATTPITEIADLNLGSRPASRKLMDRKQRRIEDLRAIPWGFSWGQCRLLLPGWFGFGSAVQRWLDEAGSAKAKAARLATLKRMHKQWPFFANLLSNMDMVLSKADLNVASRYAQLCEDRKLRNAVFSRISAEFTLTEQVLGAITGQSERLADNPLLARSIKNRFPYLDPLNHLQVELLKRFRSGKAGSNDARVRRGIHLSINGIAAGLRNSG

SEQ ID NO: 1102 - protein, 249 aa, Xylella fastidiosa 9a5c
MTRKLVLLRHGQSQWNSMNRFTGWVDIGLTEQGHQEATMAGHLMKEEGLEFDVAHTSLLKRAIHTLQDALKALDQDWLPIYKSWRLNERHYGALQGLDKIDTAAKHGEEQVNIWRRSYDIQPPPIDLDDPSHPMRDRRYAALDRKVLPVTESLKNTLERVLPYWNDAIAPQLNDNKTVLISAHGNSLRALYKYLNQESDEKILNVNIPTGIPLLFELSDTLQVVSYRYLGDPDAAQRASEMVANQGKAK

SEQ ID NO: 1103 - protein, 369 aa, Oryza sativa
MEQGQGDRYWCHHCEEVIEPVEPDMKCPSCDSGFVEEMGSAGFEPSTNLRSDRISLWAPLLLGMMGGSSRRARRLRRQIMEDDDDDDDDEDDEDDSDHELEDLFRRQRRGSSLVRLLQTLRDDLRGLDDIGRDSDRDRERERRERERLRERERERERMRERERERRRERTESLILINSNNEAIILQGTFGPDDNQDDSSNTSSGVSLGDYFLGPGLDILLQHLAESDLNRSGTPPAKKEAVEALPTVNIQEVLGCSVCLEDFEMGTEAKEMPCQHKFHSQCILPWLELHSSCPICRFQLPTEESKNPCESAGGIVSVNDDGDDAGTSSDVDSANQPGSPIFSALSALFSNPSSSSSSSSDDNAPHSSES

SEQ ID NO: 1104 - protein, 955 aa, Ustilago maydis 521
MASLATTPGGAKLIDGTALAKQVRARVAERIAELKQQHTSFQPHLCIMQVGAMSASTTYIRMKKLAAEECGMRYTHVQLPEGSSEAEIIKRVGELNEDISVDGILVQLPLGDHIDSDAERRVTEAISPEKDVDGFHALNIGHLSSKACNPLFFPCTPAGCIKLLENAGITNMAGLRAVVIGRSDIVGNPVASLLRSRDCTVTQVHSKTVDLQAHLSQADIVIAAMGKPHFIQGEWIKKGAVVIDVGTNFVDDATKKSGYRLVGDVDFDAASKVASAITPVPGGVGPMTVAMLMENVLISAERSLADGRALGIGRGVVRPNPIKPLAKVPSDIEVARSQTPKPITQVAREIGLISTELEPYGSVKAKVDLSVLKRLAHRRNGKYIVVAGITPTPLGEGKSTTTIGLAQALGAHLGKAAFACVRQPSQGPTFGIKGGAAGGGYSQVIPMEEFNLHLTGDNHAVQAANNLLAAAIDTRMFHEATQKDAALFDRLCPKKKGVRTFAPIMFRRLKKLGIDKTNPDDLTDEEKSRFARLDIDPETVTWRRVTDTNDRYLRDITVGQAATEKGITRRTGFDIAVASECMAVLALSRDLKDMRERLGRMVIGTSRAGDPVTADDIGVGGALAILMKDAIKPNLMQTLEGTPVFVHAGPFANIAHGNSSILADAIALKLAGIEQGEPIERTGYVITEAGFGADIGMEKFCNIKCRESGLVPDAAVIVATVRALKTHGGGPEVSPGKPLSEVYLEENLEILEKGCVNLAKHIANAKKFGLKVIVAINQFTTDTPAELELVRQKALEAGADDAVPANHWALGGEGAIDLAKSVINQLEGTASQFNFLYEPTLPITQKIEAIAKEMYGADGIELSEAANKQIQVIEKNGFGNLSICMAKTHLSLSADPTKKGAPSGFTIPVREVYASVGAGLLVVMCGAMSKMPGLNTRPGYYDMDLTEDGEVIGLS

SEQ ID NO: 1105 - protein, 91 aa, Prochlorococcus marinus str. NATL2A
MSISVTSPCPESTFDELGIKNWPIWTCDASSFDWTYDDKETCLLLEGEVTVTPNGGESVKFGAGDLVVFPAGIDCRWDVHKAVRKHYRFGD

SEQ ID NO: 1106 - protein, 308 aa, Prochlorococcus marinus str. NATL2A
MVRLNEIKMQDGKIFLITGANSGLGYETSKFLLERGATVIMCCRDLLKGEKAKKELLKFKFSGKIELVELDLSDLINVKKFAESIKNTFDHLDVLINNAGIMAPPKTLSKQGFEIQFAVNHLAHMFLTLELLPMLEEKNNSRVVTVTSGVQYFGKIQWEDLQGNLKYDRWASYAQSKLANVMFGLELDSKLKETNSKTSSLLAHPGFARTNLQPKSVEANQSWQEELAYKLMDPMFQSAKMGALPQITAATLTSASGGEQYGPRFNFRGFPKICRNAPKALNQTSRKKLWDISEKLIKDFDTLSKQSK

SEQ ID NO: 1107 - protein, 506 aa, Oryza sativa (indica cultivar-group)
MDSRPLLPNEEEEEALPGVSDFRGRPVYRATSGGWRSALFVAVLELAGSFAYFGVSANLITYLTGPMGQSNASAAAAVNAWSGAACMLPLLGAFLADSFLGRYPSILLACTLYLLGYGMLTVVASKSQVGILYVSLYLVALAQGFDKPCGLALGAEQFDPEHPRESASRSSLFNWWYFSMATGITVSIATVSYIQENVSWGVGFAIPFAVVSCAFLLFLLATPTYRLSSAAASPLLSLRHYKQSSEEARRMLRLLPIWATCLAYGVAYAQIMTLFNKQGRTLDRHIGHAGLELPPAALQTLGPVTIMVSVPIYDRAVVPMLRRMTGNPRGLTTLQRTGTGMALSLAAVAVAAAVEGRRLETVREQRPAMSWAWLVPQYVAMGVADVLAVVGMQEFFHGEMPEGMRSLGLALYYSVMGIGGFISSALISALDGITRRDGGDGWFADDLNRGHLDYFYWLLAGVSAAELAMFLCFARSYAYRNANKGPLLLVVPSNTPVSPCTNHHHA

SEQ ID NO: 1108 - protein, 396 aa, Solanum tuberosum
MDASAPQMDTMMPDVAAPAVQQPPPPPQPLPGMDNIPATLSHGGRFIQYNIFGNIFEVTAKYKPPIMPIGKGAYGIVCSALNSETNENVAIKKIANAFDNKIDAKRTLREIKLLRHMDHENIVAIRDIIPPPQREAFNDVYIAYELMDTDLHQIIRSNQGLSEEHCQYFLYQILRGLKYIHSANVLHRDLKPSNLLLNANCDLKICDFGLARVTSETDFMTEYVVTRWYRPPELLLNSSDYTAAIDVWSVGCIFMELMDRKPLFPGRDHVHQLRLIMELIGTPSEAEMEFLNENAKRYIRQLPLYRRQSFTEKFPHVNPAAIDLVEKMLTFDPRRRITVEDALAHPYLASLHDISDEPICMTPFNFDFEQHALTEEQMKELIYRESIAFNPEYQRM

SEQ ID NO: 1109 - protein, 394 aa, Rhodospirillum rubrum ATCC 11170
MAVSPLHGRRGTVILDLSWSFDSPVCQQVRCVHGSLVCVSCLSPPFPDGRGDLIMAVFPFSAIVGQDEMKLALLIAAVDPSVGGVMVFGDRGTGKSTAVRALAALLPPMQATVGCPYGCDPEADAKTCVPDCPRHGPGGAQAESRPVPVIDLPLGATEDRVVGALDLERALARGEKAYEPGLLARANRGFLYIDEVNLLEDHLVDLLLDVAASGVNVVEREGLSIRHPARFVLVGSGNPEEGELRPQLLDRFGLSVEVRTPDQLATRVLVVRRRDSYESDPDAFVAEWQAADGDERNRISAAREGLKSISVSDDIVEKCAELCLKLGTDGLRGELTLVRAARALAALQGDKAVTLDHLKRVAPSALRHRLRRDPLDEAGSTIRVQRGIEAVLGS

SEQ ID NO: 1110 - protein, 605 aa, Rhodospirillum rubrum ATCC 11170
MTAPAAFNPLTWDEAARAAAMVAVDPVGLGGAVIRALPGPPRDRWLAYLRELLPADAPLRRMPLHISDDRLLGGLDLAATLRAGRPVAQRGLLAEAHNGIVVLAMAERAPVGTVAQLCSVIDCGEVRTERDGLGLRSPAHLGVVALDEGLEEDEHPLASLVDRLAISLDLGPLRDLSDDGELPDADMVQAARENLGAVTIPETLIETLCATAAAFGILSLRVPLFALRVARTAAALDGRTAVEDADIMTAVRLVLAPRALVLPMPPEDDAEDQPPPPPPPEEPPESEPEQKKDQDDQGGPTLEEMAVAAAAAIMPAGMLARLRAAGGLRRKVTPPGKAGALKAAKTRGRPAGTRPGAPGPGARLSVIDTLRAAAPWQRVRRDEEAARLGDEGVPPAEGGPAGPRVLVRPDDFRVTRLRQRAQTTTIFVVDASGSSALHRLAEAKGAVELLLADCYVRRDQVALVAFRGARADVLLPPTRSLVRAKRSLQRLPGGGGTPLASGLDAATALAELCQRRGETPVLVVLTDGRANVGRDGTGGRAKAEADAQSAARALRAMGLGVLLVDTAPRPDPRARKLAEELDACYLALPHADAMAISQGVRAAMT

SEQ ID NO: 1111 - protein, 394 aa, Solanum tuberosum
MDGSAQQTDTVMSDAAAGQQPATPPLPMAGMENIPATLSHGGRFIQYNIFGNIFEVTAKYKPPIMPIGKGAYGIVCSALNSETNEHVAIKKIANAFDNKIDAKRTLREIKLLRHMDHENIVAIRDIIPPPQREAFNDVYIAYELMDTDLHQIIRSNQGLSEEHCQYFLYQILRGLKYIHSANVLHRDLKPSNLLLNANCDLKICDFGLARVTSETDFMTEYVVTRWYRPPELLLNSSDYTAAIDVWSVGCIFMELMDRKPLFPGRDHVHQLRLLMELIGTPSEAEMEFLNENAKRYIRQLPLYRRQSFVEKFPHVNPAAIDLVEKMLTFDPRRRLTVEGALAHPYLTSLHDISDEPVCMTPFSFDFEQHALTEEQMKELIYREGLAFNPEYQHM

SEQ ID NO: 1112 - protein, 380 aa, Photobacterium sp. SKA34
MFEPMMEMSDEAVIKVIGVGGGGGNAVDHMVRESIEGVQFISVNTDAQALRKTSVSTVIQIGGDITKGLGAGANPQVGRDSALEDREAIKKELEGSDMIFIAAGMGGGTGTGAAPIIAEVAKELGILTVAVVTKPFSFEGKKRMAFAEQGIDELSKHVDSLITIPNEKLLKVLGRGITLLDAFAKANDVLKNAVQGIAELITRPGMINVDFADVRTVMSEMGHAMMGSGVASGDDRAEEAAEMAISSPLLEDIDLAGARGVLVNITAGMDMRLDEFETVGNTVKAFASDNATVVIGTSLDPDMTDELRVTVVATGIGKEVKADITLVTSSKPVQATVAQEKTVVAEEKTVTNNDGQATAAKPQADHDYLDIPAFLRKQSD

SEQ ID NO: 1113 - protein, 374 aa, Arabidopsis thaliana
MMTLQSSPMSVLTEDLVEDILSRVPATSLVRLRSTCKQWNAILNDRRFIKKHFDTAEKEYLDMLLRSLRVSSMSVNLHGLHDNIDPSIELKRELNLKGLLCNSGKVESFEVFHCNGLLLFTNTSTIVVWNPCTGQTKWIQTESANTRYHKYALGYENKNLCRDYKILRFLDDGTNFELEIYEFNSSSWRVLDSVEIDFELDIGSQGMSVKGNTYWIVIDDHEVDGELVNCFLTSFDFTRERFGPHVCLPFQTSWYSDVISLSSVREERLSVLFHEEDSLTMEIWVTNDITDTIVTSWSKFLRVDLYTHRFYNGVTFFIDEENKAAVFSEDVPDDSDDIHSIVYIIGQDRLRIVDLEDGPFWPQMFCYVPSLVQI

SEQ ID NO: 1114 - protein, 381 aa, Arabidopsis thaliana
MMSNLPLDLVEEILSRVPATSLKRLRSTCKSWNNCYKDQRFTEKHSVIAAKQFLVLMLKDCRVSSVSVNLNEIHNNIAAPSIELKGVVGPQMQISGIFHCDGLLLCTTKDDRLEVWNPCTGQTRRVQHSIHYKTNSEFVLGYVNNNSRHSYKILRYWNFYMSNYRVSEFEIYDFSSDSWRFIDEVNPYCLTEGEVSLKGNTYWLASDEKRDIDLILRFDFSIERYQRLNLPILKSDYETEALSVVREKQLSVLLKRNDTLEREIWVTTNDKIDHTTKNLLWIKFLAIDQRTCYHWSCVSFFIDEEKKMAVFCDGYIGGINETSRRMFYIIGEDKYYRELYVGDSPIRSHRPFVFNYVPSLVQIPQATVIPKRRRRKRKNRN

SEQ ID NO: 1115 - protein, 396 aa, Xanthomonas campestris pv. campestris str. ATCC 33913
MARAKFLREKLHVNVGTIGHVDHGKTTLTAALTKIGAERFGGEFKAYDAIDAAPEEKARGITISTAHVEYESAVRHYAHVDCPGHADYVKNMITGAAQMDGAILVCSAADGPMPQTREHILLSRQVGVPHIVVFLNKADMVDDAELLELVEMEVRELLSKYDFPGDDTPIIHGSARLALEGDQSDIGVPAILKLVEALDTFIPDPTRDVDRPFLMPVEDVFSISGRGTVVTGRIERGIIKVGDEIEIVGIRDTQKTTVTGVEMFRKLLDQGQAGDNAGLLLRGTKRDDVERGQVLCKPGSIKPHTEFEAEVYVLSKDEGGRHTPFFKGYRPQFYFRTTDITGACQLPEGVEMVMPGDNVKMVVTLINPVAMDEGLRFAIREGGRTVGAGVVAKIVK

SEQ ID NO: 1116 - protein, 185 aa, Xanthomonas campestris pv. campestris str. ATCC 33913
MSLNRLLVLVFAGLFSTAAVAAGTSVLDLDYRPLAGKAPINLNRSYGGKVVMVVNTASKCGFTPQYEGLEALNQRFGSRGFTVLGFPSNDFQGQEPGSEKQIQEFCTLTYGVKFPMFEKVHVLGAQATPLYQRLTRETGVAPGWNFHKYLIGRNGHVVAQFPSKVKPDDPQVLAAIERELKAPAR

SEQ ID NO: 1117 - protein, 357 aa, Thermoanaerobacter tengcongensis MB4
MIGLETDVQQFAAIKVIGVGGGGGNAVNRMVEAGVKGVEFIAINTDKQALSLSKAETKIQIGEKLTKGLGAGANPEIGKKAAEESREEIERAIKGADMIFITAGMGGGTGTGAAPVVAEIAKELGILTVGVVTKPFTFEGRKRMAQAEMGIEDLKKYVDALITIPNDRLLQVVEKKTSMLDAFKLADDVLRQGVQGISDLIAVPGLVNVDFADVKTIMVNTGLAHMGIGIASGENKATEAAKQAIHSPLLETSIEGSKGILLNIAGGPNLTIFEVNEAANFIYEAADPDANIIFGAVIDEALEDQIRITVIATGFEKNSKAKEEPKKKEVKGVDVKLEDILDNDDLDIPTFLRRGRR

SEQ ID NO: 1118 - protein, 488 aa, Borrelia burgdorferi B31
MSDFIASKEDDYSKWYLDIVQKAKLADYSPVKGCMVIMPYGYSIWSKIQSILDKKFKETGHENAYFPMLIPYSFLEREKDHIDGFSPEFAIIKDAGGESLAEPLVLRPTSETIIWNMYSKWIKSYRDLPLKINQWANVVRWEKRTRPFLRTTEFLWQEGHTAHATEEEALEETLLILDVYKRFIEDYLAIPVFCGKKSEKEKFAGAVSTYSIEALMQDKKALQAATSHYLGLNFAKAFDVKFQDKDGKMRHVFASSWGVSTRLIGALIMVHSDEKGLVLPPRIAPIEIIVIPIFKKEDEINKKILDYSDCVVDALKKAEFRVEIDKDVRSSPGFRFSSAEFKGIPIRLEVGINDVLLNSVTISRRDKDRKFKYQISLDSLISKVKVELDLMQKDLFQRALNFRILNTKEIFRSSKDSYETFKAYVNDYSGFVLSCWCGSLNCENIIKNETKATIRCIPDDFKARDLTGMTCIYCSSKAKYFVLFAKSY

SEQ ID NO: 1119 - protein, 403 aa, Triticum aestivum
MASIRRPHSPARAQHLLRHNHPFSTASPPSSPLRHASSASSSAAAPSSSSSSPRKPPGHPHPFLFFTRRPLPRFAAFFLLGSFIGLLHLLSHLPLHHGLPAHPSSSPHPTHLHHHLHPMTQQQQQYLADDAATAAGGGEEGDASDKLLIIITPTRARASQAYYLSRMGQTLRLVRPPVLWVVVEAGRPTPEAALALRRTAVMHRYVGCCDALNASASAAADFRPHQLNAGLEVVENHRLDGVVYFADEEGVYSLPLFDRLRHIRRFGTWPVPTISEGGHDVVLEGPVCKQSQVVGWHTSGGANKLQRFHVAMSGFAFNSTMLWDPRLRSHRAWNSIRHPETVEQGFQGTTFVEQLVEDESQMEGIPADCSQVMNWHVPFGSESPVYPKGWRSAANLDVIIPLK

SEQ ID NO: 1120 - protein, 452 aa, Triticum aestivum
MAAAAVLRGGSRRVLAYPALRAAVISGPAALPDVPAAAGPQPPPPSPLAAGLWARSMATFTRTKPHVNVGTIGHVDHGKTTLTAAITKVLAEAGSAKAVAFDEIDKAPEEKARGITISTAHVEYETAKRHYAHVDCPGHADYVKNMITGAAQMDGGILVVSAPDGPMPQTKEHILLARQVGVPSLVCFLNKVDAVEDEELLELVEMELRELLSFYKFPGDDIPIIRGSALSALNGTNEEIGKNAILKLMDAVDSYIPDPVRVLDKSFLMPIEGIFSIQGRGTVVTGRIEQGVIKTGEDVEVIGLTESGPVKTTVTGVEMFKKMMDHGEAGDNVGLLLRGLKRGDVERGQVVCKPGTVKTYKKFEAEIYVLTKDEGGRHTAFFSNYSPQFYFRTADICGKIELPPDVKMVMPGDNVTAIFELMLPVPLEPGLRFALREGGRTVGAGVVAKVMS

SEQ ID NO: 1121 - protein, 261 aa, Xylella fastidiosa Ann-1
MAQDKFKRTKLHVNVGTIGHVDHGKTTLTAALTKVGAERFGGEFKAYDAIDAAPEEKARGITISTAHVEYETEVRHYAHVDCPGHADYVKNMITGAAQMDGAILVCSAADGPMPQTREHILLARQVGVPYIVVFLNKADMVDDAELLELVEMEVRELLSKYDFPGDDTPIVRGSALKALEGDQSEIGVPAIIRLAEALDTHIPNPERAIDRPFLMPVEDVFSISGRGTVVTGRIECGVIKVGDEVEIVGHSSHAQEDCYGC

SEQ ID NO: 1122 - protein, 359 aa, Magnetococcus sp. MC-1
MAKKVLVLPGDGIGQEITAEAVKVLNWAIQNGADITLEEGLIGGTAYDATGTPLPAETITQAKAAQAVLLGAVGGTKWEPLDISVRPEKGLLGIRKALDLYCNLRPAAVYPQLADASTLKKEVVAGIDIMVVRELSSGIYFGQPRGVEDLGDGRKKGFNTLVYTTDEIERIARKAFEAARKRSNRVCSVDKANVLESTELWREVVSDLHKREYADVELSHMYVDNAAMQLIRNPRQFDVIVTTNMFGDILSDAASMLTGSIGMLPSASLGDQFALYEPIHGSAPDIAGKGIANPLATILSVAMMLRYSLELPQLADGVEAAVVTVLDQGLRTADIMQPGMTQVGTAQMGDAVLAALNNA

SEQ ID NO: 1123 - protein, 112 aa, Synechococcus sp. RS9917
MTIYIGNLSFQAEQEDLLDLFNQYGEVKSASLPLDRETGRKRGFAFVEMNNDSDEQKAIDDLQNVEWMGRMIRVNKATPRERTGGGGGGYGGGGGNRGGGGGGGGYGGGNRW

SEQ ID NO: 1124 - protein, 124 aa, Escherichia coli W3110
MILVVDDHPINRRLLADQLGSLGYQCKTANDGVDALNVLSKNHIDIVLSDVNMPNMDGYRLTQRIRQLGLTLPVIGVTANALAEEKQRCLESGMDSCLSKPVTLDVIKQTLTLYAERVRKSRDS

SEQ ID NO: 1125 - protein, 354 aa, Bacillus cereus E33L
MEKRIVCLAGDGVGPEVMESAKEVLHMVERLYGHHFHLQDEHFGGVAIDLTGQPLPQRTLAACLASDAVLLGAVGGPRWDGAKERPEKGLLALRKGLGVFANVRPVTVESETAHLSPLKKADEIDFVVVRELTGGIYFSYPKERTDEVATDTLTYHRHEIERIVSYAFQLASKRKKKVTSIDKANVLESSKLWRTVTEEVALRYPDVELEHILVDAAAMELIRNPGRFDVIVTENLFGDILSDEASVLAGSLGMLPSASHAEKGPSLYEPIHGSAPDIAGKNKANPIAMMRSVAMMLGQSFGLTREGCAIEEAISAVLKSGKCTEDIGGTETTTSFTKAVMQEMEEQALVGRGR

SEQ ID NO: 1126 - protein, 102 aa, Taraxacum officinale
RRVKFTPTYLQSAGLNLKHVYIRSLLASICFHAYQQVAYMILQRVSPVTHSVGNCVKRVVVIVSSIFFFRTPISLINSIGTGIALAGVFLYSQVKRIKPKTT

SEQ ID NO: 1127 - protein, 506 aa, Bacillus cereus E33L
MKKILFMDTTLRDGEQSPGVNLNEQEKLQIARQLERLGIHVMEAGFAAASEGDFQSVKRIANTIQNATVMSLARAKESDIRRAYEAVKGAVSPRLHVFLATSDIHMKYKLCMSKEDVLDSIYRSVTLGKSLFPTVQFSAEDATRTARDFLAEAVEVAIRAGANVINIPDTVGYTNPEEYYSLFKYLQESVPSYEKAIFSCHCHDDLGMAVANSLAAVEGGALQVEGTINGIGERAGNAALEEVAVALHIRKDFYKAEPSMTLKEIKATSTLVSRLTGMVVPKNKAIVGANAFAHESGIHQDGVLKEVTTYEIIEPALVGESQNLFVLGKHSGRHAFTEKMKELGYEFTNDERDAVFEAFKKLADRKKEITEEDLRALMLGEAAFAAQQYNITQLQVHFVSNSTQCATVVLKDEEGNVFEDAATGSGSIEAIYNAIQRILGLECELADYRIQSITQGQDALAHVHVELKEGAHQVSGFGVAQDVLEASARAYVHAAGKLKSFIQLVK

SEQ ID NO: 1128 - protein, 131 aa, Bordetella bronchiseptica RB50
MRLLHTMLRVGNLDKSIDFYTSVLGMRELRRKDYPDGRFTLAFVGYQDESEAAAIELTHNWDTEKYDLGTGYGHIAIEVDNAYEACDKVKEKGGKVTREAGPMKHGTTVIAFVEDPDGYKIEFIQKKGRND

SEQ ID NO: 1129 - protein, 411 aa, Pseudomonas putida KT2440
MALIVQKFGGTSVGSIERIEQVAEKVKKHREAGDDLVVVLSAMSGETNRLIDLAKQITDQPVPRELDVIVSTGEQVTIALLTMALIKRGVPAVSYTGNQVRILTDSSHNKARILQIDDQKIRADLKEGRVVVVAGFQGVDEHGSITTLGRGGSDTTGVALAAALKADECQIYTDVDGVYTTDPRVVPQARRLEKITFEEMLEMASLGSKVLQIRSVEFAGKYNVPLRVLHSFKEGPGTLITIDEEESMEQPIISGIAFNRDEAKLTIRGVPDTPGVAFKILGPISASNIEVDMIVQNVAHDNTTDFTFTVHRNEYEKAQSVLENTAREIGAREVIGDTKIAKVSIVGVGMRSHAGVASCMFEALAKESINIQMISTSEIKVSVVLEEKYLELAVRALHTAFDLDAPARQGE

SEQ ID NO: 1130 - protein, 170 aa, Triticum aestivum
MRPGAEYPMAHGPAAAPRSTWQTPVPYLFGGLATMLALIALSLLTLACSYWKLSGGLAGPDEDQPPGSDGEKGSAAGPAREWLGHVVVIMAGDEQPSFLATPASMTSSAADGGAETAAGAAACCAACRSEERKMEDAREAGAQPAGSEDDARPASPSELPSSSTSSVISS

SEQ ID NO: 1131 - protein, 106 aa, Oryza sativa (japonica cultivar-group)
MAGGGVWVFRNNGVMELEEQATSRKALVHVATSEVIRSTEALERRLGALGWERYYEDRATLQLHRRDGSADLISIPRDFSRFRSTHMYDVVVKNRDHFKVDVMEKN

SEQ ID NO: 1132 - protein, 74 aa, Taraxacum officinale
KVAMWKGAMGAYFVNAVCYFPVAIIGYWAFGQDVTDNVLVALQKPSWLIAAANLMVVVHVLGRYQVFAMPLFAL

SEQ ID NO: 1133 - protein, 100 aa, Brassica napus
MAGPSGKKEKVDKAGPSGGGGGKKKKDVKKETGLGLSVKKDENFGEWYSEVCKHDMIEYYDISGCYILKPWSIAIWEIMQTFFDAEIKKMKVKNCYFPLF

SEQ ID NO: 1134 - protein, 334 aa, Aspergillus oryzae
MTAKVGINGFGRIGRIVFRNSFSHENTEVVMVNDPFIEVQYAAYMLKYDSTHGNFEYDVHIDGDSIVVNGKKVKFYAEKDPAKIPWKDAGAEYIIESTGVFTTVEKASAHLQGGAKKVIISAPSADAPMYVMGVNEKTYAGADVVSNASCTTNCLAPLTKVLHERFGVVEGLMTAVHAYTATQKLVDAPSKKDWRGGRAAAQNLIPSSTGAAKAVGKVIPELQGKVTGMSIRVPTSNVSVVDLTCRLEKGASYEEIITAIKEAAQGELKGILDYTEDDVVSSDMKGNPHSSIVDIKAGISLNPNFLKIVSWYDNEWGYSRRVLDLTAYIASVGK

SEQ ID NO: 1135 - protein, 360 aa, Medicago truncatula
MGLHHRKLLSESECERICDEDCTTATSSNCVNCLKFCNSYNPPPTPSDHTKHKTTTYLIISFSIVAAIFLVLCCYAFYVKFFSRRNRSRRRALLTRQQTEQGFVVGEEHDDGSVVDHPIWYIRTPGLQQSIINAITVVKYKKDEGLIDGSDCSVCLSEFEEDENLRLLPKCNHAFHLPCIDTWLRSHINCPMCRAPIVVDPLRIPSMEPNVFVESSQIEVFENSDGNGDSVVSQLRNGEEEPGEEVEENGRRVCEDGSSGLEMVNMQPRRSVSLDSSAAAKINLALSKFLSVESQRNCNREQVGEVNEQIVSKKVGENGNMVNMHSAPCSMNRSRSFNGKHLLSLYSSSQKKKNAPPRSF

SEQ ID NO: 1136 - protein, 500 aa, Euphorbia lagascae
MEQKNLSFPSILISFLLVLILVVVMRLWKKQNPPPGPWKFPIIGNLPHLLLTSDLGHERFRALAQIYGPVMSLQIGQVSAVVISSAEAAKEVMKTQADAFAQRPIVLDAQIVFYNRKDVLFASYGDHWRQMKKIWILEFLSAKKVQSSRLIREEEMEDAITFLRSKAGSPVNITKIIYGIIISIMIRTSVGNCKQKERLLSVADAVNEAATSFGTADAFPTWKLLHYIIGAESKPRRLHQEIDDILEEILNEHKANKPFEADNLMDVLLNLQKNGNVPVPVTNESIKASVLQMFTAGSETTSKATEWVMAELMKNPTELRKAQEEVRQVFGEMGKVDESRFHDLKFFKLVVKETLRLHPPVVLIPRECRETTRIDGYEIHPNTRIVVNAWAIGRDPNTWSEPGKFNPERFKDCAIDYKGTTFELVPFGAGKRICPGITSAITNLEYVIINLLYHFNWELADGITPQTLDMTEAIGGALRKKIDLKLIPIPYQVSLGSNIS

SEQ ID NO: 1137 - protein, 548 aa, Photobacterium sp. SKA34
MAIHPRAGQRAQQEDMHNIPALIANYFIIEPSAQDASQQVAFGTSGHRGTADKGTFNQHHIWAIAQAIAEVRAKNGVTGPLFLGKDTHALSEPAFTSTLEVLVANNVQVVIQEGKGYTPTPGISHSILCYNKVHDDKADGIVITPSHNPPQDGGIKYNPVHGGPAESELTTAIECRANEIIANGLVDVKRVSITHAFASGLIVEQDLVAPYVADLVNVIDMEAIKKSELKLGVDPLGGSGIEYWRQIASFYALDLTLVNDSIDPAFRFMSLDKDGAIRMDCSSPYAMAGLLAYKDNYDLAFGNDPDYDRHGIVTPAGLMNPNHYLAVCIDYLFRHRNDWAKQVAVGKTLVSSALIDRVVAALGRDLVEVPVGFKWFVDGLFSGKLGFGGEESAGASFLRKDGTPWSTDKDGILLCLLAAEITAVTGKTPQQYYDELADKFGRSEYSRLQAAANKEQKAVLSKLSPKMVSAETLAGEPITARLTHAPGNGAAIGGLKVTTENGWFAARPSGTEDIYKIYCESFKGKEHLALIEQEAQEIVGKVFADAGL

SEQ ID NO: 1138 - protein, 180 aa, Rubrivivax gelatinosus PM1
MRRLAIAALLCIVGSGAQAACPPLLDRSFPRLQDEKPQNLCQYAGKVVVVVNTASYCGFTSQYKGLEALHARYQSRGLVVLGFPSNDFGSQEPGSNQDIAAFCENTFGVRFPMFAKSSVKGSARNPLYADLAQRTGKTPAWNFHKYLIGRDGQVVLSFSSQTDPQDPVFVQEIEKLVDSQ

SEQ ID NO: 1139 - protein, 170 aa, Zea mays
MKFNIANPSTGCQKKLEIDDDQKLRAFYDRRISQEVSGDALGEEFKGYVFKIMGGCDKQGFPMKQGVLTSGRVRLLLHRGTPCFRGYGRRNGERRRKSVRGCIVSQDLSVINLVIVKKGENDLPGLTDTEKPRMRGPKRASKIRKLFNLNKDDDVRKYVNTYRRTFTTRG

SEQ ID NO: 1140 - protein, 392 aa, Arabidopsis thaliana
MRKKMMISDLPHDLESEILSRVPAKSLAKWKTTCKRWYALFRDPSFVKKNFDKAGGREMIVLMNSRVYSNSVNLQGINNRFDPSMEVTGKLIKLNDSKGVDISAIFHCDGLILCTTTESTGLVVWNPCTGEIRCIKPRIFYRCNDRYALGYGNSKSSCHSYKILRSCCYYVDQNLSLMAAEFEIYDFSTDSWRDLGDITRDMIVYSSGVSLKGNTYWVSGSKEKGFFMRYFDFSKEVFGRLPLPYQSFNANHTAALSAVGNEKIAVLQQKILAMSDEMRIWVTNKIDEAKDLSWSNFLLTVDYGKFNLPCLVNVTSFLLDEENKVAVCSDVDTKDGLRSRIYIVGKDFYKEVFKDTRGSDNNWPLLLCYVPSLVSIQENIPNKAEENEIKGG

SEQ ID NO: 1141 - protein, 277 aa, Gibberella zeae PH-1
MSSFTHISQSFSSQQHSTNMKSIKTPSLKRFFSDFTLGFSDGLTVPFALTAGLSSLGKADTVITGGLAELCAGSISMGIGGYLAARDECLPGHSTILDKEDLRDHASSDEANETDCMVEQSEKMQSKLDDLVRHHLEPLDLPVSTITTILDNLQREPEDLRHTISKLESFTDHTSLPSPQLTTSPIISGLTISLGYAIGGIIPLLPYFFASTVGMGLRLSSILCLMVLFTFGAGKSWILNPDRGNVVTCLVEGLQMLVLGALAAGAAVLCVTWVADR

SEQ ID NO: 1142 - protein, 155 aa, Pseudomonas putida KT2440
MLFNLAILFGTLVAMEGVGTLAHKYIMHGWGWWLHRSHHEPHLGMLETNDLYLVALGLIATALVALGKSGYAPLQWVGGGVAGYGALYVLAHDGFFHRHWPRKPRPVNRYLKRLHRAHRLHHAVKGRTGSVSFGFFYAPPLKVLKQQLRSRRSQS

SEQ ID NO: 1143 - protein, 481 aa, Acidobacteria bacterium Ellin345
MGIGAVIGSGIFTVIGTAIAGQKFDTSSILNAPLLDYIIHHTATTGRPGAGPALALSLVLVALVCAFTALCYAELASMIPIAGSAYTYTYATMGELIAWIIGWDLILEYAVSNMAVSVGFAAHLVDAFDWFGWHPNPRWISPAYLPSGLTDLQGGTIYNTGWHFGFNIPAFLIVMLLTVVLVRGIRESAETNNIMVLLKIGAILAFVVAGMKYIHPTNYHPFAPQGWPGVLTGGSIIFFTYIGFDSVSTAAEEAKNPQRDLPIGIIATLVICTVLYIAVAVVLTGIVKWDTLIDDAAPVVNSLKKLGLMSHSKGLHWTRLVVLFGAMMGMISSLLVFQLGQARVWFAMSRDGLLPKLFGRVHPKFRTPSTATWIAGVLVGIPAGILDIGTLADLSNIGTLFAFVLVSLGVIILRFKQPERRRGFRAPGGLTAPILSVVFCILLMSGLPILTWLRFFAWLIIGMSVYWLYSRHRSEFAPVRK

SEQ ID NO: 1144 - protein, 166 aa, Glycine max
MATSSAKSVHDFTVKDAKGNDINLGDYKGKVLIIVNVASQCGLTNSNYTELSQLYEKYKQKGLEILAFPCNQFGAQEPGSNEQIQEFVCTRFKAEFPVFDKVDVNGDKAAPLYKYLKSSKGGLFGDGIKWNFSKFLVDKEGNVVDRYAPTTSPLSIEKDLLKLLDA

SEQ ID NO: 1145 - protein, 449 aa, Desulfovibrio vulgaris subsp. vulgaris str. Hildenborough
MEFMDIDIENSAKIKVIGVGGGGGNAVQNMITSTLKGVTFICANTDVQALGRSSAELKIQLGEKLTKGLGAGANPQIGRDAAVESMNAIKDCIGEADMVFVTAGMGGGTGTGAAPVIAQAAREMGALTVGVVTKPFFFEGRKRLEAAEQGIADFREHVDSLITIPNDRLLSLAPKKATFVEMLKKADEVLYFAVKGISDLIMVPGLINLDFADVKAVMGESGLAMMGAGIARGESRAREAAMKAITSPLLEDVSIDGARGVLMNITCGPDLTIDEVSEAAGIIQEAAHDEARIFFGTVFDESAGDEMRITVIATGIEACGSATVTPNAQNGNIAQFRRPSQQQAAPAAQRPAPQARVESGPVAEFGRQQPQQAPQQPQQAPQQAQQVAPGRGLSNFSDEDRNIPAYLRKQTRNPSGISRSNGGHVPGEDDFIFDEDEFELPTFIRKQAD

SEQ ID NO: 1146 - protein, 135 aa, Brassica napus
MYAGTQQKENERKTQEKQTESNMRSLLLALFLVLAFHRGEAAVSCNAVVGDLYPCLSYVVQGGNVPANCCNGIRTLNSQAQTPVDRQGVCRCIKNAIGGVSFSSNNLNNAQSLPAKCGVNLPYSISPSTNCDSIN

SEQ ID NO: 1147 - protein, 112 aa, Rhodobacter sphaeroides 2.4.1
MKLIIAAIKPFKLEEVREALTTIGVRGMMVTEIKGFGSQSGHTEIYRGAEYAVNFVPKVRLEIVVSDGLAESVVETIRTTAKTDKIGDGKIFVLDVEQAVRVRTGEINDDAL

SEQ ID NO: 1148 - protein, 695 aa, Medicago truncatula
MTERFDRIEESNRRMERFFGGMKIGVGGVGWVEGAVRSSEEDEGSLGNLDLSFGLEFGKNKVMEMVVGRKDFCLVGISGIGGSGKTTLAREICRDEQVRGYFKERILFLTVSQSPNVEQLRAKIWGHIMGNGSFNTNYVVPQWKLQYECSGSQPQILVILDDVWSPSVLEQLVFRMPNCKFIVVSRFIFPIFNATYKVELLDKDDALSLFCHHAFGQKSIPFAANQNLVKQVVAECGNLPLALKVIGASLRDQNEMFWLSVKTRLSQGLSIDESYERNLIDRMAISTNYLPEKIKECFLDLCSFPEDKKIPLEVLINMWVEIHDIHETEAYAIVVELSNKNLLTLVEEARAGGMYSSCFEISVTQHDILRDLALNLSNRGNINQRRRLVMPKREDNGQLPKEWLRYADQPFEAQIVSIHTGEMRKSDWCNLEFPKAEVLIINFTSSEYFLPPFINRMPKLRALMVINHSTSYACLHNISVFKNLTNLRSLWFEKVSIPHLSGIVMESLRKLFIVLCKINNSLEGKDSNIADIFPNISELTLDHCEDVTELPSSICRIQSLQNLSLTNCHSLTRLPIELGSLRYLEILRLYACPNLRTLPPSICGMTRLKYIDISQCVYLASFPDAIGKLVNLEKIDMRECPMITNIPKSALSLNSLQLVICDDEVSWMWKEVQKVKLNVDIQVVEIEYDLDWLRE

SEQ ID NO: 1149 - protein, 209 aa, Triticum aestivum
  misc_feature (92)..(92): Xaa can be any naturally occurring amino acid
  misc_feature (108)..(108): Xaa can be any naturally occurring amino acid
  misc_feature (116)..(116): Xaa can be any naturally occurring amino acid
  misc_feature (156)..(156): Xaa can be any naturally occurring amino acid
MAPTVMASSATSVAPFQGLKSTAGLPVSRRSNGASLGSVSNGGRIRCMQVWPIEGIKKFETLSYLPPLSTEALLKQVDYLIRSKWVPCLEFXSKVGFIFREHNASPGXYYDGRYWXTMWKLPMFGCTDATQVINEVEEVKKEYLTRIPHIGFDNMXQVQCVSSSPNGLQGSGRLNSNHTGILSAMRLEPMLWFPPLPLVSRKVHVSHMK

SEQ ID NO: 1150 - protein, 88 aa, Triticum aestivum
  misc_feature (26)..(26): Xaa can be any naturally occurring amino acid
MKTTKRKMHPEYLRADLDQTIQNYTXGFDMNQMRKRETPEEKTTNAFLGYRPEDTNSALDLTYNYGVDKYDIGAGFGHFAIANDDVDK

SEQ ID NO: 1151 - protein, 1512 aa, Aspergillus oryzae
MSNRQQIDSVIDDDDEFCPLCIEEFDLSDKNFKPCPCGYQHRKAAAAKKKEAEKREIEASSRKNLAGVRVVQKNLVYVIGLNPTIRDESQLLQTLRGRDYFGQYGEIEKIVVSKAKPGGNPNQGIGVYVTYSKKSDAATCISSVDGSVNGDRVLRAQYGTTKYCSSFLRNEQCHNRNCTFLHETGEDSESYSRQDLSSMNTLSSQRPNGAPSGPSHTIPPHVARSSAMPLSQPMRRQPSKDDGASSRPPDGSALPSSASWANKDSVISRTRRASLTASQASQSPRPASATVATSAEEPKRAEKQPAPAQERRQTPLPETQSSTPSSPSESQLPADPEAPLFENLIKAVNSPDFKFVFSAAGLPADEVALIENHPSFIDPYGGVKRRAMREKAEQERAKREQELLQSAAVEEETRESGSLQLGGEPDDAHPPRGRGSRESHGAIQPPSQQGTTTNSVVGSPVSASSHQFQGLNLAGRSLTPLQQQQLMLLKSASNQQAGVVDPLQSGLGSAALDQAAVRQGLLQTQMAQLNALQAQNRQNSRFSFTNDAGSKNLSNVRMLSQQASLMQSGTPNPLAAPSPQHGLTSSFYTSGVQGPPPGLKTAGTPPISGGGMFAQGHGFTTNSNLGLAGNIGKQETNPDLMRELLRSRSGTNASGLQAPDAAKREFMFPFLQQHQTPPPLTPANGLLSSFYGSQTGNFSESGPQKQKKKGKKHRHANTSSGGGGVVDLADPSILQARMHQVGANAAAGQALYGSQGQVDEEFPPLGAPAKDKRPVDSFGFLGRSQFPTEPQSSARAGTPTLPPGLPLPHAHPASALFQSPLNPSSPVSAVSVPPGLSVPFNRLGTPSQSFQETISGRQSPEVKNTQDNVAISNRAKNASEISLGSPVPKSANKARSQTKDDLTVGSDNKSSKKSGGITEEKSVSTTTKGKPMKLDIPLNTSHAQDSTPLKGEQLTQTASSQVPAPASAIGSRPNTPLTGVSRVSDSSVPRQPRVLRVVDTPKTETPPPASATQSISSQLAAAKGRSRRPSISSISRPDTPGDFGSEADLYTSASVSRANSPPASSRIGSAPVRAMTKSQVKKERRQKAKEMEAKKHEAATAMVEEPVQAPIIGRKRKTKKTPTSNPESTTATPDTANEALKSSASGKETTDKTDQRAEAKKNKSKDKATKDTKPSPVEEKEAPTQKSAAEAWRSNNTIEQLIKDSEAAGVPIKELFTERTSVLPILLAQLHKAGNLDLNAHPLFNPPNLTQRVDMKCTADDYEILKQPLELTEEHRKALLRGEPVRINSDSNLTKYRCLITPRGCVLRHLGPEEEERYLELEKRIGAAIDLFPEYPPTSITEPDVTNRGGGLDALFATPENFNICWVDETSAGLSSMSPSGDMTVPECAVTSDTPTPPNVLSAMEADSTRSHNWAIANTAELVNATATSVRSFAAATAKHMLGAAGVVMGNMPDLDDVVGMTDEELRAFAVKSQKELESSRKDLDSIDKKLNALVKRNKKLAQQALATSVEG

SEQ ID NO: 1152 - protein, 648 aa, Ralstonia solanacearum
MLDFVRTHRRLMFLVLLILVFPSFVFFGVQGYSRFMDGSHDAAKVGDTVITTSELDTRVREQTERLRQMLGAQYDPRQFEGPQMRRDVLDGIIQQRVMVNEASRANLSVADSKVRETIEQIPAVAQLRKPDGKFDTDAYIKLLAAQGMTPEQFDARLRSELVLQQIPQSIVSSAFVPKSLVDRLIEARDQQREVQALLFKPADYAAKVTVDDKAIQAYYDAHQQEFAVLEQVKAEYVVFSGEEMMKQIPVTPEQLKEYYDQNAARFKTEEQRRAAHILIKLPDNAKPADKDAAKKRAEEVLAEVRKSPGSFAELAKKYSGDPGSAAQGGELGFLAKGATVPPFENALFALKQPGDISDVVESDFGFHIIKLEDVKGGGVQSLDAVKPELEREVRTQLANKKYTELADAFSNGVEDQSDSLKPVADKLKLQIQTADHVTRVPNPALGNSPVNNEKVLKALFADDVTKNHRNTQAVQVGPTTLVAARAVEYRPATVKKLADVREQVKAKVLAEQSAALAKKAGEEKLAALKQSNSAEGFGTAQTLSRQQAQGTPPAALVAILRADAAKLPVTIGVDLGAQGYALYRINKVLPPANVDPARRAADAQQLTQAAGQADFNAYYEALKARSKVKINGSVVDAAKPAASSDDGS

SEQ ID NO: 1153 - protein, 112 aa, Synechococcus sp. RS9917
MKKVEAIIRPFKLEDVKLALVNAGIVGMTVSEVRGFGRQKGQVERYRGSEFTVEFLQKLKVEVVIDDARVDTVVTAIAEAAKTGEIGDGKIFISPIDTVVRIRTGDRDGSAL

SEQ ID NO: 1154 - protein, 413 aa, Rhodopirellula baltica SH 1
MKAFEATRIFFDQAADRLEIDPDLREALLMPQREVQVQVTIRLDDGRLANYIGFRVQHDHSRGPMKGGLRFHPEVDLDETRALASLMTWKTAVVDLPYGGAKGGIGIDPSKMSSAEIERLTRAFVDQIHDIVGPDTDIPAPDMGTDHQVMAWFRNQWEKYHGFHPAVITGKPVEEYGAKGREEATGRGVGTLTVKLTKRLGMDASKTRVAIQGFGNVGSHAAKFLHDAQFPIVAVSDITGTYYNADGLNIPELLRHKFAHPKGLLEGFERAEHLPLDALLKLDHVEVLIPAALGGVITQKNAQDINAKVIVEAANGPVDPDADAALHDRGVTILPDILANAGGVTVSYFEWVQNRQHYRWPLDRVRQELDHTMNEAFEKVWQMAAQHEVSLRTAAYMIGISRVRRATELAGLA

SEQ ID NO: 1155 - protein, 579 aa, Candida albicans SC5314
MQKVFQRWVSRIPPVKLQYKNMLRDPSKKYSPPKQINLPNRTWPTKVITKAPRWLSTDLRDGNQSLPDPMSVPEKKEYFHKLIDIGFKEIEVSFPSASQTDFDFTRYAVENAPDDVTIQVLTQSREPLIRRTVESVKGAKRATIHTYLATSDVFREVVFGMSKQDAIDKAIETTKLVRSLTKDDPNMQDTEWNLEFSPECFSDTPVEFAVEICEAVKKAWEPTVENPMIFNLPATVEVAGPNVYADQIEYFCQNITEREKIIVSTHTHNDRGCGVAATELGMLAGADRVEGCVFGNGERTGNVDLVTVALNLYTQGIAPNLDFSDIESIIEVSERCNKIPVPARSPYGGSLVVCAFSGSHQDAIKKGFAKQKGDKWAIPYLPLDPKDIGRTYEAVIRVNSQSGKGGAAWVILRSLGLDLPRHLQVAFSGLVQNTADSLGRELKVDEIVNLFNEQYLVSAPLSIQDFEITKNKNDEREIVAQLNDGITIKGQGNGPISAFIDAISNKFGVLFEVVNYQEHSLGGGSSSKAATYIELSYVNANGEKVTRWGCGINHDVSQASIEAILSVVNSLIKKNELTV

SEQ ID NO: 1156 - protein, 539 aa, Ralstonia solanacearum
MPTALPAWQSLSQHAQAIRATHMRDWFAAPDAEQRVHAFTVEAAGLTLDYAKNRITPETLALLLQLADEAGVLTLRDAMLRGERINNTEHRSVLHAALRGHAEDDYRANGAAVMPDVLRVRAQMRDFAQRVHSGTWTGHAGQRITDVVNIGIGGSDLGPRMVCRALAHLAVPQVRVHFVSNVDGTDLAETLAGLNPDTTLAIVCSKTFTTLETMANAHSMRRWFIEHGVPEAQLKQHFVAVSTNRDAVVAFGIDPDNMFTFWDWVGGRFSLWSAVGLSIVLAIGPEQFETMLDGARAMDRHFASAAPRENMPLILGLLSVWYRGFFGAASACTVPYCAPLELLTDFMQQLEMESNGKSVQRNGAAIGTDTGPIVWGTAGTNGQHAYFQLIHQGSQIVPVDFITTLEPVRSLPGHHTKLLANCFAQGEALLRGRTAEEVRADGITDAALVPHMVFEGNRPSNTILMQRLDAASLGALIACAEHRTFVQGAVWNINSFDQWGVELGKKLAKPILEELEGAPASVAHDASTAALIRRAKAAR

SEQ ID NO: 1157 - protein, 400 aa, Candida albicans SC5314
MAKASKVDKKLSKKKEEKPAKKVEEESSSEESSSDDSSSEESSSDDDSSDDSSSSSSDEGSDSDSSDEEEVEKKESSSDESDDEDKKEESSSGSDEEEKKEEKSSSSDSEDSSSSDSSSSESDSDSDSDSDSDSEEEPSKKRKAEESKEEESAPVKKSKPAASTEEPATLFVGRLSWNIDDAWLKREFEHIGGVIGARVIMERATGKSRGYGYVDFESKSAAEKALEEMQGKEIDGRPINLDMSTGKPHASKSNNDRAKQYGDSQSPPSDTLFIGNLSFNANRDNLFNVFGEYGNVISCRVPTHPDTQQPKGFGYVQFSSVDEAKAALEAMNGEYIEGRPCRLDFSTPRDNTNNNNNNNRRGGFGGGFGGRERSATPRSGNSTPRPNKSTEFKGTKKTFD

SEQ ID NO: 1158 - protein, 719 aa, Haloarcula marismortui ATCC 43049
MVVFVAGKKASQGPTFAAVVGQRDLKDGLLAVATDDDLDGLLVRGEKGTAKSTAVRALADLLPEQRAVADCPYGCPPDRPDEQCEDCRTRSDPPVETRSVPLVTLPLGATRDRVVGTLSVADALDGDHEFDPGLLARANRGILYVDEVNLLDDHLVDVLLDAAASGQNRVERDGVTVTHPAEFTLVGTMNPEEGDLRPQLRDRFALQTEVSACEDLDDRVAIIDQALGESDDEERQTEPDRGPGERLRTARDLLPEVDLAREFREQIAELCRDAGLDGHRGDIATARAARTFAALDGRTTVLESDIERAAEFALPHRLTSRPFEDAPDVDDVLDDHFEDEEGEAEEESADDEESGEEGGDADSDEEAGAGDESVNDGADSEGSEDGSEQQEQRPDDSGESGEDGDDESGERGEQPTPASADSDGERQEAEAGDGEGAAGDDGGEGDPDQPDDPENATPLLPGQSRTAVGDSGAPDVDAPSVDTDGGSASGRASATGTKRGATVRTERAGRDDEVDAAASVRAAASRGSGRVESRDLRKSVRAGDAETLVVFAVDASASMRPAMKAAKGTVLELLKDAYQARDEVAFVTFAGEGADVVLPPTDSVSLAARHLKDLPTGDRTPLPDGLTAACEVLDRADPDAGVVIVVTDGRANTADGSPVAATRTAARTLGEAATRTIVVNAGEAGRAGLLDLVAEETDASVVSLDALTAERVDAVASDQ

SEQ ID NO: 1159 - protein, 107 aa, Triticum aestivum
ERERERERERERERERERERRRYEGSEFSEDTFIAKVKMEIVVCKEQVEPLIDKIIEKARTGEIGDGNIFLIPVADVVRVRTGEPGVHAERMIGGLSDKLPPVITIS

SEQ ID NO: 1160 - protein, 293 aa, Mycobacterium avium subsp. paratuberculosis K-10
MPDWTAAQLPSFAGRTVIVTGANAGLGEVTARELARVGGHVILAVRNTDKGRAAADRMAGVATGRVEVRELDLQDLASVRRFADGIDTVDVLVNNAGIMATKHAVTVDGFEGQIGTNHLGHFALTNLLLPKLTDRVVTVSSLMHHFGYISLKDLNFRSRPYSAWLAYSQSKLANLLFTSELQRRLDAVPSSLRALAAHPGWSHTNLQGNSGRKLGDAAVLAVDRIVSTDADFGARQTLYAVSQDLPGDTFVGPRFGLYGRTQPTWRNWPAKRAGTAAALWELSEELTGTKFPL

SEQ ID NO: 1161 - protein, 401 aa, Photobacterium sp. SKA34
MTIEILVPDLPESVADATVATWHKQPGDAVSRDEVLVDIETDKVVLEVPAPEDGVLEAIFEGEGTTVLTKQLIGKIKVGAVAGEPTKDVPTEAEASPNKRNTASLTEETSEALSPAVRRLLSEHGIDAGAVKGSGVGGRITREDVEAYLKNQSAPAVTKAPVVDVAIAHRSEKRVPMTRLRKRVAERLLEAKNSTAMLTTFNEVNMKPIMDLRKQYKDIFEERHGIRLGFMSFYVKAVVEALKRYPEVNASIDGDDIVYHNFFDVSIAVSTPRGLVTPVLRDCDKLSLAEIEKGIRELAIKGRDGKLTVEDLTGGNFTITNGGVFGSLMSTPIINPPQAAILGMHKIQDRPMAVNGQVEILPMMYLALSYDHRLVDGRESVGYLVTIKELLEDPTRLLLDV

SEQ ID NO: 1162 - protein, 62 aa, Glycine max
MLGCFSGKCSGSIRSIVKHPELPVIASCGLDSYLRLWDTKTRQLLSAVGFIPLFLCPWQHAI

SEQ ID NO: 1163 - protein, 816 aa, Buchnera aphidicola str. APS (Acyrthosiphon pisum)
MKLLKFGGTSLANAEKFLSVSSIIEENTQTDQIAVVLSAPAKITNYLVKIIENTIKNNQILETVHLAENIFMQLINNFLNIQSNFPHKEIEKIIKKEFNELKNIIQGILLLKQCPDNIRAIIISRGEILSVFIMKSILQSKNYNVTIINPVKNLVAIGDNYLDSTVDISESKKNIQNMNINQSNIILMAGFIAGNKDKKLVVLGRNGSDYSAAVLAACLDANCCEIWTDVDGVFTSDPRKVPNARLLKSISYQEAMELSYFGAKVLHPRTIEPIAQFKIPCLIKNTNNVKSIGTLICEQNCSEKDFLKGVTHLDEIAMFNISGPHIKDVGSVISRIFTMMSRGNIKILLITQSSSENKINFCVYEHDIYKILYLFNKEFQLELKDGLLNPFKIKKNLSILSIVGSNIYKKHNIASKIFSVLGALKINVIAISQGSSKHSISLVIKKENILKAVQHVHNTLFFNKKTIHMFLIGIGGIGSTLLNQILKQKQFLDKKNIEIKICAIANSKKILLLDNTNDLSNWKNDFKKSTQKFNLELLNNLIKNNHFSNSVIVDCTSSQLLSEQYVNFIDNNFHVVTSNKKANTSEWNYYKKIRKSVAQTGKKFLYETNVGAGLPVIETLQNLFKSGDNLICFKGILSGSLSFIFGRLEEGILLSQATREAKELGFTEPNPCDDLSGIDVARKLLILARESGYNIELKDIKIEPLLPNNFKIYEDTDKFLLKLKELDVYFSNKIKQALNVGNVLRFVATIEQKRQFFIKLEEVNINNPLYKVKNGENALAFYTNYYQPIPLVLRGYGAGNNVTASGVFSDLLRTLS

SEQ ID NO: 1164 - protein, 364 aa, Mycobacterium sp. KMS
MSFTPVFDHGRPLDPNDKYLILWATMSEPVADFSPLRVKRVVRETSDAVSLVLDVPRHCSGRFRYQAGQFLTLRVNLDGQELRRCYSMSSAPVEEELRITVKRDPGGLVSNWLNDTVSEGAEIHAAPPEGRFLLRDTDSEIVAFAGGSGITPIMSLIRTALATSARSIRLFYANRNRGSVIFADDLARLVEHNADRLVLTHHYDDDSGVVTPAAIESFVAGAGDADFYICGPGPFMDTVEGALATRGAPRDRVHLERFQVAQVPAGADASEAQATEEIVIELDRKTTTVPYRSGNTLLQTARTAGLRAPSSCETGSCGTCMAQVVSGSARMLNNDALDDDEVADGWVLTCQSLPTSRSVHVVYE

SEQ ID NO: 1165 - protein, 257 aa, Arabidopsis thaliana
  misc_feature (17)..(17): Xaa can be any naturally occurring amino acid
  misc_feature (80)..(80): Xaa can be any naturally occurring amino acid
MASSMLSSAAVVTSPAXATMVAPFTGSKLFAAFSVTRTTNKDITLIVSNGGRVSCMNVWPPIGKKKFATLSYFPDLSDVXLAHEVDYLLPIKCISCVALPLQHGLVVRALRAHFPLTFDGLALWPIRALLHFPRAPDSLSSLSLLSPFLHQCVLLSFPFTTNWFPSITLYSYSIPLIVFSLPLLTFLYSFLYTLFLHLLPIYSSSLLSPLLSPISHCPFTILLSYSTPSSLPLIYLVWLVLIFPYFLPFSPPSLPPF

SEQ ID NO: 1166 - protein, 319 aa, Yarrowia lipolytica CLIB122
MTHSPVVIIGSGPAAHTAAIYLSRAEIKPTLYEGMMANGIAAGGQLTTTTEIENFPGFPDGIMGSQLMEDMRKQSIRFGTEIITETVSKVDLSQRPFKYWTEFNEDEEPHTADAIILATGASAKRLSLPGEDQYWQQGISACAVCDGAVPIFRNKPLAVVGGGDSAAEEALFLTKYGSKVYVIVRKDKLRASAVMAKRLASHPKVEILFNHVSIEAKGDGKLLNALEIENTLTGEKRDLEVNGLFYAIGHIPATSIVKGQVETDEEGYVVTVPGTANTSVKGVFAAGDVQDKRYRQAITSAGTGCMAALDCEKLLAEEE

SEQ ID NO: 1167 - protein, 366 aa, Pseudomonas aeruginosa PAO1
MSSNFLNPVTTQTWANGRHLVRCVKVIQETWDVRTFCFMADQPILFFFKPGQFVTLELEIDGEPVMRSYTISSSPSVPYSFSITIKRVPGGRVSNWLHDNLKEGQELPVHGPVGLFNAIDFPADKVLFLSGGVGITPVMSMARWFFDTNANVDMVFVHSARSPKDIIYHRELEHMASRIDNFSLHIICERHGLGEAWAGYRGYLNLRMLELIAPDFLEREIFCCGPTPYMSAVKHLLQGHGYDMSRYHEEAFGPTPPEVRADVRELAAEAAEAPEVPVADQHQVEFTATGKSIRVSPGETVHAAAAKLGLHIPKACGMGICGTCKVMKTAGEVEMEHNGGITDEDVAEGYILSCCSVPKGDVVIDY

SEQ ID NO: 1168 - protein, 572 aa, Escherichia coli K12; identical to SEQ ID NO: 668

SEQ ID NO: 1169 - protein, 363 aa, Arabidopsis thaliana
MTITNLPSDLLEEIFSRFPLNSMRAVRLACKTFYTLSKCKSFAKLHFGKETTTTKEGESQMILLMDYNLYLISVVVDGDPYIECKDTRLVVWNPYWGLTRWIEPRYSHHLIGCARFSYALGYVGNISCRSHKLLRFIDYFFHGPELEWYEIYDFESGLWTTLDVTPHWCISLGSHGISIKGNTYWSAITRNSRSHGLTIYDHDHIICFDFTSERFGPLLPLPLNAEYYGDVILSSVKEEKLAVLQQQNRANPYMFDIWITINIEPGHVLWTKFLKVDMETVMETPFKSSESFFIDEKNKIVMSFDETLNPYTISIFGEAGYYRVVNLEQHANTWSRSQMCTYVPSLLQIKQLPLIQVEKCFII

SEQ ID NO: 1170 - protein, 451 aa, Leuconostoc mesenteroides subsp. mesenteroides ATCC 8293
MKIGIIGATHAGVYAAKQIKSEHPEAEVTVFEKNTTVSFLSCGIALWIGDHVSDPEKMFYETPESMRNQGITMLMAHQVNQADLKSKTLTVTNLDTEEVTTQQFDKIVITTGSKPVIPNIPGIDSNRVYFCKSWDDATRIKSVAKDLKRVAVIGAGYIGAELAEQLSVTGKQVTLIDGADRVLAKNFGPAFTERIQKEYEKNNVDVVLNQFVSKFENTPNGIKITTPNGSYEADIAILGIGFLPNTDLFSGQLETLPNGAIIVNDYMQTSEDNVYAAGDASTVFFNPTQAIDYIPLATNAIRQGILVGKNIVEPTTRYLGTQATSAVELYEQAMVATGLNSATAKEKGLDVIETVIESDYRPDFMLSTTSVLSSLTWEKDTGRIVGGSFMSQHDVSQSANLVSIAIQKQMTIDELAMSDFFFQPNFSQPINYIPEVALAAVAEKQALTLAY

SEQ ID NO: 1171 - protein, 524 aa, Hevea brasiliensis
MASSVLPSPSLQSQFMSLRSSTKPYSRRSSLSPIKASVSEKPSIGISSPTVSPTDSSKLPLRKIPGDYGLPFIGPINDRLDYFYKQGKEEYFKSRAQKYQSTVFRANMPPGPFISSNPHVVVVLDGKSFSVLFDVTKVEKKDLFTGTFMPSTELTGGYRILSYLDPSEPKHTQLKNFLFYLLKSRRDHVIPEFSSTYTGLFESLENDLASKGKVNFNNPGEQAAFSFLGRSYFGVNPVDTKIGTDGPTLIAKWVLFQLAPILTLGLPAFLEEPTIHTFRLPAFLVKKDYKRLYDYFYSSAGSLLDEAEKMGISREEACHNILFATCFNTFGGLKIFFPNILKWIGRAGVKLHTQLAQEIRSVIKSNGGEITMAALEQMPLMKSAVYEAFRIEPPVPAQYGKAKRDLIIESHDAAYEVKEGEMIFGYQPFATKDPKIFDTPDEYVPDRFVGEGEKLLQHVLWSNGPETDHPTMGNKQCAGKDFVVLISRLFVVELFRRYDSFEIEVGSSPLGSSITITSLKRASF

SEQ ID NO: 1172 - protein, 611 aa, Nicotiana benthamiana
MPAWWGKKSTKNKETQSKEKERDKYVKPRSFDEVLCRNSPRNSKDLNLGGSGSGFSGSGFSGFDSGSSLDKAHPLPRPSVGNDQGVVLGCGSVSVSSTSSSGSSDGPVNTTDQAQFDILFRGNGDNRLSPLSRSPVRSRGTTTTSSPLHPRFSSMNLDSPTGKLDNDVSSESHQLPLPPGSPPSPSALPNPRTCGVAEGSNVNMSKWKKGKLLGRGTFGHVYLGFNRENGQMCAIKEVRVVSDDQTSKECLKQLNQEIILLSNLSHPNIVRYYGSELDDETLSVYLEYVSGGSIHKLLQEYGAFREPVIQNYTRQILSGLSFLHARNTVHRDIKGANILVDPNGEIKLADFGMAKHITSSSLVLSFKGSPYWMAPEVVMNTSGYGLPVDIWSLGCAILEMASSKPPWSQYEGVAAIFKIGNSKDFPEIPDHLSNDAKNFIKLCLQREPSARPTASQLLEHPFVKNQSTTKVTHVGVTKEAYPRSFDGNRTPPVLDSGGRNISPTKGNYASHPVITISRPLSCPREIVKTITSLPVSPTSSPLRQYEPARRSCYLSPPHPAYGIGGHSGYDENDYLMFQARPTTRNTLEPWLEIPQFKVQTPSRSPKLRPIL

SEQ ID NO: 1173 - protein, 614 aa, Lycopersicon esculentum
MPAWWGKKSTKNKDLQAKEKEREKYVKPRSFDELLSRNSPRTSKDFSGSGSGFSGFDSGSSLEKAHPLPMPSVSSLGNDHGVVLGCGSVSVSSTSSSGSSDGGGPVNTDQAQLDTFRGLGDNRLSPLSRSPVRSRGTTTTSSPLHPRFSSLNLDSSTGKLDDVRSECHQLPLPPGSPPSPSALPNPRPCVVAEGANVNMSKWKKGRLLGRGTFGHVYLGFNRENGQMCAIKEVKVVSDDQTSKECLKQLNQEIILLSNLTHPNIVRYHGSELDEETLSVYLEYVSGGSIHKLLQEYGPFREPVIQNYTRQILSGLSFLHARNTVHRDIKGANILVDPNGEIKLADFGMAKHITSCASVLSFKGSPYWMAPEVVMNTSGYGLAVDIWSLGCTILEMATSKPPWSQYEGVAAIFKIGNSKDFPEIPEHLSNDAKSFIRSCLQREPSLRPTASKLLEHPFVKNQSTAKVAHVGVTKESYLRSFDGSRTPPVLELHPGGRTISPGRNISPAEGNYASHPVITVSRPLICARENVKAITSLPVSPTSSPLRQYEPARKSCYLSPPHSSYGIGGQSGYEANDYSMFQTRPSTRITLEPWLEIPHFRTQTPSRSPKTRPIL

SEQ ID NO: 1174 - protein, 606 aa, Methylococcus capsulatus str. Bath
MCGIAGLFNCNLPADELRLDQAVAKLTHRGPDDRGIFLDGRFGMGHTRLSIIDLAGGHQPLFSEDRRLALIANGEIYNFIELRSELTAAGFRFQTQSDSEVILHAYLAFGEGFLERIQGMFAFALYDALEGRLILARDRLGIKPLFLARRPDGIAFASEIKALLPLLDQPREIDPQGLAQYFQNQFSTGATTVLRGVERVLPGEAVVVEAGKTTRRFRYWSPLAVRTEELDFDEAAARFDALMERVMVEHMRSDVPFGLFLSGGVDSSLLLALLTRYSGEPIRTFSVGFPGTSLTDELPLAEGLARRFRSRHREIRPGPQDILHSLPLTVWAADDLMRDNASLPTSLLARAAGEELKVVFSGEGGDEVFAGYGRYRTSPLERLFKSLLAPGSGGFRTRGSFRGRWPKTLFGPALLAAAQSARRPVQESWRETPREWSDLQRMQYVDLCHALPDNLLVKADRMLMAWGVEGRVPFLDHRVVEFGLSLPDRLKIEGRQGKLFLKRWGERLVPAEQLYARKRGFHVPLGEWLDEPFLERLNRILPEHPALTPWFKPAGIRALIARCRDERQGSAMLWAIIQFAIWHRLFISGNGERPEALTDPLEILQR

SEQ ID NO: 1175 - protein, 452 aa, Coccidioides immitis RS
MGNTPSKPPGQPAQGPSAQWNDRKVNRRTSIQALSGSKSAAVDPSASKESATGQYSQRQQTPVHQRLQSRNIAESAGRGYDRLERRISRKEREDDTRDFPIHPKPSDTPEPARAVQVPTPASSQQYPYVGGYGPSVNTYYATPSHLSRPPRLPLPIGDAMSVPGSPITASGSLGATAAFDRAGIYPDKSGLSDTADDDDEVVDELEPFVTTGLNKAVSTTIEWRGGGEKVYVTGTFVNWARKFKLYKSEVENRLFSTTLKLRPGTHHLKFIVDGVMRTSDSLPTAVDFTNHLVNYIEISPDEMLASRGSDKPPKVVIPPGLYPPQVLPDSLPVEEPEKEPEEEIPLGDFRTIIPPVLIDIDTEESTPGYTQAANIINDFPAPPMLPMFLGRSILNSSTPMKDDNSVLNYPNHTVLNHLATSSIKNGVLATSVTTRYKRKYVTTILYKPTGHE

SEQ ID NO: 1176 - protein, 572 aa, Streptococcus gordonii
MTYQENYQKWVDFADLPDYLRQDLENMDEKTKEDAFYTNLEFGTAGMRGLIGAGTNRINIYVVRQATEGLARLIESKGRNEKERGVAIAYDSRHFSPEFAFESAAVLAKHGIKSYVFESLRPTPELSFAVRHLNCFAGIMITASHNPAPFNGYKVYGEDGGQMPPHDADALTTYIRAIENPFAVEVADVEAEKASGLIEVIGEAVDVEYLKEVKDVNINPALIEEFGKDMKIVYTPLHGTGEMLARRALAQAGFDSVQVVEAQATPDPDFSTVKSPNPENQAAFALAEELGRQVGADVLVATDPDADRVGVEVLQKDGSYLNLSGNQIGAIMAKYILEAHKNAGTLPDNAALCKSIVSTDLVTKIAESYGATMFNVLTGFKFIAEKIQEFEEKHNHTYMMGFEESFGYLIKPFVRDKDAIQAVLVVAELAAYYRSRGLTLADGIEEIYKEYGYYAEKTISVTLSGVDGAEQIKAIMAKFRNNAPKEWNATAISVVEDFKAQTSTAADGTVTTLTTPPSDVLKYTLADGSWIAVRPSGTEPKIKFYIAVVGESNEDSQAKIANIEAEINAFVK

SEQ ID NO: 1177 - protein, 545 aa, Fusobacterium nucleatum subsp. nucleatum ATCC 25586
MERIYDMIVIGGGPAGLSAGIYGGRAKLDVLIIEKENKGGQISLTSEVVNYPGILEISGSEFMTQTKKQAQGFGVNFVQEEVLDMDFTEKIKTIKTNNAEYKTLSVVIATGAAPRKLGFPGEQEFTGRGVAYCATCDGEFFTGMDIFVIGAGFAAAEEAMFLTKYGKSVTIIAREPDFTCAKLIGDKVKAHPKITVKFNTELTELTGDVKPTAAKFKNNVTGEITEYKAKVGETFGVFVFVGYAPSSQIFKGHIEIDKAGFIPTNEDLMTNVDGVFAVGDIRPKRLRQVVTAVADGAIAATSIEKYVHDLREELGIKKEEKKEEKTTSVTTEKEHFLDNELRQQLVAVVDRFENPVEIVVFKDPNNEESVNIENAVKDIASISPEKLKFSSYNEGENKELETKVKVTRTPTIAILDKDGNYTGLKYSSLPSGHELNSFILGLYNVAGPGQKVATESLEKIEKINKPVNIKIGISLSCTKCPKTVQATQRIATLNKNVEMEMINIFTFQDFKNRYDIMSVPAIIVDDQHIYFGEKTVEDMLEIINK

SEQ ID NO: 1178 - protein, 317 aa, Pseudomonas fluorescens PfO-1
MKLKTLCWLLTGWLSVGMANNEPVAARVNGEAISEFRLERFFAEYLEDQGRAVASIRNPKAYKQLRQAALDTLIDKELLWQESRKRGVKIDEQTVREQVERTRTAIGGTDKFLQRLQDAGFDEASFTEYTHRELAAQRMFAELTQVQAPDEQTVRAFFAEHRAEMAAPEQVQARHILIKVAGDADAATVEAARLRLEELRAAIAGGQTFASVAQSGSEDVTASQGGDLGYFARGQMVPAFETAAFALKPGEVSEAVRTPFGWHLIFVENHKEAADVPEEQGLETVRAYLARQQQTQARRQVLAQLRAENRIERIDDD

SEQ ID NO: 1179 - protein, 499 aa, Sulfitobacter sp. EE-36
MQELTHYLNGAHVKGTSGRFADVYNPATGEVQAKVPLANESEMDQAVKYAMAAQPAWAAVNPQRRARVMMKFVDLLNRDMDKLAEALSREHGKTLPDAAGDVQRGLEVVEYCIGAPELLKGDFTDSAGPGIDMYSMRQPLGVSAGITPFNFPAMIPMWMFAPAIVCGNAFILKPSERDPSVPLMLAELLEEAGLPKGIIQVVNGDKEAVDAILHHPVIQSVGFVGSTPIAEYIYGTGCANGKRVQCFGGAKNHMIIMPDADLDQAADALIGAGYGAAGERCMAISVAVPVGEETADRLIEKLVPRIEKLKVGPYTSGNDVDYGPVVTAAAKANIERLVQTGVDQGATLVVDGRDFKLQGYEEGFFVGPHLFDNVTPDMDIYKHEIFGPVLSTVRAKTYEEALGLAMDHEMGNGTAIFTRDGDAARDFAARVNVGMIGINVPIPVPLAYHTFGGWKKSVFGDLNQHGPDAFKFYTRTKTVTSRWPSGIKEGGEFNFKPME

SEQ ID NO: 1180 - protein, 591 aa, Medicago truncatula
MESTLKSFRDGESVLDLSPRSAVGGGVEDVYGEDCATEDQLVTPWTFSVASGYSLLRDPQYNKGLAFTEKERDAHYLRGLLPPTVSSQQLQEKKLMHNIRQYEVPLQKYVAMMDLQERNERLFYKLLIDNVEELLPIVYTPVVGEACQKYGSIYKRPQGLYISLKEKGKILEVLKNWPERSIQVIVVTDGERILGLGDLGCQGMGIPVGKLALYSALGGVRPSACLPVTIDVGTNNEKLLNDEFYIGLRQKRATGKEYYDLLHEFMTAVKQNYGEKVLVQFEDFANHNAFELLAKYGTTHLVFNDDIQGTAAVVLAGVVASLKLIGGTLPEHTFLFLGAGEAGTGIAELIALEMSKQTKAPIEESRKKIWLVDSKGLIVSSRANSLQHFKKPWAHEHEPVSTLLDAVKIIKPTVLIGSSGVGKTFTKEVVEAMTEINKIPLILALSNPTSQSECTAEEAYTWSEGRAIFASGSPFDPVEYKGKTYYSGQSNNAYIFPGFGLGIVMSGAIRVHDDMLLAASEALAKQVTEENYKKGLTYPPFSDIRKISANIAANVAAKAYELGLATHLPRPENLVKYAESCMYSPLYRNYR

SEQ ID NO: 1181 - protein, 401 aa, Rhodobacter sphaeroides 2.4.1
MPDIVVVGAGQAGAALVAKLRALKFEGSILLAGEEPSPPYQRPPLSKAYLLGTMEEERLWLRNRAFYAEAGIELRLGAPVTAIDRAARTVTVGGEAIPYGRLALTTGSAARHLPEAAGGGLDGVYTVRTLADVDRMRPEFRAGRRLVVIGGGYIGLEAAAVGAKLGLAVTVVEMAPRILQRVAAPETADWFRALHAAHGVRILEGVALERLTGEGRVTGALLADGTHLPADFVIAGVGIRPVTELAEAAGLALDNGIAVDALGQTSDPAIWSAGDCASFPWRGGRLRLESVQNAIDQAEAVAANMLGAGAPYLPAPWFWSDQFDTKLQIAGLNLGYDRVVTRGPEGGSVSFWYYRGVELLAVDAVNEPRAYMVGKRLIEAGRSPAPDAVADAAVPLKSLLV

SEQ ID NO: 1182 - protein, 373 aa, Pseudomonas putida KT2440
MAFNTIEELLEDYRQGKMVLLVDDEDRENEGDLLIAAERCDAQAINFMAREARGLICLTLTDDHCQRLGLEQMVPANGSVFSTAFTVSIEAATGVTTGISAADRARTVAAAMAPNARPEDLVQPGHIFPLRAREGGVLTRAGHTEAGCDLARLAGFSPASVIVEVLNDDGTMARRPDLEVFAARHGIKIGTIADLIHYRLSTEQTVKRIGERELPTVHGTFRLVTYEDRIEGGVHMAMVMGDIRREQPTLVRVHVIDPLRDLVGAEYAGPANWTLWAALQKVAEEGTGVVVILANHESSQALLERVPQLTHPVRPYQRGQSKVYSEVGTGAQILQDLGVGKLRHLGPPLKYAGLAGYELEVVQSIPFDPGMDG

SEQ ID NO: 1183 - protein, 333 aa, Sulfitobacter sp. EE-36
MATKLAINGFGRIGRNVLRALMERGDDDLQVVAINDLAPLETNAHLFEFDSVHGRFGRPVTLGDNTMDVGQGPIRVTAERDPAALPWGDVDIVLECTGIFTTREAAAKHLANGSKRVVISAPGKDAMKTIVYGVNHDLITAEDTVLSNASCTTNCMAPLAKTLHDAFGIKHGHMTTIHSYTGDQPVHDTAHSDLYRARAAALSMIPTTTGAAKTLGKVLPELDGLIGGTAIRVPTPNVSCVDLVVELSKEATVEEVNATLRTAAEGPLKGILGLVDRPLVSIDLNHDSHSCVVALDQTSVQSGTQLRVLGWYDNEWGFSNRMLDTSREVAKTL

SEQ ID NO: 1184 - protein, 298 aa, Prochlorococcus marinus subsp. pastoris str. CCMP1986
MSLKLDGKKLSLEIEERLRNYILTNKTIAKRNPGLAVIRIGEDPASGVYVGNKEKACSRVGIKSYIFHLKDTVEQKEVEQLLNKLNLDNNIDGMLLQLPISKKFDEQRLISFINPEKDVDGLNEQNIGKLVKNEQAMRSCTPAGIVNLLKSQNIKIEGKKIVVIGRSLLVGKPLSLMMLNLNATVTITHSKTINLNKICKEADILIAAAGKPNLINSSFVKEGAVIIDVGIHRLTSSDKSKTRLCGDVLLEDVIPKVFAYTPVPGGVGPMTVTMLLVNTIFSWQKQFGLSSTLNDLLP

SEQ ID NO: 1185 - protein, 455 aa, Oryza sativa
MPRTSVVESPGCPPLRALTTDILGLIKVVEARTKPAGVAKVVETWGAPDAPRAVLAASLADRAVDPVSVRDLPLFLPAVLAVARKNGVVELLNPLNGETLAGVNAAAGRAAPADSSAEEDPLATLHLFRRHALDSSMLGTFLACTEKGKAYVKSVAKENASSDMAVGPSSSWDVSNSGTVQFSSVDAGESYAMFGGKGIEVNLWDITSCSKIWSAKSPRGNSLQIFTAPWFTAGTFLCKDDHRKIVACTNNHQVRLYDTASQRRPVISVDFRESPIKAVAEDPNGHAVYIGTGRGDLASFDMRTELTLACTLFPGKLLGCFAGKCSGSIRSIVRHPELPLIASCGLDSYLRIWDTNTRQLLSAVFLKQHLTAVVIDSHFSTEELEETKSKQPDPVGAEVRKERKEKKNRTSEMDEDETRMLDHDDSDSEMHTSKRKKSGEKSKGMKKKSKKQQVA

SEQ ID NO: 1186 - protein, 333 aa, Sulfitobacter sp. EE-36
MTIKVGINGFGRIGRCTLSHIAASGRDDIEVVRINATGPLETAAHLIKYDSVHGRFPNDVKVGNGTLDLGRGEMEVMSTYQMNELNWEGCDVVLECTGKFNDGLLAKVHLDQGAKRVLLSAPGKNVDRTVVYGVNDGELQASDTMVSNGSCTTNCLAPMAKALHDAFGIESGIMTTVHSYTGDQPTLDRRHEDLYRARAAAMAIIPTSTGAAKALGEVLPALKGKLDGTAMRVPTPNVSAVDLTFMAGRDVTVEEVNEAMRAAANGPTSRVFAYDAEQKVSVDFNHTEHSSIFAPDQTKVVGNRLVRVLAWYDNEWAFSVRMADVAVAMGKLG

SEQ ID NO: 1187 - protein, 334 aa, Heterosigma akashiwo
MTEEKKINPPIFPFTAIVGQEEMKLALQLNVIDPKIGGVMIMGDRGTGKSTTIRAIADLLPEIEVVKDNQFNTAPSEDLNEEIVKIKTPMIDLPLGATEDRVCGTIDIEKALTDGVKAFEPGLLAKANRGILYVDEVNLLDDHLVDILLDSAASGLNTVEREGISIRHAARFVLVGSGNPEEGELRPQLLDRFGMHAVIKTVKDPKLRVRVVEERTLFDLNPEEWINKYREQQEALKTRIIAAQNLISSVTISDDFKLKISQVCSELDVDGLRGDIVTNRAAKAYAAFNNRTEVEIGDIEKVITLCLRHRLRKDPLETIDSGDKVQKLFEEIFD

SEQ ID NO: 1188 - protein, 461 aa, Rhodopirellula baltica SH 1
MNAVFDSRPWAVRVGISVFAAFCWINASATFAAKPGQPVVARVEMQFAKEDKVVDVIAKGDLLTVVEDRGEDYVIVTHDGTRGAVDKVNAVELAESTGIYTDLIEEFPEEGRYHTLRASAWWALGEQEKAMADFNEAIEKGYEEAHAYSSRGLFYAARGEHDAAIKDYERALKLDPEDITPIINRAAVRMAQREFEAAIGDYTEALEVREGNAGLLRQRALAYKSAGEMEKAIQDYDAIVDDNPEDVAAIMGRGYIRFQQHEYAAAAADFSAALELNEKDPVAWNNRGYNRYQLGKAKEALSDYEKAIELAPEYGLAHQNRAWLLATTDDESLRDSDAAVEAAKKACELNGYGNVSDLSALAAALAAHGEFKEAVGWQEKVVESAPEDAKEFAGKILDRYRAGKPYIADPAAAEKAERAAAEIEAKKKAEKENAAAKKAAAKQLAEEAEKDAKATGLEKAE

SEQ ID NO: 1189 - protein, 337 aa, Pseudomonas aeruginosa UCBPP-PA14
MSATVHYPLSAVVAADELKLALCLAAVDPAIGGVLIEGPRGMAKSTLARGVAELLPAGEFVTLPLGASEERIVGSLDLDAALGEGRARFSPGVLAKADGGVLYVDEVNLLPDHLVDLLLDVAASGVNLVERDGISHRHPARFVLIGTMNPEEGELRPQLLDRFGLNVRLDTQPPPAERAEIIRRRLAFDADPQAFVERWEGQQDNLRRRCAEARRQLARIPLDDAALDSIARRCFEAAVDGLRADLVWLRAARAHAAWRGGERIEAEDIDAVEHFALLHRRRQSSPPPSAANPPPPPAAPAALPERAGDGEGQWGELPARPVAMGTARELPRWPKKP

SEQ ID NO: 1190 - protein, 969 aa, Staphylococcus aureus
MNMKKQEKHAIRKKSIGVASVLVGTLIGFGLLSSKEADASENSMTQTENTSNESKSNDPSSVNAAPKTDNTNVSDSNTTTNTNSDETNVAQNPAQQETTQSASTNATTEETPVTGEVTTTATNQANTPATTQSSNTNAEESVNQTSNETTSNDTNTVSSVNSPQNSTNAENVSTTQDISTEATPSNNESAPQSTDASNKDVVNQAVNTSAPRMRAFSLAAVAADAPAAGKDITNQLTNVTVGIDSGDTVYPHQAGYVKLNYGFSVPNEAVQGDTFKITVPKELNLNGVTSTAKVPPIMAGDQVLANGVIDSDGNVIYTFTDYVNTKDDVKATLTMPAYIDPENVTKTGNVTLATGIGSTTANKTVLVDYEKYGKFYNLSIKGTIDQIDKTNNTYRQTIYVNPSGDNVIAPVLTGNLKPNTDSNALIDAQNTSIKVYKVDNASDLSESYYVNPDNFEDVTDSVNITFPNPNQYKVEFNTPDDQITTPYIVVVNGHIDPNSKGDLALRSTLYGYNSNIIWRSMSWDNEVAFNNGSGSGDGIDKPVVPEQPDEPGEIEPIPEDSDSDPGSDSGSDSASDSDSASDSDSASDSDSTSDSDSTSDSDSASDSDSDSDSDSDSDSDSDSDSDSDSDSDSDSDSDSDSDSDSESDSDSDSDSDSDSDSDSDSDSDSVSDSDSDSDSDSESDSDSDSDSDSDSDSDSESDSDSDSDSDSDSDSDSDSDSDSDSDSDSDSDSDSDSDSDSDSDSDSDSDSDSDSESDSDSDSDSDSDSDSDSDSDSDSDSDSDLDSDSDSDSDSDSDSDSDSDSDSDSDSDSDLDSDSDSDSDSDSDSDSASDSDSDSDSDSDSESDSDSDSDSDSDSDSASDSDSDSDSASDSDSDSTSDTGSDNDSDSESDSNSDSDSGSNNNVVPPNSPKSGTNASNKNEAKESKEPLPDTGSEDEANTSLIWGLLASLGSLLLFRRKKENKDKK

SEQ ID NO: 1191 - protein, 993 aa, Staphylococcus aureus
MNMKKQEKHAIRKKSIGVASVLVGTLIGFGLLSSKEADASENSMTQTENTSNESKSNDPSSVNAAPKTDNTNVSDSNTTTNTNSDETNVAQNPAQQETTQSASTNATTEETPVTGEVTTTATNQANTPATTQSSNTNAEESVNQTSNETTSNDTNTVSSVNSPQNSTNAENVSTTQDISTEATPSNNESAPQSTDASNKDVVNQAVNTSAPRMRAFSLAAVAADAPAAGKDITNQLTNVTVGIDSGDTVYPHQAGYVKLNYGFSVPNEAVQGDTFKITVPKELNLNGVTSTAKVPPIMAGDQVLANGVIDSDGNVIYTFTDYVNTKDDVKATLTMPAYIDPENVTKTGNVTLATGIGSTTANKTVLVDYEKYGKFYNLSIKGTIDQIDKTNNTYRQTIYVNPSGDNVIAPVLTGNLKPNTDSNALIDAQNTSIKVYKVDNASDLSESYYVNPDNFEDVTDSVNITFPNPNQYKVEFNTPDDQITTPYIVVVNGHIDPNSKGDLALRSTLYGYNSNIIWRSMSWDNEVAFNNGSGSGDGIDKPVVPEQPDEPGEIEPIPEDSDSDPGSDSGSDSGSDSNSDSGSDSGSDSTSDSGSDSASDSDSASDSDSASDSDSTSDSDSTSDSDSASDSDSDSDSDSDSDSDSDSDSDSDSDSDSDSDSDSDSDSDSDSDSDSDSDSDSESDSDSDSDSDSDSDSDSDSDSDSVSDSDSDSDSDSESDSDSDSDSDSDSDSDSESDSDSDSDSDSDSDSDSDSDSDSDSDSDSDSDSDSDSDSDSDSESDSDSDSDSDSDSDSDSDSDSDSDSDSDLDSDSDSDSDSDSDSDSDSDSDSDSDSDSDLDSDSDSDSDSDSDSDSASDSDSDSDSDSDSESDSDSDSDSDSDSDSASDSDSDSDSASDSDSDSTSDTGSDNDSDSESDSNSDSDSGSNNNVVPPNSPKSGTNASNKNEAKESKEPLPDTGSEDEANTSLIWGLLASLGSLLLFRRKKENKDKK

SEQ ID NO: 1192 - protein, 250 aa, Saccharomyces cerevisiae
MPLTTKPLSLKINAALFDVDGTIIISQPAIAAFWRDFGKDKPYFDAEHVIHISHGWRTYDAIAKFAPDFADEEYVNKLEGEIPEKYGEHSIEVPGAVKLCNALNALPKEKWAVATSGTRDMAKKWFDILKIKRPEYFITANDVKQGKPHPEPYLKGRNGLGFPINEQDPSKSKVVVFEDAPAGIAAGKAAGCKIVGIATTFDLDFLKEKGCDIIVKNHESIRVGEYNAETDEVELIFDDYLYAKDDLLKW

SEQ ID NO: 1193 - protein, 418 aa, Frankia sp. CcI3
MILGSGSAWDTACVQLANAARHLGLDDGMHDLLRTPRRAITVSVPLQRDDGQLTVLTGYRVQHNLARGPGKGGIRFHPTTDLDEVKALAMWMTWKCALMGIPYGGAKGGIAVEPAMLSLPERERLTRRYAAELVPLIGPEKDIPAPDVGTDEQTMAWIMDTYSAHTGYTTTGVVTGKPLSIGGSAGRAGATSLGVQLSVFAALRETGRDPHAMTIAVQGFGKVGALAAQYLHDAGCTVVAVSDVKGGIYNPQGLNPAALIRHLAGGAETVVGYPGTDTITNDELLELDVDVLVPAALEGVITVENVDRVRAPIIVEGANGPVTAEADQVLDDRGVLVVPDILANGGGVAVSYFEWVQDIQAYFWSEDEVSDRLRALMDRAYREVSLLATTQKISMRNAAHVIGVGRVADAHRTRGLYP

SEQ ID NO: 1194 - protein, 130 aa, Brassica napus
MATIATSLNIATQRAIITSENRPARLACPVLLNNPWNLGSRTTNRLVSFRPVKSAPEGVISDKVEKSIKDAEETCAGDPVSGECVAAWDEVEELSAAASHARDKKKAEGSDPLEEYCKDNPETNECRTYD

SEQ ID NO: 1195 - protein, 396 aa, Buchnera aphidicola str. APS (Acyrthosiphon pisum)
MPDIGLEEVEIIEILVSINEKIAPEQGLITVEGDKTSMEIPSPISGIVKHIFIKIGEKIKTDALIMRCEVENIDFHVKKKEEICLDNNVLNKVEKNFKKDIFFHATPLIRRLARNLNINLYDVVGTGPKNRILKEDLDLYQSNIKENLIEEKNKINFGDSKKSKTKELELSDIQKNIGNNLHRNWMNIPHVTQFDEVDITILEKFRQKYNNEKRNQKKTNENITILVFIIKVVAYALEKFPIFNSSLNINNKKIILKKYINIGFAIDVNNDLFVPVLKDVNKKNIKQLSSELILLSEKARTRKLNIEDMTGGCFTISNLGGIGGSWFSPIINSPEVAILGISKSQIKPSWNGKEFIPSLMLPLSLSYDHRVINGAYAARFITFISRVLSDMHFLIM

SEQ ID NO: 1196 - protein, 458 aa, Prochlorococcus marinus str. NATL2A
MPAENKELKTENLVIIGSGPAGYTAAIYAARANLQPLIITGFEKGGIPGGQLMTTTFVENFPGFPNGVQGPELMDLIKAQAVRWGTNLIEEDAISIDLSKRPFSIVTTTQKIKTNSLIISTGASANRLGLKNEKLFWSKGISACAICDGATPQFRDEELAVVGGGDSACEEAEYLTKYGSHVHLLVRSRKLRASAAMADRVEANPNITIHWETELLDVLGNDWLEKLKVKRRDTNQEEEILAKGLFYAIGHTPNTSLFTNQLSTDSKGYLLTQPGRPETSLEGVYAAGDVADSEWRQGVTAAGSGCKAALAAERWLTKNNLATLIKRVELEPSKADTTKILEVSNEANFDPEKTWQKGSYALRKLYHETEKPLFVVYTSSSCGPCHILKPQLHRVLNESKGKAIGVEIDIENDQDIAKQAEVSGTPTVHLFKNKELKKQWKGVKTRSEYKAALDELIN

SEQ ID NO: 1197 - protein, 293 aa, Triticum aestivum
MAMASSTTASVAAASLRALAGASPAPLPKPFLVLLSPAPPRRLGLGLRAARPRGPLAPLASSDSFFETSAAVDVAEPEDEAVAEEEPAVAEEEEDVAAEEEVEEVGEYVEPPEEAKVYVGNLPYDVDSERLAQLFEQAGVVEVSEVIYNRETDQSRGFGFVTMSTIEEAEKAVEMFHRYDVNGRLLTVNKAAPRGARVERPPRDSGSSFRIYVGNLPWQVDDSRLVELFSEHGKVVDARVVYDRDTGRSRGFGFVTMASQPELDDAIAALDGQSLEGRALRVNVAEERPPRRF

SEQ ID NO: 1198 - protein, 338 aa, Arabidopsis thaliana
MQIGQALAAAKEGESQMIVMMGNNLSLTSIILNGDPSIEHKGKLTCLDEQVKISQFYHCEGLLLCILKDDSRFVVCNPYLEQTRWIEPRYSHRPYGMDRFSYALGYVNTDSCRSYKLLRFIDYYYNAPEKQFFWYEVYDFDSDLWTTLDVTPHWRIAFCNTGVPFKGNTYWCAAERNVDVDEVLANRLICFDFTSERFGPLLPLPFSEEKLAVLLQHDESNPYELDLWITTKIETEEVLWSKFLRVETAGFNSYVPFISGSFFIDEEKKVAFGFDERNRQRVIVIGEAGYLRGLDLVGDFGDQSCKPDLCSYVPSLVQIKQPEGGEREEESEYGEASI

SEQ ID NO: 1199 - protein, 268 aa, Aspergillus nidulans FGSC A4
MAGVLFSPEKDIPNLSGKVILITGGTAGLGAAAAIHLAKHSPSHIYISGRNAKSADAVIQQTQKSGTKVSFLACDLASLDSIKKAADTILAQESRLDLLMCNAGIMAVPPGKTSDGYEVQFGTNHLGHALLIQKCLPLLQQTAALPGADVRVVILTSLGFRMHPSAGIVFSDLKSEQNFPAFGSWIRYGQSKLANILYARELARRYPSITSVSVHPGVVGTGLVENLGWAKRTFVYVTNLWKLMKPEEGKLEERAALRAGWDPVVQVG

SEQ ID NO: 1200 - protein, 153 aa, Triticum aestivum
RGGERAAAMRMHTKDQASEGEKELEGPSLNELEPNLEAYLRFLVDSKLIFQTLENIVDRAAVPWYAEFQNTGLERSEALKKDLKWFSEQGHTIPEPSASDTKYASYLEELSEKDQQAFFCHFYNMYFGQSAGGRLTGKKVPLFSTKPYTKTFM

SEQ ID NO: 1201 - protein, 132 aa, Musa acuminata
MILFALANGKPTVVEFYADWCEVCRELAPQIFQVEQQFRNQVNFVMLNVDNTKWEQELDEFGVEGIPHFAFLDKDGNEEGNVVGRLPKQYFLENVAALVNGEPTIPHARVVGQFSSAEARKVHQVVDPRSHG

SEQ ID NO: 1202 - protein, 181 aa, Medicago truncatula
MEIEARQGVVAKKLWNMVRVLLFIIRKGIAKSKTMVHLNLILKRGKLAGKALINTLMLNHQLYHSSFTCRSDNNSFISPCEYEFSCRNTPANPLRHSSRRFSKSRRQRHNDFSIMNNNIAVQKVFIEMMLNNEKVEAVANSPLAPFTLEDEGNCHQVDIAAEEFINNFYKELNRQNRTIAS

SEQ ID NO: 1203 - protein, 191 aa, Musa acuminata
MARVASSHFGLLRELPPPRLDPSDLPRRLRQATVLRLRSTRPLRLPKMACLAESKPVEPPPIESPPESSAGGGQGRVGRGGGLGPEIDEREVEMDENTAQPGAVKEGSQDASVSQSANFVEFPNKEINRRVALASTLAAVGLFISARLDFGVSLKDLSAAAIPYEEVGSSCFLMFCASCPCLITFLSPMKC

SEQ ID NO: 1204 - protein, 1691 aa, Magnetococcus sp. MC-1
MVDSNDKLVNILLVEDSKSFAALLQGQIQKRLGFRVVWADSLAQTRQHLEQAKHPFLLAILDLHLPDGPHGEVVDLVLQHNLPAIVLTGDKQVEMRTQLFKKGVLDYFVKDNRSVIDAVIHSVLRVARNRHLTMMVVDDSRSARAVLGQFLQRYGFQVRLAQDGAEAWALLQETPVDLVVTDYEMPNLNGVALTAKLRSRYSRDEMGIMGLSSAGQSELAVDFIKAGANDYINKPYEPEELISRVYQMAESVERYGELNQMVARHKAVLDNAQDAIITTDQQGDVLSYNPAAERLFGYPRQNVMGVSLTERLIPESLQNKQAPSLTNAMHGALEMVPNKGRLEAIGKRIDGELIDLQVALSAMPQQGGELHYTAFIQDITDKKQLLKSLEETLSAAESASKAKSAFIANMSHEIRTPMNAVLGFTDLALRGDLSPKVRDYLEKTKNASHSLMGIINDILDFSKMDVGRLELDPVKFDLHFLLERLADLFSKQAADHAVDLVFLAPLNFNQVLYGDAMRLEQIFINLIRNAVKFTKNGFITVRAQPELLEGHRVRLTCSVSDSGIGIDPEQLPHLFAPFVQADSSTTRRFGGTGLGLSIVKRLVSLMDGSVWAESEPGKGSQFHFEILVDLYAEDRRNRSLLPDVLWGERVLVVDDNPDSREHLQALLSALSLSPSLCATPAQARALLLSEQGGPQPFRYLLVDWGLPGKDGVVAVIEMRAMLKAELPEGLHPRIILLSAFGQDEIKNQAERAGVDYCLDKPISRDRLVTALSGGWHDQEQHKDRRKVQQLAAESEIGRLVGGAYLLLVEDNPINQQVAAELLERVGLVVDIAENGQQALDRLARFEYDLVLMDLHMPVMDGSEAMQRIRAQEAWRSLPVLALSTGTGEEEQLDLQDLGFQGFLHKPIRPERLYGALKRWITRPTLDASWRIVARGDEVPLLRGVDPEIGINRLAGNQELYVVLLSRFFQLYAEVLPSMQQQLQRGQWAVLGRQIHGLRNRAAALGAVELAKAVVALELAMADGHEAMIEAAFQSFSHRLEQVLQGIASHQVEQKGVALSSNLLHDDLPELVVDLHQVGPLLDQLAGRLKYHSIDAAALLQALGELLKETPLATAYWTVCKQVDRYNFYEALQSFLLIAKALKYPIIDQNVRCPASVKERILIVDDQPDNVDVLKDILEDYERMAALSGPEALMLAQCDPAPDMVLLDIMMPEMNGYEVCRRLKAMEATQEIPVIFVSAKKEVVDEAEGFLIGGVDYITKPYHGEVVRRRIHSQLELKRHRERLEKQVRMRTAELELATREAELRKDEAEAGNRAKSEFLAIMSHEIRTPLNAILGTHELLSESALSSEQQRLMEISRNAGELLLNLVNETLDLAKIEAGKLDLEYTIFDLPRLVEEITQIKRVAAEHKGVRLESEMALEVPRFVMGDPDRLRQILVNLLSNAIKFTNSGTVSLQMSRGVADRTFFKVSDTGVGIAAHSMEKIFHPFTQADTSTTRKFGGTGLGLTICKHLCEAMGGDIQVESQVGVGSTFSVNLPLPRAESSMDEPSAPEEVIVEQVQAPLRILAVDDAEDNRKLVQAFLAKSGHHLDLCEDGAQALDRFKREHYDLVLMDLLMPVLDGYGATRKIRQWEQQQHRLPTPIIALTALSVRRDLDKALACGCDFYLTKPFRKHQLLDAIYRIHGMLAGSIHQG

SEQ ID NO: 1205 - protein, 396 aa, Burkholderia cepacia
MAKGKFERTKPHVNVGTIGHVDHGKTTLTAAITTVLTKKFGGEAKAYDQIDAAPEEKARGITINTAHVEYETANRHYAHVDCPGHADYVKNMITGAAQMDGAILVCSAADGPMPQTREHILLARQVGVPYIIVFLNKCDSVDDAELLELVEMEVRELLSKYDFPGDDTPIVKGSAKLALEGDTGELGEVAIMSLADALDTYIPTPERAVDGAFLMPVEDVFSISGRGTVVTGRVERGIVKVGEEIEIVGIKPTVKTTCTGVEMFRKLLDQGQAGDNVGILLRGTKREDVERGQVLAKPGSITPHTHFTAEVYVLSKDEGGRHTPFFNNYRPQFYFRTTDVTGSIELPKDKEMVMPGDNVSITVKLIAPIAMEEGLRFAIREGGRTVGAGVVAKILD

SEQ ID NO: 1206 - protein, 382 aa, Magnetococcus sp. MC-1
MNRLVIIGTGLAGYGLAKELRKRQDKRPITLISSDDGASYSKPMLSSALAQNKDAAALVMASAEQMMAQLEAEIITHTQVEQLDTAARTLQLSSGQSIVYHTLVLAVGANPIQLPLQGSGAAEVMQVNSLADYARWRTRLQGVERVMVIGPGLIGCEFANDLLKVGKQVSLIGPDPWPISALIPEAAGRAVQQRLAEAGATWHLETFNGAIEKSAQGFVTELKNGQVVEGDLVLSAVGLRPNIALAQAAGLAVNRGIVTDAYLQTSDPHIYALGDCAEVEGRNLPYVQPLMVAGRALAATLSGEATAVVYPLMPVAIKTSLHPVVTLPVGKMEGRWALSQGEDGVLGRFFDQQERLQGFVLTGSNAALKGQLLKEMEERAAS

SEQ ID NO: 1207 - protein, 476 aa, Comamonas testosteroni
MSTVLYRCPELLIGGEWRPGRHEQRLVVRNPATGEPLDELRLASADDLQLALQTTQQAFEHWRQVPAHERCARLERGVARLRENTERIAHLLTLEQGKTLAEARMECAMAADLIKWYAEEARRVYGRVIPARLPNSRMEVFKFPVGPVAAFSPWNFPLVLSARKLGGAIAAGCSIVLKAAEETPASVAAMVDCLNQELPPGVVQLLYGVPAEVSQALIASPVVRKVTFTGSVPVGRHLAELSARHLKRITLELGGHAPVIVCGDADIARTVNLMVQHKFRNAGQACLAPTRFFVDRRIYGDFVDAFGATQALRVGAGMAAETQMGPVASARRQAAVQDLIARSVAAGARPVASAVPEAGYFVAPTLLADVPLDAPVMSEEPFGPVACAVPFDSLDQAIAQANHNPYGLAGYLFTDSAKAILAVSERLEVGSLAVNGMGVSVPEAPFGGVKDSGYGSESGTEGMEAFLDTKFMHYVA

SEQ ID NO: 1208 - protein, 512 aa, Listeria innocua
MKKIQFFDTTLRDGEQTPGVNFDVKEKIQIALQLEKLGIDVIEAGFPISSPGDFECVKAIAKAIKHCSVTGLARCVEADIDRAEEALKDAVSPQIHIFLATSDVHMEYKLKMSRAEVLASIKHHISYARQKFDVVQFSPEDATRSDRAFLIEAVQTAIDAGATVINIPDTVGYTNPTEFGQLFQDLRREIKQFDDIIFASHCHDDLGMATANALAAIENGARRVEGTINGIGERAGNTALEEVAVALHIRKDFYQAETNIVLNQFKNSSDLISRLSGMPVPRNKAVIGGNAYAHESGIHQDGVLKNPDTYEIITPALVGVDKNSLPLGKLSGKHAFNTRMEEMGYTLSEQEQKDAFKRFKQLADAKKDVTEEDLHALILGQSSESHDAFELKHLQVQYVTGGVQGAIVRIEERDGALIEDAATGSGSIEAIYNTINRLMKQDIELTDYRIQAITAGQDAQAEVHVVIKDDNGTEFHGIGIDFDVLTASAKAYLQASGKSKSTSKQADFEEVK

SEQ ID NO: 1209 - protein, 293 aa, Roseovarius nubinhibens ISM
MAVLVDKNTKVICQGLTGSQGTFHSEQAIAYGTQMVGGVTPGKGGQTHLDLPVFDSVHEAMDRTSADASVIYVPPPFAADSILEAIDAQMPLIVCITEGIPVLDMMRVKRALEGSKSTLIGPNCPGIITPDACKIGIMPGHIHKRGSVGVVSRSGTLTYEAVKQTTDVGLGQSTCVGIGGDPIKGTEHIDVLEWFLADDETESIIMIGEIGGSAEEEAAQFLADEKKKGRWKPTAGFIAGRTAPPGRRMGHAGAIVAGGKGGADDKIEAMKSAGIVVAESPAGLGEAVLAAIG

SEQ ID NO: 1210 - protein, 396 aa, Corynebacterium diphtheriae
MAKAKFERTKPHVNIGTIGHVDHGKTTTTAAITKVLADAYPELNEAFAFDAIDKAPEEKERGITINISHVEYQTEKRHYAHVDAPGHADYIKNMITGAAQMDGAILVVAATDGPMPQTREHVLLARQVGVPYILVALNKCDMVDDEEIIELVEMEIRELLAEQDYDEEAPIIHISALKALEGDEKWTQSIIDLMQACDDSIPDPERETDKPFLMPIEDIFTITGRGTVVTGRVERGSLKVNEDVEIIGIREKATTTTVTGIEMFRKLLDYTEAGDNCGLLLRGVKREDVERGQVVVKPGAYTPHTEFEGSVYVLSKDEGGRHTPFFDNYRPQFYFRTTDVTGVVKLPEGTEMVMPGDNVDMSVTLIQPVAMDEGLRFAIREGSRTVGAGRVTKIIK

SEQ ID NO: 1211 - protein, 350 aa, Listeria innocua
MAYKITSLAGDGIGPEIMASGIKILEAIAAKYNHTFEIESHPFGGAGIDAAGDPIPPETLKACQNADAILLGAIGGPKWDNAPKRPEDGLLALRKALGLFANIRPIQVPSSITHLSPLKKEIVENTDFVVVRELTGGLYFGEPKHWDDVAAVDSLTYTRVEIERIIEKAFEIASTRNKKVTSVDKANVLASSKLWRKIAEEVASRHPDITLEHLYVDAAAMLMIQRPTTFDVIVTENLFGDILSDEASVITGSLGMLPSASHAENGPSLYEPIHGSAPDIANQNIANPMSMISSVSMMLRQSFSLFKEADAIDAATARTMQAGFLTADLGGNTSTTDFTNEVLKQIEGGE

SEQ ID NO: 1212 - protein, 496 aa, Nicotiana tabacum
MVLSKTASESDVSVHSTFASRYVRTSLPRFKMPENSIPKEAAYQIINDELMLDGNPRLNLASFVTTWMEPECNTLMMDSINKNYVDMDEYPVTTELQNRCVNMIAHLFNAPLGDGETAVGVGTVGSSEAIMLAGLAFKRKWQNKMKAQGKPFDKPNIVTGANVQVCWEKFARYFEVELKEVKLSDGYYVMDPEKAVEMVDENTICVAAILGSTLNGEFEDVKRLNDLLIEKNKETGWDTPIHVDAASGGFIAPFLYPELEWDFRLPLEKSINVSGHKYGLVYAGIGWAIWRNKEDLPDELIFHINYLGADQPTFTLNFSKGSSQVIAQYYQLIRLGFEGYKNVMENCQENARVLREGIEKSGRFNIISKEIGVPLVAFSLKDNSQHNEFEISETLRRFGWIVLAYTMPPNAQHVTVLRVVIREDFSRTLAERLVIDIEKVFHGVDTLPARVNAKLAVAEANGSGVHKKTDREVQLEITTAWLKFVADKKKKTNGVC

SEQ ID NO: 1213 - protein, 517 aa, Roseovarius nubinhibens ISM
MSTEVRVPTLGESVTEATVATWFKKPGDAVAQDEMLCELETDKVTVEVPAPAAGTMGEIVAAEGDTVGVDALLATIVAGDAKPAGNTGSPKDDAPAAKPASGGDAAKGNTDVMVPTLGESVTEATVSTWFKKVGDSVSQDEMLCELETDKVSVEVPAPAAGTIVEILAQEGDTVQANGRLAVLSGSADGTITPDTRPEASAADAAPAPAASGSGRSDVEDAPSAKKAMAEAGLNRDQVTGTGRDGRVMKDDVARAAAAGAATGASASAPAPAAPAAPRAVSADDAAREERVKMTRLRQTIARRLKDSQNTAAMLTTYNEVDMTEVMALRNEYKDLFLKKHGVKLGFMSFFTKACCHALKEVPEVNAEIDGTDIVYKNFVHMGIAAGTPTGLVVPVIRDADSMSFAAIEKAIAEKGARARDGKLSMAEMQGGTFTISNGGVYGSLMSSPILNPPQSGILGMHKIQDRPMAINGKVEIRPMMYLALSYDHRIVDGKGAVTFLVRVKEALEDPRRLLMDL

SEQ ID NO: 1214 - protein, 344 aa, Lycopersicon pimpinellifolium
MAMKVDLMNILITLFFVISMFNTQTRGRSQPKLSVSERHELWMSRHGRVYKDEVEKGERFMIFKENMKFIESVNKAGNLSYKLGMNEFADITSQEFLAKFTGLNIPNSYLSPSPMSSTEFKINDLSDDYMPSNLDWRESGAVTQVKHQGRCGCCWAFSAVGSLEGAYKIATGNLMEFSEQELLDCTTNNYGCNGGLMTNAFDFIIENGGISRESDYEYLGEQYTCRSREKTAAVQISSYKVVPEGETSLLQAVTKQPVSIGIAASQDLQFYAGGTYDGNCADQINHAVTAIGYGTDEEGQKYWLLKNSWGTSWGENGFMKIIRDSGDPSGLCDIAKMSSYPNIA

SEQ ID NO: 1215 - protein, 172 aa, Triticum aestivum
MATMMTMSSFAGAAVLPRGSAGHFGAQSLPALGRRALIVRAQTEGPSAPPPNTPKASTSIWDALAFAGPAPERINGRLAMVGFVTALAVEAGRGDGLLSQLGSGTGQAWFAYSVAVLSVASLVPLLQGESAEGRAGAIMNANAELWNGRFAMLGLVALAATEIITGAPFINV

SEQ ID NO: 1216 - protein, 496 aa, Nicotiana tabacum
MVLSKTASESDVSIHSTFASRYVRTSLPRFKMPENSIPKEAAYQIINDELMLDGNPRLNLASFVTTWMEPECNKLMMDSINKNYVDMDEYPVTTELQNRCVNMIAHLFNAPLGDGETAVGVGTVGSSEAIMLAGLAFKRKWQNKMKAQGKPCDKPNIVTGANVQVCWEKFARYFEVELKEVKLSDGYYVMDPEKAVEMVDENTICVAAILGSTLNGEFEDVKRLNDLLIEKNKETGWDTPIHVDAASGGFIAPFLYPELEWDFRLPLVKSINVSGHKYGLVYAGIGWAIWRNKEDLPDELIFHINYLGADQPTFTLNFSKGSSQVIAQYYQLIRLGFEGYKNVMENCQENARVLREGLEKSGRFNIISKEIGVPLVAFSLKDNSQHNEFEISETLRRFGWIIPAYTMPPNAQHVTVLRVVIREDFSRTLAERLVIDIEKVLHELDTLPARVNAKLAVAEANGSGVHKKTDREVQLEITTAWKKFVADKKKKTNGVC

SEQ ID NO: 1217 - protein, 337 aa, Lycopersicon pennellii
MAMKIDLMSILITLFFVISMFNTQTRGRSQPKLSVSERHELWMSRHGRVYKDEVEKGERFMIFKENMKFIESVNKAGNLSYKLGMNEFADITSQEFLAKFTGLNIPNSYLSPSPINDLSDDDMPSNLDWRESGAVTQVKNQGQCGCCWAFSAVGSLEGAYKIATGNLMEFSEQELLDCTTNNYGCNGGFMTNAFDFIKENGGISRESDYEYLGQQYTCRSQEKTAAVQISSYQVVPEGETSLLQAVTKQPVSIGIAASQDLQFYAGGTYDGSCANRINHAVTAIGYGTDEKGQKYWLLKNSWGTSWGEDGFMKIIRDSGNPAGLCDIAKVSSYPNIA

SEQ ID NO: 1218 - protein, 172 aa, Brassica napus
  misc_feature (164)..(164): Xaa can be any naturally occurring amino acid
MVRSQTLHLNFVVNLYSLVWCSYRVIMERLSSPARLMIVSDLDHTMVDHHDPENLSLLRFNSLWEHAYRHDSLLVFSTGRSPTLYKELRKEKPLLTPDVTIMSVGTEITYGNSMVPDNGWVDTLNNKWDLGVVKEETGNFSELTLQAETEQRPHKVSFYVDKSXAHEVTKEL

SEQ ID NO: 1219 - protein, 263 aa, Mycobacterium avium subsp. paratuberculosis K-10
MTDAPGALAERRGNVMVITINRPEARNAINAAVSIGVGDALEEAQHDPEVRAVVLTGAGDKSFCAGADLKAIARRENLYHPDHPEWGFAGYVRHFIDKPTIAAVNGTALGGGTELALASDLVVADERAQFGLPEVKRGLIAAAGGVFRIAEQLPRKVAMRLLLTGEPLSAAAARDWGLINEVVEAGSVLDAALALASAITVNAPLSVQASKRIAYGVDDGVVVGDEPGWDRTMREMRALLKSEDAKEGPRAFAEKREPVWQAR

SEQ ID NO: 1220 - protein, 508 aa, Glycine max
  misc_feature (177)..(177): Xaa can be any naturally occurring amino acid
  misc_feature (312)..(312): Xaa can be any naturally occurring amino acid
  misc_feature (314)..(315): Xaa can be any naturally occurring amino acid
  misc_feature (373)..(373): Xaa can be any naturally occurring amino acid
MLSRFTRLFSAPSNVARLVNGVQPRFSTTTVQDAPKIEEEPRFLEMVHQYFDIAGTFTDIPKDKLEVYKQCSAVFKVRLPLVRDNGKMEFIPAYRAQHKHHRLPVKGGTRYSEHIDLQEVEALSCLMTLKCAVVELPYGGGKGGIKIDPSKYSARELEDLTRRYTLELARKNFIGAXIDVPGPDMGTGAREMSWMKDTYTVFYGHNDINATACVTGKPLSQGGIKGRVESTGLGVFFGVREFLKDVELMKKYGIDSTNGYEGKTIIVQGFGNVGYFASKFMCEQGAKLIGVVDVEGSIYNPDGIDPDKLLEXRXXKGTLLDFPGSESYKDDSAFYKPCDFAIPAAVEKSINKLNAGRLQCKVLAEAANGPTTXAAEDILTKRGILVLPDILLNAGGVTVSYFEWLKNLDHMRPGRLVKRWEEKSKQNLLKIIADKTGTDLKLTAEDAKLLRGASELDIVYSGLEEVMCAAVEETVATSKKLNVPFRLASYVNAILKVHKVYEESGFAL

SEQ ID NO: 1221 - protein, 345 aa, Lycopersicon esculentum
MAMKVDLMNILITLFFVISMFNTQTRGRSQPKLSVSERHELWMSRHGRVYKDEVEKGERFMIFKENMKFIESVNKAGNLSYKLGMNEFADITSQEFLAKFTGLNIPNSYLSPSPMSSTEFKKINDLSDDYMPSNLDWRESGAVTQVKHQGRCGCCWAFSAVGSLEGAYKIATGNLMEFSEQELLDCTTNNYGCNGGFMTNAFDFIIENGGISRESDYEYLGQQYTCRSQEKTAAVQISSYQVVPEGETSLLQAVTKQPVSIGIAASQDLQFYAGGTYDGNCADRINHAVTAIGYGTDEEGQKYWLLKNSWGTSWGENGYMKIIRDSGDPSGLCDIAKMSSYPNIA

SEQ ID NO: 1222 - protein, 481 aa, Haloarcula marismortui ATCC 43049
MTQTYENYIDGEWTGSGETQEVTNPADETDVVSTVPVASAADADEAVAAAAAATDEWGEMPGPERGAILRETGEILKSRKDELAETLTREEGKPLGEAEGEVQRAIDIFYYYAEKARDFGGTVKQPSGGRAGLQTKKEPMGVAALITPWNYPIAIPAWKIAPALAVGNTVVIKPAMQAPTVGAMIVEALDEAGIPDGAINLVCGPGSEVGEQLTTHDDVDVVSFTGSASVGEHVYEQATSNGKRAQAEMGGKNPTVVMPSADVDKAADIVGAGAFGGTGQACTATSRAIVHEDVYDEFLDAIVDYAESLEIGDGLDRAGMGPHVSEDELAGSLEYIDVAQSEGATLETGGEELTSGEYDGGNFISPAVFSDVEPDMRIAQEEVFGPVLAVMSVSDFDEGVEVANDIDYGLSASIVTDRIKEENEFIERSESGVVKVNEKTTGLELHVPFGGLKRSSTNTYREQGDAGLEFFSYIKTVYRNS

SEQ ID NO: 1223 - protein, 604 aa, Francisella tularensis subsp. holarctica
MERREKRIRKLRNKSGKVFAIETNLTGRQLLNNRVLNKDVAFSQEERVAFALIGYLPEKVESLEEQAIRVRRQLDLKPNSLEKYVFLNRLHDLNTTLFYHFVRENLEEIMPIIYTPTVGEAVQKYSSSFRKQSGLFISISHKKHIARILERYEYNSIDLVLVTDGEAVLGIGDQGIGGMNISIGKIMVYVAASGIDPARVLPVQLDMGTNNDALLNAPGYLGVRLPRVSGETYDEFIEEFVTQVKARFPNVFLHWEDLGRDNATRILEKYKDKLCTFNDDIEGTGIVATANCIAGVKTASTIRINAGEITVEEALSGICDIKVVIFGAGSAGCGIARQLADVIADRAGVSIEKARSSIYLVDRYGLVCDRLRAKRIIPEQKLFVKTSEEIDKWKVEDFNYITLEETVKNTKCDILIGTSGQPGSFTKEIIKTMAKNNNYPIIMPLSNPTSLCEALPEDIIKWTNGKALIAAGSPFPDVTYNGRDYRISQGNNAFIFPGLGLGSVAVHARVLTKGMIRAACYRLSELSPMVINEDITQPLLARITDLVDVTKEITKAVAKQAILEGVHGVDIDLEDLTETELDEEIERLINLSSWTPTYAPYMPI

SEQ ID NO: 1224 - protein, 368 aa, Staphylococcus aureus
DSDSDPGSDSGSDSGSDSNSDSGSDSGSDSTSDSGSDSASDSDSASDSDSASDSDSTSDSDSTSDSDSASDSDSDSDSDSDSDSDSDSDSDSDSDSDSDSDSDSDSDSDSDSDSDSDSDSDSESDSDSDSDSDSDSDSDSDSDSDSVSDSDSDSDSDSESDSDSDSDSDSDSDSDSESDSDSDSDSDSDSDSDSDSDSDSDSDSDSDSDSDSDSDSDSDSESDSDSDSDSDSDSDSDSDSDSDSDSDSDLDSDSDSDSDSDSDSDSDSDSDSDSDSDSDLDSDSDSDSDSDSDSDSASDSDSDSDSDSDSESDSDSDSDSDSDSDSASDSDSDSDSASDSDSDSTSDTGSDNDSDSESDSNSDSDSGS

SEQ ID NO: 1225 - protein, 368 aa, Staphylococcus aureus
DSDSDPGSDSGSDSGSDSNSDSGSDSGSDSTSDSGSDSASDSDSASDSDSASDSDSTSDSDSTSDSDSASDSDSDSDSDSDSDSDSDSDSDSDSDSDSDSDSDSDSDSDSDSDSDSDSDSDSESDSDSDSDSDSDSDSDSDSDSDSVSDSDSDSDSDSESDSDSDSDSDSDSDSDSESDSDSDSDSDSDSDSDSDSDSDSDSDSDSDSDSDSDSDSDSDSESDSDSDSDSDSDSDSDSDSDSDSDSDSDLDSDSDSDSDSDSDSDSDSDSDSDSDSDSDLDSDSDSDSDSDSDSDSASDSDSDSYSDSDSESDSDSDSDSDSDSDSASDSDSDSDSASDSDSDSTSDTGSDNDSDSESDSNSDSDSGS

SEQ ID NO: 1226 - protein, 501 aa, Triticum aestivum
  misc_feature (131)..(131): Xaa can be any naturally occurring amino acid
  misc_feature (162)..(162): Xaa can be any naturally occurring amino acid
  misc_feature (252)..(252): Xaa can be any naturally occurring amino acid
  misc_feature (269)..(269): Xaa can be any naturally occurring amino acid
  misc_feature (278)..(278): Xaa can be any naturally occurring amino acid
  misc_feature (335)..(335): Xaa can be any naturally occurring amino acid
HYRTSLYKKAGWYRSGIPGISSTHASDPIHGRKPPRSSGTIAAVPSHASSPARLFHGRSRWLASDASACAAREPSAELVEVPLAQTGEGIAECELLRWFVSEGDQVDEFQQLCEVQSDKATIEITSRFKGXVHQIQFAPGDIVKVGETLLKMIVNDSQVVPXDSLASSPDIQPGADTFTSSLREGNALRGSLSTPAVRHLVKQYGLNIDDIQGTGKDGRVLKEDVLNYAARKGLLQGAPSASEENVARAEFXRGEGGKPLLDPQFYGDXRIRLRGYQXRAMVKSMTLAAKVPHFHYLEEINCDALVQLKASFQKENKDHDVKHTFLPFLIKSLSXHLSKYPLLNSSFIDETNEVILKGFHNIGSSYGYRTGISGCPAIKKVQSLSILEITKELSRLHEMALQNRLSTNDITGGTITLSNIGAIGGKFGSPVLNLPEVAIIALGRIQKLPRFDDEENVYPSSTINVTVGADHRVVDGATVARFCNEWKSLVEKPELLLLHMR

SEQ ID NO: 1227 - protein, 356 aa, Staphylococcus aureus
DSDSDPGSDSGSDSGSDSNSDSGSDSGSDSTSDSGSDSASDSDSASDSDSASDSDSTSDSDSTSDSDSASDSDSDSDSDSDSDSDSDSDSDSDSDSDSDSDSDSDSDSDSDSDSDSDSDSDSESDSDSDSDSDSDSDSDSDSDSDSVSDSDSDSDSDSESDSDSDSDSDSDSDSDSESDSDSDSDSDSDSDSDSDSDSDSDSDSDSDSDSDSDSDSDSDSDSDSDSDSDSDSDSDSDLDSDSDSDSDSDSDSDSDSDSDSDSDSDSDLDSDSDSDSDSDSDSDSASDSDSDSDSDSDSESDSDSDSDSDSDSDSASDSDSDSDSASDSDSDSTSDTGSDNDSDSESDSNSDSDSGS

SEQ ID NO: 1228 - protein, 384 aa, Buchnera aphidicola str. APS (Acyrthosiphon pisum)
MFEPSELSNNAIIKVIGVGGGGSNAVEHMVRERIEGVEFFAINTDAQALRKIEVGQTIQIGNNITKGLGAGANPEIGRTSAEEDKELLKSALDGSDMVFIAAGMGGGTGTGAAPVVAEIAKELGILTVAVVTKPFNFEGKKRMIVAEQGIIELSKYVDSLIIIPNDKLLKVLSRGISLLDAFSAANNVLKGAVQGIAELITRPGLMNVDFADVRTVMLEMGYAMMGTGISSGENRAEEASEIAISSPLLEDIDLSGARGVLVNITAGFDLKLDEFETVGNTIRSFSSDHATVVIGTSLDPDMNDTLRVTVVATGIGMEKNLDVNQIKNKSSREVLMDYRYQYLNISPKKTDKKIIKKEIKNTKEKINKEPEYLDIPSFLRKRAD

SEQ ID NO: 1229 - protein, 701 aa, Mycobacterium bovis AF2122/97
MTTSESPDAYTESFGAHTIVKPAGPPRVGQPSWNPQRASSMPVNRYRPFAEEVEPIRLRNRTWPDRVIDRAPLWCAVDLRDGNQALIDPMSPARKRRMFDLLVRMGYKEIEVGFPSASQTDFDFVREIIEQGAIPDDVTIQVLTQCRPELIERTFQACSGAHRAIVHFYNSTSILQRRVVFRANRAEVQAIATDGARKCVEQAAKYPGTQWRFEYSPESYTGTELEYAKQVCDAVGEVIAPTPERPIIFNLPATVEMTTPNVYADSIEWMSRNLANRESVILSLHPHNDRGTAVAAAELGFAAGADRIEGCLFGNGERTGNVCLVTLGLNLFSRGVDPQIDFSNIDEIRRTVEYCNQLPVHERHPYGGDLVYTAFSGSHQDAINKGLDAMKLDADAADCDVDDMLWQVPYLPIDPRDVGRTYEAVIRVNSQSGKGGVAYIMKTDHGLSLPRRLQIEFSQVIQKIAEGTAGEGGEVSPKEMWDAFAEEYLAPVRPLERIRQHVDAADDDGGTTSITATVKINGVETEISGSGNGPLAAFVHALADVGFDVAVLDYYEHAMSAGDDAQAAAYVEASVTIASPAQPGEAGRHASDPVTIASPAQPGEAGRHASDPVTIASPAQPGEAGRHASDPVTIASPAQPGEAGRHASDPVTIASPAQPGEAGRHASDPVTSKTVWGVGIAPSITTASLRAVVSAVNRAAR

SEQ ID NO: 1230 - protein, 191 aa, Arabidopsis thaliana
MCAPQPSNEFPLIFRKDGKTCVFWDVEDYPIPAGLHPRSIRRRIVKDVKKYGCDAEVLIHAYANDNTVSVTMRRQFSAAGIKLEVFTQAGDKYARHCSLYGDIMLWSLENPPPSNIIVIAKIIDDDLADRIGCLTTVWSYGLLISQVKPEWLERLFPVGSYPSFLAAIFDGGLPKSSKANKDRFPLDESDD

SEQ ID NO: 1231 - protein, 788 aa, Magnetospirillum magnetotacticum MS-1
MDGKIVWVHAAGKLVRDEANGAIRFMYGAYQDITAVKAAEDAIRAAKEIAEEATKAKSDFLANMSHEIRTPMNAIIGMSHLALQTKLDKKQRNYIEKVHRSGENLLGIINDILDFSKIEAGKMTMESIDFRLEDVMDNLANLVGLKAEDRGLELLFNVAPDIPSALIGDPLRLGQILINLGNNAVKFTEKGEIIVGAELVERSEDQAELHFWVRDSGIGMTPEQCGKMFKSFSQADTSTTRKYGGTGLGLAISKTLVELMDGRIWVESEAGKGSTFHFHVRVGVQSHPPLRRVFSPDELLGLRVLVVDDNAAAREILSAMAKGFGLEVDSAWDGTQALEMVAAAERKDLPYDLILMDWKMPIMDGVETVQKLQHGDHARIPAVIMVTAYGREEAATNAEERGVVMKTVLTKPVTAASLLEAIGETLGKGVVAEHQGQDKAESYKETMKALEGCRVLLVEDNEMNQELATELLSQAGMEVVVAVHGQDALDILARDNRFDGILMDCQMPVMDGYTATRAIRANPALSAIPVIAMTANAMAGDREKVMEAGMLDHIAKPLNLETMFSTMAKWIKVAKAPAKTAPAPREKPKTAEVSGGLPDLPGIDIKAGMATMANKESLYLRMLAKFRDSQGHFADLFAAARQDPDPQAATRAAHTLKGTAGNIGAKGVQSAAAALEQACKEGRPEGEIRQALVSALAELDPVIAALGRMDAPETTKAPAIPEAEVTAALARLAALLEDSDAEAGDLLDELLPKLEGTALAGALKPVADAIEDCDLDLALAKLRGLDVK

SEQ ID NO: 1232 - protein, 363 aa, delta proteobacterium MLMS-1
MQGLIDSTLREGLQTVGLDLSQERQVELAGELAAMGIEELEVGPLRPDDDEVGQLLNRCRHQAGVARLAIWCRCRAADIERALAWQPEVLALSIPISRLQMQVKLQRDEAAVKELVTAALRRTRGRVGYLSLGLEDATRAEPRFLAEMVRLAKREGAHRIRLADTVGIATPAEISELVRLVRDCGGRRLAIGVHTHNDFGMAGANAIAALAAGADWADVTLLGLGERAGLARLEEVAAYLALRRQRPYQLTGLPQLCARLAGFCGQPIASRQPVVGSDIFACETGLHLAALQQDPATYEPFEPALVGNRRQLLYGTKTGRQALAGLSGDRPAEPPVGRLRRLARRLGRPLNEEELAVFLQAAA

SEQ ID NO: 1233 - protein, 761 aa, Silicibacter sp. TM1040
MSLAEKLAQERRARLAAERLLELKQAELTDANRKLGRHALALTKRIGATQAEIATFKNENEKVKSDLNTANEKVEQAERRLWHSIQAFQDGFAFFDSDSKLIGANTAYLNIFEGVEEVSPGVSYVRILQILTDEGLIDTEELSADSWRAMMTERWMSPAPEPTVVRLWNDRYLKLIDQRGHDGDIVSLALDITATVHYEEELRSARERAEAANRAKSAFLANMSHEIRTPMNGVVGMAELLSDTTLTEEQRLYANTIKNSGEALLVIINDVLDYSKIEADKLALHPEAFDLEACMHEVVMLLQANARDKGLTLLVDYDLFMPTNFIGDPGRIRQILTNLIGNAIKFTNEGHVTARVTGVPHPEDNTVMLHISIEDSGIGIPDDKIQHIFGEFNQVEDETNRQFEGTGLGLAITERLIKLMDGEIWVESQLGKGSCFGFRLPLVVADGSQVNAPELPENLNCVMIVDDMDINREILNRQLQRLDLKVVAVTSGAEALDVLNAEIDLVITDRNLPGMDGLKLARSLHHASPQTPVLLLSSDPADGSDPALSDLFAGILQKPIPRGALFRALSKLDAPSVHPARPQDVPPAAPAIEPPSDAPVQVPAPEAGVDFGSGATIASDLRRMRVLAAEDNRTNQLVFRKMVKDMNIDLRFAGNGLEAVELYQSFKPDMIFMDISMPKMDGKEATQAIRELEKENGRRVQIVALTAHAMDGDSEGILAAGLDDYLTKPLRKSVIHDRIMKNMPTAVAPLQGEGDDLQATG

SEQ ID NO: 1234 - protein, 421 aa, Silicibacter sp. TM1040
MGIFAIRLPDVGEGIAEAELTEWHVKPGDIVKEDDVLAAVMTDKAAVEVPSSVEGKVVELGGEIGDMLAIGCVLVRIEVDGEGNEAASVAEPEPTPAPKEQKAEPEPERGDKPAEPARPVVKTGKPVARAKNTKPLAAPSVRARAREEGVDLRQVPGSGPGGRISHGDLENWIASGGIQQGSVKRGKNTGVEDVRVVGMRRKIAEKMAISKRQIPHITIVEEIEMEALEDLRAALNRKYKDQRPKLTLLPFLMRAIVEAVREQPELNARYDDEKGIIHRHGGVHVGIATQTPNGLNVPVVHHAEAGSLWDNAAELARLAEAARDGSIKRDELTGGTITITSLGALGAIATTPIINHPEVAIVGVNKMQMRPVWDGQQFQPCKMMNISCSFDHRVIDGWDAAVFVQKLKLLLETPAMLFVEG

SEQ ID NO: 1235 - protein, 490 aa, Escherichia coli
MDIQKRVSDMEPKTKKQRSLYIPYAGPVLLEFPLLNKGSAFSMEERRNFNLLGLLPEVVETIEEQAERAWIQYQGFKTEIDKHIYLRNIQDTNETLFYRLVNNHLDEMMPVIYTPTVGAACERFSEIYRRSRGVFISYQNRHNMDDILQNVPNHNIKVIVVTDGERILGLGDQGIGGMGIPIGKLSLYTACGGISPAYTLPVVLDVGTNNQQLLNDPLYMGWRNPRITDDEYYEFVDEFIQAVKQRWPDVLLQFEDFAQKNAMPLLNRYRNEICSFNDDIQGTAAVTVGTLIAASRAAGGQLSEKKIVFLGAGSAGCGIAEMIISQTQREGLSEEAARQKVFMVDRFGLLTDKMPNLLPFQTKLVQKRENLSDWDTDSDVLSLLDVVRNVKPDILIGVSGQTGLFTEEIIREMHKHCPRPIVMPLSNPTSRVEATPQDIIAENKPPFSVFRDKFITMPGGLDYSRAIVVASVKEAPIGIEVIPAHVTEYL

SEQ ID NO: 1236 - protein, 406 aa, Thermus thermophilus HB27
MQELKVPSVGESIVEVEIGAWLKGEGESFAQDEPLVELITDKATLELPAPFAGTLKQILKKTGETARVGEAIALLEEGRAEAAPKAQAPAEAPKEPSPEPLAMPAAERLMQEKGVSPAEVQGTGLGGRILKEDVMRHLEERTPTKPQEAPPPPPPSRPVPPPSTPTQPPADKPWRVSEAVPMTPLRRRIAERLLMVRQTTAMLTTFNEADMSAVIALRKEFGEAFQKKYGVKLGFMSFFVKAVVQALKEIPELNAEIRDNHIVYHRYYDIGIAVGGGEGLVVPVIRDADRLSFAEIEQKIADFAERARTKKLKPEELMGGTFTITNGGIYGSLNSTPLLNPPQVGILGMHAIQERPVVRDGQVVIRPMMYLALSYDHRIVDGREAVTFLRRVKELIENPARLLLEV

SEQ ID NO: 1237 - protein, 107 aa, Haemophilus influenzae R2846
MSEVLHINDADFESVVVNSNIPVLLDFWAPWCGPCKMIAPVLDELAPEFSGKVKIVKMNVDDNQATPAQFGVRSIPTLLLIKNGQVVATQVGALPKTQLANFINQHI

SEQ ID NO: 1238 - protein, 598 aa, Magnetococcus sp. MC-1
MCGICGVMYFQPQTPQPAMLEKMVEKLHQRGPDGGGIEIDGQLGLGHRRLKVIDLSENGHQPMQDDALGLTIVFNGCIYNYQALRQSLLELGYSFFSTSDTEVILKAYHAWGWQCVQRFNGMFAFAIYERQSGRVVLARDRLGIKPLYIHQDKSHLRFASSIPSLLAGGGITTTLDPIALHHFLSFHSVVPAPRTLLQQVQKLPPATVRIVEKNGSETNHTYWNLQMGPQAGDAERTEAEWQQLLDQALRAAVSRRLVADVPVGLLLSGGLDSSLMAGLLVESGQLSRGGLSTFSIGFEQAGGEEGDEFQYSDIVAAHFGTDHHKIFIETNNLPELLRETVRAMSEPMVSHDAVGFYLLSREVAKHVKVVQSGQGADEVFAGYHWYPKVDAGQDAFQDYRKAFFDRSHEECCEMVHRDIAAAWQQDYSSAFVESWFAHPHSGTAAVDKALHLDQNIMLVDDPVKRVDNMTMAWGLEARVPFLDHELVELAARIPGHLKLQQGGKGILKEVARPIIPHAVIDRAKGYFPVPALKHMDGPVLKLAKEVLTSPRATQRGLIQPSYINRLLDHPTQHITPLHGSKLWQLTLLELWLQTHDIH

SEQ ID NO: 1239 - protein, 426 aa, Musa acuminata
MLSGDRNEQSRPRCGWPIRTHYPLLIHGESVTNSTRSESRPRQSPFPCASRPLFSPFFLPAQSSEPLLQPRWSPCDAPPRTTPCSARRPASCARGGGRAPWCALPWQWRPARRPRSPSSGLGRDSPLALAQAHETREKLKAAHSELAEEGAIEIVIIKTTGDMILDKPLADIGGKGLFTKEIDDALLQGRIDIAVHSMKDVPTYLPEGTILPCNLPREDVRDAFICLTANSLAELPAGSVVGSASLRRQSQILYRYPSLKVVNFRGNVQTRLRKLKEGDVSATLLALAGLRRLNMAENATAVLSVEEMLPAVAQGAIGIACRSNDDKMMEYLSSLNHEDTRLAVACEREFLAVLDGNCRTPIAAYAYRDEDGNCSFRGLLASPDGSKVFETTRSGPYSFDDMVELGKDAGHELKAKAGPGFFDSLQ

SEQ ID NO: 1240 - protein, 537 aa, Aspergillus niger
MARLLKAVTVCALAGIAHAFNYDQPYRGQYHFSPQKNWMNDPNGLLYHNGTYHLFFQYNPGGIEWGNISWGHATSEDLTHWEEQPVALLARGYGSDVTEMYFSGSAVADVNNTSGFGKDGKTPLVAMYTSYYPVAQTLPSGQTVQEDQQSQSIAYSLDDGLTWTTYDAANPVIPNPPQPYQAQYQNFRDPFVFWHDESQKWVVVTSIAELHKLAIYTSDNLKDWKLVSEFGPYNAQGGVWECPGLFKLPLDGGSSTKWVITSGLNPGGPPGTVGSGTQYFVGEFDGTTFTPDADTVYPGNSTANWMDWGPDFYAAAGYNGLSIKDHVHIGWMNNWQYGANIPTYPWRSAMAIPRHLALKTINNKTTLVQQPQEAWSSISSKHPLYSRTYSTFSEGSTNASTTGETFRVDLSFSATSKASTFAIALRASANFTEQTLAGYDFAKQQIFLDRTKSGDVSFDNTFASVYHGPLVPDSTGMVRLSIFVDRSSVEVFGGQGETTLTAQIFPSNDAVHARLVSTGGATEDVRVDVHNITSTWN

SEQ ID NO: 1241 - protein, 328 aa, Musa acuminata
MRHRAPLPPRPADLPRAPAAAGVPRRRGGRLAGQGPPNPDRDAWKVIKFDPFLRDSDLALAQARETRDKLKAAHSELAEEGAVEIIIIKTTGDMILDKPLADIGGKGLFTKEIDDALLQGRIDIAVHSMKDVPTYLPEGTILPCNLPASLRRQSQILCRYPSLKVVNLRGNVQTRLTKLKNGDVHATLLALAGLKRLNMVENVTSILSMEEMLPAVAQGAIGIACRSNDNKMMEYLSSLNHEDTRSAVACEREFLTVLDGNCRTPIAAYAHRDKDGSCSFRGLLASPDGSKVYETTRIGPYSFDDMVEMGKDAGHELKAKAGPGFYDC

SEQ ID NO: 1242 - protein, 426 aa, Arabidopsis thaliana
  misc_feature (394)..(394): Xaa can be any naturally occurring amino acid
  misc_feature (400)..(400): Xaa can be any naturally occurring amino acid
  misc_feature (413)..(413): Xaa can be any naturally occurring amino acid
MDFNAGVPMSSLSPLMNQDAMWQMNLSSDETMETGSYPERPGEPDCSYYIRTGLCRFGSTCRFNHPRDRELVIATARMRGEYPERIGQPECEYYLKTGTCKFGVTCKFHHPRNKAGIAGRVSLNMLGYPLRSNEVDCAYFLRTGHCKFGGTCKFNHPQPQPTNMMVPTSGQQSYPWSRASFIASPRWQDPSSYASLIMPQGVVPVQGWNPYSGQLGSVSPSGTGNDQNYRNLQQNETIESGSQSQGSFSGYNPGSSVPLGGYYALPRENVFPERPGQPECQFYMKTGDCKFGTVCKFHHPRDRQAPPPDCLLSSIGLPLRPGEPLCVFYTRYGICKFGPSCKFDHPMRVFTYDNTASETDEVVETSTGKSRRLSVSETRQAATTSSGKDTTIDXIHSSEXNKGRRRRAFKQEXKNKSFLIFQKRNL

SEQ ID NO: 1243 - protein, 368 aa, Staphylococcus aureus
DSDSDPGSDSGSDSGSDSNSDSGSDSGSDSTSDSGSDSASDSDSASDSDSASDSDSTSDSDSTSDSDSASDSDSDSDSDSDSDSDSDSDSDSDSDSDSDSDSDSDSDSDSESDSDSDSDSDSDSDSDSDSDSDSVSDSDSDSDSDSESDSDSDSDSDSDSDSDSESDSDSDSDSDSDSDSDSDSDSDSDSDSDSDSDSDSDSDSDSDSDSDSDSDSDSDSESDSDSDSDSDSDSDSDSDSDSDSDSDSDLDSDSDSDSDSDSDSDSDSDSDSDSDSDSDLDSDSDSDSDSDSDSDSASDSDSDSDSDSDSESDSDSDSDSDSDSDSASDSDSDSDSASDSDSDSTSDTGSDNDSDSESDSNSDSDSGS

SEQ ID NO: 1244 - protein, 349 aa, Aeropyrum pernix K1
MIAGEANLVYALGYGNPAGVLVLSGKCGSTLVVPLLDYERALRSVDTDVEVKAFYRGGESGIEPDIPKSDLISSENMAEAAKRVLEGCSSPAVDFKWLRWETATALSNALDNPGDGSQLISQVRSVKEEWEIGLIAEAARIAEAALRRGIEELREGVSEREVAGAVVDVIMKSGGWGPSFPVIVAFGGNTALPHHHTGDARLPHASPVLFDLGSVYKGYMSDMTRSLWRGPGGAEYRRLEELVAEAQAEAIDSVAPGVEAWEVDKAARLRLSKEGFSKYFIHGTGHGVGVEIHENPYLRPGSSEELKPGMVVTIEPGVYLPGMYGVRIEDMVLVTKRGRKLLTSFARIL

SEQ ID NO: 1245 - protein, 344 aa, Staphylococcus aureus
DSDSDPGSDSGSDSASDSDSASDSDSASDSDSTSDSDSTSDSDSASDSDSDSDSDSDSDSDSDSDSDSDSDSDSDSDSDSDSDSDSESDSDSDSDSDSDSDSDSDSDSDSVSDSDSDSDSDSESDSDSDSDSDSDSDSDSESDSDSDSDSDSDSDSDSDSDSDSDSDSDSDSDSDSDSDSDSDSDSDSDSDSDSDSESDSDSDSDSDSDSDSDSDSDSDSDSDSDLDSDSDSDSDSDSDSDSDSDSDSDSDSDSDLDSDSDSDSDSDSDSDSASDSDSDSDSDSDSESDSDSDSDSDSDSDSASDSDSDSDSASDSDSDSTSDTGSDNDSDSESDSNSDSDSGS

SEQ ID NO: 1246 - protein, 146 aa, Photobacterium sp. SKA34
MEYLHTMVRVSNLDASLDFYCNKLGLVEIRRKESERGRFTLVFLAASNQAETAKETQSPLLELTYNWDPESYTGGRNFGHLAFAVDNIYDLCAHLQNNGVVINRPPRDGHMAFVRSPDGISIELLQKGDALEAAEPWVSMQNQGEW

SEQ ID NO: 1247 - protein, 342 aa, Arabidopsis thaliana
MESDLIDLFEGAKKAADAAALDGVTSSGPEVSQCIDALKQLKKFPVTYDTLVATQVGKKLRSLAKHPVEDIKSVATDLLEIWKKVVIEETAKAKKTEGTNGCKEAKVNKMDVEKPSNPAPVKVQKLQRGDSAKSIKAVKDEKVSKDNQSSMKAPAKAANAPPKLTAMLKCNDPVRDKIRELLVEALCRVAGEADDYERESVNASDPLRVAVSVESLMFEKLGRSTGAQKLKYRSIMFNLRDSNNPDLRRRVLTGEISPEKLITLSAEDMASDKRKQENNQIKEKALFDCERGLAAKASTDQFKCGRCGQRKCTYYQMQTRSADEPMTTYVTCVNCDNPWKFC

SEQ ID NO: 1248 - protein, 426 aa, Frankia sp. CcI3
MSRVDDPENTFDVIVVGAGPAGGSAARAAANAGARVCVLERSAVPRYKTCGGGLVGLSADHLGIELAGLVRASVSSLTMTWDGRFEVTRGRSGGRPWMSMVMRSDLDAALLAAAAAAGATVRTGAHVVGLTESGPGGTGIAEDAGDQDDGWVTVRLRAGADLRARVVVGADGTSGRCGTYVGVRCDQVDVGLEGEFVADPARAARWAGRMLIDWGPVPGSYGWVFPKGRVLTVGVIGDRAEGAALRAYYTRFVDRLGLTDLPRQHDSGHLTRVRAVASPLRRGRVLVAGDAAGLLDPWTREGISFALRSGRLAGEAAAAASVGVGRARAGVTRAGGVTDTRPTGPGATALDALAAYPARVEAILGPEMAAGREVLAAFTRRPGAMHTVMAAPGTFGLFTRLIEGRTTIARQLRRPGVRAAVAALSH

SEQ ID NO: 1249 - protein, 516 aa, Blumeria graminis
MHRTFHPYFLLKMSGSSQRHSHVTGYLILLVAVATLGPLQYGYHLAELNAPQDVITCHSLLGRQNVASKSLSNPSQCIPMTEAEFAALSSIYILGGLAGAITAGPISSSHGRLLTMRITGIFFILGSLIETIAESVPVMSTGRFLAGLGAGAATVVAPMYISEISPAEKRGLFGTMTQAMISVGIFVTQSLGYFFSRGMLWRIILGVGAGFGLLLGAGLCFIPESPSWLASHHNPTLAVKTLQRIRGAGTPIHKETAGWNVQEINGEEERLIRPSDLSSTSQYNQHNLATPNLKLPSVGFFGVLQDPLYRPAIMAVCGIMIAQQLSGINSIMMYSVSLLRGVLPIPSILLTIIMSAMNVITTIVCAPLADRIGRKSCLLLSIAGMGTMSLLLAISLRMEWKLFSAIAVISFVAFFATGLGPVPYIMASELVGQEAVGAAQSWALAANYLASFLVAQFFPLLNSWMNNRWGGAGWVYFIFTAFAGVSWIFVTYYVPETNGKTGPDEVWGRTTGEVAD

SEQ ID NO: 1250 - protein, 183 aa, Pseudomonas syringae pv. phaseolicola 1448A
MNIRFVSIPLLLLAMSGAAMAADCPPLLQGELPKLRAKENIDLCKRFAGKPLVVVNTASFCGFAPQFKGLEELSQRYKGQGLEVLGVPSNDFKQEAKDGEETAKVCYVNYGVTFTMTEPQAVRGDDATHLFKVLAEQSSAPRWNFYKYVVDRQGKVIANFSSMTKPDDPELIAAIEKAIASKP

SEQ ID NO: 1251 - protein, 304 aa, Bartonella rattimassiliensis
SRIEARITVFGVGGGGGNAVNNMINAGLQGVDFVVANTDAQALAMSKAERVIQLGAAVTEGLGAGALPEVGQAAAEECIDEIIDHLADSHMVFITAGMGGGTGTGAAPVVARAAREKGILTVGVVTKPFQFEGARRMKTAEAGIEELQKSVDTLIVIPNQNLFRIANDKTTFADAFAMADQVLYSGVASITDLMIKEGLINLDFADVRSVMHEMGRAMMGTGEASGEGRALAAAEAAIANPLLDDTSMRGARGLLISITGGRDMTLFEVDEAANRIREEVDADANVIFGAIDDESLEGVIRVSV

SEQ ID NO: 1252 - protein, 96 aa, Lycopersicon esculentum
MAKSGYNASFLLLISMFLILLTFSNVVEGYNKLRPTDCKPRCTYRCSATSHKKPCMFFCQKCCATCLCVPKGVYGNKQSCPCYNNWKTQEGKPKCP

SEQ ID NO: 1253 - protein, 388 aa, Frankia sp. EAN1pec
MTTSDTATGAATGPIGSIDAIDPGPVDPVSIGPDSIAPDSVGSVGPATDGEPPASPRQTLTLAKALNTGLLSAMAADPKVVIMGEDVGKLGGVFRITDGLQARFGEDRVIDTPLAESAIVGTAIGLAMRGFRPVCEIQFDGFVYPAFDQIVSQLAKLHYRSAGRIRLPVTIRIPYGGGIGAVEHHSESPEAYFCHTAGLRVVTCSNPADAHLMIQQAVASDDPVIFLEPKRRYWEKGEVDTTPLASMPVQEQLALHTARVVRPGADATLVAYGPMVRTCLDAAQVAAEDDGSSLEVIDLRSLSPLDLDPVVESVRRTGRLVVVHEAPSNVSLSSEIAARVTEQAFYHLESPVLRVTGFDTPYPPARLEDHYLPDVDRILDAVDRSFGY

SEQ ID NO: 1254 - protein, 309 aa, Bartonella phoceensis
HRPDIAELKPRITVFGVGGGGGNAVNNMINAGLQGVDFVVANTDAQALAMSKAERVIQLGAAVTEGLGAGALPEVGQAAAEECIDEIMDHLADSHMVFITAGMGGGTGTGAAPVVARAAREKGILTVGVVTKPFQFEGARRMKTAETGIDELQKSVDTLIVIPNQNLFRIADEKTTFADAFAMADQVLYSGVASITDLMIKEGLINLDFADVRSVMHEMGRAMMGTGEASGEGRALNAAEAAIANPLLDDTSMRGARGLLISITGGRDMTLFEVDEAANRIREEVDADANVIFGAIDDESLEGVIRVSV

SEQ ID NO: 1255 - protein, 418 aa, Fusarium proliferatum
MSDLQGRKVFKVFNQDFIVDERYTVTKELGQGAYGIVCAAVNNQTNEGVAIKKVTNVFSKKILAKRALREIKLLQHFRGHRNITCLYDMDIPRPDNFNETYLYEELMECDLAAIIRSGQPLTDAHFQSFIYQILCGLKYIHSANVLHRDLKPGNLLVNADCELKICDFGLARGFSVDPEENAGYMTEYVATRWYRAPEIMLSFQSYTKTIDVWSVGCILAELLGGRPFFKGRDYVDQLNQILHILGTPNEETLSRIGSPRAQEYVRNLPFMPKKPFPSLFPQANPDALDLLDKMLAFDPSSRISVEQALEHPYLHIWHDASDEPDCPTTFNFDFEVVEDVGQMRGMILDEVMRFRQTVRTVPGQGGPAGLQNQQGVPVPLPQGNGQWTAEDPRPQEYQGHGNTGLEQDLQGGLDASRR

SEQ ID NO: 1256 - protein, 473 aa, Pseudomonas syringae pv. phaseolicola 1448A
MSSSSTSAAADPQGRQSASPNRLIFISVLVATMGALAFGYDTGIIAGALPFMTLPTDQGGLGLDAYSEGMITASLIVGAAFGSLASGYISDRFGRRLTLRLLSVLFIAGALGTAIAPSIPFMVAARFLLGIAVGGGSATVPVFIAEIAGPSRRARLVSRNELMIVSGQLLAYVLSAVMAALLHTPGIWRYMLAIAMVPGVLLLVGTFFVPPSPRWLASKGRFDEAQDVLEQLRTNKQDAQREVDEMKAQDEEARHRPKARELLRQGWVIKLLLIGIGLGFTAQLTGVNAFMYYTPIILKNTGMGTNAALTATIGNGVVSVIATLLGIWAIGRYGRRHLLMTGLVMVILMQAALGCVLQFMPQNLTQSYTALACILVFLLFMQMCISPVYWLLMSELFPMQVRGLLTGTAVSMQWLFNASVAFTFPIAVDTIGNPTFFIFAAINVGSLIFVFLCLPETKGKSLEQIEKHLKKEL

SEQ ID NO: 1257 - protein, 115 aa, Malus x domestica
MACSAVIKLALVVALCMAVSVAHAITCGQVTSSLAPCIGYVRSGGAVPPACCNGIRTINGLARTTADRQTACNCLKNLAGSISGVNPNNAAGLPGKCGVNVPYKISTSTNCATVK

SEQ ID NO: 1258 - protein, 217 aa, Bacillus simplex
LVVDGHKVKVLAERDPAQLAWGELGVEVVVESTGRFTKRADAAKHLEAGAKKVIISAPASDEDITIVMGVNEDKYDAANHHVISNASCTTNCLAPFAKVLHEQFGIKRGMMTTVHSYTNDQQILDLPHKDYRRARAAAENIIPTTTGAAKAVALVLPELKGKLNGMAMRVPTPNVSVVDLVAELEKDTTVEEVNAAFKKASEGELKGILEYSELPLV

SEQ ID NO: 1259 - protein, 147 aa, Alkalilimnicola ehrlichei MLHE-1
MQYLHTMVRVSDLDASLDFYCNKLGLVEISRKESEKGRFTLVFLAAPDDEARARSADKAPMLELTYNWDPETYTGGRNFGHLAFRVPDIYGLCQRLMDSGVTINRPPRDGHMAFVRSPDGISIELLQAGEALPPKEPWASMANTGTW

SEQ ID NO: 1260 - protein, 199 aa, Fusobacterium nucleatum subsp. nucleatum ATCC 25586
MGNLKNHLMKYERRPIMKIYDFKVKNRKGEDISLENYKGKVLLIVNTATRCGFTPQYDELEALYSKYNKDGFEVLDFPCNQFGNQAPESNEEIHTFCQLNYKVKFDQFAKVEVNGENAIPLFKYLKEEKGFAGFDSKHKLTSVLTEMLSKNDPDFAKKSDIKWNFTKFLVDKSGNVVARFEPTTSAEVIEQEIKKLLEV

SEQ ID NO: 1261 - protein, 257 aa, Sinorhizobium meliloti
MSYETLLVETQGRVGLITLNRPQALNALNAVLMRELDAALKAFDADRAVGAIVLAGSEKAFAAGADIKEMQGLDFVDGYLADFLGGWEHVANARKPMIAAVSGFALGGGCELAMMCDFIIASETAKFGQPEITLGVIPGMGGSQRLTRAVGKAKAMDLILTGRMMDAAEAERSGLVSRVVAPDRLLEEALGAAEKIASFSLPAAMMAKEAVNRSLELTLAEGLRFERRLFQSLFATEDQKEGMAAFVAKRKAEFKHR

SEQ ID NO: 1262 - protein, 480 aa, Thermus thermophilus HB27
MGQKKGPVAEGLPPGFPGGRRGRGKGLSPRESRTRRTSKGASKRAWARPQSSPPRGVWQGCKLHSMLRLDTRFLSGFPEALSRHGPLLEEARRRLLAKRGEPGSMLGWMDLPEDTETLREVRRYREANPWVEDFVLIGIGGSALGPKALEAAFNESGVRFHYLDHVEPEPTLRLLRTLDPRKTLVNAVSKSGSTAETLAGLAVFLKWLKAHLGEDWRRHLVVTTDPKEGPLRAFAEREGLKAFAIPKEVGGRFSALSPVGLLPLAFAGADLDALLMGARKANETALAPLEESLPLKTALLLHLHRHLPVHVFMVYSERLSHLPSWFVQLHDESLGKVDRQGQRVGTTAVPALGPKDQHAQVQLFREGPLDKLLALVIPEAPLEDVEIPEVGGLEAASYLFGKTLFQLLKAEAEATYEALAEAGQRVYALFLPEVSPYAVGWLMQHLMWQTAFLGELWEVNAFDQPGVELGKVLTRKRLAG

SEQ ID NO: 1263 - protein, 191 aa, Glycine max
MESNTPVIAKKELSIIHVALFMLRKGISKGKLMMHLNNMMLKRPGKAIANLMFHHNHGVSGNSLHFSAAREYEFSCSNTPNNFFAAIASSNKRHRHIPFFTCAHAPPTLDDDVATVNAVKGVLEMLNNETVVEASPAALPGFGRSPMVRQLIRVTDSPFPLVESQDDKDNQVDKAAEEFIKRFYKELRKQT

SEQ ID NO: 1264 - protein, 364 aa, Lycopersicon esculentum
MTTSNTQQSYDKTSELKAFDDTKAGVKGLIDSGITKVPQIFIHPEALENKTTNPKNTHFIFPLIDLQNISINNKEIVKQIQEASETWGFFQVINHGIPVPVLDEMLRGARRFHDQDIDVKKPYYSRDIARKVMYNCNFDLFSEKSLAANWRDSLYSVMAPNPATPEEIPETCREITIEYSNYVMNLGYTLLELFSEGLGLKPNHLKEMGCAEGLGILCNYYPKCPQPEIAIGTSRHADNDFFTVLLQDDIGGLQVLHKNQWVDVPPTHGALVVNIGDILQLISNDKYKSVVHRVLANTIGPRISIASFFSTGPFSTSRIYGPIEELLSKDNPPKYRSTTMKDFFEYSNKKGLDGNSNLSHYKII

SEQ ID NO: 1265 - protein, 171 aa, Triticum aestivum
  misc_feature (107)..(107): Xaa can be any naturally occurring amino acid
  misc_feature (115)..(116): Xaa can be any naturally occurring amino acid
MAASMITSPIVAPTSVPSLSRRGSSFAVVCSGGKKIKVDKPLGLGGGLTVDIDANGRKVGKKGVYQFVDKYGANVDGYSPIYTPKEWSESGDRYAGGTNGLLIWGVXLAGLLGGXXLLVYNTTLSPAKRLRVTQGGSLLQARLCRVLLRECINQHQIMIQQMVLTNYTLGT

SEQ ID NO: 1266 - protein, 250 aa, Yersinia pseudotuberculosis IP 32953
MAVTKLVLVRHGESQWNNENRFTGWYDVDLSEKGRSEAKAAGKLLKDEGFTFDFAYTSVLKRAIHTLWNILDELDQAWLPTEKTWKLNERHYGALQGLNKSETAEKYGDEQVKQWRRGFAITPPALEKSDERFPGHDPRYAKLTDAELPTTESLALTIERVIPYWNDVIKPRIASGERVIIAAHGNSLRALVKYLDDLGEDEILELNIPTGVPLVYEFDENFKPIKHYYLGNADEIAAKAAAVANQGKAK

SEQ ID NO: 1267 - protein, 283 aa, Lactobacillus johnsonii NCC 533
MTNIINGRQIAKQLNQETKTRVDKLKEEGIIPGIVVILVGDDPASVIYTRNKQKNAEKLGMKSILRKFPKDVSQAEVLQAIHHYNDDPTIHAILIQLPLPKHLNQTELIEAIAPEKDVDGFNSKNVGKLYNNEEGHYPVSCTSRGIMTLLHTYLDKIEGLNVTIVGRSILVSRPLQSLLINENATVTMVSLHTDNIDYYTKHADILVVAAGKPNLIKKDQVKPGATVIDVGINRMANHYLVGDVDFDDVKEVAKNITPVPGGVGPMTIATLMQQTVDLAEWNK

SEQ ID NO: 1268 - protein, 413 aa, Arabidopsis thaliana
  misc_feature (219)..(219): Xaa can be any naturally occurring amino acid
MLENPKFDLHAVGNHNNDNNYYAFTQDFYQKLGEEGTNMSVDSMQTSNAGGSVSMSVDNSSVGSSDALIGHPGLKPMRHPYSLSDGQSVFRPGKVTHALNDDALAQALMDSKYPTEGLVNYEEWTIDLRKLHMGPAFAQGAFGKLYRGTYNGEDVAIKLLERSDSNPEKAQALEQQFQQEVSMLAFLKHPNIVRFIGACIKPMVWCIVTEYAKGGSVRXQFLTKRQNRAVPLKLAVMQALDVARGMAYVHERNFIHRDLKSDNLLISADRSIKIADFGVARIEVQTEGMTPETGTYRWMAPEMIQHRPYTQKVDVYSFGIVLWELITGLLPFQNMTAVQAAFAVVNRGVRPTVPADCLPVLGEIMTRCWDADPEVRPCFAEIVNLLEAAETEIMTNVRKARFRCCMTQPMTVD

SEQ ID NO: 1269 - protein, 247 aa, Oryza sativa
MMPSASDAAAAAAALELQESGWEELRREARKLEGDLDVKLSSYARLAARSSSAADAASASSPSERSSWKSMEFEIQSLLDKLQDVNDAMSRCAASTAPTTSVSQKLARHRDILHEFAQEFRRTRGNLSSIREHADLLSSVRDDITESKATGGMSPRVHLLRERASIHGSINQIDEVIGQAQSTRVALSNQRALFGDVQGKVKQLGEKFPVIRGLLGAIKRKKSKDTIILSAVIAACTIFLIIYWLSK

SEQ ID NO: 1270 - protein, 332 aa, Kitasatospora griseola
MTRIAINGFGRIGRNVLRALLERDSKLEVVAVNDLTEPTALGRLLAYDTTSGRLGRPVTVEGDVLVVDGRRIKVLAERNPADLPWADLGVDIVLEATGRFTSAEAARAHLAAGAKKVLVSAPSDGADVTLAYGVNTEAYDPAAHTIVSNASCTTNALAPLAAVLDELAGIEHGFMTTVHAYTQEQNLQDGPHRDPRRARAAGVNIVPTTTGAAKAIGLVLPQLDGKLSGDSIRVPIPVGSIVELNTTVSRDVTREEVLAAYREAAGGKLAGVLEYSEDPLVSSDIVGNPASSIFDSELTRVDGRHVKVVAWYDNEWGFSHRVIDSLELLAAS

SEQ ID NO: 1271 - protein, 546 aa, Vibrio cholerae
MLLDTQLELAGGINNVTRILAPQGQVVLALKHPPHAPHLPDDVSLQSVLGEWQLSVQRTAEVSDQQLATIGKAISERQKLETLPYQTALDCPYRPLWHISPPQGLLNDPNGFIYHQGEYHLFYQWHPFVCEHKDKYWVHLKSLDLVHWQWQSVALTPSDWFDSHGVFSGHAVSHQQDLWLFYTGNTRLGVDRQRQTMQCAARMNANGEFEKLGPVIRCLPEGVTEHIRDPKVIYTQGKWHMLLGAQTLAHQGRLAVYHSDDLLHWHFDKLYGDELGNYGYMWECPDWFELQGEAFFVFGPQGIASANPHHTIEHQNRIFRATQNAQGEIALLQGWPLDEGFDFYAPQTAQTTDGRRVLCGWMGLPDETQHPSCDQGWIHQLTALRELEWREGKIYQHPLRELDTLRSEPHTLLLSDTVTELKAKSFDVQVTLPWGCQLRLMQNAQYCVTLTLDAENRLLRLDRSATQIRQGDTIRELKLDSPTVELRILADQSSLEIFINQGEHVMTSRIFTPLDATGISLHGASVDAKLYYMAPASAPFNLEVNV

SEQ ID NO: 1272 - protein, 112 aa, Prochlorococcus marinus subsp. pastoris str. CCMP1986
MKKIEAIIRPFKLEDVKIALVNSGIVGMTVSEVRGFGRQKGQVERYRGSEFTVEFLQKLKVEVVVENEKVSSVIDAIAEAAKTGEIGDGKIFISSIDSVVRIRTGDTDEEAL

SEQ ID NO: 1273 - protein, 494 aa, Staphylococcus xylosus
MSEWTKEQRYQKYEDVDQQTIEKLTEQVNQSEYRQTFHIQPQIGLLNDPNGLIYFKGNYYVSHQWFPLGPVHGLKYWYTYQSKDLVDFKAIGPTIKPDTKDDSHGVYSGSAFEYHDHLYYMYTANHRDSDWNRISTQHIAKMSKDGSINKFPKAVISAPPSGYTQHFRDPKVHVQDGVYYAMIAAQNIKKQGRILQYRSTDIVNWEFQGEVQTNLDDFGYMWECPDYFNLNGYDMLLFCPQGIDSEGERFKNIYQSGYIMGQYDINNLTMNHADFHELDYGFDFYAPQTFLDENGQRILIGWMGLPDINYPSDADGWAHCLTIPRVLTIESGNLKQRPIKALEKLRTNEETALGYANKFTRQLHPYEGKQFELIIDILENEATEVYFEVRTSKTESTLITYNKREQKLTLDRSESGQLPEPVEGTTRSTYLDTPLSKLQLFVDTSSVEIFCNDGERVMTARIFTDENATGIKTSTESGQTYLKFTKYDLKGDTI

SEQ ID NO: 1274 - protein, 295 aa, Chromobacterium violaceum ATCC 12472
MWQAEHIQARLQALYPHLTVEILGMTTQGDQILDKTLSKIGGKGLFVKELEQALMDGRADLAVHSLKDVPMTLPDGFALAAVCEREDPRDAFVSNRYQHLSELPAGSVVGTSSLRREAQLRARFPQLAVKPLRGNVQTRLKKLDDGEFDAIILAAAGLKRLGLAERIQGELAPSESLPAAGQGALGIEIRADRADLSALLAPLNHPDTRACTAAERALAKELGGSCQVPLGAFATLADGTLTLGGLVAHPDGSVVLTASASGPADYADALGRAVAKKLIDAGARPLIAAVLAEPR

SEQ ID NO: 1275 - protein, 270 aa, Pediococcus pentosaceus
DIPWAAACRPGLWRFSMDESKSTGANIKVIGVGGGGGNAVNRMIAEGVKGVEFIVANTDVQALQASNADVKIQLGPKLTKGLGAGSTPDVGAKAAEESQQTISSALEGADMIFVTAGMGGGTGTGAAPMVAQIAKEQGALTVGVVTRPFTFEGPKRARFAAEGVANLKEHVDTLIIIANNRLLDLVDKKTPMMEAFNEADNVLRQGVQGISDLITSPGYVNLDFADVKTVMQNQGSALMGIGSASGENRTEEATKKAISSPLLETSIDED

SEQ ID NO: 1276 - protein, 182 aa, Brassica napus
MEFASSSLCQAHKVALTRQPSPPVNSCSLGSVSVIGFSLPQISSPSLAKCGRKQSSFSSVRACVAVEQKTRTAIIRIGTRGSPLALAQAYETRAKLQAKHPELTEDGAIHIEIIKTTGDKILSQPLADIGGKGLFTKEIDEALINGHIDIAVHSMKDVPTYLPEKTVLPCNLVREDVRDAFI

SEQ ID NO: 1277 - protein, 490 aa, Yersinia pestis biovar Medievalis str. 91001
MSRYGLQKLYINGAYTDSTSGDTFDAVNPANGECIAQLQAANAQDVDKAVAAAKQGQPVWAAMTAMERSRILRRAVDILRDRNDELAAIETADTGKPLSETRSVDIVTGADVLEYYAGLIPALEGQQIPLRGSAFVYTRREPLGVVAGIGAWNYPLQIALWKSAPALAAGNAMIFKPSEVTSLTALKLAGIYTEAGLPAGVFNVLTGSGDQVGQMLTEHPGIAKVSFTGGIASGKKVMANAAGSTLKDVTMELGGKSPLIIFADADLDKAADIAMMANFYSSGQVCTNGTRVFVPQALQAAFEQKIVERVKRIHIGDPSDERTNFGPLVSFQHRDSVMRYIDSGKREGATLLIGGYSLTEGALAHGAYVAPTVFTHCRDDMQIVREEIFGPVMSILSYQSEEEVIRRANDTEYGLAAGVVTQDLNRAHRVIHQLQAGICWINTWGESAPEMPVGGYKHSGVGRENGISTLEHYTQIKSIQVELGSFNSVF

SEQ ID NO: 1278 - protein, 100 aa, Zea mays
KITEQGEVLASKYSLPELALYNLETLTTAVIQASLLKSSFDFIEPWNRIMEELACTARRAYRSLIYEEPDFLDFFLTVTPIPEISELQISSRPARRKGGK

SEQ ID NO: 1279 - protein, 162 aa, Zea mays
MATTAAGYGCCLAGLPPFPLLPGILSTRLRREPSPPRVALVASSPKLRAPAPRLRVSCGPRRLASSSGKANSDAVPSPTEATIDIKLPRRSLLVQFTCNACGERTKRLINRVAYERGTIFLQCAGCQVYHKFVDNLGLVVEYDLREENVVQGENVIDTNSED

SEQ ID NO: 1280 - protein, 522 aa, Yarrowia lipolytica CLIB122
MLRRITLNQFKGGLRRLSTLTPVKNEPLTLPNGAKYEQPVGLFINGEFVKSQSGKRFETENPTTETPIISVYEAGEADANAAVEAAKNAFKNWGFKTAPSERGVLLNKLADLIERDLDLISAIETTDNGKVFAQAQGDVALVVKVLRYYAGFADKIGGDLVQTNDGFFNYTRKEPLGVCGQIIPWNFPLLMWAWKIAPALTTGNTVVLKTAESTPLSALYACKLSQEAGFPKGVLNVVSGYGPVGGVLSAHPDIKKIAFTGSTATGKQVAKTALTSNLKKTTMELGGKSPNIIFDDANLEDALSAAALGIFFNSGEVCCAGSRLFVQAGVYDQVVEAFKKKAESVKVGDPFDPNSLQGPQQNKNQFKKILGYIEQGQKEGAHLLCGGSAQAGPNKGYFIQPTVFTDVNNDMSIVREEIFGPVLTITKFNTVDEVIDMANDSEYGLAAGIHTTDINKAHYVAENIASGTIWVNCYNAFHEAVPFGGYKQSGFGKEMGRDGLENYLQTKAVRVKLDERKWADKQ

SEQ ID NO: 1281 - protein, 237 aa, Cryptococcus neoformans var. neoformans JEC21
MSKTTTTTTRAMLFDMDGTLLDSTPAVLATWEYFAKEYDLDLHQVLRTSHGVRTIDNMRKWCGIEDPIQLRDATETFESMIVTEAKQLQAAGKEGLIALPNVLPLLNKLNASPIPVWAIVTSATTVYASAALPTAGIPETPKLITGDDVRNGKPDPEPYLAGAKALDVDVKDCVVVEDAPSGIKSGVASGARVLAVCTSHTREQLENIGATWIVTDLSRVTFEIEGGRVKLTIDETP

SEQ ID NO: 1282 - protein, 168 aa, Oryza sativa
MAALPLATAEVCDANADLIMNGELRALQPIFQIYGRRQVFAGPIVTLKVYEDNVLIREFLEEKGHGRVLVVDGGGSLRCAILGGNPVQQAQNNGWAGIVVNGCIRDVDEINGCDIGVRALNSHPMKANKKGIGEKHVPVTIAGTRICDGEWLYADTDGILISRTELTV

SEQ ID NO: 1283 - protein, 401 aa, Helicobacter hepaticus ATCC 51449
MLIVQKYGGTSMGDCDRIHNVAKRVIKSKAQGHKLVVVVSAMGGETDRLINFTQHFTPLPNTREVDMALSAGERVSAALLAIALESMGVKAISLSGRGAGIITDEFHTKARISYIDTTKIFHLLNEDYVVVVAGFQGISQQGEVTTLGRGGSDLSAVALAGALNATVCEIYSDVDGIYTTDPRIVKNARKLEKISYDEMLELASMGAKVLLNRSVELAKKLNVNLICASSFSEAQGTLITKEEDIMEKPVVSGVALDKNQARVSLADVQDRPGIAADIFGLLADNNINVDMIVQTIGRDGKTDIDFTIPKTEVTLTQQVLEKFKDDLGNIEYDNNIAKVSIVGVGMKSHSGVASTAFKALAQDDINIMMISTSEIKISMIINAQFAELAVCKLHSVYELDK

SEQ ID NO: 1284 - protein, 590 aa, Yarrowia lipolytica CLIB122
MPQKNTDHSEVEELQGNVEEVQYDVPELHIPTTNELLDSTEPFQIYYHYAAMQRAREDALPGSRFRSIFSKYTRKTDEKQSESDPCYDTPSDDGTGVSDVDPEKHAAQSSGGIISQIPGASQELAIANMSARTATWMSVFFLTTTDILGPSSAPWAISQLGWFPGVMLFTVLGVAAVYTGWLIYKMFLKLDSPEFPMKTFGDLALRVYGKGFRWGVDILQSLQLLCNVAVIILGNGQGLSQIYSPLCFSVWCIIFMVAGILLGQIKRLSNFSYVANAAIWMNLFVVFATMGIAATKPPNYVGGAQQNNLPNSTDPVRTKAIEEYAFQDQLGAVMNIVYSYGGAMVFVEFLSEMRKPREFLKGMLSAQGVIFVCYLLYGLLVYAYQGQYTVNPGNQGLGSHNWQIAVNVISVVSSLIAAGLYGNVGIKVVYITLIRRAIPALPGLDDGIKGRIAWALMVFIYWAVAFVIASAIPQFSSLTSLVGAACILQFSYTFPPFMYMGLTIREEASKLDTVDLETRTVIKYDSWRSMARWKRGIMSRPWWVLVNFVLFLASLATAILGIYSSIYSLVEAFDAPGAATVSFGCKPPVA

SEQ ID NO: 1285 - protein, 408 aa, Stenotrophomonas maltophilia
MSKADVVIVGAGHGGAQCAIALRQNGFEGTITVIGREPEYPYERPPLSKEYFAREKTFDRLYIRPPTFWAEKNIEFKLGTEVTKVDPKAHELTLSNGESYGYGKLVWATGGDPRRLSCQGADLTGIHAVRTREDCDTLMAEVDAGTKNIVVIGGGYIGLEAAAVLSKMGLKVTLLEALPRVLARVAGEDLSTFYQKEHVDHGVDLRTEVMVDSLVGENGKVTGVQLAGGEVIPAEGVIVGIGIVPAVGPLIAAGAAGANGVDVDEYCRTSLPDIYAIGDCAAFACDYAGGNVMRVESVQNANDMGTCVAKAICGDEKPYKAFPWFWSNQYDLKLQTAGINLGFDKTVIRGNPEERSFSVVYLKDGRVVALDCVNMVKDYVQGRKLVEAGATPDLEALADAGKPLKELL

SEQ ID NO: 1286 - protein, 165 aa, Staphylococcus aureus subsp. aureus MRSA252
MNNRNVYDIEVSDYKGLTYKLEAFRGKVILVVNTATECIYSEQLKKLETLFQKYKDRGFVVLSFPNNNFDNRQPGSNEEILKISREKFGVTFPVLAKISVNGNDEHPLFTHLKNEQPGIFGSPIKWNFTKFIIDRQGNVVNRFLPMEDPLDISANIEILLQESSS

SEQ ID NO: 1287 - protein, 409 aa, Stenotrophomonas maltophilia
MQRADVVIVGAGHGGAQCAIALRQNGFEGTITVIGREPEYPYERPPLSKEYFAREKTFDRLYIRPPTFWAEKNIEFKLGTEVTKVDPKAHELTLSNGESYGYGKLVWATGGDPRRLSCQGADLTGIHAVRTREDCDTLMAEVDAGTKNIVVIGGGYIGLEAAAVLSKMGLKVTLLEALPRVLARVAGEDLSTFYQKEHVDHGVDLRTEVMVDSLVGENGKVTGVQLAGGEVIPAEGVIVGIGIVPAIGPLIAAGAAGANGVDVDEYCRTSLPDIYAIGDCAAFACDYAGGNVMRVESVQNANDMGTCVAKAICGDEKPYKAFPWFWSNQYDLKLQTAGINLGFDKTVIRGNPEERSFSVVYLKDGRVVALDCVNMVKDYVQGRKLVEAGATPDLEALADAGKPLKELQY

SEQ ID NO: 1288 - protein, 262 aa, Silicibacter sp. TM1040
MSQDSPIKTRREGAILEVTLDRPKANAIDLATSRQMGEAFQAFRDDDALRVAIITGGGDKFFCPGWDLKAAAGGDAVDGDYGVGGFGGLQELRDLNKPVIAAVNGIACGGGLELALSADMILAADHASFALPEIRSGTVADAASIKLPKRIPYHVAMELLLTGRWFDAEEAHRWGLVNEIVAADQLMDRAWELARLLASGPPLVYAAIKEIVRDAEDSKFQDAMNRITGRQLRTVDVLYGSEDNLEGARAFAEKRDPVWKGR

SEQ ID NO: 1289 - protein, 574 aa, delta proteobacterium MLMS-1
ELNEQKIVIIGGVAAGPKTASRVKRLLPEADVTIIDQDNLISYGGCGIPYYIGGDVSDEKELRNTSFHLTRNEDFFLKAKGVTVRTKTRALAIDRPNKKVQVQALDGGAREEIPYDQLVIATGSQPNRLPLPGVELDGVFTISDLHQAIEIKERIARGKVSRAVIIGGGAIGIEMAEAFVDLWGLEADLLEFMPQLLPRLVDWEFARMLENHLRQQGVNIYTNEAARAIEGEAGTVSRVVTPQRTLAADLVIMAVGVRARGELAAEAGLPVDGQGNILVNDRLQTADPNIYAAGDCIAVKNRLTGKSGIAPMGSLANREGRIVADNLAGIPSRYQGWVGSFTLKAFERCIAATGLSLESARAEGFDAAAATTAQSDRAHFFPNQTVIPLRLVFDRSNRQLLGVQGFGPMGDAVLARIDAAAALLQQGGTIDDVSQLEMAYAPPFATALDALNATGNVADNLAAGRLRCVETADFLAWMEDFSSQPDWVALDIRHPNEASLLADKFGRDQWLTIPYVDIRERHRELPTDRTMIIICDAGTRSSEIQIFLDSVGLANNLVLGGGFNLIRRMGVAWM

SEQ ID NO: 1290 - protein, 394 aa, Candidatus Protochlamydia amoebophila UWE25
MAKETFQRKKPHVNVGTIGHVDHGKTTLTAAITKVLAEAGGAKFRDYASIDNTPEEKARGITINSSHVEYETDARHYAHVDCPGHADYVKNMITGAAQMDGAILVVAATDGAMPQTREHILLARQMQVPAIVVFLNKVDMLGESDSELLDLVEMELHELLESKGYHNSPIIRGSALRALEGDPKYVESIKQLMKIVDEAVPTPQRETDKPFLMPVEDVFSISGRGTVATGRVERGVVKINDKLQLIGLGDTRDTVATGLEMFNKILEEARAGENVGILLRGLTKTDIERGMCLVAPGTCTPHTEFKGPVYVLTKEEGGRHKPFFSGYRPQLYFRTTDVTGTIELPAGVEMVMPGDNVEITVKLIAPIAMEKGMRFAIREGGRTIGAGTVSEILK

SEQ ID NO: 1291 - protein, 634 aa, Rickettsia rickettsii
MSNSNIDNDLDKIDSLLKKAKSKKIPVTYDDINNALPLNKNPSIRQLEEAILKFSDAGVDILESNEDDEIKLDIGMDEEFKLSTNVDNEPEDEVEEENIGTTDDPVRLYLKDMGGVDLLTREHEVEIAKRIEEGHKTMTASLCRSPIAMRCFIVWYEDLVNEKMLLRDLIDLEANMLHDETPENDEEHSSETEGEEHEDNHLSMSRVETQILPNIIERMKKIAFICEELLIEAKKCYEKSFEPKVLQNSKKYNNLELLINEVSEIHFNSKRTEEILGKMYGINRDLINKETAFLKLAEKYGVTRQNFLDEYIGSVINAAWKEKMLKNKKVAWKELMTKESDYIDQMIAELSVIESKTGLLVNDFKKLVNTIQKSERQTLQAKKDMIEANLRLVISIAKKYANRGLQFLDLIQEGNIGLMKAVDKFEYRRGYKFSTYATWWIRQAITRAIADQARTIRIPVHMIETINKILRTSRQMLNELGYEPTATEIANRLSMPLDKVRKVMKIAKEPISLENPVGDDSDGGQLGDFIEDKNAVAPIDAAIQSNLREVTTRVLATLTPREERVLRMRFGIGMNTDHTLEEVGQQFKVTRERIRQIESKALRKLQHPIRSKKLNSFRSGGKRGDGNPSDLLEA

SEQ ID NO: 1292 - protein, 482 aa, Pseudomonas syringae pv. phaseolicola 1448A
MQLIWLRSDLRVHDNTALTAAMERGPTLAVYLLSPAQWRSHDDADCKVDFWLRNLVELEKALGALNVPLLIREADTWDQAPEVLSTLCTQLKIEGLHLNQEYGINETRRDQAVQKALEKAGVQVTSYLDQLLFKPGSILTKTGNYFQVFTQFKKVCYNRMHQAMPQPVRTPKAQQSLSIKSDSIPDQVEGFATPSKALRDLWPAGEAEARRRMATFADAQISYYKTERDFPAKPGTSQLSAYLAAGVISPRQCLHAALGSNQGEFETGDVGTVTWINELLWREFYKHTLVGYPRVSRHRAFRPETEALKWRDAPEELLAWQEARTGLPIIDAAMRQLLETGWMHNRLRMVVAMFLTKNLLIDWHEGERFFMRHLIDGDLASNNGGWQWSSSTGTDSAPYFRIFNPLSQSERFDPEGVFIKRWLPELADLNKKQIHDPASIGGLFGAADYPKPIVDLSKSRARALAAFKALPARQPAAGIEHD

SEQ ID NO: 1293 - protein, 366 aa, Saccharophagus degradans 2-40
MTTHTLRVARVENPTANSKAIYFEPNSLPAAFAGQFLTLIVRPNDKELRRAYSLFTTPEEGLAIGVKRVPGGIVSNYLNTYARAGMEIQVAGPSGNFTYRPEKNTGAKHLILVGGGSGITPLMAILKTALAQQHVEHITLLYANTCEQEIMFAHELNTLAEANREKFTLIHYLNSENTQQIKQRQKGLLGWLGKTTSYTTAGFLTQEKALEILKQHNIAVSNTQQPSTYAYLCGPGGFMTLAEQALLNIGVASTNIKKENFVASAPSNPTPNFTPPNCEARVKIAGDYKRFTVPSGKNILQAAIDANIDWPFSCREGSCTACYSRCTSGQVHLLSDSALSNQELAEGGVLPCVGFPKSKKLELVID

SEQ ID NO: 1294 - protein, 449 aa, Alkalilimnicola ehrlichei MLHE-1
MAARLDEKLEPIFQDVLRRNPGESEFHQAVHEVLETLGPVLVKYPELAERKIIQRICEPERQIIFRVPWQDDRGETHINRAFRVEFNSALGPYKGGMRFHPSVYLGIIKFLGFEQIFKNALTGLPIGGGKGGSDFDPKGKSEDEIMRFCQSLMTELYRHLGEYTDVPAGDIGVGQREVGFLFGQYKRITNRYESGVFTGKGLSWGGSRARKEATGFGTVYFLEEMLKARNDGLEGKTCVVSGSGNVAVYAMEKIYELGGKVIACSDSSGIVVDEKGIDLDRVKRIKEVERRRISTYADEVKHAKYIEDGNIWAVPCEAALPCATQNELNGKDAKKLLQNGCIAVAEGANMPSTPEAIRLFLESGIAYGPGKAANAGGVATSALEMQQNASRDSWTFEHTEQRLHEIMKNIHRNCYETADEFGAPGNYVTGANIAGFLKVSQAMEAMGLI

SEQ ID NO: 1295 - protein, 493 aa, Leptospira interrogans serovar Lai str. 56601
MFMVTELSCCQKMTQLKRSLNLFDSISLMFSSMVGPGIFITTGYILHQVPNPNIVLLAWILGGFLAVAGAMSYAKSASLFPYAGGDYVYLKEAYSPIVAFASGWLSLSINFSASISLSALAFSKSFFSLINPSWDIYFFEIPFLGLTISIGTAQILAMSAILVFTIVNFFGISTASRIQNLFTSVKILGLVSFVILGFVIGNYDISRFKSFSLFPSDLKGFELLLAGVIPVTYSYLGWNMITYVAEEVKDPDKNIYKAVLYSCALVTILYILMNFLFLSSGTLSELSGDKIGITASSALFGPKATVFITVFICWAFLASISAYIIGGSRIYFAMARDGFFFQNMAKLHSKHKSPYMSLLFQCGYACLFCFVKEIESLLYLITCSTLLLATITAYTPILFEKRNYKLKFRIPGYPYTTYLYIASNFGIIATLLWNKPTEAFWGVGFTFLSIPMYYYFKIMQNTLSKNSTPLETPEVLATSLLPENEPVPIASGE

SEQ ID NO: 1296 - protein, 347 aa, Debaryomyces hansenii CBS767
MTNEFHQISFPPSVLDRLAPDISLQRHLNLGLRPCLRNFNEFKPLEVSTGNLQELEGNFTVGSSIVKNGNTTVICGITLGIVETPKSSIFESTDSESTYTSVYPVVEISRGRSGAPTDEEMILSQKLYETILHSKIISTKSLEAKPGMAIANDDGSLEIIYPTPNETSDVFSNIKSCSFVLYAHLKVFSRSGPLFDVCHTSLINALKNTKLPKVYVQDSFNNIKVPIRSKGNFGHLSKSSDVLIDGNKALMYDLPLNHEQIGLSSSFGIIELESNSTNDMDIDSKSVILADLEGDSEESECLSRANIIIDQDNSHMKHVSIVGGGANINIDTIKECIQIAKLRSMNV

SEQ ID NO: 1297 - protein, 155 aa, Glycine max
MAAYREPMNMNMSDRAPVSPQQPHSPWHSPVPYLFGGLAAMLGLIAFALLILACSYWKLSGYLEGNGETERDLEAGETEQDQKPAKPYEEKILVIMAGQEKPTFLATPSVSSCSTSRSSSFGDNTSTCTCEENRKSLEMAQAGTGTTETAHSSSD

SEQ ID NO: 1298 - protein, 511 aa, Oryza sativa
MAANQVANHDTHSLWLLNSAYIALLPKKTDALRVGDYRPISLIHAFRKLFSKLLANRLAPKLQQMVSTNQSAFIKGRNIQDNFLFVNNMVREFQSSKIPAILLKLDIAKAFDTISWPYLLDRLRYLGFGDRWIGWIISILATSSSKILLNGKAGNNFLHGRGLRQGDPLLPMIFILAIDPLQKLLAIVQEAGLLQPLHKWTARFNMALYADDAVVFLRPDKRELQTIQMILQNFGLATGMVREFILLWHQIQQVELHEGIDDAIVWRWTPNGSYSANSAYRIQFVGGIQDNRSDFFWKAKVYNDECEIAPEHEREEAPRTAKKLSWWALSFSLSNVWCKFYRKSQAWNSTASFSDVDEKNRKGGDAEDDFTHSRPDHVFRGVHRAIICGKVGQVPVQKILRNGHTVTVFTVGTGGMFDQRTVGAENLPMPAQWHRISVHNEQLGAFAVQNSAVYVEGDIETRVYNDRINDQVKNIPEICVRRDGKIQLMQSGDSNVGKSLEELTDDDTVLI

SEQ ID NO: 1299 - protein, 224 aa, Haemophilus influenzae R2846
MKPYLIAPSILSADLARLGNDVQNVLNAGADVIHFDVMDNHYVPNLTFGPAVCQALRDYGITEPIDVHLMVKPIDRIIPDFAKAGANYITFHPESSEHIDRSLQLIRDCGCKSGLVFNPATPLSYLDYVLDKVDVVLLMSVNPGFGGQSFIPATLKKLQQARKIIDESGYDIRLEVDGGVKVDNIAEIAAAGADMFVAGSAIFGKPDYKQVIDQMRTQLASVSA

SEQ ID NO: 1300 - protein, 224 aa, Rhodobacter capsulatus
MPSDYAEIRNRVEHYFDRTATRAWARLTTADEKVSKVRQTVREGRDTMRAVMLSRLPDDLTGCRVMDAGCGTGLTTVELARRGADVVAVDISPQLIDIAKDRLPPELRGKVSFHVGDMADPALGQFDYVVAMDSLIYYRAPDIGRVLTELGKRTHSAIVFTVAPKTAFLMAFWWLGKLFPRSNRSPVMIPHALDKLQRHAGDSLIKIDRVARGFYISECLEYRP

SEQ ID NO: 1301 - protein, 311 aa, Synechococcus sp. RS9917
MLGSGSNVAMALKLDGRTLAAAIEQRLQQVVRQQSDRAGRPPGLAVLRVGDDPASGVYVANKEKACARNGIASFGSHLPADTSQAEVLATIEALNGDDRVDGILLQLPLPPGLKERPLIAAIDPDKDADGLHTLNLGRLLKGEPGPRSCTPAGVMALLRSHSIPLEGRRAVVVGRSILVGQPMALMLQAANATVTVAHSRTRDLAAMTRQAEVLVVAAGQPRMIGADHVAPGAVVVDVGIHRLPPPEGSPEGTKAKLCGDVRAEELENVAGALSPVPGGVGPMTVTMLLVNTVVAWSRRHGVGHGLDDLVV

SEQ ID NO: 1302 - protein, 918 aa, Salmonella enterica subsp. enterica serovar Paratyphi A str.
MTNYSLRARMMILILAPTVLIGLLLSIFFVVHRYNDLQRQLEDAGASIIEPLAVSSEYGMNLQNRESIGQLISVLHRRHSDIVRAISVYDDHNRLFVTSNFHLDPSQMQLPAGAPFPRRLSVDRHGDIMILRTPIISESYSPDESAIADAKNTKNMLGYVALELDLKSVRLQQYKEIFISSVMMLFCIGIALIFGWRLMRDVTGPIRNMVNTVDRIRRGQLDSRVEGFMLGELDMLKNGINSMAMSLAAYHEEMQHNIDQATSDLRETLEQMEIQNVELDLAKKRAQEAARIKSEFLANMSHELRTPLNGVIGFTRLTLKTELNPTQRDHLNTIERSANNLLAIINDVLDFSKLEAGKLILESIPFPLRNTLDEVVTLLAHSSHDKGLELTLNIKNDVPDNVIGDPLRLQQVITNLVGNAIKFTESGNIDILVEKRALSNTKVQIEVQIRDTGIGIPERDQSRLFQAFRQADASISRRHGGTGLGLVITQKLVNEMGGDISFHSQPNRGSTFWFHINLDLNPNVIIDGPSTACLAGKRLAYIEPNATAAQCTLDLLSDTPVEVIYSPTFSALPLAHYDIMILSVPVTFREPLTMQHERLAKAASMTDFLLLALPCHAQINAEKLKQGGAAACLLKPLTSTRLLPALTEYCQLNHHPEPLLMDTSKITMTVMAVDDNPANLKLIGALLEDKVQHVELCDSGHQAVDRAKQMQFDLILMDIQMPDMDGIRACELIHQLPHQQQTPVIAVTAHAMAGQKEKLLSAGMNDYLAKPIEEEKLHNLLLRYKPGANVAARLMAPEPAEFIFNPNATLDWQLALRQAAGKPDLARDMLQMLIDFLPEVRNKIEEQLVGENPNGLVDLVHKLHGSCGYSGVPRMKNLCQLIEQQLRSGVHEEELEPEFLELLDEMDNVAREAKKILG

SEQ ID NO: 1303 - protein, 524 aa, Oryza sativa
MELILQLEAKTAAQAVVTVFFFFLLPLALLFYFARAAISSRDSKTRELILSKLPSPPFKLPVIGHMHLIGPLPYVSLRDLAAKHGRDGLMLVRLGSVPTLVVSSPRAAEAVLRTHDLAFASRPRSMVTDIIMYGALDSCFAPYSDHFRSVKKVVTVHLLNSKRVQAYRHVREEEVRLVMARLRGAAAAAAAVDLSQTLQFFANDLICRAVSGKFLCEQGRNKVFRDLMEANSNLLGGFNLEAYFPGLARMPLISKLICARAIRIRRRWDQLLDMLIDDHVASARDRAKNDDDDFIHVLLSLQDEYGFTRDHIKAISIDMFEAGTDTSHLVLEYAMVELTRKPHILTKLQDEVRRITPKGQHMVTEDDIVGMVYLKAVIKETLRLHAPGGFTIPHLAREDCNVDGYMIPAGTRVLINLWALSRDANYWDKPDEFLPERFMDGSNKNTDFKGQDFQFLPFGSGRRMCPGIHSGKVTLEIMLANLVYCFNWKLPSGMKKEDIDMTDVFGLAIHRKEKLFLVPQIANY

SEQ ID NO: 1304 - protein, 111 aa, Prochlorococcus marinus str. MIT 9313
MTIYIGNLSFQAEQEDLLDLFSQYGEVKTCSLPLDRETGRKRGFAFVEMTNDADEQKAIDDLQDVEWMGRMIRVNKATPRERTGGGGGRGGYGGGGGGGGGYGGGGGGNRW

SEQ ID NO: 1305 - protein, 898 aa, Chromobacterium violaceum ATCC 12472
MSEHDKDLPLRADLACLDRLLSEVVGEQEGAVVSGAVQAIALRRGDERSHPLPQLAPEAAASLLRACGLYAQLFNIAEDLHHNRRRRAHQLAGSAPQQGSLPRALQRLRQDGVSFHALHQLLSHAKVGAILTAHPTEVQRQSVLDGHRAVRRFLSQLNAADLTPEEREALEAKLKRAILALWQTSEIRHFKMTVRDEITNGVAYHPLAFFEALPALYRRLEREIGQLWGEEARLPSFIRVGSWIGGDRDGNPNVDAGLLRHAVTRQSQQAFEYYLQELKSLYRELSLSSRLVEAGAEVLALAEQSPDQAVSRGEEPYRRALATMQGKLRATARLRGVELACRWDERAPYRDHRELIQDLASLSASLRAHGSALLADGRLSRLIRSVDVFGFFLMPLDLRQHAAVHEGVVAELFSAAGLEEYRALDEAARVRVLIRELATPRLLFSPYLRYGEQAEKELAIFREAAAIQRDFGVEAIGQCIISNCASVSDILALALLCKEAGLIRLEDGQPRASVNLVPLFETIADLENSEAVMRALFALPWYKQLLDSRERVQEVMLGYSDSNKDGGYLTSQWQLWQAETRLVKVFADAGARLQLFHGRGGSVGRGGGPSYEAIVAQPAGSVAGRIRITEQGEVITAKYSDPAIAGRNLEALVAATLEASLGNIPGGEVDTALFDELSASAFAAYRALVETPGFMQYFLEATPVTAIARLNIGSRPASRKSLSSIGDLRAIPWVFSWSQSRLMLPGWFGVGSAVAAYVQKHGDAGLAKLQHLYRHSPFFQVMLSNMEQVLAKADLGIARRFSELVADRELAARLFGAIEAEWRKTHDAFFAITGQAELLEGNPTLRRSLETRLPFLDALGLLQADLLARLRAEPDDEDTLYAIHLTINGTSAGLRNTG

SEQ ID NO: 1306 - protein, 499 aa, Francisella tularensis subsp. tularensis SCHU S4
MQIVWFKRDLRVTDNLALSLASEKGDILPLYIIEPELWQQPDMSHRQYLFLSECLEELNTELTKLGQSLAIMLGDAVEIFEQLIQKYNIKNVWSHQETWNDWTYQRDIKLEKFFKQNNIVWHQPYQNGVVRCLADRDNWALLWHQHMSEKIIRAPTKLKFICENQIKIPTAESLGLEYDDCYKRQKGGRIRALRILDSFLYQRGCGYTKEMSSPVTAFKSCSRLSPYIAFGVISLKEIYQKANQRKNEIKESSVKNKTKWLSAMRSFLSRLRWHCHFMQKLEDQPSIEYENLHSAYDQLRTEPLNQQCFEAWKTGNTGYPMIDACMRALIATGWLNFRMRAMLMSFASYHLWLDWRVTSLYLARLFTDYEPGIHYSQVQMQSGTTGINSIRIYNPIKQSIDQDPNGEFIRRWLPELENVSNENIHTPWLEKHNSLDYPDPTIDEKQARKFAADNIYKIRKSSKNSQETKNIVKKHASRKTSRKIKSKQHKVESIQGELF

SEQ ID NO: 1307 - protein, 250 aa, Arabidopsis thaliana
  misc_feature (124)..(124): Xaa can be any naturally occurring amino acid
MKFNVANPTTGCQKKLEIDDDQKLRAFFDKRLSQEVSGDALGEEFKGYVFKIMGGCDKQGFPMKQGVLTPGRVRLLLHRGTPCFRGHGRRTGERRRKSVRGCIVSPDLSVLNLVIVKKGVSDLXPGLTDTEKPRMRGPKRASKIRKLFNLGKEDDVRKYVNTYRRTFTNKKGKKVSKAPKIQRLVTPLTLQRKRARIADKKKRIAKANSDAADYQKLLASRLKEQRDRRSESLAKKRSRLSSAPAKPVAA

SEQ ID NO: 1308 - protein, 269 aa, Roseovarius nubinhibens ISM
MKGYLMTKTILITGATDGIGLETARHLAAKGHSLILHGRSAAKLDAARDKIGGTTSGYLADLSDPAETLRLARDIARDHDAIDVIINNAGVYKIPDPVTKTGHDLRFLVNTIAPEILTRALLSTLGENGRVVNLSSAAQSPVDLEALAGRKRLADFEAYAQSKLALTIWSREMAAKHRNGPIFVAVNPGSLLASKMVKDGFGVAGKDLGIGVEILARAALSDRFALASGKYFDNDIGEFTPPHPAALDDQNSAKVYDQIVQLAKELGAA

SEQ ID NO: 1309 - protein, 113 aa, Rickettsia akari str. Hartford
MSLLDKLYRKGIKLEELTDIFAIRIVVIDEEQCYKALKVVHDLYVHGNDKFKNYVLNPKPNGYQSLHTIITTEDNYKIEIQISFILYCFEVEKRNFVNQHFEILLFVLKGNVA

SEQ ID NO: 1310 - protein, 429 aa, Roseovarius nubinhibens ISM
MPALSPTMEEGTLAKWLVKEGDTVSSGDLLAEIETDKATMEFEAVDEGVIGKILVAEGSEGVKVNTPIAVLLEEGESADDIGEASAPAAEPKAEAPKSDAAPKPEAAPAASAAPAAPKADGERIFASPLARRIAADKGLDLSQISGSGPRGRIVKADVENAQPSAAKPAAKDQPAAAPAAAAPAATGPSSSQVIAMYEGREYEEIPLNGMRKTIAARLTEAKQSIPHFYLRRDIRLDALLKFRGQLNKQLEARSVKLSVNDFIIKACALALQTVPAANAVWAGDRVLQLKPSDVAVAVAIEGGLFTPVLKDAEMKSLSALSSEMKDLASRARDRKLAPHEYQGGSFAISNLGMFGIDNFDAVINPPHGAILAVGAGVKKPVVGADGELSVATVMSVTLSVDHRVIDGALGAQLLDAIVQNLENPMVMLA

SEQ ID NO: 1311 - protein, 81 aa, Glycine max
  misc_feature (12)..(12): Xaa can be any naturally occurring amino acid
  misc_feature (15)..(15): Xaa can be any naturally occurring amino acid
  misc_feature (50)..(50): Xaa can be any naturally occurring amino acid
  misc_feature (80)..(80): Xaa can be any naturally occurring amino acid
APPTVDIALDNXEAXTSSYHCSVVRALALEQIDPSLAIGFYCRDKGEPLXFSGCPFGHVFSSSNPYVFYLASFYADDFDXF

SEQ ID NO: 1312 - protein, 460 aa, Roseovarius nubinhibens ISM
MPTEILMPALSPTMEEGTLAKWLVKEGDTVSSGDILAEIETDKATMEFEAVDEGVIGKILVGDGSEGVKVNTPIAVLLEEGESADDIGEASAAPAEAPKSEDAAKPAPAKAKAPATESENLAPNTEPDWPEGTPMKTMTVREALNSAMAEEMRSDETVFVMGEEVAEYQGAYKITQNLLDEFGSKRVIDTPITEHGFAGIGVGAAWGGLKPIVEFMTWNFAMQAIDQIINSAGKTNYMSGGQLGCSIVFRGPNGAAARVGAQHSQDYAAWYAQVPGLKVVQPYSAADAKGLLKSAIRDPNPVVFLENEILYGKSFEVPALDDFTIPFGKARVWREGEDVTIVSFGIGMTYALDAAEKLAEDGISAEVIDLRTLRPIDYDTVIASVMKTNRCVTVEEGWPVASIGNHISATLMERAFDYLDAPVINCTGKDVPMPYAANLEKLALTSTAEVIEAVRKVTYK

SEQ ID NO: 1313 - protein, 302 aa, Pediococcus parvulus
FSMDDKQNAGANIKVIGVGGGGNNAVNRMIAEGVKGVEFIVANTDVQALKQSKAETKIQLGPKLTKGLGAGSTPEVGTKAAQESEQTISSALEGADMVFVTAGMGGGTGTGAAPLVSKIAKETGALTVGVVTRPFSFEGPKRARFAAEGVAQMKEQVDTLIIIANNRLLEMVDKKTPMMEAFSEADNVLRQGVQGISDLITSPGYVNLDFADVKTVMSNQGSALMGIGSANGENRTEEATKKAISSPLLEVSIDGAEQVLLNITGGPDLSLFEAQAASEIVAKAATDDVNIIFATSIDENIE

SEQ ID NO: 1314 - protein, 224 aa, Haloarcula marismortui ATCC 43049
MSRSEETAVDADSVADAVAAFARGEPVLIHDAADREGETDLVYPAGAVSPDAVARMRNDAGGLVCVALSDRVAEALELPFMQEVLSHPTAADHDLAYDERSSFSLTVNHRDTFTGITDDDRSLTIQELAAVAADPDPDAFSDAFRSPGHVHLLRAAPDGLADREGHTELALALAAAADQPEAAVVCEMLDDETGAALPPAAARAYAEREGLVYVEGASLLERFD

SEQ ID NO: 1315 - protein, 313 aa, Pediococcus acidilactici
FSMDDNKSKGANIKVIGVGGGGGNAVNRMISEGVKGVQFIVANTDVQALQASNADVKIQLGPKLTKGLGAGSTPEVGAKAAEESQQTIASALEGADMIFVTAGMGGGTGTGAAPMVAKIAKEQGALTVGVVTRPFTFEGPKRARFAAGGVSNLKEHVDTLIIIANNRLLDLVDKKTPMMEAFNEADNVLRQGVQGISDLITSPGYVNLDFADVKTVMQNQGSALMGIGSANGENRTEEATKKAISSPLLETSIDGAEQVLLNITGGPDLSLFEAQAASQIVTEAANDDVNIIFGTSIDEELKDGVRVTVIATG

SEQ ID NO: 1316 - protein, 314 aa, Pediococcus inopinatus
FSMDDKQNAGANIKVIGVGGGGGNAVNRMIAEGVKGVEFIVANTDVQALKQSKADTKIQLGPKLTKGLGAGSTPEVGSKAAQESEQTISSALEGADMVFVTAGMGGGTGTGAAPLVSKIAKETGALTVGVVTRPFSFEGPKRARFAAEGVAQMKEHVDTLIIIANNRLLEMVDKKTPMMEAFSEADNVLRQGVQGISDLITSPGYVNLDFADVKTVMSNQGSALMGIGSANGENRTEEATKKAISSPLLEVSIDGAEQVLLNITGGPDLSLFEAQAASEIVAKAATDDVNIIFGTSIDENMKDEVRVTVIATGK

SEQ ID NO: 1317 - protein, 528 aa, Lactobacillus plantarum WCFS1
MKFTELGLSDSLLKAVNRAGYEEATPIQAETIPMVLEGKDVIGQAQTGTGKTAAFALPILQRLDFDNHNIQALVVSPTRELAIQTQEEIFRLGKDERAKVQVVYGGADIRRQIRNLKQNPQVIVGTPGRLLDHIRRGTVKLDHVKMLVLDEADEMLNMGFLEDIESIIKQVPDERQTMLFSATMPPEIKRIGVQFMKEPHHVKIKSKEMTADTVDQYYVKAKEFEKFDIMTRLFDVQAPELTIVFGRTKRRVDELSKGLEARGYNAAGIHGDLSQQRRTQIMRQFKAGKLDILVATDVAARGLDVSGVTHVYNYDIPQDPDSYVHRIGRTGRAGHKGVSLTFVTPNEMEYLRVIEKLTKKRMLPLKPPTESEAFAGQLAAAEANVDSLVAKTSTEKYADQAAELLQKYDATDLVAALLNDLTKDDASAVPVKITPERPLPRHKGGGGNNRRGGYRGGNRNRNNSHGNGRGGYSHNGRNRDRDRNGGRGDRKSNGYKGRSRDDNRSSNRNHDEGRKQSSKRSYTIRTND

SEQ ID NO: 1318 - protein, 654 aa, Photobacterium sp. SKA34
MLEVAVAEPVCSKGAPFLSRSYIGIPMQETVTEFRQLDLADTLLSALDNMGFVAPTPIQAASIPLLLTGTDALGKAQTGTGKTAAFSLPVLNKVDLSQHKPQAIVMAPTRELAIQVAAEIKVLGQNIKGLKVLEIYGGASIVDQMRALKNGAHIVVGTPGRVKDLISRKQLQLDEVHTFVLDEADEMLKMGFVDDVTWIMEQAPETAQRVLFSATMPPIVKEIVDRFLRNPARIDVAGENRTVSKVEQQFWVVKGVEKDEAMSRLLETEDTDASIVFVRTRQDTERLADWLSSRGFKAAALHGDIPQSLRERTVDHIKRGVIDILVATDVVARGLDVPRITHVFNYDIPFDVESYIHRIGRTGRAGRAGKAILLVRTNQIRMLRTIERVTKSRMEEIQLPLRDLVAASRLNRLGEELAAQKEQTSVEAFVELVEKLQESIDVDAATLAAMLLQRQQGNRPLFYKGPDPMIAAIERESQRRERRGNDRDRGERGDRRERGERRSYNNADWDTYQLQVGREQGVQVKDIVGAIANELGLSKEFIGAIKLAPTHTFVQLPKKMTAEVASQLKKLRIRQNDVKAVVVEGEVLREHRPRSGNRDGNRDGNRGGYRGNRDGNRGGERGGERRFDRNRGNDTRGGYRGNRDGAPRKPHTEA

SEQ ID NO: 1319 - protein, 114 aa, Methanosarcina mazei
MKYVIAMIRPERLDAVKRELQKIEVSRLTVSSVSGYGAQKGYMEIYRAMEYDANLLEKIKIEIAVNDEFLEPTIEAIKTGAKGSDGYVGSGKIFVLPLENVIRIRTNETGPEAI

SEQ ID NO: 1320 - protein, 157 aa, Oryza sativa (indica cultivar-group)
MAAATMALSSSFAAVAAAAGGAPWRAAVRFPPRRRVALVVRAQAEPEVEPTKEETATSSSPTPSPAAAAPRAKPAASTGLWDVLAFNGPAPERINGRLAMVGFVSALAVEASRGGGLLDRPAAGTGSRGSPPPPPCSPRRPWCRCSAAKARKRRTAA

SEQ ID NO: 1321 - protein, 446 aa, Antirrhinum majus
MSPTSLNTSSETAPPSSTTVCVTGAAGFIGSWLVMRLLERGYTVRATVRDPGNMKKVKHLIELPKADTNLTLWKADMTVEGSFDEAIQGCEGVFHLATSMEFDSVDPENEVIKPTIDGMLNIIKSCVQAKTVKKFIFTTSGGTVNVEEHQKPVYDETDSSDMDFINSKKMTGWMYFVSKILAEKAGMEAAKENNIDFISIIPPLVVGPFIMPTFPPSLITALSPITGNEAHYSIIKQCQYVHLDDLCEGHIFLFEYPKAEGRYICSSHDATIYDIAKLITENWPEYHIPDEFEGIDKDIPVVSFSSKKMIGMGFIFKYTLEDMVRGAIDTCREKGMLPYSTKNNKGDEKEPILNSLENNYNIQDKELFPISEEKHINGQENALLSNTQDKELLPTSEEKRVNGLESALLSKIQDKEVLPTSGVKHAKGQENALLPDIANDHTDGRI

SEQ ID NO: 1322 - protein, 873 aa, Staphylococcus aureus subsp. aureus MRSA252
MKKRIDYLSNKQNKYSIRRFTVGTTSVIVGATILFGIGNHQAQASEQSNDTTQSSKNNASADSEKNNTIETPQLNTTANDTSDISANTNSANVDSTAKTMSTQTSNTTTTEPASTNETPQPTAIKDQATAAKMQDQTVPQEANSQVDNKTTNDANNIATNSELKNPQTLDLPQSSPQTISNAQGTSKPSVRTRAVRSLAVAEPVVNAADAKGTNVNDKVTASDFKLEKTAFDPNQSGNTFMAANFKVTGQVKSGDYFTAKLPDSVTGNGDVDYSNSNNTMPIADIKSTNGDVVAKATYDILTKTYTFVFTDYVNDKENINGQFSLPLFTDRAKAPKSGTYDANINIADEMFDNKITYNYSSPIAGIDKPNGANISSQIIGVDTASGQNTYKQTVFVNPKQRVLGNTWVYIKGYQDKIEESSGKVSATDTKLRIFEVNDTSKLSDSYYADPNDSNLKEVTGEFKDKISYKYDNVASINFGDINKTYVVLVEGHYDNTGKNLKTQVIQENIDPATGKDYSIFGWNNENVVRYGGGSADGDSAVNPVDPTPGPPVDPEPEPEPTPDPEPSPEPEPEPTPDPEPSPEPDPDSDSDSDSGSDSDSGSDSDSDSDSDSDSDSDSNSDSESDSDSDSDSDSDSDSDSDSDSDSDSDSDSESDSDSDSDSDSDSDSDSDSDSDSDSNSDSDSDSDSDSDSDSDSDSDSDSESDSDSDSDSDSDSDSDSDSDSDSDSDSDSDSDSDSESDSESDSDSDSESDSDSDPDSESDSDSDSDSDSDSDSDSESDSDSESDSDSDSDSDSDSDSRVTPPNNEQKAPSNPKGEVNHSNKASKQHQTDALPETGDKSENTNATLFDAMVALLGSLLLFRKRKQDHKEKA

SEQ ID NO: 1323 - protein, 539 aa, Chlamydomonas reinhardtii
MSGDFGSEPLGSCSVETVTALLGYGLEQDSITALCQPEGGAGCTSTDNCMFQYLMGATADAQSTASDVGVGLDVSFLLFSGYLVFVMQLGFAVLCAGSIRSKNCMNILLKNMLDACVGAIGFYVFGYAFAYGRKYGQNSNGFIGNWNFALSYTTQTSMSGTEFTTFGWHQFFFQWSFCAATTTIVSGAVAERCTFMAYMIYAFFLSSFVYPVIVHWVWDGQGWLSAFNTFQDGYALILKTGAIDFAGSGVVHMTGGIAALMGAWIMGPRVGRFANDGTVNEMRGHSSTLVVMGTFLLWFGWFGFNPGSNLVVASQAAATVVSRVAVTTALAGGAGGISMLFYKFLTVKAWDVVATCNGILAGLVAVTASCSVIEPWAAIITGAIGAIIFSIADYVTLYKLKVDDPVSAFALHGAVGAWGVLFPGFLAAPHYVVEVYGAYGFGMDAREGKRFGLFYGGHGQVLLVQLIEVLAIFGWTGFMMGSFFFILNKAGLLRVPLQEEMAGLDAANYSKSVGSKDPSVHCTVGVDKLEGGALGEGKA

SEQ ID NO: 1324 - protein, 296 aa, Rhodospirillum rubrum ATCC 11170
MGAHLIDGKAIAQQLRERIAQEVADLKAHRGLVPGLAVVLVGEDAASQVYVGSKEKMAVAVGMHSVVCRLAATTSEAEVLAKVEALNADPTIDGILVQLPLPAHIDEDKILLAIDPDKDVDGFHPVNVGRLSIGQSNGEHGMVPCTPKGCLMLLKGVLGDLTGKTALVIGRSNIVGKPMAQLLLSANCTVTLAHSRSRDLPDLCRRMDIVVAAVGRPEMVKGDWLKPGAVVIDVGMNRLPAAPGAEKGKLVGDVDYASAAAVAGAITPVPGGVGPMTIACLLANTLEACKARGAGA

SEQ ID NO: 1325 - protein, 521 aa, Salmonella enterica subsp. enterica serovar Paratyphi A str.
MLDTNMKTQLRAYLEKLTKPVELIATLDDSAKSAEIKELLAEIAELSDKVTFKEDNTLPVRKPSFLITNPGSQQGPRFAGSPLGHEFTSLVLALLWTGGHPSKEAQSLLKQIRDIDGDFEFETYYSLSCHNCPDVVQALNLMAVLNPRIKHTAIDGGTFQNEITERNVMGVPAVFVNGKEFGQGRMTLTEIVAKVDTGAEKRAAEALNKRDAYDVLIVGSGPAGAAAAVYSARKGIRTGLMGERFGGQVLDTVDIENYISVPKTEGQKLAGALKAHVSDYDVDVIDSQSASKLVPAATEGGLHQIETASGAVLKARSIIIATGAKWRNMNVPGEDQYRTKGVTYCPHCDGPLFKGKRVAVIGGGNSGVEAAIDLAGIVEHVTLLEFAPEMKADQVLQDKVRSLKNVDIILNAQTTEVKGDGSKVVGLEYRDRVSGDIHSVALAGIFVQIGLLPNTHWLEGALERNRMGEIIIDAKCETSVKGVFAAGDCTTVPYKQIIIATGEGAKASLSAFDYLIRTKIA

SEQ ID NO: 1326 - protein, 383 aa, Xanthobacter autotrophicus Py2
MSDAPEGERATTAADVSSHVVSMPSTRRSATPSPSQIRSCTVFQYGAAAPERRSIPFRFRRALYAAMSENTKSVYHPVHPRLRIGTRGSPLALWQAHAVQAALAVALGVEKEAIAVEVIKTSGDQIQDRALSEAGGKGLFTKEIEEALLDGRVDLAVHSAKDVATVLPDGLHLAGYLPRADVRDALILKSGAALADLPAGAKVGTASLRREAQLRRIRPDLKVELLRGNVHTRLAKVKDGDFDATLLALAGLTRLGMAQAASCVLATDDFLPAVGQGAVAIECRIADPDTNAAIAAIACRDTGIALEAERAFLAALDGSCRTPIAGLATVEGESVRLRGLVLSPDGSDAAEIAELAPIADAARLGAECGARLRTSAPARALGL

SEQ ID NO: 1327 - protein, 259 aa, Geobacillus kaustophilus HTA426
METSHLLVEQSGSVLWLTLNRPERLNAFSPEMIAGLTDEIERAAADDAVRVIVLSGAGRAFCAGGDVKTMGQSSAPQAYEHIGRLNRLILAMKSCEKPIMAAVHGVAAGAGFNLALACDVILAAEDSQFILSFAKVGLVSDGGGSYWLPRLVGPHLAKQFFFTADPISARRLYELGVLSEVVPAEKLREATESLASKLAGGPTKAIGKQKRLIEHALTATLEEILEEERLVQGLMVETEDHREGVTAFKEKRSPVFQGK

SEQ ID NO: 1328 - protein, 466 aa, Synechococcus sp. WH 5701
MSVSSGPSSDEAAVENLVIVGSGPAGYTAAIYAARANLSPLLITGFQDGGIPGGQLMTTTHVENFPGFPDGILGPDLMDRMKAQAVRWGTRLVEADAEAIDLSERPYRVSAEGRTIRTQAVILATGASANRLGLPHEQQFWSQGISACAICDGATPQFRNEQLAVVGGGDSACEEAVYLTKYGSHVHLIVRRESLRASGAMADRVLANSAITVHWQREVADVSGNGWLEALTLRNPDDGSTEELPVRGLFYAIGHTPNTHLVRDQLAVDAKGYLVTTPGQPDTSLEGVFAAGDVADAQWRQGVTAAGSGCQAALAAERWLTHHGLATTVKRTDVEPEPSGEPAHTAVSDADNYDPAALWQKGGFALRKLYHDSDKPLLVVYTSPSCGPCHVLKPQLKRVLLELDGAAQGVEIDIEAEQEIATQAGVNGTPTVQLFQGKQLRQQWRGVKQRSEFKAAIEALLPVPVA

SEQ ID NO: 1329 - protein, 400 aa, Streptomyces avermitilis MA-4680
MLSEQSAATVRATLPAVGAAVGEITARFYDRLFAARPELLRDLFNRGNQAAGTQRQALAGSIAAFATYLVEHPDERPDAMLDRIAHKHASLGIAPGQYAVVHEHLFAAIAEVLGDAVTPEVAAAWDEVYWLMANALIAIERRLYAQHENTGDTGGRRPWRVVERVDETADVAAFRLRPADGRPLPDFRPGQYVSVRVELPDGARQTRQYSLVGAPGSPELRIAVKRVHGGTTPDGEVSNHLHARVREGSVLELSAPYGDLALEATDVPLLLASAGIGVTPMIAMLEHLALTGHRAPVTVVHADRSPAEHALRADHEAYAAKLADAAVHFWYEHPEPGHPADRTGLVDLTGVPVSAGTRAYLCGPLPFMRAVRTQLIEKGVAPADIHYEVFGPDLWLARES

SEQ ID NO: 1330 - protein, 391 aa, Rhodobacter capsulatus
MKYDAFVVGGGPAGSTAAWDMARAGLKVALLDRAGRIKPCGGAIPPRLIRDFDIPDHLLVAKITSARMISPTGRFVDIPIENGFVGMVDREDYDEWLRERAGKAGAERLTGTWLRIERDSGKTVVVWRDKVTGEEMKAETRVVIGADGANSQVRNEVPATKIPLVFAYHEIIKAPTTVANYDPTRCDVYYDGRISPDFYGWVFPHGKTASIGMGTELPDVSLKDCTTLLRQMSGLDKEETIRKEGAPIPLQPLDVWDNGKDVVLSGDAAGVVAPSSGEGIYYAHAGGRYAAEAAMAFLKSGKPADLKLARAGFMKEHGTVFKVLRMMQDKYYHSDDRRERFVSLCHDVDVQRMTFESYMNKKMTKFQPLKNLKIGFKNLAHLSGLVPPQWT

SEQ ID NO: 1331 - protein, 188 aa, Triticum aestivum
  misc_feature (40)..(40): Xaa can be any naturally occurring amino acid
RIITHKESEQAQSWSKIYSEDTKEQSIPVITAWQLNERMXRVCLLLLLFSLPVRFGKEQVHEWRRSYDTPPPNGESLEMCADRAVSYFKDQVVPHLTAGKHVMVAAHANSLRSIIMHLDKLTSQEVISLELSTGIPMLYIFKEGEFIRRGSPVGPSEASVYAYTRVRVYSIFYPSTEQFVSTVYIKTN

SEQ ID NO: 1332 - protein, 165 aa, Brassica napus
  misc_feature (152)..(152): Xaa can be any naturally occurring amino acid
  misc_feature (162)..(162): Xaa can be any naturally occurring amino acid
MGTMTKRRRFKPMSSYNVNAEDRSNQTVVADLDGTLTSSSRPLLYFFLVALKAGSLLRALILLASVPLVHLTYLFVSESLAVKVAVFITFAGLKLGDVEHVARHVLARVYEKELKRDTWRIFEAFGKRYIVTASPRVMVEPFAKNFLGADKXIGTELGFTRXGWL

SEQ ID NO: 1333 - protein, 254 aa, Pediococcus pentosaceus
FSMDESKSTGANIKVIGVGGGGGNAVNRMIAEGVKGVEFIVANTDVQALQASNADVKIQLGPKLTKGLGAGSTPDVGAKAAEESQQTISSALEGADMIFVTAGMGGGTGTGAAPMVAQIAKEQGALTVGVVTRPFTFEGPKRARFAAEGVANLKEHVDTLIIIANNRLLDLVDKKTPMMEAFNEADNVLRQGVQGISDLITSPGYVNLDFADVKTVMQNQGSALMGIGSASGENRTEEATKKAISSPLLETSID

SEQ ID NO: 1334 - protein, 354 aa, Burkholderia vietnamiensis G4
MRFDLEPPSSVAAAHRIGVLLINLGTPDAPTPRAVRRYLAEFLSDPRVVEIPQAIWQVLLRTVILPLRGRASAKKYAAVWMPEGSPLRVYTERQTEGVRHLLAANDYQVQVDYAMRYGSPNIAQALAQFKRAGVERVLLMPMYPQYSASTTATAFDAAFAALTRMRNQPEVRTVRHYADHPAYIHALAEQVRHYWAQHGRPDFAAGDKLVLSFHGVPKRTLDLGDPYHDQCQQTGALLMAALGLSTLECRVTFQSRFGKAEWLQPYTAPTLRELGEAGVRRADVFCPGFTADCLETIEEIGMEVRDEFLAGGGQAFHRIPCLNGASAWIGALGEIVAENLQGWPAKAAQPETVS

SEQ ID NO: 1335 - protein, 258 aa, Zea mays
MTTMSDDGDRTCPLCAEEMDTTDQQLKPCKCGYDICVSYWHHIIDMAEKEETKGRCPACHTRYDKDMIVKMAATCDRTVADKNAEKKQKAQRVKPKAAPTATTTSTVESKKHLATIRVIQRNLVYIIGLPAHLCNESVLERREYFGHYGKVLKVLVSRPTGPPSQQASANSSISVFSLKDRPGAVVRGLSTEPKGLGLTQPLRKNVGLRLALVITSPDPTHAGAVSIGRYTWSVRIICASTRTVTTILHQVDVHTSQI

SEQ ID NO: 1336 - protein, 427 aa, Mycobacterium sp. JLS
MNSPSSGALARRLGTRDAVLIGLGSMIGAGVFAAFGPAAQAAGTGLLVGLAIAAVIAYCNAVASAQLAAQYPTSGGTYIYGRERLGPWWGFIAGWGFVVGKTASCAAMAMTVAAYAVPGPWWAQRLVGVAAVVGLAALNYRGVTKTAGLTRILVGCSLIALTVVVVGIAVGGQASLDHLGGWPALGAGGVYGVLQSAGLLFFAFAGYARIATMGEEVRDPTRTIPRAILIALFITVGVYLIVGVAALLAVGPDGLAHATAPLTAAVDGAGAGELAPVVRIGAVLAALGALLALIAGVGRTSLAMARHRDLPVWLSAVHPRYQVPHHAELALAVVVSVLVLTADLRDVIGFSSFGVLIYYAITNASAFTQPAAQRRWPRWLNVAGLAGCLILTATLPWPSVLAGAAMFAIGLAGRWLIVGRRTHTTHA

SEQ ID NO: 1337 - protein, 248 aa, Zea mays
  misc_feature (125)..(125): Xaa can be any naturally occurring amino acid
GYLEAGRVPYPWLTSTLSLAAGSAIMLASWATRIAEAPQTDLDFWKALTPVAIAHTIGHVAATVSMAKVAVSFTHIIKSGEPAFSVLVSRFFLGEHFPAPVYFSLLPIIGGCALAAVTELNFNMXGMKGKSVSGMNYYACLSIMSLVILLPFAVAMEGPKVWAAGWQTAVAEIGPNFVWWVAAQSVFYHLYNQVSYMSLDEISPLTFSIGNTMKRISVIVASIIIFQTPVQPINALGARIGILGTFIY

SEQ ID NO: 1338 - protein, 509 aa, Nostoc punctiforme PCC 73102
MTLSFQELGISQERVAQLEKIGFTEPTNIQVQAIPQLLGGRDVVGQSQTGTGKTAAFSLPILERLDINQKAVQAIVLTPTRELAMQVHDAIAQFIGDEGLRVLAIYGGQSIDRQMLQLRRGVHMVVGTPGRVIDLLDRGCLKLDQVKWFVLDEADEMLSMGFIDDVIKILSQAPVDRQTALFSATMPPSIRMLVNKFLRSPATVTVEQPKAAPNKINQVAYLIPRHWTKAKALQPILEMEDPETALIFVRTRRTAAELTSQLQGAGHSVDEYHGDLSQQARERLLVRFRNRQVRWVVATDIAARGLDVDQLSHVINFDLPDSVETYVHRIGRTGRAGKEGTAISLVQPFERRKQQTFERHNRQSWQLLSIPTRAQIEARHILKLQEQVREALTGERLASFLPIVSELIEEYDAQAIAAAALQIAYDQTRPAWLSSDVEIPQEESSAPKPRLGKRRESSSDRPRSAWKSDSNNGEERHSSPKPKLRTSGHESSASPSKKIGSPTARESAS

SEQ ID NO: 1339 - protein, 424 aa, Arabidopsis thaliana
  misc_feature (395)..(395): Xaa can be any naturally occurring amino acid
MASIRRTLSPMYHDRSHENGGSHKGFTIGGSSSKHNSSQFLSYLTKLLGVTSDPKSSRRGPWRRPFYQFLVFFLLGFVLGLTPFGKMEDVNGSDRFSFEIKQPYVEERLENRKREEAAVDAVSFVAETENGKKEVNFVPKKLLIVVTPTYNRAMQAYYLNRVAQTLRLVESPVLWIVVEGNVASFETSEILRKTGVMYRHLVCKRNMTSIKDRGVHQRNTALEHIELHKLDGIVYFADDDNIYSLELFQSLRQISRFGTWPVAMLAQSKNKAILEGPVCNGSQVIGWHTNEKSKRLRRFHVDMSGFAFNSTILWDPKRWRRPFSHPTRQLDTVKEGFQSTLFLYMTSCVSKQETSFIEQVVADESEMEGVPPACSSILNWHLHLDALDVPYPQGXSTYPMCCAHYWIYIKEAYEEWKKTSEGSL

SEQ ID NO: 1340 - protein, 389 aa, Haloarcula marismortui ATCC 43049
MTTRGETLQLATRGSDLALRQAATVRDSLSSRRLAVELVEVETTGDQIRDELIHRLGKTGAFVRSLDEKVLDGELDAAVHSMKDMPTERPERLVVAAVPERAAAEDVLVTPDGRSLEELPEGATVGTSSLRRKAQLLAERDDLTVEPLRGNVDTRLAKLLAPSLQQEHQERHEAEQEHEGDAGDGDDADPDTDEEEEHPYDRTVEEWFDDLTEFERRAMERDPDVEYDAIVLAKAGLHRAGLTRYVGMSDLDPDQFVPAPGQGALAVTAVDGDLALDIKDRLDDPQTRIETTVERTILEELGGGCVAPIGVHAQLEGGVVHTRVRVLSQDGTEEVSVGRDVPAEYHIESAQDLAAELAEQGADDLIAEAKRDSTEADDDASTAREEDEE

SEQ ID NO: 1341 - protein, 455 aa, Francisella tularensis subsp. holarctica
MSFIPHKLEQIKKMLDTIGASSVDQLFDEIPRHLRADTLNIKDGINEIQLANLMRKRANKNHHNINYIGAGAYSHHIPAAIWDIVARGEFYTAYTPYQAEASQGGLQVIYEFQTMMAGLTGMDASNASMYDGATALAESVLMAIRSNKKAKSQKVLIAEALHPTYLRVLETITKHQGIEFDIVNLDSKNGKTDVTKLEDFANTNYAAVVIQSPNFLGQLADVDGITNWAHKHGALVIAVTNPMSLAILKSPAEWGDNGADIVCGEGQPIGVPLASGGPYFGFMTCKMAHVRQMPGRIVGRTVDLDGNEGFCLTLQAREQHIRRAKATSNICTNQGLMVTAATIYMSLLGAEGLERVASISHENTQTLATELAKINGVSIRFNSAFFNEVVIDLPVNAETFVTEMEKEAIDAGYFLGEYHSDLANSIMVCATEIHTSEDIKEYIEATKKVLARIGG

SEQ ID NO: 1342 - protein, 334 aa, Neisseria meningitidis MC58
MSIKVAINGFGRIGRLALRQIEKAHDIEVVAVNDLTPAEMLLHLFKYDSTQGRFQGTAELKDDAIVVNGKEIKVFANPNPEELPWGELGVDVILECTGFFTNKTKAEAHIRAGARKVVISAPGGNDVKTVVYGVNQDILDGSETVISAASCTTNCLAPMAAVLQKEFGVVEGLMTTIHAYTGDQNTLDAPHRKGDLRRARAAALNIVPNSTGAAKAIGLVIPELNGKLDGSAQRVPVASGSLTELVSILERPVTKEEINAAMKAAASESYGYNEDQIVSSDVVGIEYGSLFDATQTRVMTVGGKQLVKTVAWYDNEMSYTCQLVRTLEYFAGKI

SEQ ID NO: 1343 - protein, 526 aa, Vibrio angustum S14
MLEQSMKQQLKAYLENLKTDIQLVLSLDDSDTAQKLHELAHEIAELNDKVSVIEDNNASVRKPVMQVVNPTKETSMSFAGLPMGHEFTSLVLALLHSGGHPMKLEQAVIDQIAALDQDIIVETFISLSCQNCPDVVQAFNMMAAINPRIKATMIDGAAFQDEVTERNIMAVPTVYVNGEVFGQGRMSLTEILNKLDTGAAKKVAASLNEKAPFDVLVVGGGPAGASAAIYAARKGIRTGVVAERFGGQVMDTMSIENFISVKETQGPRLAASLEEHVKQYNVDIMSEQRVNNIVEAADTEDGYTHVYLESGAMLKARSVIISTGARWREMNVPGEQEYRNKGVAYCPHCDGPLFKGKRTAVIGGGNSGIEAAIDLAGIVEHVTVLEFADTLRADQVLIDKAESMPNIDIIKMAQTTEVVGDGTRVTGISYKDRNTDEIKHIELAGIFVQIGLVPNTEWLKESAVALTPRGEIEIGAHGNTNVNGIFAAGDVTTVPYKQIIIAMGEGAKASLGAFDYLIRTPAPIAK

SEQ ID NO: 1344 - protein, 419 aa, Streptococcus pneumoniae
MTFSFDTAAAQGAVIKVIGVGGGGGNAINRMVDEGVTGVEFIAANTDVQALSSTKAETVIQLGPKLTRGLGAGGQPEVGRKAAEESEETLTEAISGADMVFITAGMGGGSGTGAAPVIARIAKDLGALTVGVVTRPFGFEGSKRGQFAVEGINQLREHVDTLLIISNNNLLEIVDKKTPLLEALSEADNVLRQGVQGITDLITNPGLINLDFADVKTVMANKGNALMGIGIGSGEERVVEAARKAIYSPLLETTIDGAEDVIVNVTGGLDLTLIEAEEASQIVNQAAGQGVNIWLGTSIDESMRDEIRVTVVATGVRQDRVEKVVAPQARSATNYRETVKPAHSHGFDRHFDMAETAELPKQNPRRLEPTQASAFGDWDLRRESIVRTTDSVVSPVERFEAPISQDEDELDTPPFFKNR

SEQ ID NO: 1345 - protein, 476 aa, Frankia sp. CcI3
MDAIFANLIGGVSTPAVDGETMSILNPSTADLLAQAPRSGPADVDAAVAAASAAFEGWRDTTPAQRSRALLRVADALEDRADEVAAVESANTGKPLRLTVDEEVGPSADQIRFFAGAARLLEGRSAGEYLAGYTSYVRREPIGVCAQVTPWNYPLMMAVWKVAPAIAAGNTVVLKPSDTTPASSLLLAEIAAEFLPPGVLNVVCGDRDTGRALVAHPGPAMVSVTGSVRAGMEIARAAADSLKRVHLELGGKAPVIVFDDVDPAVVARQIAEAAYFNAGQDCTAATRVLAAPGVHDELAAALAEAAGKTATGSPEEPDVDYGPLNNAGQLARVSGFVERAPEHAEVLAGGAPLDRAGYFYPATVVSGLRQDDELIQSEVFGPIITVQRFDSEDTAVAWANGVEYGLASSVWTRDHGRALRVARRLDFGCVWINTHIRLVAEMPHGGFKKSGYGKDLSVYGLEDYTRIKHVMSNIEF

SEQ ID NO: 1346 - protein, 200 aa, Zea mays
LIPRVLTRAQVTLGNILKESGQEGIPVNKTWRLNERHYGSLTGLNKSETAAKYGEAQVQIWRRSFDTPPPPMEPDHPYYNTIVKDPRYAEGPSEAEFPMFESLKLTIARTLPYWNDVIIPQLKEGKSIIIAAHGNSLRGIVKHLDNLSDDAIMALNLPTGIPFVYELDENFKPVVSMKFLGDEETVRKAIESVAAQGKAK

SEQ ID NO: 1347 - protein, 402 aa, Burkholderia vietnamiensis G4
MTDITADQMARVKATAPVLAVHGATITKHFYQRMFTRHPELKNLFNQTHQKTGSQPETLAKAVYAYAANIDNLGALGGAVSHIAHKHASLNIRPEHYPIVGENLLASIVEVLGDAVDAQTLEAWRVAYGQLAQILIGAEADLYAGAAWSGFRPFKVARKVRESDEITSFYLTPADGGAAPTFEPGQYVTVKRFVGDLGVDQPRQYSLSDAPHGKWLRISVKRESGQAEAVPAGKVSTLMHDGVEEGAIVEVTAPMGEFSLKRGVDTPVVLISGGVGLTPMVSMASTLVAEGSKRDVRFVHACRSGAVHAFRDWLNDTVREHANFKRTVLYELVGPNDRAGVDHDLEGRLTPERVQQYALVPDADYYICGPIAFMKAQRDALVALGVAPERINTEIFGSGALE

SEQ ID NO: 1348 - protein, 116 aa, Oryza sativa (indica cultivar-group)
MARAQLVLVAVVAALLLAAPHAAVAITCGQVNSAVGPCLTYARGGAGPSAACCSGVRSLKAAASNTADRRTACNCLKNAARGIKGLNAGNAASIPSKCGVSVPYTISASIHCSRVS

SEQ ID NO: 1349 - protein, 361 aa, Cryptococcus neoformans var. neoformans JEC21
MVNNTEYYKTLGLSKDASEADIRKAYRKESLKWHPDKNPGDKHAAAEEKFKKISEAYEVLSDPKKKEIYDQFGEDGLKGGGAAGGGGFGGFPGGGGGGYSSFHATDPNDIFNTFFSSMGGGGGGAENIFTSFGGGGSSRGGPRMRSSRMGGGMGGMGGMGGMPGGFGDEPSSSAPPPPGEIIKPLALTLEELYKGGTKRLKITRHLQSGGQAEKILEVAYKAGWKKGTKIKFAGAGNEDEYGQSQTVAFVVEEKPHNRFERVDDDLVVKLNITLSQALLGPDGGGAITKEVEQLDGRRIQVSLPEGQIVQPGQETRIQGEGMPVSKASSVKKSGDLVVKWNVVFPTRLTPEQKKDLRRILG

SEQ ID NO: 1350 - protein, 406 aa, Burkholderia cepacia
MSADPFVIVGAGHAARRTAEALRARDADAPIVMIGAERELPYDRPALSKDALLNDDGEQRAFVRDAAWYDAQRIALRLGTRVDAIEREAQRVRLDDGTTLPYAKLVLATGSRVRTFGGPIDAGVVAHYVRTVADARALRAQLVRGRRVAVLGGGFIGLEVAAAARQLGCNVTVIDPAARLLQRALPEVVGAYAHRLHDERGVGFQMATLPRAIRAAAGGGAIVETDRGDVHADVVVVGIGVLPNVELAQAAGLDVDNGIRVDAGCRTADRAIFAAGEVTMHFNPLLGRHVRIESWQVAENQPAVAAANLLGADDAYAELPWLWSDQYDCNLQMLGLFGAGQTTVVRGDPARGPFTVFGLGGDGRIVAAAAVNLGRDIGAARRLIAAGAMPDPQQLADPTVGLKTFL

SEQ ID NO: 1351 - protein, 302 aa, Alkalilimnicola ehrlichei MLHE-1
MLKKTAGMPAIEAPQHTACNDRRAPRRRTHRDRPAWNRGGPAQPWCAGERGMNPKRHDLEHSHDPADIRERLAGDKHRSYLPDAILGGIDGCITTLALVASVAGAGLPGMVAFVLGLASLIADALSMAVSNYQAVKSTDEARHRLREQEHHHVAVDPEGEREEIRAIFEAKGFDGDALEHIVETITRDQRLWVETMLMEEHGLALHGPSALVSGLTTFAAFVGIGFVPLAPFLVPFLAGDEYFLISAVVTALALFGIGYAKGVILDMSRWRAGLETLLLGGSAALAAFLVGRLLEPLLLQAL

SEQ ID NO: 1352 - protein, 179 aa, Cryptococcus neoformans var. neoformans JEC21
MFSLRPLFRSSQLTTAARRTLHYTAPALNTSTRPESPVTPVPTVQDGTVPTEYELANGPQADLVSGAPAELLHRPVRIFRPTKNTMQSAKGKTKRWIIDFDVLQGAGRWENRLMGWASSADYVQGTTLAFRSKEDAIYFAEKQGWPYKVDEPKKIEIPPKSYANNYVHVPGKLRIHHTK

SEQ ID NO: 1353 - protein, 630 aa, Saccharomyces cerevisiae
APSFNVDPLEQPAEPSKLAKKLRAEPDMDTSFVGLTGGQIFNEMMSRQNVDTVFGYPGGAILPVYDAIHNSDKFNFVLPKHEQGAGHMAEGYARASGKPGVVLVTSGPGATNVVTPMADAFADGIPMVVFTGQVPTSAIGTDAFQEADVVGISRSCTKWNVMVKSVEELPLRINEAFEIATSGRPGPVLVDLPKDVTAAILRNPIPTKTTLPSNALNQLTSRAQDEFVMQSINKAADLINLAKKPVLYVGAGILNHADGPRLLKELSDRAQIPVTTTLQGLGSFDQEDPKSLDMLGMHGCATANLAVQNADLIIAVGARFDDRVTGNISKFAPEARRAAAEGRGGIIHFEVSPKNINKVVQTQIAVEGDATTNLGKMMSKIFPVKERSEWFAQINKWKKEYPYAYMEETPGSKIKPQTVIKKLSKVANDTGRHVIVTTGVGQHQMWAAQHWTWRNPHTFITSGGLGTMGYGLPAAIGAQVAKPESLVIDIDGDASFNMTLTELSSAVQAGTPVKILILNNEEQGMVTQWQSLFYEHRYSHTHQLNPDFIKLAEAMGLKGLRVKKQEELDAKLKEFVSTKGPVLLEVEVDKKVPVLPMVAGGSGLDEFINFDPEVERQQTELRHKRTGGKH

SEQ ID NO: 1354 - protein, 583 aa, delta proteobacterium MLMS-1
MCTIVVTYNEAQPEVLRAMAKAVHHRGPDSLEICCHGNHGVAACRLTILGDPKAPMIYHDPHSGRIILLNGEIYNYSELWQELNKVGIVAGTDLEAELISRLYSVHGPQFAQRLKGMFAIAILDEANLVLIRDRFGIKPLYFTRHGQRILVSSEIKGILAHPGITPILNHSSFQETRVFGYVSSPEQTFFENIQQVQPGQVLVFNAAGREHATTFGAIPKAHFVNGQPEPDYEESVVITRETILKAVERMFGHGEMDKGVFLSGGIDSSTIALVASLHSGRKLQTFTLADSNETPDLLAARQVAEALKTDHHEYIVTSDDYWRWLPDYVAHYEGLMAGGVFHIQGGLAFHILAQYISKHVKVAFSGEGADELFGGYYWIHTHPLGFSDRIRKNLTAVKGNAALTATVNTLFPPPEDATVYQKNLFDFLLKGGLSNYHLQSVDRSAGAFGMEIRPFYLDDDLSQWAASLPIEYKVPNKQTTKRILRDAFRQDFQKLGLETVLTRQKMGMPSALANLDKEINEKVERAVTAEDLAGHPYGAILGSKMNLLLFDLFEHIFFKGWNHHSALPPSDSYLARVWPTYST

SEQ ID NO: 1355 - protein, 561 aa, Rhodobacter capsulatus
MDHERLKSALAVLTVDPAAVGGLWLRSRAGPIRLAFTDTLAKLPFPMALRRLPPNVDDGALYGGLDVAETLHSGKPVLKGGLLDRPSVFILPMAERCTAKLGARLAQALDLRQHALIALDEAAEPDEALPHAVADRLGLFVDLSEVRSIDGPGLLPETAQIERARELLPQVQMPAERVSEIVEGCRQLGISSLRAPMLALTAARILTALSGRTRVEAEDVLHAAELTLAHRALPLQEAPPPPPPPPEPPEPNEGENQQDEQDQIDPLDGIPPEIVVEAVRAMLPDNILQTLNMGSRLRAASGGQGAGQEQIGNRRGRPLPSRKGKLEDDAKIDLVATLRSAAPWQGLRRRQAPAGTERVLLVESSDIHIKRRKEMSDRVLIFAVDASGSAAVARLSEAKGAVELLLGRAYAARDHVSLITFRGTAAQVLLQPSRSLTQTKRQLQGLPGGGGTPLASGMEMAMVTAKQARSRGMTPTIALLTDGRGNIALDGTANRELAGEQATKVARAIRASGMPAVIIDTAMRPNPALVDLARTMDAHYIALPRATAHKMADVLGAALEA

SEQ ID NO: 1356 - protein, 335 aa, Xanthomonas campestris pv. campestris str. ATCC 33913
MTQTITVIRGDGIGPEIMDATLFVLDALQAGLTYEYADAGLVALEKHGDLLPESTLASITKNKVALKSPLTTPVGEGFSSINVAMRRKFDLYANVRPAKSFPNTKSRFADGVDLITVRENTEGAYLSEGQEVSADGEVAVSGARVTRKGSERIVRYAFDLARATGRKKVTAVHKANIIKSTSGLFLKVARDVATQYPEIEFQEMIVDNTCMQLVMRPEQFDIIVTTNLFGDIISDLCAGLVGGLGLAPGANIGVDAAIFEAVHGSAPDIAGQGKANPCALLLGAAQMLDHIGQPQNAERLREAIVATLEAKDSLTPDLGGTGNTMGFAKAIASRL

SEQ ID NO: 1357 - protein, 350 aa, Rhodobacter capsulatus
MTTAVARLQPSASGAKTRPVFPFSAIVGQEDMKLALLLTAVDPGIGGVLVFGDRGTGKSTAVRALAALLPEIEAVEGCPVSSPNVEMIPDWATVLSTNVIRKPTPVVDLPLGVSEDRVVGALDIERAISKGEKAFEPGLLARANRGYLYIDECNLLEDHIVDLLLDVAQSGENVVERDGLSIRHPARFVLVGSGNPEEGDLRPQLLDRFGLSVEVLSPRDVETRVEVIRRRDTYDADPKAFLEEWRPKDMDIRNQILEARERLPKVEAPNTALYDCAALCIALGSDGLRGELTLLRSARALAALEGATAVGRDHLKRVATMALSHRLRRDPLDEAGSTARVARTVEETLP

SEQ ID NO: 1358 - protein, 382 aa, Nitrosomonas europaea ATCC 19718
MFEITNTEPLEAVIKVIGIGGCGGNAVDHMIRNEVKGVEFICMNTDAQALQGNRAQTLLQLGTSVTRGLGAGANPDIGKEAALEDRDHIAEIVQGADMLFITAGMGGGTGTGAAPVVAQIAKEMGILTVAVVSKPFSFEGKRLKAAQAGMEALAEHVDSLIVIPNDKLMKVLGNDISMLDAFKAANDVLYGAVAGIAEVINCPGLVNVDFADVKTVMSEMGMAMMGSAAASGVDRSRMAAEEAVASPLLEEITLTGARGVLVNITASSAMKMREVQEVMDIVKKMTAEDATVIVGTVIDENMGDSLRVTLVATGLGNINQQSQRPMTVIHTRTGTDDRISSHQVDEPAVMRTGRRSNAAVTAMQQAGMDPMDIPAFLRRQAD

SEQ ID NO: 1359 - protein, 392 aa, Listeria innocua
MLEFDTSSESLATIKVIGVGGGGNNAVNRMIEHGVQGVEFISVNTDAQALNLAKAETKLQIGTKLTRGLGAGAVPEIGKKAAEESREQIEEALKGSDMVFVTAGMGGGTGTGAAPVIAQIAKEMGALTVGVVTRPFGFEGPKRTKQALTGTEAMKEAVDTLIVIPNDRLLQIVDKNTPMLEAFREADNVLRQGVQGISDLIAVPGLINLDFADVKTIMTNRGSALMGIGIATGENRAAEAAKKAISSPLLETSVDGAKGVLMNITGGSNLSLYEVQEAAEIVSSASDEDVNMIFGSVINDELKDELIVTVIATGFDEEKQAQQQAQANRRPNQSIQVNRPSYAVQDEPQNDYAQNAPQQGNNPVHEQPQAEPQQNSSDVDVPAFIRNRNRRG

SEQ ID NO: 1360 - protein, 110 aa, Escherichia coli
MSDKIIHLTDDSFDTDVLKADGAILVDFWAEWCGPCKMIAPILDEIADEYQGKLTVAKLNIDQNPGTAPKYGIRGIPTLLLFKNGEVASATKVGALSKGQLKEFLDANLA

SEQ ID NO: 1361 - protein, 331 aa, Methanosarcina acetivorans C2A
MKLAVIEGDGIGREVIPAAVEVLDAFGLELEKVSLELGYARWERTGSAISEEDIATIKGCDAVLFGAVTTVPDPSYKSVLLTIRKELDLYANVRPVKPLPGITGVTGRNDFDFIIVRENTEGLYSGIEEIGPDLSWTKRVVTRKGSERVAEYACKLAKQRKNKLTIVHKSNVLKSDKLFLDVCRQVASSHGVEYGDMLVDSMAYSLMMRPDKYDVVVTTNIFGDILSDMCAALVGSLGLVPSANIGEKYAFFEPVHGSAPDIAGKGIANPLAAILCVKMLLEWSGRGKEAALIDRAISYILEKKLITPDLGGVSTTAEVGQTVAKYVMQNL

SEQ ID NO: 1362 - protein, 481 aa, Francisella tularensis subsp. holarctica
MVIFEKTRGKNSPSVMPSKKGDVSNIPTDMLRTKKPILPEQAELDVVRHYTQLSRKNFCIDTNFYPLGSCTMKYNSRAAHKYASLAGFLERHPYASAQSVQGTLECLYDLQNLIKELTGMTGVSLAPMAGAQGEFAGVAMIKAYHHKRSDFERDEIIVPDAAHGTNPATAKVCGLKVIEIPTKKDGDIDIEALDKVLGPKTAGIMLTNPSTVGVFERNIAVIAKKVHEAGGLLYYDGANLNAIMGKARPGDMGFDVLHMNLHKTFATPHGGGGPGAGPVAVNDKLKEFLPVPMVGKKDDKFVWLEEKDVSNTIGRLSAFNGNIGVLIRAYIYGAMLGGNGLTEASEIATLNANYMMTRLKEEGFTIAYPDRRASHEFIVTLKPEFLNYGVTATDFAKCLIDKGVHAPTMYFPLLVPECLLIEPTETENVDSMEKFIQAMVEIRDIAKKDPQYLKGAPYNLPARRLDDVKAAKELDIVWQPK

SEQ ID NO: 1363 - protein, 218 aa, Bacillus simplex
LVVDGHKVKVLAERDPAQLAWGELGVEVVVESTGRFTKRADAAKHLEAGAKKVIISAPASDEDITIVMGVNEDKYDAANHHVISNASCTTNCLAPFAKVLHEQFGIKRGMMTTVHSYTNDQQILDLPHKDYRRARAAAENIIPTTTGAAKAVALVLPELKGKLNGMAMRVPTPNVSVVDLVAELEKDTTVEEVNAAFKKASEGELKGILEYSELPLVS

SEQ ID NO: 1364 - protein, 183 aa, Coffea canephora
GAYGIVCSVLNSETNEMVAVKKIANAFDNYMDAKRTLREIKLLRHLDHENVIAIRDVIPPPLRREFSDVYIATELMDTDLHQIIRSNQSLSEEHSQYFLYQIPRGLKYIHSAKVIHRDLKPSNLLVNANCDLKIIDFGLARPNTKNEVMTEYVVTRWYRAPELLLNSSDYTAAIDVWSVGWIF

SEQ ID NO: 1365 - protein, 400 aa, Rickettsia akari str. Hartford
MSVKIIVPLLGESVTEATIAKWYKKEGDSVKTDELLLEIETEKVTLEVNAPCNGTIGKISKTDGANVAVGEEIGDINEGAAVNTAGTHTESAKAQEVTQPTSEKPVDRPAMVNNILAPSVQKLVTENKLDPNNIKGTGKDARITKSDVLETINTKSAATSTTVNKTNEERVQRVRMSRLRKTIAQRLKDSQNTAAILTTFNEIDMSKVIALRNQYKEEFEKKHDVKLGFMSFFVKATIEALKLIPSVNAEIDGDDLVYKNYYDIGVAVGTEQGLVVPVVRDADQMGFAEVEKAIGTLAKKAREGKLSMADLSGGTFSISNGGVYGSLLSTPIINPPQSGILGLHKTEERAVVIDGKIEIHPMMYIALSYDHRIIDGKEGVSFLVKIKQLIENPEKLLLNL

SEQ ID NO: 1366 - protein, 544 aa, Francisella tularensis subsp. holarctica
MAIQTVSTKPFANQKPGTSGLRNKVIAFQQPRYLENFVQSIFNSLDDIEGKTLVVGGDGRYYNDVAIQIIVRMAAANGFAKIIVGQNGIFSTPAVSCVIRKYEAFGGIVLSASHNPGGPKGDFGIKYNVSNGGPAPEKITDRIFSETKKINQYFISDAAKERVDLDKLGIYKIENTTVEVINSVIDYAELMQQIFDFDKVRELFAKGFKVRFDSMCAVSGPYAKYIFETLLKAPAGTVVNAQPLEDFGGFHPDPNPVNAEDLVKHMRSGKYDFGAASDGDADRNMIVGKQIYVSPSDSLAIMAANAHLIPVYSKGIKGVARSMPTSTAVDRVAESLRLSCFETPTGWKFFGNLLDAEKITLCGEESYGTGSNHIREKDGVWAVLFWLNLVAVTGKQVDQLVEEHWQKFGRNFYSRHDYEAIDTAIANSIIDSLRERLSSLVGAQLNDEKVAKADDFSYIDPIDGSVSNHQGIRIIFEDGSRIVFRLSGTGTQGATLRIYLEKYESDSSKFSIPTQQALASLIEIAEDLTNIKSLTGMTEPTIVT

SEQ ID NO: 1367 - protein, 105 aa, Oryza sativa (japonica cultivar-group)
MADDDDDQDEVQESMEDQTAAAAGLDSRVKASLVLGTESFAISSESGILSEQLAAMKEKSMEILKGYITKHNAPADVPDEPIEGLSDDEGDAPAKNPPKKPKKQK

SEQ ID NO: 1368 - protein, 354 aa, Triticum aestivum
MDGNKGPVVVTGASGFVGSWLVMKLLQAGYTVRATVRDPANVEKNKPLLELPGAKERLSIWKADLSDEGSFDDAIAGCTGVFHVATPMDFGSKDPENEVIKPTVEGMLSIMRACKEAGTVRRIVFTSSAGSVNIEERQRPAYDQDNWSDIDFCRRVKMTGWMYFVSKSLAEKAAMEYASENGLDFISIIPTLVVGPFLSAGMPPSLVTALALITGNEAHYSILKQVQLVHLDDLCDAMTFLFEHPEANGRYICSSHDATIHGLARMLRDRFPEYSIPHKFAGVDDDLQPIHFSSKKLLDHGFSFRYTAEDMFDAAIRTCREKGLIPLGDAPAPAAAGKLGALAAGKGQAIGAET

SEQ ID NO: 1369 - protein, 356 aa, Sulfurospirillum multivorans
MNAILSDQKTFQAIIRVNQAIEDIRQGKMVVMVDDEDRENEGDLVYAASFSTPQKVNFMASHAKGLICVAISKKIANRLQLEPMVKKNDSSYETAFTITVDARTAATGISAGERDMTIKILADGGSHESELVRPGHIFPLIAKEGGALVRIGHTEGSVDLCRLAGQGDSAVICEIMKEDGTMARRPDLDIFCAKHELNIVYISDIVEYRMMNESLIRVIAESTTQFLGKDARRYDFVDHNDNHHIAYAFGNIKNRSAVKFHSIMPDNELLADTKKYNSLIQAIHYLQKSGGVLIFMDNGTQDMSKIREYGIGAQIIKHLGIENIELLSDSKNKEFVGISGFGLSVIKSTNVNETVA

SEQ ID NO: 1370 - protein, 392 aa, Neisseria gonorrhoeae
MEFVYDVAESAVSPAVIKVIGLGGGGCNAINNMVANNVRSVEFISANTDAQSLAKNHAAKRIQLGTNLTRGLGAGANPDIGRAAAQEDREAIEEAIRGANMLFITTGMGGGTGTGSAPVVAEIAKSLGILTVAVVTRPFSYEGKRVHVAQAGLEQLKEHVDSLIIIPNDKLMTALGEDVTMREAFRAADNVLRDAVAGISEVVTCPSEIINLDFADVKTVMSNRGIAMMGSGYAQGIDRARMATDQAISSPLLDDVTLDGARGVLVNITTAPGCLKMSELSEVMKIVNQSAHPDLECKFGAAEDETMSEDAIRITIIATGLKEKGAVDPTPEREVEAVAPSKQEQSHIVEGMIRTNRGIRTMNLTAADFDNQSVLDDFEIPAILRRQHNSDK

SEQ ID NO: 1371 - protein, 596 aa, Zea mays
MAAALECWSGRPSTDEETVEHVLMKPHGRSDDSLPTCADSARAAGEPTPAPAPAPAPPKKWQRLGRNFAGAIAAFKNTLSLDGGGGGGGLPRDPSPRAEKPPPLLLRGLAQLYSRGAANQQLPEKLVADLRRHFDALPNSYAQAGYDMKDVLLHARLAEQATGEDQPAVNIEEVHGRGSCEEGTVFQLTFACTAPLSWQSMSGSLDSPSFCCKKIQIFEKRGLTLGVVMILVQTGNEALFKNQVESALKSVVKKQRKNSGGVKLPFGLCGCQEEGSRNFDEESMFDPDDDRVLDNEPAHRPQLPTPLPQASVFVSVDEWQTIRSGGEELGRWMLRSEEIEFVDWFGANSFRGVYKGKKVWVNKLRGCDMGSAYDVEIRQDLLQLMSCGQRNILQLHGVCFSENHGLCIVTRMMEGGSVHDILVQRNKRLSLRDTVRIALDVADAMAFMNGYGIAYRDLNARKILLDRQGNACLGDMGIVTPCSNVGEVTEYETSGYRWLAPEIIAGDPETVSETWMSNVYSYGMVLWEMITGEEAYSTYSPVQAAVGIAACGLRPEIPRDCPPFLRSLMNRCWDSSPLKRPQFSEITSILQRQNVR

SEQ ID NO: 1372 - protein, 348 aa, Glycine max
TRLNGHGDFCREMLRMDKHVFHKLCDILRQRAMLRDTAGVMIEEQLAIFLNVIGHNERNRVIQERFQHSGETISRHFNNVLKAIKSLSREVLQPPQPSQLRGPPNNARFYPYFKDCIGVIDGMNIPAHVPAKDQSRFRNKKGILSQNVLAACTFDLQFIFVYPGWEGSVTDSRVLRAVLDNPDQNFPQIPQGKYYLVDKGYLNTEGFIAPYQGVRYQHYEFRGANQLPRNAKELFNHRHCFLRNAILRSFNVLKTRFPILKLAPQYSFQIQRDIVIAGCVLHNFIRREERNDWIFNSVGGSPVEEISDIDELPDVPMLSSIQEQLAFSSRDSIASSMWDDFLTKWDEW

SEQ ID NO: 1373 - protein, 677 aa, Arabidopsis thaliana
MIPLSFAALGDIVDKKLDEDYVKEEVEMMIQVSLLSTQAAPGERPTMSEVEIFRNSCLCYINWFCNIISIIYSNSLLLRIDSGSSSISVVFLVFTLSRMEQRRMLTAARPRLSSTIRTITSHVAFSASRLLKPYVAYRLGLEDANQRKTENESTGGDKEIANSLLHCLKFHYLLLHFPSFSLQIHNRSTSLSLSRFEKMAKLVMLLVLCILPAIAMAARRGNIGKNTMVVQGSTYCDICKFGFETPESSYFIPGATVKLSCKDRKTMEEVYTDKAVSDKEGKYKFIVHDDHRDQMCDVLLVKSSDKTCSKISVGREKSRVILNHYSGIASQIRHANNMGFEKEVRMATSTTMSHQAIGSVVSQRPFKASQFLKEPLNNVPMKFRQKRFKIEATASQISVVDNTFLSPSPSKNKPHESKKKSNEAALILIRHGESLWNEKNLFTGCVDVPLTQKGVGEAIEAGKKISNIPVDLIFTSSLIRAQMTAMLAMTQHRRKKVPIILHNESVKAKTWSHVFSEETRKQSIPVIAAWQLNERMYGELQGLNKKETAERYGTQQVHEWRRSYEIPPPKGESLEMCAERAVAYFEDNIKPELASGNNVMIAAHGNSLRSIIMYLDDLTSQEVTTLDLSTGVPLLYIFKEGKFMKRGSPVGSTEAGVYAYTKRLAQYREKLDAAATI

SEQ ID NO: 1374 - protein, 980 aa, Arabidopsis thaliana
MTDTTDDIAEEISFQSFEDDCKLLGSLFHDVLQREVGNPFMEKVERIRILAQSALNLRMAGIEDTANLLEKQLTSEISKMPLEEALTLARTFTHSLNLMGIADTHHSQLLQSGISPDELYKTVCKQEVEIVLTAHPTQINRRTLQYKHIRIAHLLEYNTRSDLSVEDRETLIEDLVREITSLWQTDELRRQKPTPVDEARAGLNIVEQSLWKAVPQYLRRVSNSLKKFTGKPLPLTCTPMKFGSWMGGDRDGNPNVTAKVSLLIFYDLNSKPTGHERISLLSRWMAIDLYIREVDSLRFELSTDRCSDRFSRLADKILEKDYMPPNLQKQNEQDFSESDWEKIDNGSRSGLTSRGSFSSTSQLLLQRKLFEESQVGKTSFQKLLEPPPLKRAGSAPYRIVLGEVKEKLVKTRRLLELLIEGLPCEYDPKNSYETSDQLLEPLLLCYESLQSSGARVLADGRLADLIRRVSTFGMVLVKLDLRQEAARHSEALDAITTYLDMGTYSEWDEEKKLEFLTRELKGKRPLVPQCIKVGPDVKEVLDTFRVAAELGSESLGAYVISMASNASDVLAVELLQKDARLALTSEHGKPCPGGTLRVVPLFETVNDLRAAGPSIRKLLSIDWYREHIQKNHNGHQEVMVGYSDSGKDAGRFTAAWELYKAQENVVAACNEFGIKITLFHGRGGSIGRGGGPTYLAIQSQPPGSVMGSLRSTEQGEMVQAKFGIPQTAVRQLEVYTTAVLLATLKPPQPPREEKWRNLMEEISGISCQHYRSTVYENPEFLSYFHEATPQAELGFLNIGSRPTRRKSSSGIGHLRAIPWVFAWTQTRFVLPAWLGVGAGLKGVSEKGHADDLKEMYKEWPFFQSTLELIEMVLAKADIPMTKHYDEQLVSEKRRGLGTELRKELMTTEKYVLVISGHEKLLQDNKSLKKLIDSRLPYLNAMNMLQVEILKRLRRDEDNNKLRDALLITINGIAAGMRNTG

SEQ ID NO: 1375 - protein, 247 aa, Glycine max
MYIASMGRSFKDSLKLLEADIHHANTLASDFPREYDGACLQMRMSYSPAAHLFLFLVQWTDCNLAGALGLLRILIYKVYADGTTTMSTHERKASIREFYAVIYPSLLQLQKGVTDTEDTKQKAVCMERYRKRDDEEHRQPSDIDIEREEECGICMEMNSKIVLPNCNHAMCLKCYREWRTISQSCPFCRDSLKRVNSGDLWVFTDRRDVVDMATVTRENLRRLFMYIDKLPLIVPDSLFDTYDSHIR

SEQ ID NO: 1376 - protein, 249 aa, Azoarcus sp. EbN1
MYKIVLLRHGESTWNKDNRFTGWTDVDLTEKGVEEARGAGHLLKREGYTFDLAYTSVLKRANKTLNIVLEELDSLWLPVEHSWRLNERHYGDLQGLNKAETAAKFGDDQVLVWRRSYDTPPPPLPEGDERLTSGDPRYASLPRAQFPRTECLKDTVARFVPYWETVIVPNILAGRRILIAAHGNSLRALIKYLDNISDSEIVGLNIPTAQPLVYELDANLRPIRSYYLADADTIRAAEAAVAGQGKAKG

SEQ ID NO: 1377 - protein, 284 aa, Colwellia psychrerythraea 34H
MRASLIDGKAIAKKLRDSVKEEVNLRISNGQRVPGLAVILVGCDPASQVYVGSKRKACEEVGFISRSYDLPHTTSEQELLALVSELNNDDSIDGILVQLPLPKNLNADLIIEHINPLKDVDGFHPSNVGKLVLRQPGLRPCTPKGIVTLIESTGIDPKGLDALVIGASNIVGRPMGLELLLAKCTVTTTHRFTKDLEGKVRNADLLVVAVGKPGFIPGEWIKEGAIVIDVGINRLDNGKLVGDVDFGAAKERASFITPVPGGVGPMTVASLIENTLIACQQSSQ

SEQ ID NO: 1378 - protein, 545 aa, Oryza sativa
MEAGTWAVVVAAVAAYMAWFWRMSRGLSGPRVWPVVGSLPGLVRHAEDMHEWIAANLRRTRGTYQTCIFAVPGLARRGGLVTVTCDPRNLEHVLKSRFDNYPKGPFWHGVFGDLLGDGIFNSDGETWVAQRKTAALEFTTRTLRTAMSRWVSRSIHSRLLPILSDAAAAGGGGGGATVDLQDLLLRLTFDNICGLAFGKDPETLARGLPENDFASAFDRATEATLNRFIFPECVWRFKKWMGLGMETTLARSVQHVDRYLSAVIKARKLELAAGNGKGDASSATPHDDLLSRFMRKGTYSDESLQHVALNFILAGRDTSSVALSWFFWLVSTHPAVERKIVRELCTVLAASRGADDPALWLAAPLNFEELDQLVYLKAALSETLRLYPSVPEDSKHVVADDVLPDGTFVPAGSSVTYSIYSAGRMKTVWGDDCLEFRPERWLSADGTKFEPHDSFRFVAFNAGPRICLGKDLAYLQMRNIAGSVLLRHRLAVAPGHRVEQKMSLTLFMKHGLRMEVRPRDLAPIVDELRGAGEYAAAARATAACA

SEQ ID NO: 1379 - protein, 175 aa, Zea mays
MAALIKLGSLLRQSAVASSASTGSAPALFNAARFMCAGQPADGSKLFVGGLAWATDDHSLKEAFQSFGEVVEARVITDRETGRSRGFGFVSFASGEDAKSAAENMDGKELAGRNVRVNFANERPSGGGGGGFSRGGGGYGGGGGGYGGGGYGGGGGYGGGRGGGGGGYGGDHESY

SEQ ID NO: 1380 - protein, 398 aa, Colwellia psychrerythraea 34H
MLTDKHIDIIKSTIPLLENAGPALTGHFYQRMFSHNPELQDIFNMANQHSGRQQVALFEAIAAYAKNIENLAALTTAVERIAQKHTSFNIKADHYAIVGHHLIETLRELASDVFTADVEEAWTVAYQFLAQIFINREAELYQQRAETLGGWRDARSFTVVDKVVESTLVTSFVFMPVDDKAVIGFQPGQYLGIEVSDPSREFKEIRQYSLSTKANDQTYRISVKREINNVDGITAKGIVSNYLHDEVNVGDSINLYAPAGDFFFNDRQAPVVLLSAGVGITPMQAILETLAQQGYNHPVQYLHACENSEQHSFDQRTTELINQNNWQQHIWYRTGDVSQQHILQGMMDFTKIDLPIEQGDFYLCGPIPFMQFAKQQLLTLGVAASNIHYEVFGPHADL

SEQ ID NO: 1381 - protein, 382 aa, Debaryomyces hansenii
MSQPELKKSKVDISKTITVLPGDHVGEEVCNEAIKVLQAIEDATPYRNIKFNLQKHLIGGAAIDATGTPLPDESLEAAKNSDAVLLGAVGGPKWGTGSVRPEQGLLKIRKELNLYANLRPCNFASDSLLELSPLKSEIVKGTDFTVVRELVGGIYFGERQEQAESEDKQTAWDTEKYSTEEVTRITRMAAFMALQHNPPLPIWSLDKANVLASSRLWRTTVDKVMSEEFPQLTIQHQLIDSAAMILVQSPTKLNGIIITSNMFGDIISDEASVIPGSLGLLPSASLASLPDTNSAFGLYEPCHGSAPDLTENKVNPVATILSVAMMLRLSLDCVPEAEALEKAVGQVLDSGIRTGDLRGSSSTKEVGDAIAEAVKKVLNQSV

SEQ ID NO: 1382 - protein, 183 aa, Coffea canephora
LVIGAYGIVCSALNSETTEHVALKKIANAFDNRIDAKRTLREIKLLRHMDHENVVAIRDIIPPPQREAFNDVYIAYELMDTDLHQIIRSNQALSEEHCQYFLYQILRGLKYIHSANVLHRDLKPSNLLLNANCDLKICDFGLARVTSETDFMTEYVVTRWYRAPELLLNSSDYTTAIDVWSVG

SEQ ID NO: 1383 - protein, 146 aa, Haemophilus influenzae R2846
MGIVSRSGTLTYEAVKQTTDEGFGQSTCVGIGGDPILGSSFIDILERFQQDPETEAIVMIGEIGGSAEEEAAIFIKDNVTKPVVAYIAGITAPKGKRMGHAGAIISGGKGTAVEKIAALEAAGVICVKSLAEIGEALRKLLKSSKN

SEQ ID NO: 1384 - protein, 183 aa, Coffea canephora
LVIGAYGIVCSVLNSETNEMVAVKKIANAFDNYMDAKRTLREIKLLRHLDHENVIAIRDVIPPPLRREFSDVYIATELMDTDLHQIIRSNQSLSEEHSQYFLYQILRGLKYIHSAKVIHRDLKPSNLLVNANCDLKIIDFGLARPNTENEVMTEYVVTRWYRAPELLLNSSDYTAAIDVWSVG

SEQ ID NO: 1385 - protein, 317 aa, Mycobacterium tuberculosis CDC1551
MAKDLVATVPDLSGKLAIITGANSGLGFGLARRLSAAGADVIMAIRNRAKGEAAVEEIRTAVPDAKLTIKALDLSSLASVAALGEQLMADGRPIDLLINNAGVMTPPERVTTADGFELQFGSNHLGHFALTAHLLPLLRAAQRARVVSLSSLAARRGRIHFDDLQFERSYAPMTAYGQSKLAVLMFARELDRRSRAAGWGIISNAAHPGLTKTNLQIAGPSHGRDKPALMERLYKTSWRFAPFLWQEIEEGILPALYAAATPQADGGAFYGPRGRYEVAGGGVREAKVPAAARNDADSKRLWEVSEQLTGVSYPKSR

SEQ ID NO: 1386 - protein, 413 aa, Rubrobacter xylanophilus DSM 9941
MEDGRPAAYITGIGVVSPVGVGRKRFWEALLACESGMGPITLFDPEGFEVRIAAECNDFDPKEFMDRKMVPRTDRFGQMALASAKLALEDAGAWELLQERPERVGLILGSGLGGATSLEETQRVMDGRGPTRVGPFAVTKIMPNSAAAHIGIQLGVQGPSASPALACACGTDAMGLGYDLIRRGDADAVICGASEAVITPVIVAGFAAMRAMSRRNDDPEGACRPYDADHSGFVIGEGAAVLLLESAESVRRRGAEPYAKITGVGRTTDAYNMTDPDPKGRGILRAMQLALKEAGVPGERVGYINPHGTGTAAGDAPESRAMETINPRVKVSATKSTLGHSMGATGAIETAICALAVRERTVPPMRNLERLAEDCARLDYVVNEPREAPDLEAAVCANLGVGGHNAAVVLERA

SEQ ID NO: 1387 - protein, 118 aa, Arabidopsis thaliana
MAGVMKLACMVLACMIVAGPITANALMSCGTVNGNLAGCIAYLTRGAPLTQGCCNGVTNLKNMASTTPDRQQACRCLQSAAKAVGPGLNTARAAGLPSACKVNIPYKISASTNCNTVR

SEQ ID NO: 1388 - protein, 302 aa, Prochlorococcus marinus str. MIT 9313
MALRLDGKQLAAELEQRLQAEIAAGLVQAGRPPGLAVLRIGDDPASGVYVANKQKACGRIGVASHLTHLPETVSVSKVLATIQALNIDERVDGILLQLPLPKGLDEGPLLAAIDPEKDADGLHTLNLGRLLKGEPGPRSCTPAGVMALLARHQISLERKRAVVIGRSILVGQPMALMLQAANATVSVAHSHTGDLASLTQQADVLVVAAGRARMIGAEHVKPGAVVVDVGIHRLPLDPELGTQAKARLCGDVRTQEVEPLASALTPVPGGVGPMTVTMLLVNTVARWQQHCGLPFGLRDLLV

SEQ ID NO: 1389 - protein, 194 aa, Aspergillus nidulans FGSC A4
MASATTFYDFEPVDKKGEAYPLNQLKGKVILVVNTASKCGFTPQFKGLETLYQSIKAKRPDDFVILGFPCNQFGGQDPGSNDQIQEFCQLNYGVTFPVLGKTEVNGDNANPLWTWLKESQPGLLGLKRIKWNFEKFLISADGKVVGRWASTTKPEGLESRILEEIEKAEKQGLLASKAMQPEAAGTDGETAKLA

SEQ ID NO: 1390 - protein, 1064 aa, Magnetococcus sp. MC-1
MGIQRRVLGLIAFFLLVAFSAVEVRSYYQLKAYAEESLRTQAEIVQGLLMSIRRVYHHAFLDSHIPLSSDTVPLLPAHAINRISKEFPTWFKGGVSFNNVSDKPRNEQQRAKGIEQQAMAHFRQNPEEKRWFTQYQEENGEAYYHYATPIWIEPYCMQCHGAKEKAPAAIQKMYSTGFDYKIGDLRGVVSIKLPAAHINRLVKQQFLENSLIHLLIFGSAFFAISFFLRRDVGQPLEAISHAVRKFGQTRELPKFEEQPGEFQILLHTLTDMASTVVLRESEVQERQLQIELLLDSAGEGIYAIDTQGICIQCNPAAVALLGYASSTELVGRDIHTLCHRADEQGTHMPHSDCPGCKVIASGEPVHLAQEYLQRQDGSVFPVEMRIHPMHQGGRVVGAVVLFDDISRRLDAEQKLRLSERHFRTLVQALPGTFYKCAPDPLCTMYSLGDNIAELTGYAADSFIENHERSFSSVVHAEDWPRVREALDQALAQGVVYHLEYRVNHTDGKPRWVMDRGQAVYDEAGRAEVLYGVLLDMTERKQYEQRLESARQQADAGNRAKSEFLAVMSHEIRTPLNAIMGMGDLLGETALSPVQRHYLSISQHAGETLVELIEDILDLSRIEVGELELEPAPFEVEALVEEVCEVVTSSAHDKGLILLMRIDPLLPPVLIGDKKRLRQILFNLLFNAVKFTKHGEVMLDIRHDAARSAAGAVLLQVRDTGVGMAEEMIERVFEPFTQGDSTITRQYGGSGLGLTICKRLVSKMGGDIQLESALGRGTTATVQLVLPVGRHGMVAAVRQQVPLHGANLLLVDDNANNREIYTELLQQEGARVVGCATGETAMQQVSEANFDLAVLDFHMPSEDGLTLAGRIQEMVPNMPLLMLSSDQQPAAAARANSMGVTFLLKPVKRQLLRQTIAQLMQSGKGVKDAPVLGQGVESGPQKGLKILLAEDVPENALLIEAYLEETGHQISVVGDGQQAFERFQEEPFDLVLMDLQMPVMNGLQATRHIRAWEQAQGVKRTPILALTAHAMKEDESKSLEAGCDGHLTKPIRKQVFLQKLQGFLG

SEQ ID NO: 1391 - protein, 377 aa, Avena nuda
MADAEDIQPPVCDNGTGMVKAGFAGDDAPRAVFPSIVGRPRHTGVMVGMGQKDAYVGDEAQSKRGILTLKYPIEHGIVSNWDDMEKIWHHTFYNELRVAPEDHPVLLTEAPLNPKANREKMTQIMFETFNTPAMYVAIQAVLSLYASGRTTGIVLDSGDGVSHTVPIYEGYALPHAILRLDLAGRDLTDYLMKILTERGYSFTTSAEREIVRDMKEKLSYIALDYDQEMETSNTSSTVEKSYELPDGQVITIGAERFRCPEVLFQPSFIGMEAAGIHETTYNSIMKCDVDIRKDLYGNIVLSGGTTMFTGIADRMSKEITALAPSSMKIKVVAPPERKYSVWIGGSILASLSTFQQMWIAKAEYDESGPSIVHRKCF

SEQ ID NO: 1392 - protein, 120 aa, Triticum aestivum
  misc_feature (91)..(91): Xaa can be any naturally occurring amino acid
MAAPRGAALVLAMVLAAMLVAPPATVHAISCSTVYSTLMPCLQYVQQGGSPARGCCTGIQNLLAEANNSPDRRPICGCGKNVANGASGGPXITRAAALPSKCNVALPYKISPSVDCNSIH

SEQ ID NO: 1393 - protein, 451 aa, Thermus thermophilus HB27
MPKEILMPELAESVVEGEILKWLVEEGDYLKKDQPFVEVMTDKVTVELPSPYEGVLLKKLAKEGEVVKVHAPIALIAEPGEAVEGVKEPPPVQAVEERSIVEPGLPAKEEKEDLSLFKPDPTQVAVKNPFLSGEKPQEGARPGRVLAVPAARKLARELGIPIEEVPGSGPLGRVRVEDVRAYAERRKAPPERPEEGPQVLPAGFPPPPKYAPPKGYEHLEERVPLRGIRRTIAQGLWQSHLYTVRTLNVDEADLTELVRLRERLKPQAEAQGVKLTYLPFIVKAVVRALKKFPMLNTSLDEERQEIVYKRYYHIGLAVATERGLIVPVVRDADRKSVLELAQEIAELSQKAREGRLAPEEVTGSTFTITNIGSVGATLSFPIIHLPDAAILGVHSIRKRPWVMPDGSIRPRDIMFLSLSFDHRLVDGAEAAMFTREVIRLLENPDLLLLEM

SEQ ID NO: 1394 - protein, 449 aa, Pseudomonas fluorescens PfO-1
MEIEEFGYKQELKRSLTLTDLVVYGMIFMIPIAPFGVYGYVNAEAPGMVPLAYIIGMVAMVFTALSYGSMARAFPIAGSVYSYAQRGLNQHVGFIAGWLMLLDYLLIPPLLYVYAAMALNHLYPDIPKVGFILAFLVSATFVNLRGITFTARMNIVFLLAQLVVLGIFLFYAWNALHNGGGNGQLTLAPLYHPETFNFALLMQAVSIAVLSFLGFDAISTLAEEIKGDPGRSVGKAALITLVVMGVIFVAQTWIATDLAAGMGFKSADTAFYEIAEIAAGSWLATLTGVATALAWGVAVAITSQAAVSRLLFGMARDGKLPKVLAKVHPKHNTPYLSIYLVAVLSLVICYLFINSVDTLTSLVNFGALSGFMLLHLTVINYYWRRQKSGQVIRHLICPVIGFIIVAAIMYNMGVDAQKLGLIWIALGLVYLFFLNKLGASTALPDPSNG

SEQ ID NO: 1395 - protein, 412 aa, Arabidopsis thaliana
  misc_feature (50)..(50): Xaa can be any naturally occurring amino acid
MLEGAKFNVLAVGNHHNNDNNYYAFTHEFYHKHVCRSNMSMESMQTSNAXGGSVSMSVDNSSVGSRDALIGHPGLKPMRHYSLSDGQSVFRPGRVTHALNDDALAQALMDSKYPTEGLANYEEWTIDLRKLHMGPAFAQGAFGKLYKGTYNGEDVAMKILERPENSPEKAQPLEQQFQQEVSMLAILKHPNIVRFIGACLKPMVWCIVTEYAKGGSVRQFLTRRQNRAVPLKLAVKQALDVARGMAYVHGRNFIHRDLKSDNLLISADKSIKIADFGVARIEVQTEGMTPETGTYRWMAPEMIQHRAYNQKVDVYSFGIVLWELITGLLPFQNMTAVQAAFAVVNRGVRPTVPNDCLPVLSDIMTRCWDANPEVRPCFVEVVKLLEAAETEIMTTARKARFRCCLSQPMTID

SEQ ID NO: 1396 - protein, 228 aa, Pinus radiata
MAFNALIIIATCCRAFVGILLVSLMVMNSVHADPEALQDFCVADTKSSIFMNGRPCLNPMEASPEHFMTSALRKAGNLSANPLGFSVIVTTPANMPGLNTLGLSMGRIDMAPGSAIPPHIHPRGSETIFVVRGALNVGFVDTSNRLFSHKLVTGDVFVFPKGAVHYLQNIGKITAFIVSAFNSQNPGTAIVSLATFASTPAIPYEVLSKAFAISVQEVSQIRKSLGGT

SEQ ID NO: 1397 - protein, 402 aa, Pseudomonas aeruginosa UCBPP-PA14
MDNLNSAVQVLIHGSNTLFILLGAVMVLAMHAGFAFLEVGTVRLKNQVNALSKILSDFAISALAYFFVGYWIAYGVTFFHPAAALTVDSGYALVKFFFLLTFAAAIPAIISGGIAERARFGPQLCATALIVAFVYPFFEGLVWNGNFGLQEWLKLEFGAPFHDFAGSVVVHALGGWLALAAVLLLGSRNGRYRDGKLVAMAPSSIPFLALGSWILIIGWFGFNVMSAQTLAGVSGLVAVNSLLAMVGGTMASLLIGRNDPGFLHNGPLAGLVAVCAGSDLMHPIGALATGLVAGALFVWAFTATQVRWKIDDVLGVWPLHGLCGVWGGIACGIFGQQALGGLGGVSLASQALGSLLGVTVAFAGGLLVYGLMKALLGIRLSQEEEYYGADLSIHKIGAISHE

SEQ ID NO: 1398 - protein, 168 aa, Zea mays
MAASSTATSVHDFIVKDASGKDVDLSAYKGKVLLIVNVASQCGLTNSNYTELAQLYEKYKDQGFEILAFPCNQFGGQEPGTNEEIVQFACTRFKAEYPIFDKVDVNGNNAAPIYKFLKSSKGGLFGDSIKWNFSKFLVDKEGRVVDRYAPTTSPLSIEKDIKKLLGSS

SEQ ID NO: 1399 - protein, 156 aa, Haemophilus quentini
NRSNTPVLVDGKDVMPEVNAVLTKMKDFCQRIISGEWKGYTGKAITDVVNIGIGGSDLGPYMVTEALRPYKNHLNMHFVSNVDSTHIAETLKKINPETTLFLVASKTFTTQETMTNAQSARDWLLKAAKDESAVAKHFAALSTNAKDVEKFGIDTN

SEQ ID NO: 1400 - protein, 960 aa, Sorghum bicolor
MASERHHSIDAQLRALAPGKVSEELIQYDALLVDRFLDILQDLHGPSLREFVQECYEVSADYEGKKDTSKLGELGAKLTGLAPADAILVASSILHMLNLANLAEEVELAHRRRNSKLKHGDFSDEGSATTESDIEETLKRLVSLGKTPAEVFEALKNQSVDLVFTAHPTQSARRSLLQKNARIRNCLTQLSAKDVTVEDKKELDEALHREIQAAFRTDEIRRAQPTPQDEMRYGMSYIHETVWNGVPKFLRRVDTALKNIGINERLPYDVPLIKFCSWMGGDRDGNPRVTPEVTRDVCLLSRMMAANLYINQVEDLMFELSMWRCNDELRARAEEVQSTPASKKVTKYYIEFWKQIPPNEPYRVILGAVRDKLYNTRERARHLLATGFSEISEDAVFTKIEEFLEPLELCYKSLCECGDKAIADGSLLDLLRQVFTFGLSLVKLDIRQESERQTDVIDAITTHLGIGSYRSWPEDKRMEWLVSELKGKRPLLPPDLPMTEEIADVIGAMRVLAELPIDSFGPYIISMCTAPSDVLAVELLQRECGIRQTLPVVPLFERLADLQAAPASVEKLFSTDWYINHINGKQQVMVGYSDSGKDAGRLSAAWQLYVAQEEMAKVAKKYGVKLTLFHGRGGTVGRGGGPTHLAILSQPPDTINGSIRVTVQGEVIEFMFGEENLCFQSLQRFTAATLEHGMHPPVSPKPEWRKLMEEMAVVATEEYRSVVVKEPRFVEYFRSATPETEYGKMNIGSRPAKRRPGGGITTLRAIPWIFSWTQTRFHLPVWLGVGAAFKWAIDKDIKNFQKLKEMYNEWPFFRVTLDLLEMVFAKGDPGIAGLYDELLVAEELKPFGKQLRDKYVETQQLLLQIAGHKDILEGDPYLKQGLRLRNPYITTLNVFQAYTLKRIRDPSFKVTPQPPLSKEFADENKPAGLVKLNGERVPPGLEDTLILTMKGIAAGMQNTG

SEQ ID NO: 1401 - protein, 103 aa, Rickettsia rickettsii
MNNSEFSKIAETTIAYIAEKIEEQDKEASIDVDLQGDILNLDTDKGVYVINKQSAAKEIWLSSPVSGPYHFFYEQGKWTNRAGLELMAILTEELNIKFDTRPT

SEQ ID NO: 1402 - protein, 147 aa, Magnaporthe grisea
MALKRINKELTDLGRDPPSSCSAGPVGEDLFHWQATIMGPSDSPYAGGVFFLAIHFPTDYPFKPPKVNFTTRIYHPNINSNGSICLDILRDQWSPALTISKVLLSICSMLTDPNPDDPLVPEIAHVYRTARAQYEATAREWTPKYAI

SEQ ID NO: 1403 - protein, 376 aa, Robiginitalea biformata HTCC2501
MGKKIQLDSIESAIEDIRQGKVIIVVDDENRENEGDFIAAAEKVTPEMINFMATHGRGLICAPLTEERCDALDLKMMVENNTVLHHTQFTVSVDLIGYGCTTGISVHDRAKTIQALVNPDIRPEELGRPGHIFPLRAKNGGVLRRVGHTEAAVDFARLAGFQPAGILVEVLNEDGTMARLPELARVARKFNLKLVSIEDLVAYRMKHDSLIRKEASFDVKTRFGEYRLHAYRQTTNDQIHLALTKGAWKDGDPVLTRINSTLVNNDILGTLTNDADKKLDDMFRALNDEGTGAIVFINQPSESLNLLSRIRGLEENQAKGILKAPGIEMDTKDFGIGAQILHDLRIQKIRLMTNSSQAKRVGIVGYGLEIVDYVPY

SEQ ID NO: 1404 - protein, 443 aa, Prochlorococcus marinus str. NATL2A
MLRVAVIGGGPSGSCAAEILAKAGIKTWIFERKLDNAKPCGGAIPLCMVSEFDLPESIIDRKVRNMKMISPSNREVDIILDDIYPGSDKEYIGMLRREVMDSFMRNRAAELGATLVNGLVSKIETGTNKQGPYTLHYTEILNDKSEEKGKQLEVDLIVGADGATSRVAKAMDAGDYNYAVAIQERIKLPKEEMKYYEDRAEMYVGTDVSPDFYGWVFPKYDHVAAGTGTMKQNGGLIKSLQIGVRERAKKRLVNGEVIKVEAHPIPEHPRPRRVVGRMALVGDAAGYVTKSSGEGIYFAAKSGRMCAEQIVESSQNGKIIPTENDLKKYLKKWDKKYGITYTVLDILQRIFYTSDGAREAFVEMCGDMDVQRLTFDSYLYKTVVAMKPLQQLKLTLLTIGSVLRGKALAPSTYKPVPSAVRDDKEVNKMLAVSSIKGGIKASK

SEQ ID NO: 1405 - protein, 589 aa, Zea mays
  misc_feature (559)..(559): Xaa can be any naturally occurring amino acid
  misc_feature (572)..(572): Xaa can be any naturally occurring amino acid
MCGILAVLGCSDCSQARRARILACSRRLKHRGPDWSGLYQHEGNFLAQQRLAIVSPLSGDQPLFNEDRTVVVVANGEIYNHKNVRKQFTGAHSFSTGSDCEVIIPLYEKYGENFVDMLDGVFAFVLYDTRDRTYVAARDAIGVNPLYIGWGSDGSVWMSSEMKALNEDCVRFEIFPPGHLYSSAGGGFRRWYTPHWFQEQVPRTPYQSLVLREAFEKAVIKRLMTDVPFGVLLSGGLDSSLVASVTKRHLVETDAAEKFGTELHSFVVGLEGSPDLKAAREVADYLGTTHHEFHFTVQDGIDAIEEVIYHDETYDVTTIRASTPMFLMARKIKSLGVKMVLSGEGSDELLGGYLYFHFAPNREELHRETCRKVKALHQYDCLRANKATSAWGLEVRVPFLDKEFVDVAMGMDPEWKMYDKNLGRIEKWVLRKAFDDEEHPYLPEHILYRQKEQFSDGVGYNWIDGLKSFTEQQVTDEMMNSAAQMFPYNTPVNKEAYYYRMIFERLFPQDSARETVPWGPSIACSTPAAIEWVEQWKASNDPSGRFISSHDSAATDRTXATSWRWPTAAGTXAANGTVNGNDVAVAIAV

SEQ ID NO: 1406 - protein, 344 aa, Hyoscyamus niger
MATFVSNWSTKSVSESFIAPLQKRAEKDVPVGNDVPIIDLQQHHHLLVQQITKACQDFGLFQVINHGFPEELMLETMEVCKEFFALPAEEKEKFKPKGEAAKFELPLEQKAKLYVEGEQLSNEEFLYWKDTLAHGCHPLDQDLVNSWPEKPAKYREVVAKYSVEVRKLTMRMLDYICEGLGLKLGYFDNELSQIQMMLTNYYPPCPDPSSTLGSGGHYDGNLITLLQQDLPGLQQLIVKDATWIAVQPIPTAFVVNLGLTLKVITNEKFEGSIHRVVTDPTRDRVSIATLIGPDYSCTIEPAKELLNQDNPPLYKPYSYSEFADIYLSDKSDYDSGVKPYKINV

SEQ ID NO: 1407 - protein, 251 aa, Zea mays
GIFFLSHSSPAWLYPIHAGAIAISTATASCIYTYHCTWCGGQLHKLGVSAQNHQPARAFLCCLPRRVATRADKIGSESPAADGVGDAARKRPSGDDGPTPGPADKRRRPEHPSSSSAGSRDRHHHHHGRRPPSSADEKVRASHILIKHEGSRRKASWRDPEGVAISATTRDDAADLARALRDQIVSGDREFEDVAAENSDCSSAKRGGDLGSFGRGKMQKPFEKAAFALKVGEISDVVDTESGVHIIKRTG

SEQ ID NO: 1408 - protein, 960 aa, Sorghum bicolor
MPERHQSIDAQLRLLAPGKVSEDDKLVEYDALLVDRFLDILQDLHGPHLREFVQECYELSAEYENDRDEARLGELGSKLTSLPPGDSIVVASSFSHMLNLANLAEEVQVAQRRRIKLKRGDFADEASAPTESDIEETLKRLVSQLGKSREEVFDALKNQTVDLVFTAHPTQSVRRSLLQKHGRIRNCLRQLYAKDITADDKQELDEALQREIQAAFRTDEIRRTPPTPQDEMRAGMSYFHETIWKGVPKFLRRIDTALKNIGINERLPYNAPLIQFSSWMGGDRDGNPRVTPEVTRDVCLLARMMAANLYFSQIEDLMFELSMWRCSDELRIRADELHRSSKRAAKHYIEFWKQVPPNEPYRVILGDVRDKLYYTRERSRHLLSSGISEIPEEATFTNVEQFLEPLELCYRSLCACGDKPIADGSLLDFLRQVFNFGLALVKLDIRQESDRHTDVLDSITTHLGIGSYAEWSEEKRQDWLLSELRGKRPLFGSDLPQTEETADVLGTFHVLAELPADCFGAYIISMATAPSDVLAVELLQRECHVKQPLRVVPLFEKLADLEAAPAAVARLFSIDWYMNRINGKQEVMIGYSDSGKDAGRLSAAWQMYKAQEELIKVAKHYGVKLTMFHGRGGTVGRGGGPTHLAILSQPPDTIHGSLRVTVQGEVIEHSFGEELLCFRTLQRYTAATLEHGMHPPISPKPEWRALMDEMAVVATKEYRSIVFQEPRFVEYFRSATPETEYGRMNIGSRPSKRKPSGGIESLRAIPWIFAWTQTRFHLPVWLGFGAAIKHIMQKDIRNIHVLKEMYNEWPFFRVTLDLLEMVFAKGDPGIAAVYDKLLVAEDLQSFGEQLRKNYEETKELLLQVAGHKDVLEGDPYLKQRLRLRESYITTLNVCQAYTLKRIRDPSFQVSPQPPLSKEFTDESQPVELVQLNQQSEYAPGLEDTLILTMKGIAAGMQNTG

SEQ ID NO: 1409 - protein, 421 aa, Azoarcus evansii
MDRAIEHTKYLIAGSSHAALEAINAIRMHDAEGPITVVTRDAHLPYSPTVLPYVVSGKSAPERIFLRDDDFFARNKVAYRPKAALKALHADRNTAELADGSSVVYEKLLLATGASPAIPPIPGIDTVSYHVLRTLDDALKLRGAIAESKQAVVLGAGLVGMHAAENLVKAGATVTIVEMSEQLTSGYFDKVAADMIEQAFRDAGGKIMTGSRVVRLEPTAAGAKLTLENGTTLEADLLLVATGVKPEMDYLNGSGVEHAQGILVDDRMQTTAENVWAAATAQARGFFTGTKVMNAILPDATIQGRVAGMAMAGDPGVKDYAGAVPLNTYHFFGRHAISVGSSTVPEGGEVVTRFDEKTGRYLKAIFAADGPLTGIFGVNEFFDGGVMAQLILRRTDLTPLRSRFVANPLAVGREIMSQTWR

SEQ ID NO: 1410 - protein, 485 aa, Saccharophagus degradans 2-40
MSLTLTNSKLQRQGSVIDGAWLQSSDEFVVENPATGQVVATVANAGAAEAEAAVLAAERAGVQWREFSAKKRSTLLKAWYELVVSNANDLAVLLTTEQGKPLAEAKAEILYGASYIEWFAEQAKRIEGAVIPAPASNQRIVTVKQPVGVVAAITPWNFPMAMLARKIAPALAAGCTVVAKPAKETPLSALAMAYLAQEAGIPPGVINLVTGQDSSAIGGVFTQHPSVKKLTFTGSTAVGKTLLEQSAATIKKCSMELGGNAPFIVFDDADIDAAVAGCIAAKFRNAGQTCVCVNRIFVHDKVKAAFTKKLVEAVAKLKVGDGIEEGVAIGPLINAAAFKKVSELVIDACNKGAKAIVAEGHTHLNGALFYPPTVVTEATTQMDVFNEEIFGPVAVVYSFSSEEEAIALANNTPFGLAGYFYSRDIGRVWRVASALEVGMVGVNDTAISNEMAPFGGVKESGFGREGSQMGLDDYLETKYMLMGGL

SEQ ID NO: 1411 - protein, 303 aa, Triticum aestivum
MYTSLYKKAGWYRSGIPGISSTHASANPSARAAAAAAPPLPSSRPASLRRNFTMKLNIANPTTGCQKKVEIDDDMKLRNLYDKRISQEVVGDLLGEEFEGYIFKIMGGCDKQGFPMKQGVLTPGRVRLLLHRGTSCFRGHGRRVGERRRKSVRGCIVSQDLSVINLVIVKKGKNDLPGLTDTEKPRMRGPKRASKIKKLFNLGKDDDVRQYVNTYRRSFTNKKGKTVSKAPKIQRLVTPLTLQRKRARIADKKKRIAKKKSEAAEYQKLLAQRLKEQRDRRSESMAKRRSKLSAATKAPAASA

SEQ ID NO: 1412 - protein, 276 aa, Oryza sativa
MMPPPVQTLRLLLLTPFPPPPRLRFHRLTATGRSDNAAAASGTTARERRLAKVREERRRRQHELDNTYPGWARVLENACRDDDELRAILGDSIGNPELMKQRIQERVRKKGRAQFNKSKTGSIVAFKVSFRDFNPLNSFIWFELFGEPTDRDVDLLGGVIQAWYVMGRLGAYNSSNLQLANSMLDYDPSYDSDQASGVMPSSFHDISDVEFQDNWGRVWVDLGTSDYLGLDVLLNCLTQLSSEHLGIKQVVFGGKKMGDWEEGMKNSDYGYRHFKI

SEQ ID NO: 1413 - protein, 182 aa, Magnetospirillum magnetotacticum MS-1
MARRGWTVADIPSQAGRRAVVTGASAGLGYETALALAGAGAAVVLAVRDAAKGARAAEAIARAHPGADLAVRLIDTASLASVRAFAADWPARQPIDRLILNAGIAAVPSREESVDGFERQLATNTLGHVALTGLLLPVLSPTAGSSRWRASPIAAAGSASTTSTGARVTGRRPPTVRASSRS

SEQ ID NO: 1414 - protein, 396 aa, Methylococcus capsulatus str. Bath
MSKEKFTRTKPHVNVGTIGHVDHGKTTLTAALTKCMAAKFGGEFKAYDQIDAAPEERARGITIATAHVEYESAARHYAHVDCPGHADYVKNMITGAAQMDGAILVVSAADGPMPQTREHILLARQVGVPYIVVFLNKADMVDDPELLELVEMEVRELLSKYDFPGDDIPIIKGSALKALEGDGSEIGVPAVEALVQALDDYIPEPERAIDRPFLMPIEDVFSISGRGTVVTGRVERGIIKVGEEIEIVGIRPTAKTTCTGVEMFRKLLDQGQAGDNIGVLLRGTKREDVERGQVLAKPGSITPHTHFEAEIYVLSKEEGGRHTPFFNGYRPQFYFRTTDVTGAVTLPEGVEMVMPGDNVKIEVKLIAPIAMDEGLRFAVREGGRTVGAGVVSKIIE

SEQ ID NO: 1415 - protein, 225 aa, Salmonella enterica subsp. enterica serovar Typhi str. CT18
MPEEAHVQCKGFLFDLDGTLVDSLPAVERAWCSWADRFNLAHDEVLGFIHGKQAITSLRHFMAGKSEAEIAAEFTRLEQIEATETAGITALPGAVDLLNHLNKAGIPWAIVTSGSMPVARARHQVAGLPAPEVFVTAERVKRGKPEPDAYLLGAQLLGLAPQECVVVEDAPAGVLSGLAAGCHVIAVNAPADTPRLADVDFALDSLTQLSVAKQPNGDVVVLRKT

SEQ ID NO: 1416 - protein, 347 aa, Datura metel
MATLVSNWSTNNVSESFIAPLEKRAEKDVALGNDVPIIDLQQDHLLIVQQITKACQDFGLFQVINHGVPEKLMVEAMEVYKEFFALPAEEKEKFQPKGEPAKFELPLEQKAKLYVEGERRCNEEFLYWKDTLAHGCYPLHEELLNSWPEKPPTYRDVIAKYSVEVRKLTMRILDYICEGLGLKLGYFDNELTQIQMLLANYYPSCPDPSTTIGSGGHYDGNLITLLQQDLVGLQQLIVKDDKWIAVEPIPTAFVVNLGLTLKVMSNEKFEGSIHRVVTHPIRNRISIGTLIGPDYSCTIEPIKELISQENPPLYKPYPYAEFAEIYLSDKSDYDAGVKPYKINQFPN

SEQ ID NO: 1417 - protein, 317 aa, Colwellia psychrerythraea 34H
MNNTTVRIATRKSALALWQAEYVKAQLEHFHDGINVELVPMTTKGDIILDTPLAKVGGKGLFVKELEVAMLEDRADIAVHSMKDVPVDFPEGLGLEVICPREDPRDAFVSNTIKSLSDLPQGSIVGTSSLRRQCQLKASRPDLDIRDLRGNVNTRLRKLDEGQYDAIILAAAGLIRLEMSERIAQFIEPEEMLPANGQGAVGIECRNDDATIKALLAPLECATTRIRVLAERAMNRALQGGCQVPIGSYGVISADGKNIHLRGLVGSVDGSEMIESEITGPVEEGEALGNKLAQELLSRGADKILQQVYSENDIKNS

SEQ ID NO: 1418 - protein, 117 aa, Nicotiana glauca
MAKVALLVVVCMAAVSVMLTPHADAAISCGQVVSSLTPCISYVTKGGAIPAPCCNGIESLNNQATSTPDRQTACNCIKSAAASIKGINFSLAGSLPGKCGVNLPYKISPSIDCSTVQ

SEQ ID NO: 1419 - protein, 540 aa, Prochlorococcus marinus str. MIT 9313
MAKDPGRVLIFDTTLRDGEQSPGASLNLEEKLAIAQQLARLGVDVIEAGFPFASQGDFAAVQRIAQQVGGDEGPIICGLARASRADIKACADAVAPAPRRRIHTFIATSDIHLEHKLRKSRAEVLAIVPEMVAYARSLVDDVEFSCEDAARSDPEFLYEVIEAAIAAGAGTINIPDTVGFTTPSEFGALIAGIDCHVPNMNEAVISVHGHNDLGLAVANFLEAVKSGARQFECTINGIGERAGNAALEELVMALYVRRRYFNPFFGREPDSPTPLTAVRTEEITKTSRLVSNLTGMVVQPNKAIVGSNAFAHESGIHQDGVLKNRLTYEIVDARTVGLSDNRISLGKLSGRSAVRARLEELGYDLTREDLDEAFARFKDLADRKRDITDRDLEAIVSEQVQQSEARFQLRLVQVSCGSSLRPTATVILAQEDGQEQTAAAVGTGPVDAVCRALNALAGEPNELIEFSVKSVTEGIDAMGEVTIRLRRDGQLFSGHSADTDVVVAAAQAFVNALNRLVAGCGRQSLHPQHDAVLADLRSGI

SEQ ID NO: 1420 - protein, 282 aa, Francisella tularensis subsp. tularensis SCHU S4
MILIDGKSLSKDLKERLATQVQEYKHHTAITPKLVAIIVGNDPASKTYVASKEKACAQVGIDSQVITLPEHTTESELLELIDQLNNDSSVHAILVQLPLPAHINKNNVIYSIKPEKDVDGFHPTNVGRLQLRDKKCLESCTPKGIMTMLREYGIKTEGAYAVVVGASNVVGKPVSQLLLNAKATVTTCHRFTTDLKSHTTKADILIVAVGKPNFITADMVKEGAVVIDVGINHVDGKIVGDVDFAAVKDKVAAITPVPGGVGPMTITELLYNTFQCAQELNR

SEQ ID NO: 1421 - protein, 469 aa, Streptococcus pyogenes MGAS10394
MAFEIIMPKLGVDMQEGEIIEWKKQEGDTINEGDILLEIMSDKTNMELEAEDSGVLLKIVRPAGDTVPVTEVIGYIGAEGESVDTIASSEKTTEIPVPASADAGPTVAPKENVASPAPQVAATAIPQGNGGKVRATPAARKAAAEMGIDLGQVPGTGPKGRVHKEDVENFKGAQPKASPLARKIAADKGIDLATVSGTGFNGKVMKEDIIAILEAAKPAEAKAPAAKEEKVVDLPEGVEHKPMSAMRKAISKGMTNSYLTAPTFTLNYDIDMTEMIALRKKLIDPIMAKTGLKVSFTDLIGMAVVKTLMKPEHEYMNASLINDANDIELHRFVNLGIAVGLDDGLIVPVIHGADKMSLSDFVLASKDVIKKAQTGKLKAAEMSGSTFSITNLGMFGTKTFNPIINQPNSAILGVGATIPTPTVVDGEIVARPIMAMCLTIDHRLVDGMNGAKFMVDLKKLMENPFELLI

SEQ ID NO: 1422 - protein, 117 aa, Nicotiana glauca
MAKVALLVVVCMVAVAVMLTPHADAAISCGQVVTSLTPCINYVRQGGAIPAACCSGIKTLNSQATSTPDRQTACNCIKSAARSISGINFGLASSLPGKCGVNLPYKISPSIDCSTVQ

SEQ ID NO: 1423 - protein, 487 aa, Frankia sp. CcI3
MSVSVTMPRLGESVSEGTVTRWLKQEGERVEADEPLLEVSTDKVDTEIPAPASGVVSSIKVAEDETVEVGVELAVIDDGSAGGGTAPAQATQAPAAPEPEPEPAPEPVKPAAAAPPPPPTPTPAPAPTPAPAPTPAPAPTPAPAPAFARQPELTPVPAQTPAAANGNGGGIGRYVTPLVRKMAAELGVDLGTVAGTGPGGRVTKQDIQDAARPRDAAPAAQETPATPPTAPTAPAVAPTVAPTGAAPVRGQTEKLSRLRALVARRMVESLQISAQLTTVVEADVTRIARLRDRAKSGFQAREGIKLSFLPFFALATCAALREFPQLNSSIDVEAGTVTYHGEENLGIAVDSERGLVVPVIHNAGDLNLIGLARKIDDLASRTRANRISPDELGGGTFTLTNTGSRGALFDTPIINQPQVGILGTGIVTKKPAVVDDPELGEIIAVRSTVYLSLTYDHRIVDGADAARFLAFTKHRLENGAFEAELGL

SEQ ID NO: 1424 - protein, 117 aa, Nicotiana glauca
MAKVALFVVVCMAAVAVMLTPHADAAIFCGRVVSSLIPCINYVIKGGAIPAPCCNGIKSLNNQATSTPDRQTACNCIKSAAASIKGINFSHAGSLPGKCGVNLPYKISPSIDCSTVQ

SEQ ID NO: 1425 - protein, 107 aa, Prochlorococcus marinus str. MIT 9313
MSNAAAVTDASFEQDVLQSDVPVLVDFWAPWCGPCRMVAPIVDEIAKEFESKIKVFKLNTDENPNVASQYGIRSIPTLMVFKGGQKVDTVVGAVPKATLSGTISKYL

SEQ ID NO: 1426 - protein, 112 aa, Nicotiana glauca
MAKVALLVVVCMVAVAVMLTPHADAAISCGQVVTSLTPCINYVRQGGDIPTACCSGIKTLNSQATSTPDRQTACNCIKSAAGSISGINFGLASSLPGKCGVNLPYKISPSID

SEQ ID NO: 1427 - protein, 487 aa, Triticum aestivum
TNRSGMAGGDEGSLVPREVPGSYGMPFVSAIRDRLDFYYFQGQDKYFESRVDKYGSTVVRINVPPGPFMARDPRVVAVLDAKSFPVLFDVDKVEKKNLFTGTYMPSTSLTGGFRVCSYLDPSEPTHTKVKQLLFSLLASRKDAFIPAFRSHFSSLLATVESQLVLGGKSNFNTLNDATSFEFIGDAYFGVLPSASDLGTTGPTKAAKWLIFQLHPLVTLGLPMILEEPLLHTVHLPPILVSGDYKALYKYFYAAATKALDTAEGLGLKRDEACHNLLFATVFNSYGGLKVLLPGILARIAGAGEKFHQKLVAEIRAAVADAGGKVTIEALEKMELTKSAVWEALRLDPPVKFQYGRAKADMNIESHDAVFAVKKGEMLFGYQPCATRDPRVFGSTAREFVGDRFVGEEGRKLLQYVYWSNGRETESPSVDNKQCPGKNLVVLVGRLLVVELFLRYDTFTADVGVDLLGTKVEFTGVTKATSGPESAV

SEQ ID NO: 1428 - protein, 250 aa, Prochlorococcus marinus str. NATL2A
MIQSISSAIFTEHRPVQIIPSVLPADWANMGQCVKDLELAGVDRIQFDVMDGNFVPNLTFGPEMISACRKYCSVPFETQLMVSQYNCETMLEGYVEASKGANGEPGVVIAHAEANVHLHRILGKIRQLGGSPSVALNPHTPMDMVKDVLDMVDHVLVMTVNPGFGGQAYIPTMLNKITQLRKTILDNGYDVDIEVDGGIKADWSLSQCCAAGANCFIAGSGMFAYPTLKEGCDALRKVANDAQNGIIVEK

SEQ ID NO: 1429 - protein, 525 aa, Lactobacillus johnsonii NCC 533
MSIKKLENSSDHAMVAEEVKILTNLLNESIRQLSGDVIFNKIQDLIKISAQKDYDALEEQIASLTNQEMIVVARYFATLPLLVNISEDVELASEVNLLNNTDQDYLGKLEDTIDLVSQKENASEILKHVNVVPVLTAHPTQVQRKTVLELTDQIHGLLRSYREVKNGTINQAEWTEKLRAYIEILMQTDIIRSHKLQVSNEITNVLAYYPKALIPAITKFTARYQELAKKHNLNLSGATPITMGMWIGGDRDGNPYVTAETLKLSATLQSQVIFEYYIKQLNKLYRTISMSTSYMKPSSAVEKLSDLSNDDSPFRTNEPYRRAFYYIESRLLHTEYTLLGTADKNSFVKKRDLENLDKIPVYKNPQDFKADLITIKESLEEDHDQAVVRSFFTELLEAIDIFGFHLATIDMRQDSSVNEACVAELLKSAGICDDYSDLPEKDKVKVLLNELNNDPRNLHANNKPKSELLQKELNIYKTARQLKDCIGEDVIKQHIISHTESVSDLLEQAIMLKEYDLLNNQGARI

SEQ ID NO: 1430 - protein, 157 aa, Griffithsia japonica
MSATKLSDLQGLKDIEGGAIDPSRFAGKVVFAMNVASACGYTKPGYELLKRLTDKFAPADFVAVAIPCNSFLWQESGSAEDVKTFALARADKLLVTEKAAVNGNHPHPIVALAKQAFPGRVMWNFDGRFVFDRNGVPVARFGNSAKPEEIEAAIANA

SEQ ID NO: 1431 - protein, 385 aa, Lactobacillus johnsonii NCC 533
MPLFETVEDLENSREIMKEFLNLDIVKKWLASQNNYQEIMLGYSDSNKDGGYLASCWNLYKAQKDLTAMGKKLGVNITFMHGRGGTVGRGGGPSYEAITAQPFGSINDRIRMTEQGEIIQNKYGNQDTAYYNLEMLASATIDRIVSKQIVSEDDIGGFRSSMDEIVLDSNKVYRKLVFETPAFLDYFLQATPIKQISNLNIGSRPAARKKITDFSGLRAIPWVFSWSQSRIMFPGWYGVGSAFKHFIDANPNNLHTLQKMYQGWPFFHSLLSNVDMVLSKSNMDIAKQYADLCEDEDTKKVFDTIYQEWKLTKEVILQIEGNKELLADNPSLKMSLNYRMPYFNILNYIQIEMIKRDRVDEIAGVYESILPITINGVTSGLRNSG

SEQ ID NO: 1432 - protein, 572 aa, Desulfovibrio desulfuricans G20
MESKEAALRQKKGVSACNGRNIRLCRSVVITRCRKTHGKETYKIMVEKLLFADLPLSKEVLRAIQDMGFEEASPIQTMSIPHILAGKDVVGQAQTGTGKTAAFGIPILERIDPRDKATQAVVLCPTRELAIQVAEEVTTLARHKRGISVVPVYGGQPIERQVRALRRGAQVIVGTPGRVMDHLDRGTMDINTVKMVVLDEADEMLDMGFRDDIEFILGKMEQEVQTVFFSATMPRAILDMAQRYLKEPEFLKVTQKLLTVPSIEQIYFEVRPFQKLESLCRVLDVYNPKLTIVFCSTKVGVDELATNLQARGYDADGLHGNLNQAQRDRVMNRFRKGNIDILVATDVAARGIDVENVEAVVNYDIPNDVESYVHRIGRTGRAGRAGRAFTFVSGREFYKLRDIKRFTKAQIAQRQVPSLSEVENAKFTQMLNEVTNQIRTGGLERYIELVEGIIGEEFTSVEAAAALLRMMMHRNAGDAVTEEQKFGDTGAQPGMVRLFFNVGRKARVTARDFVGAIAGETGLPGRMIGSIDIYDRFTFVEVPNEFAAEVLAVMNGNQIRGNKLAVEPASRR

SEQ ID NO: 1433 - protein, 475 aa, Photobacterium sp. SKA34
MFKQQAFINGQWSDAFSGKTANITNPATNEVIGHVPLMGVEETNIAIDAADKAYRLWSKTTAKHRSMILRQWYELIVSHSDELANILTAEQGKPLAEAKGEIAYAASFVEWYAEEAKRLNGEIIPSHKEDARILVSRQPVGVVAAITPWNFPAAMITRKCGPAFAAGCSVVLKPAPDTPYTAFALAELAHRAGIPAGLFNVITGDAVKIGAELMSNKRVRKVSFTGSTAIGKLLMAQSAATVKKVSLELGGNAPFIVFNDADLSRAIDGVMVSKFRNAGQTCVCTNRIYVHSDVYQQFVEKLAEKVSALTVGNGVDNGVTIGPLINRAAVEKVEKHINDAMMKGANLVIGTRKPSISCFVQPTVLSDVTDNMLVANEETFGPLSAVFKFTDEQDVITRANNTDSGLAAYVYTQSLSRVFRVSEALEYGMVGVNEGLISTELAPFGGIKESGIGREGAHQGLEEYTEMKYTLMGGL

SEQ ID NO: 1434 - protein, 686 aa, Saccharomyces cerevisiae
MTDITPVQNDVDVNGNNVNDDVSSNLKRPIDQGDPSNGLAEEENPANNQLHLKKARLDGDALTSSPAGLAENGIEGATLAANGENGYNATGSGAEDEQQGLKKEEGGQGTKQEDLDENSKQELPMEVPKEPAPAPPPEPDMNNLPQNPIPKHQQKHALLAIKAVKRLKDARPFLQPVDPVKLDIPFYFNYIKRPMDLSTIERKLNVGAYEVPEQITEDFNLMVNNSIKFNGPNAGISQMARNIQASFEKHMLNMPAKDAPPVIAKGRRSSAQEDAPIVIRRAQTHNGRPKRTIHPPKSKDIYPYESKKPKSKRLQQAMKFCQSVLKELMAKKHASYNYPFLEPVDPVSMNLPTYFDYVKEPMDLGTIAKKLNDWQYQTMEDFERDVRLVFKNCYTFNPDGTIVNMMGHRLEEVFNSKWADRPNLDDYDSDEDSRTQGDYDDYESEYSESDIDETIITNPAIQYLEEQLARMKVELQQLKKQELEKIRKERRLARGSKKRGKRSKGRSGSKNASSKGRRDKKNKLKTVVTYDMKRIITERINDLPTSKLERAIDIIKKSMPNISEDDEVELDLDTLDNHTILTLYNTFFRQYESSSGASNGLDGTSGVTRDASSLSPTSAGSRKRRSKALSQEEQSRQIEKIKNKLAILDSASPLSQNGSPGQIQSAAHNGFSSSSDDDVSSESEEE

SEQ ID NO: 1435 - protein, 159 aa, Saccharophagus degradans 2-40
MASIYDINIQSLQGQLIGFSDFKGKALLIVNTASKCGFTPQYEGLQQLHQQYASEGLVIIGCPCNQFGKQEPGDAKAISEGCLINYGVDFLITEKIHVNGANTHPLYRYLKTALPGFMGNNIKWNFTKFLIGKDGTPIKRFAPFTKPASMEGAVKKALG

SEQ ID NO: 1436 - protein, 321 aa, Debaryomyces hansenii CBS767
MVHHNVTIIGSGPAAHTAAIYLSRAEIKPTLYEGMLANGTAAGGQLTTTTDVENFPGFPKGINGTELMDQMREQSVRFGTDIITETISKCDLSSRPFKLWTEWNEDSEPITTDAVVIATGASAKRMHLPGEDTYWQQGISACAVCDGAVPIFRNKPLAVVGGGDSACEEALFLTKYGSKVYLLVRRDQLRASNIMQKRVQNNDKLEILWNSEAKEAKGDGKLLQNISVYNNKTKETKDLPVNGLFYAIGHIPATQIFAKQLETDDQNYILTKPGTAETSIPGVFAAGDVQDKRYRQAITSAGTGCMAALDCEKFLSEEEAK

SEQ ID NO: 1437 - protein, 160 aa, Colwellia psychrerythraea 34H
MSNIYQFTVKNNKEETIELNQFTDKVLLIVNTASNCGFTPQYQGLQSLHDSFQTNGFEVLAFPCNQFKQQESGNNEEIQQFCDLHFNIKFPLFDKIDVNGSNAHPLFSFLKQQAPGILGSKSIKWNFTKFLVNRKGEVVKRYAPTTKPEAITADIEKLLV

SEQ ID NO: 1438 - protein, 573 aa, Saccharomyces mikatae IFO 1815
MAFEENNKPVASEQPQAAEDLVSSFSKDSHLSAQSQKYSNDELKAGEANPEGSESVPMEIPKKPMSEYVTVSLLCLCVAFGGFMFGWDTGTISGFVAQTDFLRRFGMKHKDGTHYLSNVRTGLIVAIFNIGCAFGGIILSKAGDMYGRKKGLSIVVSVYIVGIIIQIASINKWYQYFIGRIISGLGVGGIAVLSPMLISEIAPKHLRGTLVSCYQLMITAGIFLGYCTNYGTKNYSNSVQWRVPLGLCFAWSLFMIGALTLVPESPRYLCEMNRVEDAKHSIAKSNKVSPEDPAVQAELDLIMAGVEAEKLAGNASWGELFSTKTKVFQRLLMGVLVQMFQQLTGNNYFFYYGTIVFKSVGLNDSFQTSIVIGVVNFASTFFSLWTVENLGRRKCLLLGAATMMACMVIFASVGVTRLYPHGKSQPSSKGAGNCMIVFTCFYIFCYATTWAPVAWVITAESFPLRVKSKCMAMASASNWVWGFLIAFFTPFITSAINFYYGYVFMGCLVAMFFYVFFFVPETKGLSLEEIQELWEEGVLPWKSEGWIPSSRRGNDYNLEDLQHDNKPWYKAML

SEQ ID NO: 1439 - protein, 363 aa, Aspergillus nidulans FGSC A4
MFAARNFATPARQCLRSTRVAPNLASTRLQGKYTVTLIEGDGIGPEISQSVKDIFSAANAPIKWESVDVTPILKDGKTAIPDAAIDSVRKNYVALKGPLATPVGKGHVSLNLTLRRTFNLFANLRPCRSVAGYKTPYDNVDTVLIRENTEGEYSGIEHVVVDGVVQSIKLITREASERVLRFAFQYARSINKKKVRVVHKATIMKMSDGLFLNTAREVAKDFPDVEFDAELLDNSCLKITTDPTPYNDKVLVMPNLYGDILSDMCAGLIGGLGLTPSGNIGDECSIFEAVHGSAPDIAGKGLANPTALLLSSIMMLQHMGLNEHASRIQKAIFDTLAEGKTLTGDLGGKAKTHEYADAIIKRL

SEQ ID NO: 1440 - protein, 1533 aa, Magnaporthe grisea 70-15
MYPGSSQSRPYQVPPPPPMSPPLSQMHQQMSFVPPPPPPLNRYQTTPNLGASAPPPPPPGPPPASALNPQAPWNGAWGGVPAPRQAYDNRSGMYAQAPIQQYNPQAHAATAPGLNIPPPPLQTDAPMSDTYNPGQDPMFDGFMPDLSFDLEQETMGSSQTWQTTSSSSTNTASVNDNVQSNAPTEERTRRNNSASITGTQSSSNVPGIPSDITASWSLDKVIAWLQMNSFSRDWQETFKSLNIHGAQFLELGSGHFGRGNFGMMHQQVYPKLAKVCTASGTGWDQPREREEGKRMRRLIRGLVHARAVPDSARVPSSHGRQGSINSRGNDKGTHDGSDSPNTPIMKTPSSQSRSTTIPTFPDGSSFSNHRGVLKNIDIDRHSSPKLNGDSPAASPNPVMASSTPKSSTLSVSPHSSRFGNNVRNSTDSVKAIYGSGIPADAQKMMSNSNLDELINGRGARQSPSDLGDNSAGTDSPVSARDTKLPFRQRMQAKDIDGNLSSPNGEGSLSPQMYRNGLGLDDYLRFKKPGGSIYLMATADGWNYRVVDVTDVETVLDLRSEISRGLGIPDEDGVEFYLTELGKSDHSQPLDDNQLMNHNKSRADAEGTLKLFVKPPPMSQQSTWSAGDTGQRHRFGTSSSMSRQQNTLKDDQSEEARLRAQREYKAEIDRKGREYLAIRKAKLESNNNGLSSSTEGIGIVGKPVDFDTPRHSPYEDKNTDRMFPTRNAPAPPVAPSATLNRVNSLMTGQRRVQGSMDGYPSQRVPPGVGTTTSPKEMSEDRRRQPMSGSQPMGGITSALVDMGRNLGGVALPNRGVSANNVPSKPSPPYRVATAPVSGRDFVSPDNRAAFPRSQTAGDLSPISQMPANFAAYQEPNPSPRGFGAAPVSSAAHKRAPSGPDIDFTEPEVSFDRPAPSTAQNEAQSDDDSGDDSDDGLFVIPIAARKASMKKAKSRASVTFDASDSGDGKRPALTVNTARDRKSVSFNSPQSARTGDDDDDSGRQRRTPKSDMWDSEDGKLGRRKSFKMDVWANRPPAEALINNLEDFFPGMDVDQPVLEEGDQEQNIDGSPVAPSPIAEVDETQSPGHLQINATPLNSLPPSRVQSMYNESDTLGSDESTLKALERPPSFQSLAQRSVRRSGGLGRMKSIREKARGAHEAHKRYTQTSMAAPQGLSRSGGTPATETQPTQNNSSALLRRKSTKMFNANIVQIRPNRDSMLVPDIPQDSISSSSRGAPKHPTTFRWFKGQLIGKGTYGRVYLGMNATTGEFLAVKEVEVNPRAAAGDKKRMKELVAALDQEIETMQHLDHVNIVQYLGCERKETSISIFLEYISGGSIGSCLRKNGKFEESVVQSLTRQTLSGLAYLHREGILHRDLKADNILLDVDGTAKISDFGISKKTDNIYGNDKSNSMQGSVFWMAPEVIRSQGEGYSAKVDIWSLGCVVLEMFAGRRPWAKEEAVGAIYKIANGEIPPIPEDVQDTISPIAVAFMMDCFTVDSHDRPTANKLLSQHPFCELDPNYNFLDSELYAKIRGTY

SEQ ID NO: 1441 - protein, 338 aa, Azoarcus sp. EbN1
MTIKVAINGYGRIGRCTLRALYELGLRDQFEIVAINASGDLATNAHLTRYDTTHGRFATPVATEGDNLMIVGDDRIPFFSTKDPLAVNWGEFGVDVLLECTGAYASKAKAEVLLKQGAKKVLISAPGGDDVDATIVYGVNHDVLTRDMTVVSNASCTTNCLAPVAKVLQDNIGIEQGLMTTVHAYTNDQVLVDVRHKDLRRARAAAQNIIPTKTGAAKAVGLVLPALKGKFDGFALRVPTMNVSLVDLTFTASRATSKEEITVLMKEAANGPMKGVLAVNEEPLVSMDFNHDSHSSVFDATQTRVMDGTLVKVLAWYDNEWGYSCRMLDAARVFHQAK

SEQ ID NO: 1442 - protein, 476 aa, Rubrobacter xylanophilus DSM 9941
MTEAVERLTKKSEDSSRWYLELVRMAKLADYGPVRGTFAIRPYGFAIWERIQADLDARFKATGHVNAYFPLLIPESYLTKEAEHVEGFAPECAWVTVGGDDELEERLAIRPTSESIICDFYRKWIHSYRDLPVLINQWCNVLRWEMVTRPFLRTAEFLWQEGHTVHATAEEAREEALRMLNVYRDCFYEVLAIPVLTGMKSPSERFAGAVETFTCEGLMGDGRALQAATSHDLGQNFARAFDITFLDENQERVHPYQTSWGFSTRTIGALILVHGDDRGLRLPPKLAPTQAVVVPIWRGKNKGEVRREAEALHRELAEAGLRAEADLDEEHSPGWKFNEHELRGVPVRVELGPKDIEKGQAVLVRRDTGEKEFVGRGAAARRLVELMDEIQQNMLRQAEAFRDENTRRAETYEEFKEIIEEKRGFVVAPWDGTEETEQRIKEETKATIRLLPFEREEGKDLVSGRPGKTAVFARAY

SEQ ID NO: 1443 - protein, 780 aa, Magnetococcus sp. MC-1
MSILHKLWGHSIRHQLMLGIALVHAVLMTLFIFDLVDRQRDFLHKQAVAQATSLSRTLAANSISWVLARDFVGLEELLSSMLDYPELRYAMVVDVNGKVLSHSDKSKAGKFLADPLSLKLIDAPNTLQVLLQSKQVIDVAMPILTNQQLVGWARVSLSQNKSGQELLHVTYKGFLYTLFAIVVGIVFAYFMARGLTKDLYHLLHVANTTRLGQLNHRVQIKRHDEIGLLSNGFNQMLGVLEQEEQQLRLIQQSLTQSNQALRQSEEKFRRLVESLSSEYFLYSHNTEGVFEYVSPSIRTVLGYDPQEFMTHYATYFTENPINMQAVNHTEASIRGEQQASYVIEIFNKQGQAVRLDVLEYPIFDKDGRVIAVEGLAHDVTERHRAEFELLTAKEQAEAANRTKSEFLAMMSHEIRTPMNSILGMAELLSESPLTPEQQGYLKIQRRAGHGLLELINDILDLSKLEAGRIELYIQPFNLPELLQSVVDLLENLARERGLALRLERMEEIPTLCQGDRARLRQIMVNLVGNAIKFTHDGSVKISVEKSSDDATNLLFHVIDSGIGIAEKDQSSVFQRFTQIDSSNSRFYGGSGLGLAITHHLVELMGGKIWLKSALGEGSCFTFTLPLPPVQIDEPALAATHDEEAPMVATESCCATKPLRILLAEDSPDNELLIRIFLRDSPHSLCCVKNGLEAYQQVQKENFDLILMDIQMPVMGGDEAIIKIRAWEQSQQCDPTIIIALTAHAMSEHQKHYLTLGFDAFLSKPINKKTLLNALAQYGQS

SEQ ID NO: 1444 - protein, 327 aa, Prochlorococcus marinus subsp. marinus str. CCMP1375
MAGTLLFNALREAIDEEMARDPHVCVMGEDVGQYGGSYKVTKDLYEKYGELRVLDTPIAENSFTGMAVGAAMTGLRPIVEGMNMGFLLLAFNQISNNMGMLRYTSGGNFKIPTVVRGPGGVGRQLGAEHSQRLEAYFHAVPGIKIVACSTPTNAKGLMKAAIRDDNPVLFFEHVLLYNLTEELPEGDYLCSLDQADLVREGKDVTILTYSRMRHHCLKAVEQLTKKDIDVELIDLISLKPFDIKTICNSIRKTHRVIIVEECMKTGGIGAELMALINEHCFDDLDCRPIRLSSQDIPTPYNGQLENLTIIQPHQIVETVEQVVNLGV

SEQ ID NO: 1445 - protein, 484 aa, Escherichia coli
MSDMEPKTKKQRSLYIPYAGPVLLEFPLLNKGSAFSMEERRNFNLLGLLPEVVETIEEQAERAWIQYQGFKTEIDKHIYLRNIQDTNETLFYRLVNNHLDEMMPVIYTPTVGAACERFSEIYRRSRGVFISYQNRHNMDDILQNVPNHNIKVIVVTDGERILGLGDQGIGGMGIPIGKLSLYTACGGISPAYTLPVVLDVGTNNQQLLNDPLYMGWRNPRITDDEYYEFVDEFIQAVKQRWPDVLLQFEDFAQKNAMPLLNRYRNEICSFNDDIQGTAAVTVGTLIAASRAAGGQLSEKKIVFLGAGSAGCGIAEMIISQTQREGLSEEAARQKVFMVDRFGLLTDKMPNLLPFQTKLVQKRENLSDWDTDSDVLSLLDVVRNVKPDILIGVSGQTGLFTEEIIREMHKHCPRPIVMPLSNPTSRVEATPQDIIAENKPPFSVFRDKFITMPGGLDYSRAIVVASVKEAPIGIEVIPAHVTEYL

SEQ ID NO: 1446 - protein, 481 aa, Escherichia coli
MEPKTKKQRSLYIPYAGPVLLEFPLLNKGSAFSMEERRNFNLLGLLPEVVETIEEQAERAWIQYQGFKTEIDKHIYLRNIQDTNETLFYRLVNNHLDEMMPVIYTPTVGAACERFSEIYRRSRGVFISYQNRHNMDDILQNVPNHNIKVIVVTDGERILGLGDQGIGGMGIPIGKLSLYTACGGISPAYTLPVVLDVGTNNQQLLNDPLYMGWRNPRITDDEYYEFVDEFIQAVKQRWPDVLLQFEDFAQKNAMPLLNRYRNEICSFNDDIQGTAAVTVGTLIAASRAAGGQLSEKKIVFLGAGSAGCGIAEMIISQTQREGLSEEAARQKVFMVDRFGLLTDKMPNLLPFQTKLVQKRENLSDWDTDSDVLSLLDVVRNVKPDILIGVSGQTGLFTEEIIREMHKHCPRPIVMPLSNPTSRVEATPQDIIAENKPPFSVFRDKFITMPGGLDYSRAIVVASVKEAPIGIEVIPAHVTEYL

SEQ ID NO: 1447 - protein, 108 aa, Nitrosomonas europaea ATCC 19718
MSQHIHYVTDASFESEVLQCPVPVLVDYWAEWCGPCRMIAPLLDEIASEYGDRLKIAKLNIDENQSTPQKYGIRGIPTLMIFKNGNIEATKVGALSKSQLTAFVDSHL

SEQ ID NO: 1448 - protein, 448 aa, Escherichia coli
MEERRNFNLLGLLPEVVETIEEQAERAWIQYQGFKTEIDKHIYLRNIQDTNETLFYRLVNNHLDEMMPVIYTPTVGAACERFSEIYRRSRGVFISYQNRHNMDDILQNVPNHNIKVIVVTDGERILGLGDQGIGGMGIPIGKLSLYTACGGISPAYTLPVVLDVGTNNQQLLNDPLYMGWRNPRITDDEYYEFVDEFIQAVKQRWPDVLLQFEDFAQKNAMPLLNRYRNEICSFNDDIQGTAAVTVGTLIAASRAAGGQLSEKKIVFLGAGSAGCGIAEMIISQTQREGLSEEAARQKVFMVDRFGLLTDKMPNLLPFQTKLVQKRENLSDWDTDSDVLSLLDVVRNVKPDILIGVSGQTGLFTEEIIREMHKHCPRPIVMPLSNPTSRVEATPQDIIAENKPPFSVFRDKFITMPGGLDYSRAIVVASVKEAPIGIEVIPAHVTEYL

SEQ ID NO: 1449 - protein, 395 aa, Shewanella oneidensis MR-1
MFEIMDTHSDDAVIKVIGVGGGGGNAVEHMVKHNIEGVEFVVTNTDAQALRKSGAGSTIQLGRDVTKGLGAGANPEVGRAAAEEDRENIRAAIKGSDMIFIAAGMGGGTGTGAAPVVAQIAREEGILTVAVVTKPFPFEGKKRMAYAEQGIAELAKHVDSLITIPNEKLLKVLGRGTSLLDAFAAANNVLLGAVQGIAELITRPGLINVDFADVKTVMSEMGNAMMGTGVARGEDRAEEAAEAAVASPLLEDIDLAGARGVLVNITAGMDMSIEEFETVGNHVKAYASDNATVVVGAVIDPEMSDELRVTVVATGIGAEKRPDIQLVSKPAPRPEPVVVEPKVEAYVEEATHVSYAAPKGNVLPAAPAPAPAPAPSTKHELDYLDIPAFLRKQAD

SEQ ID NO: 1450 - protein, 126 aa, Triticum aestivum
MASALTNVSLSTFAPTARGDVLARPHVAAARVTFPTAYRGSGALSCRAGGPATPPGISDKMSDSIKEAQETCSEDAASGECAAAWDEVEELSAAASHARDKLKDSDPLENYCKENPETDECRTYDS

SEQ ID NO: 1451 - protein, 403 aa, Vibrio fischeri ES114
MKRAVITGMGIVSSIGNNAEEVLESLKAGKSGINFSEQFAEKGLRSNVWGDLKMNPADHIDRKKMRFMGDAAAFAYISMEQAVADSGLTEDQVSNERTGIVAGSGGASSLNQVNAVDILREKGVKRVGPYMVPRTMASTVSACLATPFKIKGVNYSMSSACATSAHCIGHAVELIQLGKQDVMFAGGGEELDWSLTMMFDAMGALSSKYNDTPEKASRTYDADRDGFVISGGGGMLVIEELEHALARGAKIYGEIVGYGATSDGYDMVAPSGEGAVRCMKMAMQNVDSVDYVNTHGTSTPVGDAKELGAIQEVFGANSPAISATKAMTGHALGAAGVHEAIYSTLMLEHGFIAPSINVETLDPAAEGLDIVTEKRDQALNTVMSNSFGFGGTNATLVIKKYEA

SEQ ID NO: 1452 - protein, 234 aa, Zea mays
  misc_feature (194)..(194): Xaa can be any naturally occurring amino acid
MDLATTPARRRPMEPGLARRLWHVVVAVCHILRRGLSPKRIMMDVHLLLGRGKLVGRTLRGHLAHPSSGHHLATYGASSSSSSTLASFYGHPREVEFSCATTPSYPQQHYGLFPSNKARGGGGYGGLDAATVARAFEMLSRAEVDTGGGGTPAVAATTATPSPMLAWILGRSPAGVRPLRVTDSPFPAVAGDGXGCCGERVDADADDFIRKFYEQLRLQPTAATPDAHLRRRGY

SEQ ID NO: 1453 - protein, 541 aa, Zea mays
MAIPDPPAAYIYLPRPASLDPNGPLYHKGWYHLFYQWNPDSAVWGNITWGHAVSRDLLHWLHLPLAMVPDHPYDANGVWSGSATRLPDGRIVMLYTGSTAESSAQVQNLAEPADARTLNPVLVPPPGIGPTDFRDPTTAWRTPGNDTPAWRVAIGSKDRDHTGLALVYRTEDFVRYDPAPALMHAVPGTGMWECVDFYPVAAGSGAAADSGDWLETSAAPGPGVKHVLKARLDDDKHDYYAIGTYDPATDTWTPDSAEDDVGIGLRYDYGKYYASKTFYDPVLRRRVLWGWVGETDSERADILKGWASAQSIPRTVLLDTKTGSNLLQWPVVEVENLRMSGKSFDGVALDRGSVVPLDVGKATQLDIEAVFEVDASDAAAVTEADVTFNCSTSAGAAGRGLLGPFGLLVLADDDLSEQTAVYFYLLKGTDGSLQTFFCQDELRASKANDLVKRVYGSLVPVLDGENLSVRILVDHSIVESFAQGGRTCITSRVYPTRAIYDSARVFLFNNATHAHVKAKSVKIWQLNSAYIRPYPATTTSL

SEQ ID NO: 1454 - protein, 393 aa, Spinacia oleracea
MASASLLKTSPVLDNPEFLKGQTLRIPSVAGVRFTPSGSSSLTVRASSYADELVKTAKTVASPGRGILAMDESNATCGKRLASIGLENTEANRQAYRTLLISAPGLGQYVSGAILFEETLYQSTTDGKKMVDVLIEQGIVPGIKVDKGWLPLPGSNDESWCQGLDGLACRSAAYYQQGARFAKWRTVVSIPNGPSALAVKEAAWGLARYAAITQDNGLDPILEPEIMLDGEHGIDRTFRVAQQVWAEVFFNLAENNVLLRDPLKPSMVGPGALSARKGPPEQVADYPLKLLHRRRGPVVPGIMVLSGGQSEVEATLNLNAMNQSPNPWHVSFSYARALQNTCLKTWVEGQENVKAQDFACAKSNSLAQLGKYTGEGESEERKKDMFVKATLTY

SEQ ID NO: 1455 - protein, 355 aa, Prochlorococcus marinus str. NATL2A
MALSYYAEELKKTASAIAQPGKGILAVDESTKTVGKRLASIGVENSEENRKAYRGMLFTTEGLGNFISGAILFEETLFQNHPDGEPMVKKLEKLGIIPGIKVDKGLRPLAGGHDVETFCSGLDGLVERAADYYEQGARFAKWRAVLQITDDGCPSKLSIRENAWGLARYARSVQESGLVPIIEPEILMDGSHSIEKTAAVQEEVIKEVYLACQVNGVLLEGTLLKPSMTVQGADSSTKADPQQVAEMTIRTMERCVPASVPGITFLSGGLSEEAASVYLNLMNKIDRKAKWNVSFSYGRALQHSCLKAWKGSNTADGQKALIARAQANSEASKGLYVAGSQPSSDEQLFVAGYKY

SEQ ID NO: 1456 - protein, 590 aa, Asparagus officinalis
MCGILAVLGCSDDSQAKRVRVLELSRRLKHRGPDWSGLCQHGDCFLSHQRLAIIDPASGDQPLYNEDKSIVVTVNGEIYNHEELRRRLPDHKYRTGSDCEVIAHLYEEHGEDFVDMLDGMFSFVLLDTRNNCFVAARDAVGITPLYIGWGLDGSVWLSSEMKGLNDDCEHFEVFPPGNLYSSRSGSFRRWYNPQWYNETIPSAPYDPLVLRKAFEDAVIKRLMTDVPFGVLLSGGLDSSLVAAVTARHLAGSKAAEQWGTQLHSFCVGLEGSPDLKAAKEVAEYLGTVHHEFHFTVQDGIDAIEDVIFHIETYDVTTIRASTPMFLMARKIKSLGVKMVISGEGSDEIFGGYLYFHKAPNKEEFHHETCRKIKALHQYDCLRANKATSAWGLEARVPFLDKEFMDVAMSIDPESKMIKPDLGRIEKWVLRKAFDDEENPYLPKHILYRQKEQFSDGVGYSWIDGLKAHAAKHVTDRMMLNAARIYPHNTPTTKEAYYYRMIFERFFPQNSARFTVPGGPSIACSTAKAIEWDARWSNNLDPSGRAALGVHDSAYDPPLPSSISAGKGAAMITNKKPRIVDVATPGVVIST

SEQ ID NO: 1457 - protein, 112 aa, Triticum aestivum
MRDLPRLRRTAHTHPGEFPEKKIQSLAQDLGVLDRTDQREEREMADWGPVIVATVLFVLLTPGLLCTLPGRGRVAEFGSMHTSGLSILIHAVLYFALVTIFLIAVGVHVYTG

SEQ ID NO: 1458 - protein, 335 aa, Colwellia psychrerythraea 34H
MTKQTITVIPGDGIGPSIIDATIKILDKAGCGFDYEFADAGLTALEKHGELVPEETINLIEKNKITLKGPLTTPVGEGFTSINVTLRKQFKLYANLRPVLSFKGTKARYENIDILTVRENTQGMYSGAGQVTSEDGTEAQAMSIVTREGAEKILTFAYETAIKEGRKKITAVHKANILKSTSGLFLKVAREVAQRYPQIESTEMIVDNCCMQLVMNPEQFDVIVTTNLFGDILSDLCAGLVGGLGMAPGANIGEDCAIFEAVHGSAPDIAGKNLANPTSVILAAIQMLEYLDMGDKAEKIRAAITDVIASGDRTTGDLGGTHGTTDFTEAVLERL

SEQ ID NO: 1459 - protein, 430 aa, Ashbya gossypii ATCC 10895
MSFLASRLSTRFLARPAVSAGVRSFVSTPLRRATFDRSKPHLNIGTIGHVDHGKTTLTAAITKTLASRGGADFLDYSSIDKAPEERARGITISTAHVEYQTEKRHYSHVDCPGHADYIKNMITGAAQMDGAIIVVAATDGQMPQTREHLLLARQVGVQHIVVFVNKVDTIDDPEMLELVEMEMRELLNHYGFDGDNTPVVMGSALCALEGRQPEIGEQAIMKLLDAVDEYIPTPARDLEKPFLMPVEDIFSISGRGTVVTGRVERGNLNKGEEIEIVGHNATPFKTTVTGIEMFRKELDKAMAGDNAGVLLRGVRRDQLKRGMVLCKPNTIKAHTKFLASLYVLTKEEGGRHSGFGENYRPQIYVRTADVTVVLKFPESVADHSMQVMPGDNVEMVCELVHPTPIEAGQRFNIREGGKTVGTGLVTRIIE

SEQ ID NO: 1460 - protein, 447 aa, Salmonella enterica subsp. enterica serovar Paratyphi A str.
MKKVKKLSLTDLVLYGLVFMVPIAPVSLYGVVYNLSHGMVALVYIIGAIAMFFTAYSYSTLSQHISSSGSAYAYAGVCINPAVGFLTGWILLLDYLLFPTLVAVLGGVAVHAILPQIPVWVWPLIYVAIGTGVNYLGIQQTAKFDKLLVFIQLGILAIFVLLIVRLMMQDSSQITLSFRPFFDSQWFTPGLIATAISVAALNFLGFDAISTLSEESEGGGRAVSKATLLALVLATVLFIIVVAFAAFATGNVDRFAEGNATNEAFFTIAGNVGGIWLKVAFSIIVAFVCAVGNIITAQTAVSRVLFSMGRDRMLPAFLAHVHTTRKTPNYAILFTGGVTLLLSYLFSGKIESISTLVNFGALFAFFVVNLCVFILFNFRMKAQRRIFAHVISPIMGMIVIGYVCLNMNIHALILGISWAAIGIAILCYRKAHNQNIAIDLEGKKLLD

SEQ ID NO: 1461 - protein, 363 aa, Arabidopsis thaliana
MLGILRQRAIDGASTLRRTRFALVSARSYAAGAKEMTVRDALNSAIDEEMSADPKVFVMGEEVGQYQGAYKITKGLLEKYGPERVYDTPITEAGFTGIGVGAAYAGLKPVVEFMTFNFSMQAIDHIINSAAKSNYMSAGQINVPIVFRGPNGAAAGVGAQHSQCYAAWYASVPGLKVLAPYSAEDARGLLKAAIRDPDPVVFLENELLYGESFPISEEALDSSFCLPIGKAKIEREGKDVTIVTFSKMVGFALKAAEKLAEEGISAEVINLRSIRPLDRATINASVRKTSRLVTVEEGFPQHGVCAEICASVVEESFSYLDAPVERIAGADVPIPYTANLERLALPQIEDIVRASKRACYRSK

SEQ ID NO: 1462 - protein, 500 aa, Streptomyces avermitilis MA-4680
MTKIVNHWIGGKTVEGASGTYGPVTDPATGAVTTKVAFATVDEVDAAVAAAKDAYATWGQSSLAKRSTILFKFRALLDANRDAIAELITAEHGKVHSDALGEVARGLEIVDLACGITVQLKGELSTEVASRVDVSSIRQPLGVVAGITPFNFPAMVPMWMFPLAIACGNTFVLKPSEKDPSAALKLAELLAEAGLPDGVFNVVHGDKVAVDRLLEHPDVKAVSFVGSTPIARYIHTTASAKGKRVQALGGAKNHMLVLPDADLDAAADAAVSAAYGSAGERCMAISAVVAVGAIGDELVEKIRERAEKIKIGPGNDPASEMGPLITKAHRDKVASYVAGAAAQGSEVVLDGTGHTVDGFEDGHWIGLSLLDKVPTSADAYRDEIFGPVLCVLRVDSYEEGLALINDSPFGNGTAIFTRDGGAARRFQLEVEAGMVGVNVPIPVPVGYHSFGGWKDSLFGDHHIYGNDGTHFYTRGKVVTTRWPDPSEAPAGVDLGFPRNH

SEQ ID NO: 1463 - protein, 1177 aa, Methylococcus capsulatus str. Bath
MSEDLTSPPAMRQRFLRSLGSICLIVILAEVIVMTLLGALHRGGLELVRWQESALDGLLLGLFSAPLLWIMALRPLAQQIARESQRNKELLDALDAHALVSITDLQGRILYANDNFCAVSRYGREELVGQDHRIVNSGYHGKAYIRDMWRTISRGNIWQGEFCNRRKDGTRYWVDSTIVPLMDNAGKPRQYISIRRDITAQKEAEAQLARLKQAMDANSEMILLTDRAGRIIYANPALCRFSGMAEGELLGQSPSILDSPLADQETLAAMQEALQAGQPWSGRLLNRRRTGPAPHDAEDYWAEISTTPIHTDGNGLVGYVQIQHDVSARVERERALAMEQEDTAARLRITETLQQSAPLDERCRQVLRILFELGTFGLQRKGGIFLKAEHGNCLKLFVLEGKFCDEFVRREQTIPMGACLCGRSAVSGEILVSDDCFQDHRHEHRFEDMESHGHYIVPIASGGDLLGVLFLYTDPNPTRSEARMVMLRQVGEMLALAILEDRAKASLKAAHDAAVDAAQAKSAFLANMSHEIRTPMNGVLGMLELLKDTDMSREQWDLVETASNSAESLLEIINSILDFSKLEAGKVEIERTEFNLPDLVEEVCALLAGRAHDKGLELNCFLPADLPRMWIGDPTRIRQILTNLLGNSVKFTERGEVSVKVMQGEAGAKRTDLSFEIRDTGIGIAPDVQARLFQPFTQADGSTSRRFGGTGLGLSICRNLVELMGGTIGLESAPGRGSRFWFTLPLEPLPGASAPALPDFSHRRVLVVDDNATNRVILSHYLTHWGLEVDEAERGDTALNRLRTALHESRPYDIVLLDLHMPYMDGHELARAMNAEPGLKDTPRLLLSSGGLTGEAELRALGIARSLLKPVRQSLLFNAIAEVLAAKATVQRRPAAKTETVLPAYEGRRVLVVEDNRVNQKVIVAMLGKFGIVPDVADNGQAALELLARSSYDLVLMDCQMPVLGGYEATGELRAREMSAGGRRTPVVALTAHAATGEREKCLAAGMDDYLSKPISRDRLAEALERWLGHPAAPASAETGQGAVNDDGGDRPAGLSWNREETLARLDHDEALLAEMIALCIEELPRHLAALQEAGAANDIAALADAAHAIKGMAGHFCAGSVRDLAARLEDQARKAGSMPDAASIGALETAAARLLEDLHGGSPAGDPAKGTNDAAQ

SEQ ID NO: 1464 - protein, 428 aa, Oryza sativa
MIEGSRFQNMLGGAGIGGGIGCRGRQENEMNGFHNMPYYHKVGESSHMSVDNADNLNMMNFVGGSVAMSVDNSSVGSNESRTVMLKHPGLRDMPAPSYSVHNSVIHPNRAMAPTLNEDALARVLMDPSHPTEILSNYEEWTIDLGKLDMGAPFAQGAFGKLYRGTYNGEDVAIKLLEKPENDPERAQLMEQQFVQEVMMLSTLRHPNIVRFIGACRKSIVWCIITEYAKGGSVRQFLARRQNKSVPLGLAVKQALDVARGMAYVHALRFIHRDLKSDNLLISADKSIKIADFGVARIEVQTEGMTPETGTYRWMAPEMIQHRPYDHKVDVYSFGIVLWELITGMLPFTNMTAVQAAFAVVNRGSRPAIPQDCVDSLSKIMTCCWDANPEVRPSFAEIVVMLENAEIEVMRNVRRARFRCCIAGPMTTD

SEQ ID NO: 1465 - protein, 471 aa, Leptospira interrogans serovar Copenhageni str. Fiocruz L1-130
MEQTLEKKSIHEDRYYRPDNFPKGLTRKVVESISHIKNEPGWLTSFRLKAFEIYEQKPMPTWGFFPNFNVDIDSYTHYIGSNQQKKKSWDEVDPEVLKSFERLGIPEHERKYLAGIEAMNDSETVYANVKKELTELGILFCDIDTAIREYPEIVKKYLGTVVSVGDNKFSALNSCVFSGGSFAFVPKGVKTPMPLQAYFKVTAASSGQYERTLLIADEGAELEYSEGCSSVQDKGTNFHTAVVELISHKNAKIFYTTIQNWKKNMYNWTVKRGLCYERGHITWTDVNIGANTIKYPGIVLQGDHSTGDILSLAFAGGGQIQDTGARIIHVGKNTRSNILAKGVSLDGGINSYRGLVKFTSGSENSYSHVKCDGLMMDDRSQSHAYPYNDVSGQNGTLNYEATVSRIDEDQLFYLQSRGLSEDDAKLLIINGFCEGVTKHLNVEYSVEMTRLIRMILEDGHVIQENKDSVVS

SEQ ID NO: 1466 - protein, 433 aa, Escherichia coli
MVETIEEQAERAWIQYQGFKTEIDKHIYLRNIQDTNETLFYRLVNNHLDEMMPVIYTPTVGAACERFSEIYRRSRGVFISYQNRHNMDDILQNVPNHNIKVIVVTDGERILGLGDQGIGGMGIPIGKLSLYTACGGISPAYTLPVVLDVGTNNQQLLNDPLYMGWRNPRITDDEYYEFVDEFIQAVKQRWPDVLLQFEDFAQKNAMPLLNRYRNEICSFNDDIQGTAAVTVGTLIAASRAAGGQLSEKKIVFLGAGSAGCGIAEMIISQTQREGLSEEAARQKVFMVDRFGLLTDKMPNLLPFQTKLVQKRENLSDWDTDSDVLSLLDVVRNVKPDILIGVSGQTGLFTEEIIREMHKHCPRPIVMPLSNPTSRVEATPQDIIAENKPPFSVFRDKFITMPGGLDYSRAIVVASVKEAPIGIEVIPAHVTEYL

SEQ ID NO: 1467 - protein, 387 aa, Zea mays
MIPSVRISPGYAAFSGSSLRLKLHSIPSISSLKPSKYVVSSLKPLYLAPLDGPHTSELKSWRQPLEFRCAASAADDKESKTQVVPVQLEGAQRLKISIYFATWWALNVIFNIYNKKVLNAFPYPWLTSTLSLACGSAMMLFSWATRLVEAPKTDLDFWKVLFPVAVAHTIGHVAATVSMSKVAVSFTHIIKSAEPAFTVLVSKFLLGETFPVPVYLSLLPIIGGCALAAVTELNFNMVGFMGAMISNLAFVFRNIFSKRGMKGKSVSGMNYYACLSIMSLVILTPFAIAMEGPQMWAAGWQKAVAEVGPNVVWWIAAQSVFYHLYNQVSYMSLDQISPLTFSIGNTMKRISVIVSSIIIFHTPVRPVNALGAAIAILGTFLYSQAKA

SEQ ID NO: 1468 - protein, 312 aa, Leptospira interrogans serovar Copenhageni str. Fiocruz L1-130
MINRVLGLFLIIGILIFVLSFFSTSGQSEDQYQAEGPSRIQSVVILIREFLWGKASHSNAAASVTTAENPQEIFKRAYRANEKKAYLNAVEEYSKYLKLVPNDASAYYNRGLVHYTLKRYNDAVRDFEKAVEIDPSKTYAFLYKGYAYEMISDCKQAIEDFEKAISLGENKNAELYGHKARCENRSKNYDEGFQDALKALNIDKKNAYAFFELAYAQYGLKKYSDSVESYTKVLQFSPNDGVAFHNRGLALVFLNKIPSACKDFQRSSEIGYFDSKKKWMNIVNDLYRKFFAGPIKLSILNFYHKILFQKRY

SEQ ID NO: 1469 - protein, 469 aa, Arabidopsis thaliana
KMPRVIPPENLGCPPFRALTFDSLGLIKVTEARGQERGIPTVVNTWGEMNASRSVLAASIDDRLRNPLLAVARKDGNVEVINPCNGDLHFSYSVFGDDGCSPEDNEISALHLFRKKIDDQTERSCTLLTCTKKGDVSLRSVKFPDAHGNSTDDASPKTWKACGSGEILVGKVDGSENFSLFGGKRVEANIWDLEQCTKIWSAKCPPKNNLGIFTPTWFTSATFLSKDDHRKFVTGTKSHQVRLYDISTQRRPVLSFDFRETAITSIAEDPDGHTIYVGNASADLASFDIRTGKLLGSFLGKCSGSIRSVVRHPQHQVIASCGLDRYLRVYDVKTRQLISAVFLKQHLTGLVFDSGFSGEETAVANTVAEAATEEKMTIMDQEDDETEKAPVKRKKSKKEKRSREIVFEGEDDEENEDEIEKAPVKTKKSKKEKRSREKVSEGEEKDELRSKKTREHKKKTKIVKHNQED

SEQ ID NO: 1470 - protein, 948 aa, Caulobacter crescentus CB15
MIRTAKLALVAAALSTTALSPLALAAPAPAQPAATASIAVPPIVYQQRVLANGMKVFTSRDTSTPNVSVQVWYGVGSKDDPQGRSGFAHLFEHLMFKATRNMPNETVDRLTEDVGGFNNASTWDDFTNYYEVVPANHLERLIWAEADRLKSLVIDEAVFASERDVVKEELRQRVLADPYGRFFALSIPQQSFAVHPYQRPGIGSIEELDAATVDDVRAFHRTYYRPDNAALIIVGNFDQTKLDAMIDKYFGSLTTPAGAIPKVTAVEPARTGPKTVNTYGPNVPLPALAITWLAPAAADKDAPALAVLDAILTAGKSSRLYDSLVYDQKIAQSVFSSAPNNAQPGLFYVGAIMAGGKTVAQGEAALRAQVARVRDGLVTPAELAEAKAGLLADAVRRREEIDGRGFAIGYALQTEGDAAAANSSLAKLQAVTAADIQRVARQYLADDRRTVINYLPEKDRPAGEKDATPPIPKVASVKYDGPITTLAPEAEREKPPAVAAPVPAVMPTPAEKTLANGLRVIVAKSSELPLITSTLTVKGGASSDPAGLAGTSSLTSELLTEGTATRSATQVARETEALGANLAAGSGWEAASLTLSVTANNADPAMAIMADVAQNPAFKTEELDRVRAETLDGLSVAFQRPGSLASFATSPVLYAGSAYGHVAGGTPGSLPKIKREDLAKTHAAYWRPDNAVLVVTGNLSPEAGFALAEKAFGGWKKPATPPPAPPAAPTGYQPRNVVIDLPGTGQAAVVLAKPAITRADPSYYQGVVANTVLGVGFSSRLNQEIRIKRGLSYGAGSSLTPQGQFGGFSARVQTKNPSAGEVISLTRAELSRLANEPASVGELAARKSVLVGGFGRDLGTSEGLAGILGNLAVYGVPLTEIQSYAAKVEAVTPEQVQAFAKAKLDPTQMSVIVAGDAKAMGEALAKVAPNATVIPAAKLDLDAPGLTQ

SEQ ID NO: 1471 - protein, 166 aa, Triticum aestivum
  misc_feature (28)..(28): Xaa can be any naturally occurring amino acid
  misc_feature (98)..(98): Xaa can be any naturally occurring amino acid
ATSVAPFQGLKSTAALPVSRRSNGASLXSVSNGGRIRCMQVWPIEGIKKFETLSYLPPLSTEPLLKQVDYLIRSKWVPCLEFSKVGFIFREHNASPGXYDGRYWTMWKLPMFGCTDATQVINEVEEVKKEYPDAYVRIIGFDNMRQVQCVSFIAFKPPGCEESGKA

SEQ ID NO: 1472 - protein, 287 aa, Medicago truncatula
MGNVNGREEDFNGTLSSASSTSSEVSDSMSAPDGVVENPSPVELMGHSPPASPRTTQSPLMFTPQAPVVPLQRPDEMQVPSPSLMQTNSGYEDMFSEIGIPTMITWSYDGKEVAVEGSWDNWKTRMPLQRSGKDFTIMKVLPSGVYQFRFIVDGQWRYAPDLPWARDDAANTYNILDLQDSVPEDLGSISSFEPPKSPDSSYNNLHLSSEDYAKEPPLVPPFMQATLLNVPSANMEFQPLVSRPQHVVLNHLYMQKGKSSPSVVALGSTHRFVAKYVTVVMYKSLQR

SEQ ID NO: 1473 - protein, 497 aa, Moricandia nitens
MERARRLAYRGIVRRLVNESKRHRKGEITPHHVPSVVPHAPARYISSLSPYLSNHRSVNVGARHHHNHHQTRSISVEAVKPGDTFPRRHNSATPDEQAHMAKLCGYDHIDSLVDATVPKQIRIDSMKFSKFDEGLTESQMIAHMTELASKNKVFKSFIGMGYYNTHVPTVIIRNILENPAWYTQYTPYQAEISQGRLESLLNFQTMITDLTGLPMSNASLLDEGTAAAEAMAMCNNIQKGKKKTFVIASNCHPQTIDICKARADGFDLKVVTKDLKEIDYSCGDVCGVLVQYPGTEGEVLDYGEFVKNAHANGVKVVMATDLLALTVLKPPGEFGADIVVGSAQRFGVPMGYGGPHAAFLATSQEYKRMMPGRIIGVSVDSTGKQALRMAMQTREQHIRRDKATSNICTAQALLANMAAMYAVYHGPAGLKSIAERVHGLAGIFSLGLKKLGVAEAQDLPYFDTVKIKCSDAHAIADAAVKSEMNLRVVDSNTVSLL

SEQ ID NO: 1474 - protein, 615 aa, Legionella pneumophila str. Lens
MKSTDPIKIAVLPGDGIGIEVTEATLPVFEVLDVPATLSYGDIGWEFWKKEGTAIPSRTWQLISASDTVLLGAITSKPQREAKQELSKALRKSNPYYVSPVIQLRQGLDLFANVRPCFSIDDQSKPFNFCIIRENSEGLYCGFDYFPLPKAIHNLLAESQHWQTIPADEASCALRLQSKPGLTRLFDFAFNHAMQTGMPRVTLADKPNVLRESGEFARKIFESTAQKYPKIQADILNVDAVALWLIKSPEKFGVIVAENMFGDILSDIGAGVMGGLGLAPSANIGDKGSYFEPVHGSGPRMKKNCANPSAMFLTISMLLNHFGYPDRAKKIVNAVMQVIKEKRFITYDLGGHSTTIDMANAVIESCARLEASCLSTDFSSVPKENLIESDTMSNLLQQLMHCNSAEISDALDACGIEGGLLNIKPLSQGMKMVGPAYTIQYLPREKKETAFHNAANYIDKVPKHSVIVIDNNGQTDCTVWGDLLTHTALRNNIMGTVVHGAVRDVESIRSTNYPVFCTGIYMCSGKNRVYKANEQCPLFINGVTINPGDIVFADDNGVLVIPNELLHEVVNKTIAIRLTEKRIKAAVASGSTLEQAREDYYYEQPWLGINKKREQ

SEQ ID NO: 1475 - protein, 358 aa, Medicago truncatula
MASQILRRTLGSRYFANHRSFSSDSTPIRATLFPGDGIGPEIADSVKQIFQAADAQIEWEEHYVGTEVDPRTKSFLTWESLESVRRNKVGLKGPMATPIGKGHRSLNLTLRKELNLYANVRPCYSLNGYKTRYDNVDLITIRENTEGEYSGLEHQVVRGVVESIKIITRQASIRVAEYAFHYAKEHGRKRVSAIHKANIMQKTDGLFLKCCREVAEKYPEIVYEEVVIDNCCMMLVKNPGLFDVLVMPNLYGDIISDLCAGLIGGLGLTPSLNIGEGGIALAEAVHGSAPDIAGKNLANPTALLLSSVSMLRHLDLHDKADRIQNAILNTIAEGKYRTADLGGSSKTTEFTKAIIDHL

SEQ ID NO: 1476 - protein, 465 aa, Exiguobacterium sibiricum 255-15
MAKNMPEIGDYKYGFHDRDISIFRSGRGLTTEVVETISKMKEEPQWMLDFRLKSLKIFNEQSMPAWGGDLSDLRFDDITYYVKPSERAEKSWDEVPEEIKRTFDKLGIPEAEQKYLAGVSAQYESEVVYHNMKSELEDQGIVFKDTDTALKENEDLFREYFGKLIPPTDNKFAALNTAVWSGGSFIYVPKGVKMDTPLQAYFRINSENMGQFERTLIIVDEEASVHYVEGCTAPVYTTNSLHSAVVEIFINKNAYCRYTTIQNWANNVYNLVTKRAICEAGATMEWVDGNIGSKLTMKYPAVILKGEGSRGMTLSIAIAGKGQHQDAGAKMIHLAPNTSSTIVSKSISKHGGKVTYRGIVHFGRKATGARSNIECDTLIMDNQSTSDTIPYNEILNDNISLEHEAKVSKVSEEQLFYLMSRGISQEEATEMIVMGFIEPFTKELPMEYAVEMNRLIKFEMEGSIG

SEQ ID NO: 1477 - protein, 331 aa, Cryptococcus neoformans var. neoformans JEC21
MFSVKAVAPSISQAFTEIVPSTHRKHQAELDAMDLDEDEFGGAGPSKRSIVSPGEVITSSKEYMRGHGTYVEESNVVSSVAGTIERVNKLISVRPLRSRYTPEVGDLVIGRIVEVGAQRWRVDANGRQDAVLMLSSVNLPGGVQRRKIESDALKMREFLAEGDLLVAEVQAFFGDGAMSLHTRSLKYGKLRNGFLLTVPPQLIRRLKSHFYHIPPPCGPTGVDVILGLNGYVWVSNGTSQARREGGEGFDSEGVYSNQNDEIPPQGREAISLVANIIKALASEGVPLTETLIGESYAWAEKNVPSGSGPFDSETERKMLNEIVGLEFLEFA

SEQ ID NO: 1478 - protein, 577 aa, Robiginitalea biformata HTCC2501
MEPVKEMQKKQDEKKAMRISGAEAIIHCLLEEGADLIYGYPGGAIMPVYDELYKFQDRLHHVLTRHEQGAIHAAQGFARVSGKVGVAMATSGPGATNLVTGLADAQIDSTPLVCITGQVPRHLLGSDAFQETDIIGISTPVTKWNYQVTRAEEIPEIIAKAFYIARSGRPGPVLVDITKNAQFDSLDFSYTPCKGVRSYNPVPKADPEALQRAADLINKAKRPYIVFGQGVILGSAEAELQEFVEKTGIPAAWTILGLSAMDSDHPLNVGMVGMHGNYGPNVLTNECDVLVAIGMRFDDRVTGSLDTYAKQAKVIHLEIDPAEVGKNVKADVAVLGDARESLRQLLPLVEKRKHDQWLSEFHARDKEEFEAVIKNDLHPTKEGLTMGEVIARINEESGHKAVIVTDVGQHQMVACRYAKFRQSKSSITSGGLGTMGFALPAAIGAKMGAMDREVVAVIGDGGYQMTIQELGTIFQTKAPVKIVVLNNDFLGMVRQWQELFFDRRYASTVMTNPDFVKIAEGYHIRSRRVENRAELAEAVAEMMASEEAYFLEVRVEKEDNVFPMIPSGASVSDIRLK

SEQ ID NO: 1479 - protein, 364 aa, Shewanella oneidensis MR-1
MSYQIAVLAGDGIGPEVMAEARKVLKAVEARFGLNIEYTEYDVGGIAIDNHGCPLPEATLKGCEAADAILFGSVGGPKWEKLPPNEQPERGALLPLRGHFELFCNLRPAKLHDGLEHMSPLRSDISARGFDVLCVRELTGGIYFGKPKGRQGEGESEEAFDTMRYSRREISRIARIAFEAARGRRKKVTSVDKANVLACSVLWRQVVEEVAVDFPDVELEHIYIDNATMQLLRRPDEFDVMLCSNLFGDILSDEIAMLTGSMGLLSSASMNSTGFGLFEPAGGSAPDIAGKGIANPIAQILSAALMLRHSLKQEEAASAIERAVTKALNSGYLTGELLSSDQRHKAKTTVQMGDFIADAVKAGV

SEQ ID NO: 1480 - protein, 599 aa, Bordetella bronchiseptica RB50
MSVTDNRIGALRRAMRQHQLDAYIVPSADPHLSEYLPGRWQGRRWLSGFTGSVGTLVVTRDFAGLWVDSRYWVQAENQLAGTGVTLMKIAQASTPGHVDWLAARLPAGSRVGVDGQVLGLAAFRALSAALAPAGIHLDILSDLLQAIWPDRPGLPSAPVYELPAPHACEPRADKLARVRAAMRAQGADAHWLSTLDDIAWLFNLRGSDVEYNPVFLAHALVGPDHATLFVADGKIDAALRQALAADGVETADYGLAAEALGSLHTDQTLLIDPARVTCGVFHAMDPAVPRIEAINPSTLYKSRKSDAELASVRAAMEQDGAALCEFFAWFEGAVGREPVSELTIDERITAARSRRPGYVCPSFATIAGFNANGAMPHYRATPQAHAAIEGDGLLLIDSGGQYLGGTTDITRVVAVGAPSADQKVDFTLVLKGMIALSRASFPRGTPSPMLDAIARAPIWAGGAEYGHGTGHGVGYFLNVHEGPQVISYRAAPGPHTAMEPGMITSNEPGIYRPGRWGVRIENLVANRTWLEGELGEFLCFETLTLCPIDTRCIDATLLRADEIAWLDDYHRTVRERLAPWVEGAALQWLQARTRPLGAD

SEQ ID NO: 1481 - protein, 359 aa, Prochlorococcus marinus str. NATL2A
MKSYKITLLPGDGIGPEITNVTHKILDLVSRKFGFEIKFKEMPFGGSAIDSDGIPFPDRTLQECKNSDAVLLAAIGDPKYDELPREKRPETGLLNLRSSLDLFANIRPVKIIPSLTKASSLKEDFVKEVDLVVVRELTSGIYFGEPKGRIKTDKGERAFNTMTYTSEEVNRIAEIAFKLAKQRNQKVCSVDKANVLDVSQLWREETILVSNKYKDIELTHQYVDNAAMQLVRNPSQFDVILTGNLFGDILSDIAAMLTGSIGMLPSASLTTDGPGVFEPVHGSAPDIAGKDIANPIAMLLSAAMMLKIALNETEAATFLENAINEILNDGYRTSDLMSIQTTKQVGCSQMGELLAEKLK

SEQ ID NO: 1482 - protein, 357 aa, Solanum tuberosum
MALQIAKRLLRCRADSVASSVRFFDRTFTSESNSNLIRATLFPGDGIGPEIAESVRQIFKVAEVPIEWEEHYVGTEVDPRTNSFLTWESLESVRRNKVGLKGPMATPIGKGHRSLNLTLRKELNLYANVRPCYSLPGYKTRYDDVNLITIRENTEGEYSGLEHQVVRGVVESLKIITRQASLRVAEYAFHYAKTHGRERVSAIHKANIMQKTDGLFLKCCREVAEKYPEIKYEEVVIDNCCMMLVKNPALFDVLVMPNLYGDIISDLCAGLIGGLGLTPSCNIGEGGIALAEAVHGSAPDIAGKNLANPTALLLSSVSMLRHLELHDKADRIQDAILKTIAGGKVPNWRPWRHCYNN

SEQ ID NO: 1483 - protein, 290 aa, Pseudomonas syringae pv. syringae B728a
MSQETAYIFDATAANFDQLVIDKSFDQPVLVDFWAEWCAPCKVLMPLLQQITESYQGELLLAKVNCDIEQDIVARFGIRSLPTVVLFKDGQPVDGFAGAQPESEIRKILDQHVVMPPPPAADPLKQAQALFAESRFAEAEAQLKVLLGEDNTNGAALILYARCLAERGELSEAKAVLDAVTGDAHKAELAGAKAQLTFLAQAATLPDAAELKSRLAQNPQDDEAALQLAIQQLSRQQYEAALDGLLKLFIRNRNYAEGLPHKTLLQVFDLLGNEHPLVTAYRRKLFAALY

SEQ ID NO: 1484 - protein, 750 aa, Bacillus sp. L7
MMKWFAKLILSLSLAVVMAASSAAISFGASNSSLDTHASLVTQLDSAASEAAEGKSAMINESAINSNVTGWKLHGKGRMEVTGEGLRLTSDPQENVMAISETVADDFIYEADVMVTDPQADATLLFRSGEDGWSSYMLQLALGAGVIRLKDASGGEGVLNVERKVEAKPGDIYHLRVKAEGTRLQVYWGQQYEPVIDTEAAAHRTGRLGLHVWNGSALFQNIRVSDMSGNTLEPISSQGLWQPDLKGLKGTGEDGLEAKKVFRNHEADVVLEGDLILNGQGSAGLLFRSNAQGTEGYAAVLQGEGERVRVYLKKADGTILHESRVTYPSQRESRHHLEVKAIGERIQIFVDGYEPAAIDMVDTAFPSGYHGVMASSGIAYFQDVYITPYASYYTEKYRPQYHYSPIRGSASDPNGLVYFEGEYHLFHQDGGQWAHAVSRDLIHWKRLPIALPWNDLGHVWSGSAVADTTNASGLFGSSGGKGLIAYYTSYNPDRHNGNQKIGLAYSTDRGRTWKYSEEHPVVIENPGKTGEDPGGWDFRDPKVVRDEANNRWVMVVSGGDHIRLFTSTNLLNWTLTDQFGYGAYIRGGVWECPDLFQLPVEGSKKRKWVLMISTGANPNTQGSDAEYFIGDLTPEGKFINDNPAGTVLKTDWGKEYYASMSFSDMPDGRRIMLAWMTNWDYPFSFPTTGWKGQLSIPRQVSLKETEEGIRMHQTPIEELAQLRSPVLHITNREVGDFRRKSAQRDHIRRL

SEQ ID NO: 1485 - protein, 517 aa, Robiginitalea biformata HTCC2501
MEEPIAQRTYLVGGELLNWDGPVTEVYSTISGPGQYKPTHLGSIPDMGEKEALEALDAAMGAYARGQGAWPTMKVRDRIECMEKFVRQMEGKRERIVQLLMWEIGKSLPDSEKEFDRTVEYIYDTIEEYRELDRNSAKFDKHQGVYAHIRRGPLGVVLCLGPYNYPLNETFALLIPAIIMGNTTIFKPAKHGVLLITPLLEAFQNSFPRGVVNILFGRGRAVAAPIMQTGKVDVLALIGNSKSANALQEQHPKSNRLRLVLGLEAKNPAIVLPDADLDLSIQECLAGTLSFNGQRCTALKVVYVHEDIREEFLERFASAVDALPFGNPWDPGVKLTPLPEPGKPDYIRELIDDALEKGARILNEKGGEQTDNYIWPAVLYPVTRDMRVYREEQFGPVIPVLSFREIEEPLDDMAESNYGQQVSLFGKDVYTLAPLIDTLANLVCRVNLNSSCQRGPDVYPFTGRKDSAQSTLSVHDALRSFSIRTFVAFKDNPINVETVEQLLDTKASNFISTDYIL

SEQ ID NO: 1486 - protein, 487 aa, Physaria fendleri
MANVKLLYHYLITHFFKLCLLPLIALVASKASSLDQEDLQNLWFHLQHNILTLTILFAVLTFVSAIYFLTRPRPVYLVDYSCHLPPPHQKITVKKIVENVNKNRELDASHNSKIPESSLDFVLRLLERSGLGEETYIPDSLLNVPPIQTMAAAREETEQVIFNAIDNLLANTKVNTRDIGIIIVNSSMFNPTPSLSAMVVNKYKLRSTIKSFNIGGMGCSAGIIAIDLAKDLLQVHKNTYALVISTENLTRNMYVGNNRSMLVANCLFRLGGAAILLSNKSGERRRSKYKLLHTVRTHTGADDKSFRCVQQEDDDMGKTGVSLTKDITSVASRTITKNIATLGPLVLPISEKILFFITYIHKKFVNDKVKHYIPDFKRAIDHFCIHAGGRALIDELEKNLGLLPIDVEPSRSTLHRFGNTSSSSIWYELAYTEAKGRMKKGNKAWQIALGSGFKCNSAVWVALCDVKPSVNSPWEHCLDKYPVKLDL

SEQ ID NO: 1487 - protein, 505 aa, Robiginitalea biformata HTCC2501
MEKRRIEIMDTTLRDGEQTSGVSFTASEKLTLAKLLLEELRVDRIEVASARVSEGEFDSVRQITAWAAEKGLLPRVEVLTFVDGGASLNWMEQAGAQVQNLLTKGSLNHLKYQLKKTPEKHFSDIREVIAKAGEQGVRTNIYLEDWSNGMRNSPEYVYEFLDFLDTQPIDRIMLPDTLGVLTPGETREFLEDIIGRYPDGHIDFHGHNDYDLSVANVMEAVSAGVHGLHLTVNGMGERAGNAPLASVVAVLNDFMPEVAIGVSETSLFKVSKLVSAFTGIGIPANKPIVGDNVFTQTAGIHADGDNKKNLYFNDLMPERFGRKRKYALGKTSGKANIQKNLQELGLTLNDEELRKVTARIIELGDKKEKVTREDLPYIISDVLGSGSHQQRVFIRSYVLTHAKGLQPSTTVSLEIEGENYEAHAQGDGQFDAFMNALRKVYRSLKRPLPTLVDYAVRIPPGSNSDALCETVITWRQDDREFTTRGLDSDQTVSAIKATEKMLNIG

SEQ ID NO: 1488 - protein, 579 aa, Staphylococcus aureus
MAKIKANEALVKALQAWDIDHLYGIPGDSIDAVVDSLRTVRDQFKFYHVRHEEVASLAAAGYTKLTGKIGVALSIGGPGLIHLLNGMYDAKMDNVPQLILSGQTNSTALGTKAFQETNLQKLCEDVAVYNHQIEKGDNVFEIVNEAIRTAYEQKGVAVVICPNDLLTEKIKDTTNKPVDTSRPTVVSPKYKDIKKAVKLINKSKKPVMLIGVGAKHAKDELREFIEMAKIPVIHSLPAKTILPDDHPYSIGNLGKIGTKTSYQTMQEADLLIMVGTNYPYVDYLPKKNIKAIQIDTNPKNIGHRFNINVGIVGDSKIALHQLTENIKHVAERPFLNKTLERKAVWDKWMEQDKNNNSKPLRPERLMASINKFIKDDAVISADVGTATVWSTRYLNLGVNNKFIISSWLGTMGCGLPGAIASKIAYPNRQAIAIAGDGAFQMVMQDFATAVQYDLPLTVFVLNNKQLAFIKYEQQAAGELEYAVDFSDMDHAKFAEAAGGKGYTIKSASEVDAIVEEALAQDVPTIVDVYVDPNAAPLPGKIVNEEALGYGKWAFRSITEDKHLDLDQIPPISVAAKRFL

SEQ ID NO: 1489 - protein, 702 aa, Arabidopsis thaliana
MSGSVSGCGSGGCSIVWFRRDLRVEDNPALAAAVRAGPVIALFVWAPEEEGHYHPGRVSRWWLKNSLAQLDSSLRSLGTCLITKRSTDSVASLLDVVKSTGASQIFFNHLYDPLSLVRDHRAKDVLTAQGIAVRSFNADLLYEPWEVTDELGRPFSMFAAFWERCLSMPYDPESPLLPPKKIISGDVSKCVADPLVFEDDSEKGSNALLARAWSPGWSNGDKALTTFINGPLLEYSKNRRKADSATTSFLSPHLHFGEVAWANEGNEAGEESVNLFLKSIGLREYSRYISFNHPYSHERPLLGHLKFFPWAVDENYFKAWRQGRTGYPLVDAGMRELWATGWLHDRIRVVVSSFFVKVLQLPWRWGMKYFWDTLLDADLESDALGWQYITGTLPDSREFDRIDNPQFEGYKFDPNGEYVRRWLPELSRLPTDWIHHPWNAPESVLQAAGIELGSNYPLPIVGLDEAKARLHEALSQMWQLEAASRAAIENGSEEGLGDSAEVEEAPIEFPRDITMEETEPTRLNPNRRYEDQMVPSITSSLIRPEEDEESSLNLRNSVGDSRAEVPRNMVNTNQAQQRRAEPASNQVTAMIPEFNIRIVAESTEDSTAESSSSGRRERSGGIVPEWSPGYSEQFPSEENGIGGGSTTSSYLQNHHEILNWRRLSQTGYVKSAFGGAKGEEHHKGCNSGEIWLDCKPSTFGTV

SEQ ID NO: 1490 - protein, 429 aa, Arabidopsis thaliana
  misc_feature (337)..(337): Xaa can be any naturally occurring amino acid
MLSLITEEWPPHLASMAAETSIRKLPSLSGLRHRRNPLEDNPYFHPSNGFYITPSDVILAQVAYDHSAHSQSRVAYHRAGPRREIMYEPSAVKAAIVTCGGLCPGMNTVIRELVVGLWELYGVREIYGIPAGYRGFYSMKAVKLDPKAVHDWHKKGGTVLATSRGGFHLQKIVDAIHLNGYNQVYIIGGDGTMRGAVEIFKEISLRKLEVGITVIPKTVDNDVGIIDRSFGFQTAVEMAQEAISAAHVEAESAVNGIGLVKLMGRSTGHIALHATLSSRDVDCCLIPEMDFYLEGKGGLFEFLEKRLKERGHAVLVVAEGAGQEMIPRNESQKQERXFTVKYIYPTYMIRAVPANATDNLYCTLLAHSAIHGVMAGYTGFVPGPINGNYAYIPLEEVAQTKNQVNTRDHKWAWVRSVTNQPDFETNVKG

SEQ ID NO: 1491 - protein, 495 aa, Salmonella enterica subsp. enterica serovar Paratyphi A str.
MSRNTEATEEVGIWTGGRLNYKEGFFTQLPTDELAKGISEEVVRAISAKRNEPDWMLEFRLNAYRAWLDMDEPHWLKAHYDKLNYQDYSYYSAPSCGNCDDSCVSQPGAVQQTGANTFLSKEVEDAFEQLGVPVREGKEVAVDAIFDSVSVATTYREKLAEQGIIFCSFGEAIHDHPELVRKYLGTVVPGNDNFFAALNAAVASDGTFIYVPKGVRCPMELSTYFRINAEKTGQFERTILVADEGSYVSYIEGCSAPVRDSYQLHAAVVEVIIHKDAEVKYSTVQNWFPGDNNTGGILNFVTKRALCEGENSKMSWTQSETGSAITWKYPSCILRGDNSIGEFYSVALTSGHQQADTGTKMIHIGKNTRSTIISKGISAGHSQNSYRGLVKIMPTATNARNFTQCDSMLIGADCGAHTFPYVECRNNSAQLEHEATTSRIGEDQLFYCLQRGISEEDAISMIVNGFCKDVFSELPLEFAVEAQKLLAISLEHSVG

SEQ ID NO: 1492 - protein, 174 aa, Oryza sativa
MAAARGQKAVAALPHLVKSLRSEPVSNAPRLRHLPSLRRTFSLYDQINLIDSVPEDQLRFQSYDDTGFNINKVKYEGSLLIVENKIMTWAPKSFAEITAESLSIFKVVHPIPEILILGCGRHIQPISPELRKFIRSTGMKLEAVDSRNAASTYNILNEEGRPVAAALLPCGVTS

SEQ ID NO: 1493 - protein, 379 aa, Oryza sativa
MGAAGAMERELLEAFEAARKAADAVGEAAAAAGAGEGESPEAARCVDALRRLRGARVTTAALVSTQIGRRIRYLTKHPHSSIKATASDLLGHWKKVVIEEDKKNGALQNGKSSSTVVKVEKVEPMKVEKASPRATVNNNNMDTRVVNHKGGKVEKFSNAELRTQSIKVEKVQKVVHKVSSVEKPSPVQGGPPRLTSVVKCGDASRDRIRAILGDAFSRVSEETRKDDREEVRNIIEEVKACDPFRIAVMVECALFQKLGNFNGPNKQRYRSLMFNLKDDHNTDFRRRVLLGQVQPERIADLTPTEMASDTRKLENKKIEEKALFECERGGAPKATTDQFKCGRCGQRKTTYYQLQTRSADEPMTTFVTCVNCNNHWKFC

SEQ ID NO: 1494 - protein, 350 aa, Aspergillus oryzae
MARRALLTGGNGFIGSHILAQLLDHGCTVCCAVRTQEKGDKILRDFATQQSQITITIVPDIVAPGAYDTAVQGTPAFDAVYHTASPFTYANAGSNLQFLEPAIKGTLNLLKAVKDNAPSVKRVIWTGSCASVIDYDNLVADPPRIYTEADWNPVTWEEAVNGDPSKAYRGSKLFAEREAWQFMKEEQPHFDLVTLSPPATFGPLRHSITSIGELNESNSRLWKFCFSSTKDAPVPYMPVHTYVDVRDLAYAQFRAMIVPEAGNQRFVVCARQFDFQDVCDILRSHHPELSERTPLGKPGTRSLPPGAYSIDNSKVKKFLGVEFRSLEETVLDAARCMLDIERNEKQALST

SEQ ID NO: 1495 - protein, 299 aa, Arabidopsis thaliana
MASSSDHTAKIIDGKAIAHTIRSEIAEEVRGLSEKHGKVPGLAVVIVGSRKDSQTYVNTKRKACAEVGIKSFDVGLPEEVSEADLISKVHELNSNPDVHGILVQLPLPKHINEENILGAISIDKDVDGFHPLNIGKLAMKGREPLFLPCTPKGCLELLARSGVKIKGQRAVVVGRSNIVGLPVSLLLLKADATVTTVHSHTKDPEAIIREADIVIAACGQAHMIKGNWIKPGAAVIDVGTNAVSDPSKKSGYRLVGDVDFAEASKVAGFITPVPGGVGPMTVAMLLRNTVDGAKRVFGE

SEQ ID NO: 1496 - protein, 86 aa, Triticum aestivum
  misc_feature (4)..(4): Xaa can be any naturally occurring amino acid
  misc_feature (19)..(19): Xaa can be any naturally occurring amino acid
  misc_feature (23)..(23): Xaa can be any naturally occurring amino acid
  misc_feature (28)..(29): Xaa can be any naturally occurring amino acid
  misc_feature (60)..(60): Xaa can be any naturally occurring amino acid
  misc_feature (67)..(67): Xaa can be any naturally occurring amino acid
  misc_feature (75)..(75): Xaa can be any naturally occurring amino acid
  misc_feature (79)..(79): Xaa can be any naturally occurring amino acid
PCIXYAMGKVSAPGGGCCXGVRXLNAAXXPTPADRKTTCTCLKASRRSGIGGIKPNLVAXIPGKCGXVNIPYCHXPKGXRLLQRCR

SEQ ID NO: 1497 - protein, 483 aa, Methanosarcina acetivorans C2A
MRDGEQTPGVALTREKKLLIARALDEMRINVIEAGSAITSAGERESIKAVANAGLDAEICSYCRIVKMDVDHALECDVDSIHLVAPVSDLHIKTKIKKDRDTVRQIAAEVTEYAKDHGLIVELSGEDASRADPEFLKAIYSDGIDAGADRLCFCDTVGLLVPEKTTEIFRDLSSSLKAPISIHCHNDFGLATANTVAALAAGAKQSHVTINGLGERAGNASLEEVVMSLEWLYKYDTGIKHEQIYRTSRLVSRLTGIPVSPNKALVGGNAFTHEAGIHVHGLLADKSTYEPMSPEYIGRQRQIVLGKHAGRSSITLALKEMGLEADEAQTEEIFNRVKQMGDQGKHITDADLQTIAETVLDIYKEPIVKLEEFTIVSGNRVTPTASIKLNVKDKEIVQAGIGNGPVDAVINAIRRAVSSCAEDVVLEEYHVDSITGGTDALVEVRVKLSKNGKVITASGARTDIIMASVEAVMNGMNRLIREE

SEQ ID NO: 1498 - protein, 499 aa, Triticum aestivum
  misc_feature (124)..(124): Xaa can be any naturally occurring amino acid
MYRAAGSHLRSLKNHGASRFASTSVVKQSSGGLFSWLLGGGSSQLPPLDVPLPGITIPPPLPDFVEQSKTKITTLPNGIKIASETSPGAAASVGLYIDCGSIYETPASSGASHLLERMAFRSTXNRSHLRLVREVEAIGGNVSASASREQMSYTYDALKSYAPEMVEVLVDSVRNPAFLEWEVKEQLQKIKSEISEVSSNPQGLLLEALHSAGYSGALAKPLMATESAIRRLDISTLEEFIHENYTAPRMVLAASGLEHDELVSIAEPLLSDLPGVKRHEEPKSVYVGGDYRCQADSPNTHIALAFEVPGGWRQEKTAMIVTVLQMLMGGGGSFSVGGPGKGMHSRLYLRVLNKYDQIESFSAFNSIYNDSGLFGIHAATSPDFASTAVDLAAGELLEVATPGKVTQEQLDRAKEATKAAVLMNLESRIVASEDIGRQVLTYGQRKPVEYFVRAVEATTLNDISTVAQKIISSPLTLASWGDVIHVPSYESVSRKFLSK

SEQ ID NO: 1499 - protein, 426 aa, Exiguobacterium sibiricum 255-15
MMTVELNLAVNREAVAERATRLGEPAWMITKRQDALDLAPTLALPKVEKIKIGGWNFTEGTADLETVTGLTPDIESLIGENRDHMLITRNGQLVHAQNSEATNGVIFTTLEDAMKHHPELVEKYFMTEGVNVNEDRLAALNAALMNGGTFLYVPKGLKLTVPMQAIYTLEQTGGALYHHAIIIADADSELTYIENFVSYGEGAHNVNVVTEVFVEDNAKVLFGGVDTLAKGAVTYMNRRGVVKQGAKLEWALGHMNDGHTITETKTHLVGNDSFSDTKAVTVGRGEQKQNFNVRTDHFGKGSEGFILIHGVQKDSATSIFNGTSMIHHGASKSNGVQTERVLMLSEKARGDANPILLIDEDDVMAGHAASVGRVDELQLYYLMSRGLSRKEAERLVVHGFLQPVVSELAIDSVKERLVQVIEGKVN

SEQ ID NO: 1500 - protein, 522 aa, Shewanella oneidensis MR-1
MSNRVIIFDTTLRDGEQALAASLSVKEKLQIAMALERLGVDVMEVGFPVSSPGDFESVQTIARTIKNSRVCALSRALEKDIDAAAQALSVAEQFRIHTFISTSTIHVESKLKRSFEQVLEMAVGAVKYARRFTDDVEFSCEDAGRTPIDNLCRMVEAAIHAGARTINIPDTVGYTVPSEFGSIIQTLFNRVPNIDQAIISVHCHDDLGLSVANSITAVQHGARQIECTMNGIGERAGNCSLEEIAMILATRKNLLGFETGINAKEIHRTSNLVSQLCNMPIQSNKAIVGANAFTHSSGIHQDGMLKAQNTYEIMTPESIGLNRNNLNMTSRSGRHVIKHRMEEMGYSSQDYNLDALYEQFLHLADKKGQVFDYDLEALAFIEAQAAEDNFYQLRQLVVQSDSTEGVATATVRIEVGGEIKTEAATGNGPVDAAYNAIARATDRRIDIISYKLGAKGVGQDALGQVDITAVYHEQNFHGVGLATDVVEASARALVHVMNLTCRADKVADYKQNMHKNRELGGV

SEQ ID NO: 1501 - protein, 143 aa, Hordeum vulgare subsp. vulgare
MEYQGQTGHATTDKVEDYGQPVAGHGGATGGPTGTHGAAAAAAGTGQLQPTRDDHKTDGVLRRSGSSSSSSSEDDGVGGRRKKGMKEKIKEKLPGGAHKDAAGQQHTPAAGEYAGTGTHGAEATGEKKGVMDKIKEKLPGGQH

SEQ ID NO: 1502 - protein, 303 aa, Aspergillus nidulans FGSC A4
MGPDRAGKSVFLGNIPYRSLLADTLCLDLTEEQVKDILSTAGTVTKFRLMMNPETGKPKGYGFADFADADAAASAVRNLNDYEIMGRKIRVDWPHNNEKDSVPEDYSQPSQMPGQDGQLGGPPLSAPLPPLPPGVELPPHLDCPNAISQTLAALPPNQLLDVLQQMKALAMSDPARATELLRQAPQLAYAIFQALLLLNLVDYSTLGAVVEQAAQPMAPPPAPPAAAAFQPFGAVPGQVSTPPMVNTPFAQPPPQPTQQQVPGQEELLQQVLNMPQSAIDALPPMERSQIMLLRQQLMQGGLR

SEQ ID NO: 1503 - protein, 505 aa, Mesorhizobium sp. BNC1
MTISYDKVREVASTLRFPAQAFINGELCWAEDGDKFDTVNPATGEVLCSVAHCKKEDVDKAVIAARRSFNDGEWSRAEPEHRKEVLTRLSHLIRENAFELAVLESLDSGKTITDCLKEIGTEVANFFQWYGELIDKSFGKVAPTGESALALIVKEPAGVVGIIVPWNFPLLMTAWKVAPALAAGCSCIVKPAEQTPLSAIRMAELAQQAGLPDGVLNILPGLGETAGQAIGRHNDVDIISFTGSTEVGGFFLRYSGESNLKVVGLEMGGKSPFIVLDDADLNDDLVEHAVSSAFWNGGQNCSANMRQLVDTRVADEFVERVVARAEKYKVGDPLDPSTDIGAMVTEEHMKRVVGYIERGESEGARRLTGGARQGRGYFIEPTVFSGLRPEMTIAREEIFGPVLGVMPVKGLDDALRIASDTIYGLHATVFTRDLDRALHLARRLPCGTVSVNGFSEGDIKTPFGGYKQSGSLSRDNGTEAMDQYLQTKTIWITLRGPSNRGSIAG

SEQ ID NO: 1504 - protein, 567 aa, Cryptococcus neoformans var. neoformans JEC21
MSAGPAQPNIYAPIRTSHSGYPSPTHSGSSTPASLEFSDGRLPESNVERDMSKVAERVALLGEVDDGAVIVEGEDKITKFVWTLVLAAAISGLLFGYDTAAISGMLVIIKDDLGTILSSWQKEAITSATTLGALLGGLAAGCISDFTGRRLVIVFANVAFIGGSICQAACHTVAVMIAGRFIVGLGVGLASCIVPLYIGELAPTMIRGRLVTINCVAITLGQVVAYAIGASFQNAHNGWRWIVGLGAMPSFVQLASIGFLPESPRILLLRSDVAGARAITAKIYPLAKVEQVDRKVEIMKAAVDQSIEYNANSTWFERLKSLVMVGTNRRALIIGCGLQAAQQLCGFNTLMYYSATIFAMLGFKNATAVGLIVATVNVLFTLVALKIVDPVGRRRTMLFTLPIMTLALVLAAIFFYYLTLSTNGILIEDHDYPRSLSIPVLLSMLLYVAGYATGLGNIPWQQGELFRLEVRGIGTSICTAVNWSCNMLIASTFLSLMDAATPSGAFGIYAGFCVIGWLFCWMLYPETSGLSLEEVYFVFEEGFGIEKSQQLRKQKLEESAKLKAIFE

SEQ ID NO: 1505 - protein, 584 aa, Cryptococcus neoformans var. neoformans JEC21
MSDAVALKAEANKAFAAKDYTTAAKLYSDAIALDPSNHVLYSNRSATKAGLKDYEGALEDAEKTIELDPSFSKGYARKGAALHGLRRFPDAVMAYESGLQAEPNNAACVKGLSEVKRAMDTDSSSPFAPGGDMGLGKIFSDPSMISKLENHPKTSALMKDATFRANMLQLQASGGRNMSTLMGDPRTLTALGVLMGIDIDAMERPEGSNEYPPSSSSAPEPTPAPAPKAEEPKKQPAPVPEPEAEPMEVEEDEEAKAKKEAEEFKAQGNTSYKARKFDEAIEFYSKAWDLYPKDVTFLTNLSAVYFEQGEYQKCIETCEKAVEEGRDLRADYKVFAKAYGRIGSSYSKLGDLAQAIKFFQKSLTEHRTPDILTKLREAEKAKAEADRQAYIDPEKAEKAREEGNEAFKKGDFAGAQKHYSEAIKRLPTDPRAYNNRAACYTKLLALPEALKDAETAISIDPTFIKAYIRKALVQEGMKEYTAALETLQKATEADVEKKHTRELETNMMKVMNEIQQQRSSETEEETYARAMRDPEVAEIMNDPIMRQILSDAQQNPRALNDHMKNPMIAQKIQKLINAGIIRTR

SEQ ID NO: 1506 - protein, 553 aa, Saccharophagus degradans 2-40
MLAQPAQKYRPFKGAQLADRQWPNRTIEKPPIWMSTDLRDGNQALIDPMSVETKLTFFKEIVAMNFKEIEIGFPSASDTDFQFTRRLIDEGHIPEDVTIEVLVQARKELIERTVESVRGAKRVIIHMYNPTAPSFRSIVYKTDKAGVKNIAVQGTKWVMEATAKAPEVEWVYQYSPEVFSGTEIEFSKEVVDAVSATWQPTPENKMIINLPATVEMGTPNTYADQIEWMHRYIERRDSIVLSVHPHNDRGTAVAAAELAVMAGADRVEGCLFGNGERTGNVDLVTLALNLYTQGVHPGLDFSDIDKVRKLVETCNQIPVHPRHPYAGELVFTAFSGSHQDAIKKGFAQRKDGEIWEVPYLPIDPKDLNRDYDAVVRVNSQSGKGGVSFLLQQKAGLELPRRLQIEFSGIVQKINDETGKEMTAAQIVDVFQQEYFGATQGFEYVACHVSDSKTIAEGMQVEVELVKQGEAFTVVGEGSGPIDAAVTAINKVVPAGVSVVDYHEHAVREGADGEAVCYVELKVGNGRPVFGVGRHKNIVVAAVRAMVGGVNRAS

SEQ ID NO: 1507 - protein, 375 aa, Neurospora crassa
MEEEVAALVIDNGSGMCKAGFAGDDAPRAVFPSIVGRPRYHGIMIGMGQKDSYVGDEAQSKRGILTLRYPIEHGVVTNWDDMEKIWHHTFYNELRVAPEEHPVLLTEAPINPKSNREKMTQIVFETFNAPAFYVSIQAVLSLYASGRTTGIVLDSGDGVTHVVPIYEGFALPHAISRVDMAGRDLTDYLMKILAERGYTFSTTAEREIVRDIKEKLCYVALDFEQEIQTAAQSSSLEKSYELPDGQVITIGNERFRAPKALFQPSVLGLESGGIHVTTFNSIMKCDVDVRKDLYGNIVMSGGTTMYPGLSDRMQKEITALAPSSMKVKIIAPPERKYSVWIGGSILASLSTFQQMWISKQEYDESGPSIVHRKCF

SEQ ID NO: 1508 - protein, 79 aa, Brassica napus
  misc_feature (76)..(76): Xaa can be any naturally occurring amino acid
MSSKKVEGSSAPANRRDPYEVLCVARDASDQEIKSAYRKLALKYHPDKNANNPEASDLFKEVAFSYSILSDPEKRXQYD

SEQ ID NO: 1509 - protein, 88 aa, Magnetospirillum magnetotacticum MS-1
MHGLTVTEVKGYGRQKGHTEIYRGAEYAVSFLPKLKIEVAVASDLVTSVIDTIAGAARTGQIGDGKIFVMPLEKAVRIRTGETDADAL

SEQ ID NO: 1510 - protein, 266 aa, Oryza sativa (japonica cultivar-group)
MARRLWHVVRAVLFMLRKGMSKRKLAMDLHLLLHRGKIAGNKALGKIMNTTTATASHGHGHAADAASTAAGEAAAAAPFSCGRALDPALAVYDPRGAGLEVEFSCSNTPSYPSSFHLIPTKRRRRNNNGSNGRRRGGGGRGANGGEPGWYNYDAADIARVFEILNSSDQLLGDGGAAVAATPSPALWRTSFGGRSPAPVRQLRITDSPFPIRDDGGEDAGAGLVDLEAEEFINKFYEQLRTQQQSLATATPDYYAGYSRPVTGVAY

SEQ ID NO: 1511 - protein, 630 aa, Magnetococcus sp. MC-1
MCGLSAILDLTGQRLPEAEQLTAMTRALAHRGPDGEGMHREPGVGLGHRRLSIIDLAGGAQPLWNEDRSVAVVFNGEIYNFPDLMQRLQGLGHQFHSRSDTEVIVHAWEQWGEQCVEALQGMFAFALWDRCQGVLFVARDRLGIKPLYYGFSEDGWLLVGSELKALTAHPGLSRSLDPKGVMDYFAYGYIPDPHSIYRQVKKLEPGYCARFTLGSGDWRLRCYWDLSFAAQPLTEAAALQQLQELLGQTVQSHTLADVPLGAFLSGGVDSSLITALLAKQSQTPLQALTVAFTGSREDEAPHARAVAQHLGVQQQLLTVDPLDFERLERLPGLYDEPFADSSAWPTFLLCEAAASRMKVVLSGDGGDELCAGYSRYRLFMAEQQVRQRVPSWLRRGLFGPMGMLYPKLDNAPRWLRAKSTLQALGEGPLEGLFRGASMMDPAMGQGLLAPDLMLLDYHPIEHFYRLNARLPEQVAFHDRMLYLDFKTFLAGRVLTKVDRASMAVGLEVRVPLLDHRLVEWAGRLPWCLKMQGGQGKYLLKKLAAQQVPATAVYRSKQGFIPPLAAWLRGPLQERLQDRLSSRVITESGLFHPRWIHWMLEQHRKKKQDLSMPLWSLLMFEGMLRKAQNKG

SEQ ID NO: 1512 - protein, 248 aa, Glycine max
ACRRQNKTFPRVGLVFDLTQDSRRFYPDFLPGRHRRRSSFAERGSGRFFRTSGGGVAFSASAAAGRKAAAVENALPCSLEDLYKGVKKKMKISRNVYDAFGKCGDVEEILTIEIKPGWKKGTKITFPEKGNREPGVIPADLIFVIDEKPHALYRRDGNDLVINQEITLLEALTGKTLDLTTLDGRSLMIPLTDIVRPGAEVVVPNEGMPISKEPGRKGNLRIKLDVKYPSRLTPEQKSDLRRVLGGIS

SEQ ID NO: 1513 - protein, 590 aa, Zea mays
MAMAMARPCAFLLFFLVLFSYDGSGPGSSRRTRRSGVAQATQRVFLYPQAPKVSSIVSSKYRTAYHFQPPKNWINDPNGPMYYNGIYHQFYQYNPNGSLWGNIVWAHSVSTDLVNWIRLAPAIERTTPSDINGCWTGSATILKSGRPAIIYTGADTEKRQVQNVAFPKNLSDPYLREWVKPHDNPVIQPVGRGLNPGQFRDPTTGWIGPDGLWRIAVGAEVDGHSAALLYESEDFVRWDRVDHPLYSSNASAMWECPDFFAAMPGENSGLDMSAAVPDGAKHVLKMSLDGSDKYMVGVYDLKGDAFVPDTVIEDRRLWSRIDYGNYYASKSFFDSKKGRRVIWGWTNETDSSSDDVAKGWAGIHAIPRTIWLDKDSKQLLQWPVEEIESLRGKQVRHQGLELRKGDLFEIKEIDTLQADVEIDFELTSIGSADPFDPSWLLDIEKQCREAGASAHGPFGLVVLASESMEEHTSVHFRVYYRSQEKHMVLMCADLRKSSLRPELYTPAYGGFFELDLEKEKTVVSLRTLIDRSAVESFGGGGRVCIMARVYPAALVDDGGTRMYAFNNGTSTVRVPRLEAWSMRRAQVNKG

SEQ ID NO: 1514 - protein, 292 aa, Kineococcus radiotolerans SRS30216
MPTPPTGPVVVLTGATSGLGCLAALDLAARGAHLILPARDPDRAQATVDAVRARNPSARTEVVEVDLTRLHQVRAAGRRIAQQHEHVDVLVNNAGVHAFTPRTTVDGLPQMVAVNYLAPWVLTQALLPALRRSAAARVVTVASEASRRHGTLSLPDDLTDLSPFTARGSSPRYGKTKLLDIMFTLELAERLRGTSVVANCLDPGFNVTGLGRDLRLARPLELLLTRLRIGDPRRGAGLIVHLATHPSYGNVSGRYVTVRGPREITPAAPADDPAARRRLWNVTEELLHERVP

SEQ ID NO: 1515 - protein, 466 aa, Vibrio angustum S14
MALHEVTRKTGNDPIYGSDTIHNVAATTKLPQQEQAPNVIYQMIRDELYLDGNARQNLATFCQTWEEDEVHKLMDLSIDKNMIDKDEYPQSAEIEGRCVHILADLWNSPESVTTVGTSTTGSSEACMLGGLAALWRWREKRRALGQPTDKPNMVCGPVQVCWEKFARYWDIEMRETKMADGHYCMTPEDMLELVDANTIMVVPTFGQTFTGLYERVKPLSDALDTYEHDTGNSIDIHVDGASGAMLAPFCAPEIDPWDFRLERVKSISTSGHKFGLAPLGCGWVVWRSKEDLPEGLVFHVNYLGGDMPTFALNFSRPAGQIIAQYYNFLRLGYEGYKRIHDASYDVCEYLVKELNKFNLFEFLFDGNREKGIPAISWRLKNDADVSFSLYDLADRLRTRGWLVPAYSLPANAQVLVVQRILVKQGLTIDLANLLIADFKRSIDFLNTHAQAKCTAEDVKTFDHSGR

SEQ ID NO: 1516 - protein, 758 aa, Synechococcus sp. CC9605
MGCALPEVRRHPIRHPDDYGIALPEWLRECIANVPPGIGQSCPTDAEALLVSAFDFGFQLHEGQFRASGDPYIVHPVAVADLLRDIGASAPVIAAGFLHDVVEDTDVTPDQIELHFGSEVRELVEGVTKLGGIHFNDRTEAQAENLRRMFLAMASDIRVVLVKLADRLHNMRTLGALKEEKRQRIARETREIYAPLANRLGIGRFKWELEDLAFKLLEPEAFREIQEEVATKRSEREQRLGVTVGLLNERLERAGLDHCEVSGRPKHLFGIWSKMQRQQKEFHEIYDVAALRILTPNVESCYRALAVVHDTFRPIPGRFKDYIGLPKPNGYQSLHTAVIGRHRPIEVQIRTLEMHHVAEFGIAAHWKYKEGGSPASSSSDAERFNWLRQLVDWQQEGGNDDHNDYLSSIKEDLFDEEVFVFTPKGDVLGLRKGATAVDFAYRIHSEVGNHCHGVRINDRLCPLPTPLQNGDFVRVLTSKTAHPSLDWLNFVATPTARNRIRQWYKRSHRDETIERGKDLLERELGRDGFDALLNSEAMQRVAQRCNVPTTEDLLASLGFGDVTLQQALNRLREEMRLLAEQQQAPPSNEDVAAALVPSRDPAADRSVGAGAILGLEGLDYRLGGCCSPLPGELIVGTVALGNHGITIHRQDCSNVETIPRERRLPVRWNTAHAEQEKQRFPVQLRIEVIDRVGILKDILLRLSDGAINVSDARVTTAAGKPARIDLRVELEGADQLSRTMDQIRSMADVIGIARVGTS

SEQ ID NO: 1517 - protein, 410 aa, Burkholderia vietnamiensis G4
MSRRRVVVTGLGLISPVGNNVADGWANLVAGKSGIATVTKFDASNLACHFAGEVKGFNVEEYIPAKEARGMDTFIHYGIAAGVQAIRDSGLEVNEANAERIGVLVGSGIGGLPMIEDTHQTYVDRGPRRISPFFVPGSIINMISGHLSIMFGLKGPNLAAVTACTTGLHSIGLAARLIQAGDADVMVAGGAESTVSPLGIGGFAAARALSTRNDDPATASRPWDKDRDGFVLGEGSGVMVLEEYEAAKARGAKIYAEVSGFGMTGDAYHMTAPNMDGPRRCMVAALRDAGVNPDEVQYLNAHGTSTQLGDKNESDAVKAAFGEHAYKLAVNSTKSMTGHLLGGAGGLESVFTVLALHNNVSPPTINIFNQDPECDLDYCANTARDLKIDVAVKNNFGFGGTNGTLVFKRV

SEQ ID NO: 1518 - protein, 304 aa, Kineococcus radiotolerans SRS30216
MNANWTARHVPDQSGRVAVVTGANTGLGLETARTLAERGATVVLAVRDVDKGARAAAGLTGNAPGNVVVQRLDLSSLESIRAAASALRDAHPRIDLLVNNAGVMYTPRQTTRDGFERQFGTNHLGHFALTGLLLERMLPVPGSRVVTVSSTGHRIRAAIRFDDLQGERSYSRAAAYGQSKLANLMFTYELQRRLAAHGTTTVAVAAHPGVANTELVRNSPAAVRAAVDRLAPLLTQPAAMGALPTLRAATDPSVLGGQYYGPGGRGEVRGYPRLVTSSPQSYDLADQRRLWAVSQELTGVEFPL

SEQ ID NO: 1519 - protein, 825 aa, Glycine max
MALTEFFHGEISSELWKMLVSISRKALRCKSSAESLITYVRELLPTIEEIKYSGVELPAPRQSQLDRLSEILRSGVELSHQALSSSRWNVYRNFQLAKKMEKLEKHVTRFLQVPMQAHILADVNHVRFEMAERFDRVEASNRRMERLIGEMKIGVNGGGWVEEAVRSMQEDETWVEGCNGNNNNGFGVGLEFGKNKVLEMIFTRSGDVSVVGICGIGGSGKTTLAREVCRDDQVRCYFKERILFLTVSQSPNVEQLRESIWVHIMGNQGLNGNYAVPQWMPQFECKVETQVLVVLDDVWSLSVLDKLVLKIPGCKFLVVSRFNFPTIFNATYHVELLGEHDALSLFCHHAFGQKSIPMGANVSLVKQVVAECGRLPLALKVIGASLRDQNEMFWLSVKSRLSQGQSIGETYETNLIDRMAISTNYLPEKIKECFLDLCSFPEDRKIPLEVLINMWVEIYDIDEAEAYAIVVELSNKNLLTLVQEARVGGMYSSCFEISVTQHDILRDLALHLSNRGSIHQHRRLVMATRKENGLLPKEWSRYEDQPFEAQIVSINTGEMTKMDWFDLDFPKAEVLIINFTSTEYFLPPFINKMPNLRALIIINHSTSHARLQNVSVFRNLTNLKSLWLEKVSIPQLSGTVLQNLGKLFVVLCKINNSLDGKQFPNLSELTLDHCVDLTQFPSSICGIKSLQNLSLTNCHSLSQLPVEFGKLRSLEILRLYACPYLETLPPSMCDMKRLKYIDISQCVNLTCFPEEIGRLVCLEKIDMRECPMIRYLPKSAVSLQSLQLVICDEEVQDMWSDVEMSNSNVLIQVAEQHYDLDWLQE

SEQ ID NO: 1520 - protein, 367 aa, Carica papaya
MAMIPSISKLLFVAICLFVHMSVSFGDFSIVGYSQDDLTSTERLIQLFNSWMLNHNKFYENVDEKLYRFEIFKDNLNYIDETNKKNNSYRLGLNEFADLSNDEFNEKYVGSLIDATIEQSYDEEFINEDIVNLPENVDWRKKGAVTPVRHQGSCGSCWAFSAVATVEGINKIRTGKLVELSEQELVDCERRSHGCKGGYPPYALEYVAKNGIHLRSKYPYKAKQGTCRAKQVGGPIVKTSGVGRVQPNNEGNLLNAIAKQPVSVVVESKGRPFQLYKGGIFEGPCGTKVDHAVTAVGYGKSGGKGYILIKNSWGTAWGEKGYIRIKRAPGNSPGVCGLYKSSYYPIKNRDNGRIQIRPSSQHLTSHE

SEQ ID NO: 1521 - protein, 85 aa, Arabidopsis thaliana
  misc_feature (2)..(2): Xaa can be any naturally occurring amino acid
  misc_feature (9)..(9): Xaa can be any naturally occurring amino acid
  misc_feature (37)..(37): Xaa can be any naturally occurring amino acid
  misc_feature (44)..(44): Xaa can be any naturally occurring amino acid
  misc_feature (57)..(57): Xaa can be any naturally occurring amino acid
  misc_feature (62)..(62): Xaa can be any naturally occurring amino acid
  misc_feature (68)..(69): Xaa can be any naturally occurring amino acid
  misc_feature (74)..(74): Xaa can be any naturally occurring amino acid
  misc_feature (80)..(81): Xaa can be any naturally occurring amino acid
MXSSMLSSXAVVTSPAQATMVAPFTGLKSSAAFPVTXKTNKDIXSIASNGGRVSCMXVWPPXGRKKFXXLSYLXPDLSDXXIGLR

SEQ ID NO: 1522 - protein, 166 aa, Zea mays
MNALAATTRNFRRASKLLGLDSKLEQSLLIPFREIKVECTIPKDDGSLATFVGFRVQHDNARGPMKGGIRYHNEVDPDEVNALAQLMTWKTAVAAVPYGGAKGGIGCSPGELSRSELERLTRVFTQKIHDLIGTHTDVPAPDMGTNAQTMAWMLDEYSKFHGHSPA

SEQ ID NO: 1523 - protein, 489 aa, Treponema denticola ATCC 35405
MITLRNISFSYNGTKENNLCDISLHIPKGQCVLLCGASGCGKTTLTRLINGLIPHFFEGEFSGEAIINGMNSEEADIAQLSDSVGTVFQNPRTQFFNTDTDSEIVFGLENRGLPPEQLLSRLEKVTEDLQIQNLRERSIFELSGGEKQKIAFASVYAAAPDIFVLDEPSSNMDYHSIKELSELIKKIKLQGKTIIIAEHRIWYLMDIADRVIFMENGKIAHDMDIKTFVDLPEAQIKSMKLRCRNLADVKAETVNVSPDVSVSFGGHTFAVKDITVKLGHTSVLQDISFSTTGGEIIAITGENGAGKTTLARTLCGLTQEAAGSISFDGNPLSRKMRRERSYMVMQDVGHQLFTDSVYAECRLGIKDLPDPAIDEVLTELSLNRLKERHPLSLSGGQKQRLAVAVSVLCGKDILIFDEPTSGLDLKSMQEAGRIIKRLADDKKTVIVITHDIEFIKTICSRVLILSGGKIVKELCGEKKNELEMQLETF

SEQ ID NO: 1524 - protein, 300 aa, Debaryomyces hansenii CBS767
MTLKHPAILIRDPLQYNYEEFFSIVLEDLRKGNPSLSTIDIIISQYIHNSNDLNSCLSKIYNGLRSKVSELGWDYSFEIDVIFNQKSYRCLCEQLSRVFYVCDEESAIPKELTGVETKSINTKLEKKNQPTTGSKCRKYQEYPVTAVGGTFDHLHDGHKILLSLAVFLTSRTVIIGITGPKLLVNKKYSETLESYERRQLRVIGYLQKVLNDGIKFEIFQINDVCGPTGYIKDINSLAVSEESSKGGGFVNKTRREKGYSELDVIVINVIGDQNSNEQNNWLGKLSSTDIRKQEYEKHYK

SEQ ID NO: 1525 - protein, 925 aa, Robiginitalea biformata HTCC2501
MKKTLHLLLFCLLSQLTGAQDFQFRAADIEIPYEKFVLPNGLTLLVYEDHKAPIVAVNVWYHVGSKNEKPGKSGFAHLFEHLMFNGSENYNQDYFQALESIGGTDLNGTTSNDRTNYFQNVPVSALDQVLFLESDRMGHLLGAIDQERLDEQRGVVQNEKRQGENQPYGMQWDYLTKAMFPKGHPYSWTVIGEMEDLNAASLEDVQEWFKSYYGPANAVIAIAGDVEPEEVRQKVMRYFGDIPSGPTIERQEVNIPLHPYDSYQVYQDRVPETRVLFAWNTPPFGDREDIHFDLIAAILSNGKNSRLYKRLVYEDQIASSVAAFEWSKELASNFIALANVKPGGDREQVQQVMWEEISRLMEEGPTQEELVRVKADYFAGFIKGMERIGGFGGVSDILASNQTYFGDASYYKKVLQYVEEATVADVQATAKKWLSKGKHILVCEPFPEYEVADSGADRSQLPPLGPPKSSRFPELQRAELSNGLKIVLAQRSGVPTIVMNMLFDAGYKTDFRSSPGTASLAMNLMDEGTENMNSLEISEKLQLLGASLSTGSNQDISNVYMNTLKPTLQGSLEVFADVLLNPAFPQKEFNRLQTEQINDIKSEKSQPVAMALRVMNKFLYGEGHPYSNPYTGTGYESTVAALTREDAREFYDTWIKPNNATLVVTGDVSMAELRPMLEKSLGKWRRGQVPEISFPEPKTGTKNTLYLMDRPESQQSVIIAGNLTEKYGDLPEVALGQMVSILGGDFTSRINMNLREDKHWSYGAGGFVLGARNERPFIVYAPVQTDKTAESVSEIRKELSEFVSTRPATAAELEKVKTNEVLKLPGQWETNAAVAGSVANMVRYDLPDDYYQQYDANVRNLSLDDVRSVSNTVVRPADVNWFMVGDRAKIVEKLDGLGFDQIIEIDADGNPKTPALKQTEVEIKN

SEQ ID NO: 1526 - protein, 197 aa, Triticum aestivum
MAARKLIFGLTAARRASSRAPVLLRASPLLEASTSASHTTAAATKPSGGSPWALLFSSRVFSSTPPAQQSAGDVPAPSAVDHKLIMPEDKFHKLADDTIHDLLEKLEEYGDSQQMDGFDIDYGNQVLTLRLGDLGTYVVNKQTPNRQIWLSSPVSGPARFDWDAATDSWIYRRTGVNLMRLLEKEIGELCGTPVDLS

SEQ ID NO: 1527 - protein, 763 aa, Zymomonas mobilis
  misc_feature (463)..(463): Xaa can be any naturally occurring amino acid
  misc_feature (467)..(467): Xaa can be any naturally occurring amino acid
MAETTTAEAKKNAGDAPLIDLNETSIRKFITQPKKTEYVTYDQLNEALPQDQDVFGTDRKYNVCPFVNGHQYRKNEDSGQDGQQEEENAAKKLQGQRWHFSGSGHYDQRKKHPTEQMIRCVCISAKWVRSSFWSREGEIAIAKRIEAGRDTMILGLCESPITFDNIIEWSNALNEGTLQLREIIDLDAMLTQGPSPDQFEEDGDDNDNEISERNAGPTFKEDDDEDDDSEGELDENGQRIQRENMDEEDENTLSLAQMEEQLKPASLEKFAKIADLYRQFSVLQNARMRALGANEEFPEDQENAYQQLREELTAEVESVKFHNARIEFLVEQLYNYNSRLRTLNGQMLRLAERYKVPRDSFLNAYLGNEMEEGWVERVFKNRQKMGNFTTSEAESIERIRSEVAEIAQVTGMTVKELRRIVTMVQKGRKRSPHSLKPEWLKPICVWLSLLPKNIPIAVCSSLXLFRXAISGLMKAVGKFEYRRGYKFSTYATWWIRQAITRSIADQARTIRIPVHMIETINKLVRTSRQILHEIGREPTPEELAERLSMPLEKVRKVMKIAKEPISLETPIGDEEDSHLGDFIEDKNAIIPVDAAIQANLKETVTRVLASLTPREERVLRMRFGIGMNTDHTLEEVGQQFSVTRERIRQIEAKALRKLKHPSRSRKMRSFPRPLENTAFSALSIKKPFETRCFSGVSKGFFDFRRRADDGGSLRLPIYESGLMFQPYPDQRSYGRLLTGDNKHEQKGASFLRRSSEFYALHHP

SEQ ID NO: 1528 - protein, 497 aa, Bordetella bronchiseptica RB50
MSEVHRLPLLIGGKLVQSKTTQWRDVINPATQEVVAQVPFATREELDLAVANAKEAFKTWRNTGQGARMRVMLKLQQLLRDNTGKLAEMITREHGKTLPDAEGEVGRGLEVVEHACSIANLQLGEYAENAAGGIDVYTLIQPLGVCAGITAFNFPVMLPCFMFPIAVACGNTFVLKPSEQDPSSSLFLAQLALEAGLPPGVLNVVHGGPDIANGLCEHPDIKAVSFIGSTRVGTEIYNRASAAGKRCQSMMGAKNHCVILPDADPEVALNQLVGAAFGAAGQRCMATSVAVMVGEARNWLPDFVERARKLKVNNGVDREADLGPLVSPAAKQRVEGLIQKGVDEGAKLLLDGRSLKVAGFEQGNFVGPTIFDGVTENMTIYTEEVFGPVLCVVGVDTLEDAVEFINRNPNGNGVALFTQDGGAARYFQNNIDVGQVGINIPIPVPVAWFSFTGSRGSKLGDLGPNGKQAVQFWTQTKTVTARWSAHGRGVNTTISMK

SEQ ID NO: 1529 - protein, 369 aa, Pseudoalteromonas tunicata D2
MKLNSAAEIIEDIRAGKMVILMDDEDRENEGDLIMAAEHISADAINFMATYGRGLICLTLTQDRCRQLDLPLMVRNNGAQFSTNFTMSIEAAKGVTTGISAADRARTVQAAVAKGAVPTDIVQPGHIFPIMAQPGGVLTRAGHTEAGCDLARLAGCEPSSVIVEILNPDGTMARRPDLEVFAQQHGLKIGTIADLIEYRNLNEATIERVAKCKLPTEHGHFDLVTYKDTIDGQLHYALVNGAIESHTPTLVRVHLQSTFNDLLLSDRVADRSWTLPNAMQRVASEGGVVVILGKQESPAELESIVKALEAQDNGETTQLRKFQGTSRTVGVGSQILADLGIHQMRLMSLPKKYHAISGFGLEVIEYVEP

SEQ ID NO: 1530 - protein, 332 aa, Candida albicans SC5314
MPFVNKSGFFDPSTAPYYDPKETRKVVFITGGNSGIGWYTVLHLYLHGYIVYVAGRTESKVLKAIDDIKAEAENRQAKETTKHPLGELNYIHIDLLDLSTVTKAVDEFAEKEKILDVLINNAGLMGVPYEVTKDDYEIQYQVNFVAHYLLTLKLLPFLQSAVKIGVTPRIINLASIGHNFQFKHFTPEQNKLDKFPNSVFTWVRYGIAKSSQIQFAKELANHYPDILSVSVHPGVILGTELYNHWKNIPIIGIGARGIFALSDKLIGVSNEEGSLATLRAALDPSLTLKENGEYLITGGKIDEPSKIASNTQYSKETWDWNYEQLKKRGYNI

SEQ ID NO: 1531 - protein, 380 aa, Phanerochaete chrysosporium
MSKRTFKIVILPGDGIGPEVVAEATRVLEVVSASSSDVEIKLETHDFGGCSIDKHGEPLTAATLEACKLADAILLGAIGGPKWGVNSKVRPEQALLALRKALGLYANIRPANFASDSLLAYSPLKPSVARGVDIIVIRELIGGAYFGERKELGARAQEDAAWDTMIYSVPEVQRITRSRRQVASPDPPLPVHSIDKANVLASSRLWRKVATETIQNEFPQLKLDHHLVDSASMLIVANPKKLNGVILTENLFGDILSDESSVIPGSLGLLPSASLAARPLWPNTAHRRSSPRRVYEPIHGSAPDIAGQGIANPIGTILSAAMLCGTRSVWRSPAKAIEAAVEGARRQGDRREGLRTADLGGSSKTKDIGHKVVEILKATL

SEQ ID NO: 1532 - protein, 136 aa, Nicotiana tabacum
MASTVMSLKPAPFSVEKTAVKGLPSLARSSSSFRVQASGVKKLKTDKPYGINGSMSLRDGVDASGRKQKGKGVYQFVDKYGANVDGYSPIYNTDDWSPSGDVYVGGTTGLAIWAVTLVGILAGGALLVFNTSALAQ

SEQ ID NO: 1533 - protein, 854 aa, Oryza sativa
MAALPLATAEVCDANADLIMNGELRALQPIFQIYGRRQVFAGPIVTLKVYEDNVLIREFLEEKGHGRVLVVDGGGSLRCAILGGNPVQQAQNNGWAGIVVNGCIRDVDEINGCDIGVRALNSHPMKANKKGIGEKHVPVTIAGTRICDGEWLYADTDGILISRTELTVILLEMAREAAIFGDNIPPKLERPYPNTPKHKFSSMSTPSSFEATEEATLLGAKRKSSLDPPSAKRPRSPILPLVRSPRVRLRMHHLIEHMHANLSPTADVMKNWKFDQEVLRKELLRMIVFQELPFSIVEHVGFRRFVASLNPYFKVISRTTLRNDCMAAYEDRKLALFDVLKSSNSRVSLTADMWTSIQNLGYLCVTCHYIDNEWKLQKRIIKFALVPTPHDGITMFSEMLKAIQEWHIENKLFSVTLDNASVNDTMMTHLKTNLVGKTMLPCDGVLLHFRCAAHIFNLIVQDGLKTMSNAINSIRESVKYVRSSQSRGQRFEEMIAQVGIKTNRRPSLDVSTRWNSTYLMLESSLLVRMAFEALDRHDINYLHQPFDYQWTMAEKLCALLKVFYEATVAVSGTLYPTSTCYFHELWKIKMVLDKEATNEDVTIASIVKEMKEKFKKYWDAQYLQICFPVIFDPRYKYKFIEFRLKSAFGAAATPYLKEIKSNMQKLFDEYSAKYGGSNNINSQPETSVEQNVDASNQFADWRQFLHDKSRSKVKSELSRYLADMPQEGDFQDGHDFDILNWWMVNKTKYPVISRMARDVLAIPATSVASEAAFSTGERIISDYRSRLSSSTVEALICLQDWMRAEGLGDFFARDLAESDDQNVQHSGNIEKDRKSSWSWKQLFVTLSIGTVGLS

SEQ ID NO: 1534 - protein, 161 aa, Triticum aestivum
  misc_feature (136)..(136): Xaa can be any naturally occurring amino acid
  misc_feature (156)..(156): Xaa can be any naturally occurring amino acid
MAPTVMASSATSVAPFQGLKSTAGLPVSRRSNGASLGSVSNGGRIRCMQVWPIEGIKKFETLSYLPPLSTEALLKQVDYLIRSKWVPCLEFSKVGFIFREHNASPGYYDGRYWDNVESCLCSGCTDATQVINEVEXVKEGVPDAYSAYRFTTSQVXCVSTP

SEQ ID NO: 1535 - protein, 110 aa, Rubrobacter xylanophilus DSM 9941
MPEPVAVTVDSFEREVLESEVPVLVDFWAEWCPPCRQLEPVIEELAREYAGRVKVAKVDVDAESSLAGRFGISSIPTIAFFEPGERPKAVMGAMPKEMIESAFGLERFSG

SEQ ID NO: 1536 - protein, 479 aa, Anabaena variabilis ATCC 29413
MSDLVLFWHRRDLRITDNIGLATARQHSSKVVGVFCLDPNILERDDVAPVRVTYMIGSLQELQQRYVQAGSQLLILRGDPVQAIPHLAEALNAKAVFWNWDVEPYSQTRDRAIIATLKDKGIQCLTHNWDQILHSPDEIRSGSNTPYTVYTPFWKNWSSKPKAKPVETLHNVEGLTEAEQELAQKAGVKALPTAKDLGFFWDADLIIAPGEAAAQAKLAEFTAKAITEYQEQRNFPGVNGTSQLSAALKFGVIGIRTVWQTTLEALENSRSEETTTSIRTWQQELAWREFYQHAMYNFPELADGAYRATFKNFPWETNEEHFQAWCEGKTGYPIVDAAMRQMNESGWMHNRCRMIVASFLTKDLLINPQWGEKYFMQKLIDGDLSANNGGWQWSASSGMDPKPLRIFNPASQSQKFDPDAEYIRQWVPELRSMDTEYLVTGKITPLERHAVGYVKPIVDHQKQQQLFKQRYQQQKAIGI

SEQ ID NO: 1537 - protein, 314 aa, Azoarcus sp. EbN1
MSATPDFPAPERLVIATRESRLALWQAEHVKARLEALYPGCRVELLGMTTRGDQILDRPLAKVGGKGLFVKELEAALLEERADIAVHSMKDVPMQLAEPFALPCISAREVPLDAFVSPRYASLADMPPGTVVGTSSLRRESQLHAQFPFLAVTSLRGNLDTRLRKLDEGQYDAIILAAAGLRRLGLADRIRAELPSEVSLPAAGQGALGIECLAKRTDIAAWLAPLNDADTSACVRAERAVARALAGSCEVPLGAYAEIRAGRLWLRGFVALPDGSRMVRAEREGDAADAEGLGLALADDLRAQGAEDILARLG

SEQ ID NO: 1538 - protein, 167 aa, Blumeria graminis
MGPTTTLYDFMPKDKNGEPVPLEKYKGQVVLIVNTASKCGFTPQFEGLEKLYKSVSSTHPGKFTILGFPCNQFGGHDPGSNDEIQNFCRINYGVTFPMLGKVNVNGDTADPLFEWLKVEKPGIMGMKRVKWNFEKWLVSKDGKPIKRYSSTAGPEGFQSLIIEEIEK

SEQ ID NO: 1539 - protein, 404 aa, Burkholderia pseudomallei K96243
MPRTVVVIGGGQAAGWVVKTLRDEGFAGRIVMIADEAHLPYERPALSKAVLAGEADIATVRVMQPDAFGALDVDAWQPERAASIDRARRVVRTASGREIEYDRLVIATGGTPRRLPDAIVGTAHLHYLRTLDEALALGEKLRASRRVLVIGGGWIGLEVAATARKLGVDALVVEGAPRLCARSVPGAVSDFLLDLHRANGVDVRLNASLASLDAHPDDARRVRATLAGGGVVDADFAVAGIGLALNTSLATEAGLHVDDGIVVDEYGATSDPAIFACGDVANHPNAWLKRRVRLESWANAQNQAIAAAKAVLGVRAPYAEIPWFWSDQYDVNLQILGDLPADARCIVRGELAAKRATLFFVADGALRGVIAINAARELKLARKWMNQGRAIDVAALADTAKALA

SEQ ID NO: 1540 - protein, 990 aa, Azoarcus sp. EbN1
MGRLVTEEWIGAARSKGLPQCNIRVGANGARAGRHSSMGANCAFRAPAGASPHHVSRRANRPLPQRSHPHPEQTMTEDKDAPLREDIRLLGRVLGDTVRDQHGEAAFALIERIRQTSVRFRRDDDNAARLELEGILDALSREQTIEVVRAFSYFSHLSNIAEDQHHIRRSRAHLIAGSAPREGSVAHALVRALASGLPPARLAAFFDTALISPVLTAHPTEVQRKSILNCETDIAHLLDARDRMTLTPEERQESDEALRRTVLTLWQTRMLRPAKLSVVDEVANGLSYFDATFLRELPHLYANLEDQLVSRDPALAGLELPAFLQVGSWIGGDRDGNPFVTADVLERTLAMQAGAVLGFYLDELHALGARLSLALGLVTASDALLALAARSPDHSPHRNDEPYRRAISGIYARLAATHHALLGTEPPRHPVAVAEPYAAVAELADDLDVIHRSLVANGSAALARGQLRRLRRAVRVFGFHLAPIDLRQNSEVHERVVAELLATARTGTDYATLDEAARVELLIEELATPRPLASPHVRYSDETEGELAIFRTARAAHRRYGGPAIPNCIISKTDDVSDLLELALLLKEAGLLRPHERALDVNIVPLFETIEDLANAPSVMDRLFALPGYMNLLAASRDRTHEVMLGYSDSNKDGGFLTSGWALYKAEIGLIEVFARHGIRLRLFHGRGGSVGRGGGPSYEAILAQPGGAVQGQIRLTEQGEVIAAKYGNPEVGRRNLEVIVAATLEASLLADRAPAPRVEFLDTMQALSDVAFAAYRGLVYDTEGFERYFWESTVISEIAELNIGSRPASRKKGTRIEDLRAIPWVFSWSQCRLMLPGWFGFGSAVKTWLAAHADDGIARLQAMHREWSFFAALLSNMDMVLAKTDLAIASRYAGLVKDVNLRDAIFERIRNEWHDTVDALLAITGQRELLDGNPLLKRSIRNRFPYLDPLNHVQVELLRRHRETHDDARIRLGIHISINGIAAGLRNSG

SEQ ID NO: 1541 - protein, 249 aa, Brassica napus
MNGFSDLNSSESKPSLSHLAPLEAILFDVDGTLCDSDPIHLIAFQELLQQIGFNNGVPIDEKFFIKNIGGKHNSQIALALFPNDVTRGLEFCEEKEALYRKLVAEKIKPLDGLIKLTKWIEERGLKRAAVTNAPKENAELMISKLGLTDFFQAVILGSECEYPKPHPGPYLKALEVLNVSKEHTLVFEDSVSGIKAGVAAGMPVVGLTTGNPASMLMQAKPAFLIENYADPKLWAVLEELDNKGTFQKS

SEQ ID NO: 1542 - protein, 111 aa, Rhizobium leguminosarum
MKKIEAIIKPFKLDEVRSPSGVGLQGITVTEAKGFGRQKGHTELYRGAEYVVDFLPKVKVEVVLADENAEAVIEAIRKAAQTGRIGDGKIFVSNVEEVIRIRTGETGIDAI

SEQ ID NO: 1543 - protein, 562 aa, Shigella flexneri 2a str. 2457T
MASSGTTSTRKRFTGAEFIVHFLEQQGIKIVTGIPGGSILPVYDALSQSTQIRHILARHEQGAGFIAQGMARTDGKPAVCMACSGPGATNLVTAIADARLDSIPLICITGQVPASMIGTDAFQEVDTYGISIPITKHNYLVRHIEELPQVMSDAFRIAQSGRPSPVWIDIPKDVQTAVFEIEAQPAVAEKAVAPAFSEESIRDAATMINAAKRPVLYLGGGVINAPARVRELAEKAQLPTTMTLMALGMLPKAHPLSLGMLGMHGVRSTNYILQEADLLIVLGARFDDRAIGKTEQFCPNAKIIHVDIDRAELGKIKQPHVAIQADVDDVLAQLIPRVEAQPRAEWHQLVADLQREFPCPIPKACDPLSHYGLINAVAACVDDNAIITTDVGQHQMWTAQAYPLNRPRQWLTSGGLGTMGFGLPAAIGAALANPDRKVLCFSGDGSLMMNIQEMATASENQLDVKIILMNNEALGLVHQQQSLFYEQGVFAATYPGKINFMQIAAGFGLETCDLNNEADPQAALQEIINRPGPALIHVRIDAEEKVYPMVPPGAANTEMVGE

SEQ ID NO: 1544 - protein, 233 aa, Prochlorococcus marinus subsp. pastoris str. CCMP1986
MTFNKNLEKSEVREYFNGTGFDRWRKIYSKSEEINTVQKNIRKGHQKTVDDVVSYVKNYPELTTKTFCDAGCGVGSLAIPLLRLGIKDLQVSDISSEMINETKKRINELGLSQRKIKFLTSDLEQLKGLFDVVICLDVFIHYPQPVAEEMVRHLCDLSKEKLIVSFAPYTPILAVLKNIGKLFPGPSKTTRAYTLREKGIINAANEKGFIVVQKKLNQAPFYFSKLIEFNKVK

SEQ ID NO: 1545 - protein, 586 aa, Zea mays
MGMAALLLVWALLHCAGTVTMVRASHAVYPELQSLEAEKVDETSRTGYHFQPPKHWINDPNGPMYYKGLYHLFYQYNPKGAVWGNIVWAHSVSTDLIDWTALAPGIYPSRQFDVKGCWSGSATVLPSGVPVVMYTGIDPDEHQVQNVAYPKNLSDPFLREWVKPDYNPIIAPDSGVNASAFRDPTTAWYGPDRHWRLLVGSKVGGKGLAVLYRSRDFRRWVKAHHPLHSGLTGMWECPDFFPVAVHGGGRHYRRGVDTAELHDRALAEEVKYVLKVSLDLTRYEYYTVGTYDHATDRYTPDAGFRDNDYGLRYDYGDFYASKSFYDPAKRRRVLWGWANESDTVPDDRRKGWAGIQAIPRKLWLSPRGKQLIQWPVEEVKALRAKHVNVSDKVVKSGQYFEVTGFKSSDVEVEFAIGDLSKAERFNPRWLTDPQALCKKRGARETGEVGPFGLWVLAAGDLTERTAVFFRVFRANSSSSSRLVVLMCNDPTNSTFEAQVYRPTFASFVNVDIARTKTIALRTLIEPSVVESFGAGGRTCILTRVYPKKALGDNAHLFVFNHGEVDVKVTRLDAWEMRTPKMNVPAQ

SEQ ID NO: 1546 - protein, 100 aa, Arabidopsis thaliana
  misc_feature (76)..(76): Xaa can be any naturally occurring amino acid
RPRVRASSMLSSATMVASPGQGNKVAPFNGPKSSGAFPGNRKGNNDITSNISNGRRVNCMQVWPPIGKKKFETLSXLPDLNESELAKGIDQLIRNKLNPC

SEQ ID NO: 1547 - protein, 370 aa, Coccidioides immitis RS
MASVYKSVSKKRKPSLKEDEHDEDVEMELEERLSDESSDGESDEQSVENHDTNGEINTNSNDRSNSSGYMPKTRVLMLTSRGVTHRHRHLLADLAALLPHTHKESKLDTKKKTTGYNFLLNSLADLHSCNVIFFLEARKRGQDLYLWLSRPPNGPTIKFSVTNLHTMGELGTGFAGNCLKGGRGVVVFDQSFGDEEVMKTGNEWRGLVREMLRGVFSVPKRGVKGMKPFIDRVIGVCWVDGKIWIRVFEIRETDGKTEKDGEEEAANKRRYRRGKDGLPNVSLVEIGPRFVLTPIVILEGSFGGPVIYENREYVSPSQVRREIRVKKAARYASRRAGQMDRTVKNAGLGLGAEGEANRKKDELDPHVLFA

SEQ ID NO: 1548 - protein, 506 aa, Frankia sp. CcI3
MTTSAAGASSTATLPAGALPAGYADVRFAAIEDALAEIAAGRPLVVVDDADRENEGDLIFAAEAATPELVAFMTRYTSGVICVPMDAADTDRLELDQMVPHNTERMGTAFTITVDARDGVSTGISAADRARTIRLLADPRTTPGDLSRPGHIFPLRAKDGGVLRRPGHTEAAVDLARLAGLRPAGAICEIVNDDGTMARLPRLAEFAREHGLLLISIADLIAYRRRTEKQVVRVAEASLPTRYGAFRAVGFRNILDGVEHIALIRGELGDGADVLVRVHSECLTGDVFGSRRCDCGTQLDAALRIIATEGRGVVLYMRGHEGRGIGLMHKLRAYQLQDAGHDTVDANLALGLPADARDYGTGAQILVDLGVRGIRLLSNNPTKRAGLEGYGLRIVELIGMPVTQTPENLRYLTTKRDRMGHVIPGLPSIPGLPSIPGPPGLPGPPGLPGPPGLSDLPRAVGEDEPAGSRWIPGAPRAPRVPVTSGCTAVAGPGTSAGVDCAEGEGL

SEQ ID NO: 1549 - protein, 414 aa, Vibrio fischeri ES114
MSKRRVVVTGMGMLTPVGNTVEASWKALLAGQSGIVNIEHFDTTEFTTRFAGLVQDFNAEEYMSKKDARKMDLFIQYGVAAGIQALDDSGFKVTEENAHRIGAAIGSGIGGLGLIEAGYKAFSEKGPRKISPFFVPSTIVNMIAGHMSIIRGLRGPNIAISTACTTGLHNIGHAARMIAYGDADAMLAGGAEKASTELGMGGFGAAKALSTNNENPQGASRPWDKNRDGFVLGDGAGMMVLEEYEHAKARGAKIYCELVGFGMSGDAYHMTSPTPDGSGGALAMEAAMRDAGVTGEQIGYVNAHGTSTPAGDVAEIKGIKRALGEAGSKQVLVSSTKSMTGHLLGAAGSVEAIITAMSLVDQIVPPTINLDDPEEGLDIDLVPHTARKVTDMEYAICNSFGFGGTNGSLIFKKM

SEQ ID NO: 1550 - protein, 236 aa, Frankia sp. CcI3
MATAQIYPSLLAADFGRIADAALAVEGQADWLHVDVMDYHFVPNLAFAPDTVTALRAVTDTPLDCHLMIDDPDRWAAGYAERGAANVTIHAEAVSDLPRTTRAIRAAGARTGLAVKPNTPVEHYLDDLHRFDLLLLMTIEPGFGGQTFMTEVLPKIEAARRLLDARGLDLWLQIDGGVNAGTIERAAVAGVDVFVAGTAVFGAADPGQAVERLREQALRAAPRLSPPAPRSAVGPA

SEQ ID NO: 1551 - protein, 368 aa, Lactobacillus johnsonii NCC 533
MNLDKLQNWLISTNNDVAYISDPISINYFTRYSMDPHERIFALLAFKDKSAFIFAPELNVEEAKNSAWDGDVYGYLDHENPWSKIADLVNQRIGTPNNIAIEKAHLSVDRLEALRIAFPDSSFTNNVSPFVAEARLRKTPEEVEQLKAAGAEADFAFQIGFNALKNGVTERYVAGQIDYQLKLQKGVMHTSFETIVQAGKNAANPHLGPTMNKIEPNELVLFDLGTMHNGYASDSSRTVAYGEPTAKEKEIYEVDREAQQAAIEAAKPGITASELDAVARDIITKAGYGEYFIHRLGHGIGMNVHEFPQIMEGNDVVLEEGMCFSIEPGIYIPNVAGVRIEDCGVVTKNGFETFTKTSKELKYIPVKD

SEQ ID NO: 1552 - protein, 94 aa, Bartonella taylorii
IDEIIDHLADSHMVFITAGMGGGTGTGAAPVVARAAREKGILTVGVVTKPFQFEGARRMKTAEAGIEELQKSVDTLIVIPNQNLFRIADEKTTL

SEQ ID NO: 1553 - protein, 519 aa, Arabidopsis thaliana
MSGAITCSAADLATLLGPNATAAADYICGQLGTVNNKFTDAAFAIDNTYLLFSAYLVFAMQLGFAMLCAGSVRAKNTMNIMLTNVLDAAAGGLFYYLFGYAFAFGGSSEGFIGRHNFALRDFPTPTADYSFFLYQWAFAIAAAGITSGSIAERTQFVAYLIYSSFLTGFVYPVVSHWFWSPDGWASPFRSADDRLFSTGAIDFAGSGVVHMVGGIAGLWGALIEGPRRGRFEKGGRAIALRGHSASLVVLGTFLLWFGWYGFNPGSFTKILVPYNSGSNYGQWSGIGRTAVNTTLSGCTAALTTLFGKRLLSGHWNVTDVCNGLLGGFAAITAGCSVVEPWAAIVCGFMASVVLIGCNKLAELVQYDDPLEAAQLHGGCGAWGLIFVGLFAKEKYLNEVYGATPGRPYGLFMGGGGKLLGAQLVQILVIVGWVSATMGTLFFILKRLNLLRISEQHEMQGMDMTRHGGFAYIYHDNDDESHRVDPGSPFPRSALLLAFNFQLFGNLLPFKYCLGFGFEI

SEQ ID NO: 1554 - protein, 234 aa, Matthiola incana
NQNEVIKPTVNGVLGIMKACVKTKTVRRVIFTSSAGTINVEEHQKNVYDEQNWSDLEFIISKKITGWMYFLSKTLAEKAAWDYAKENGIDFISIIPTLVIGPFITTSMPPSLITGLSPITRNEAHYSIIRQGQYVHLDDLCNAHIFLYEQAAAKGRYVCSSHDATILTISKILRQKYPEYNVPSTFEGVDENLKSVVFSSRKLIEMGFNFKYSLEDMYVESIETCRRKGFLPVS

SEQ ID NO: 1555 - protein, 203 aa, Cryptococcus neoformans var. neoformans JEC21
MVLVLVIGDLHIPNLVHDLPAKFKKLLVPGKIGQIICTGNVCDKETYDYLRTTAPEVHVVRGEFDENPHFPLSLIIQHQSLRIGVVHGQQVVPAGDPDMLAALARQMDVDVLISGGTHRFESFEFEGRFFVNPGSATGAWSSLWNGEVTPSFALMDIQGPVIVTYVYQLVDGEVKVDKVEYRKPDPTSEIQSQSTRSEVAARW

SEQ ID NO: 1556 - protein, 92 aa, Bartonella grahamii
IDEIIDHLADSHMVFITAGMGGGTGTGAAPVVARAAREKGILTVGVVTKPFQFEGARRMKTAESGIEELQKSVDTLIVIPNQNLFRIANDKT

SEQ ID NO: 1557 - protein, 634 aa, Solanum tuberosum
YHSSYDPENSASHYTFLPDQPDSGHRKSLKIISGIFLSSFLLLSVAFFPILNNQSPDLQSNSRSPPPSRGVSQGVSDKTFRDVVNASHISYAWSNAMLSWQRTAYHFQPQKNWMNDPNGPLYHKGWYHLFYQYNPDSAIWGNITWGHAVSKDLIHWLYLPFAMVPDQWYDINGVWTGSASILPDGQIMMLYTGVSDDYVQVQNLAYPTNLSDPLLLDWVKYKGNPVLVPPPGIGIKDFRDPTTAWTGPQNGQWLLTIGSKIGKTGIALVYETSNFTSFKLLDEVLHAVPGTGMWECVDFYPVSTEKTNGLDTSYNGPGVKHVLKASLDDNKQDHYAIGTYDLTKNKWTPDNPELDCGIGLKLDYGKYYASKTFYDPKKQRRVLWGWIGETDSESADLQKGWASVQSIPRTVLYDKKTGTHLLQWPVEEIESLRVGDPIVKQVNLQPGSIELLHVDSAAELDIEASFEVDKVALQGIIEADHVGFSCSTSGGAASRGILGPFGVVVIADQKLSELTPVYFYISKGADGRAETHFCADQTRSSEAPGVAKQVYGSSVPVLDGEKHSMRLLEDHSIVESFAQGGRTVITSRIYPTKAVNGAARLFVFNNATGASVTASVKIWSLESANIRSFPLQDL

SEQ ID NO: 1558 - protein, 669 aa, Saccharomyces cerevisiae
MLRTRLSVSVAARSQLTRSLTASRTAPLRRWPIQQSRLYSSNTRSHKATTTRENTFQKPYSDEEVTKTPVGSRARKIFEAPHPHATRLTVEGAIECPLESFQLLNSPLFNKGSAFTQEEREAFNLEALLPPQVNTLDEQLERSYKQLCYLKTPLAKNDFMTSLRVQNKVLYFALIRRHIKELVPIIYTPTEGDAIAAYSHRFRKPEGVFLDITEPDSIECRLATYGGDKDVDYIVVSDSEGILGIGDQGIGGVRIAISKLALMTLCGGIHPGRVLPVCLDVGTNNKKLARDELYMGNKFSRIRGKQYDDFLEKFIKAVKKVYPSAVLHFEDFGVKNARRLLEKYRYELPSFNDDIQGTGAVVMASLIAALKHTNRDLKDTRVLIYGAGSAGLGIADQIVNHMVTHGVDKEEARKKIFLMDRRGLILQSYEANSTPAQHVYAKSDAEWAGINTRSLHDVVENVKPTCLVGCSTQAGAFTQDVVEEMHKHNPRPIIFPLSNPTRLHEAVPADLMKWTNNNALVATGSPFPPVDGYRISENNNCYSFPGIGLGAVLSRATTITDKMISAAVDQLAELSPLREGDSRPGLLPGLDTITNTSARLATAVILQALEEGTARIEQEQVPGGAPGETVKVPRDFDECLQWVKAQMWEPVYRPMIKVQHDPSVHTNQL

SEQ ID NO: 1559 - protein, 1387 aa, Oryza sativa
  misc_feature (1357)..(1357): Xaa can be any naturally occurring amino acid
MRLGKQRVFIFTASTEISGVSTREHGEGYGFLYCKSHVTAEQHLQPTQDFWIAASPSKVVQADAAALGTIAADMAPVVDGFSADDDELDLDSPTEGFSSIPEAIEDIRQGKYVIVVDDEDRENEGDLIMAASKVTPEAMAFIVRHGTGIVCVSMKEDDLERLELPLMVTTKENEEKLRTAFTVSVDAKEGTTTGVSAKDRANTVLALASPNSKPEDFNRPGHIFPLKYREGGVLKRAGHTEASVDLAMLAGLPPAAVLCEIVDDDDGSMALLPKLQDFARRENLKIISIADLIRYRRKRDRLVERVCVTPLQLQWGSFQSYCYRSLIDGMEHIAMVKGDVGDGQDILVRVHSECLTGDIFGSARCDCGNQLALAMTMIEKTGRGVVVYLRGHEGRGIGLGHKLRAYNLQDDGRDTVEANEDLGLPVDSREYGIGAQILRDLGVRTMRLMTNNPAKYTGLKGYGLSVLGRVPLLTPITNENRRYMETKRLKMGHVYGTRPSGNTSTLADGGIKKEQDQIDSASEQDTSKIYTLEKVYGFRLVCRSVVDLRSQKFHTRVYKRKSYFRSSASECEKIIHSARWLEFRRQRVAFQRTRRTIHLIPLASQDDSSGLSVNGSPQVDSASEMDDIRVKLVKALQSEDISTGLVQSIHDAARSIELAFLDHSKSSKNSWFPKEWLGVDNNEWIKPLSYQAAVGSLLQAVIDVSSRGNGRDRDINVFVQRSLSRLLSSLEGAIQNELSKREPTLYQWYSSDQNPLVVRTFVNSFENDPRFNSATAICHERQQMNTSESDLSLLMLGLTCLAAITKLGSTKVSCQQFFSMVPDIIGRFMDMLLEFVPLSKAYTLTKDIGLQREFLCNFGPRAADPKFSSDREVEISFWIDLVQKQLLRALDREKIWSRLTTSESIEVLEKDLAIFGFFIALGRSTQTYLSSNHLTNLDDSINDIVSSHLNKLTIIQVVCEELEWLPFYSGDVPAATIEGREDVHKGEIISRVLNVCSYWMTSFIKYSSWLENPSNVKAARFLSKGHSMLSDCMKELDLTKYDMPKDQTFPEAKEHLVARTELASFDKSLESVEEALVKLEDLLQELHLSSSNSGKEDLRAACSDLEMIRRLKKEAEFLEASFRAKTEFLEADASSRPLSPAVEEGRGKTASNANESSTPQKPANRVENKRRPIWDLFGRPSGRRVQLVQQTSDQNVSVANVDNKDTQSNDILRFEQLRRELIELEKRVQKSADNAQKEETYVANETLDSSVSSSPVSMPSGPASKKENVITKSVEKVKETTTTVVQGTQLLAIDTGAAMGLLRRALIGDELTHKEKQALQRTLTDLASVVPIGILMLLPIPSTYAPERLDLLRQLEXVKEMGVAEGSSEEMVEACFGTRQKMVSFRL

SEQ ID NO: 1560 - protein, 158 aa, Rhodopseudomonas palustris CGA009
MASIYDFTAKSLVGKDVSLKQFEGKVLLIVNTASACGFTPQYKGLEALQEKYGPRGFSVLGFPCNQFGAQEPGDEAQIAQFCSTNYGVTFPMFAKIDVNGAGAHPLYKFLKDEKGGLLGSAIKWNFTKFLVDRSGRVVSRHAPTTTPEALSKEIETLL

SEQ ID NO: 1561 - protein, 167 aa, Saccharomyces cerevisiae
MQEFYSFSPIDENGNPFPFNSLRNKVVLIVNVASHCAFTPQYKELEYLYEKYKSHGLVIVAFPCGQFGNQEFEKDKEINKFCQDKYGVTFPILHKIRCNGQKQDPVYKFLKNSVSGKSGIKMIKWNFEKFVVDRNGKVVKRFSCMTRPLELCPIIEELLNQPPEEQI

SEQ ID NO: 1562 - protein, 323 aa, Candida albicans SC5314
MYRQFTRGFSSSLPARNYASTIKNLKVTKDTKVIYQGFTGKQATFHAEQAIAYGTDVVGGINPRKAGTTHLDRPVFGTVAEAMKEAGASATGIFVPPPLAAAAIEEAIAAEIPLAVAITEGIPQKDMVRISQILKTQEKTRLVGPNCPGLIAPDQCKIGIMPSSIHQRGKVGVISKSGTLTYEAVAQTTAVGLGQSLVIGMGGDPFPGTNFIDALTLYLNDPETEGIIMIGEIGGSAEEEASEFLKQHNLTRPEGPKPVVGFIAGVSAPPGRRMGHAGAIVAGGKGDAKSKIAALESAGVVVEKSPARLGNSLLAEFKNKNLL

SEQ ID NO: 1563 - protein, 482 aa, Rubrobacter xylanophilus DSM 9941
MIESQIESRNYIGGEWVPADSGEVEEVRNPARPSEVLGTAPRSDRGEMERAVAAAQEALPGWRSALPAARGQILLRAADIIDSRSEELARLMALEAGKPLGESRAEVSRAAAIFRYYGSEGWRLYGVEAPSTRPGVRITSTREPLGVVGLITPWNFPLAIPSWKMAPALICGNTVVIKPAANAVLNAAELVRILEEAGLPGGVVNLVMGPGGSSGDALVRDERVRAISFTGSTAVGLSIQERAAGKKVQLEMGGKNPYVVMEDADLEDAAAKVAYGAFGYAGQKCTASSRAVVVEEVYEAFLEQVVEATRALKLGEPLDEEAVIGPVINESQYESILGAIEQAREDGRVVLDGGATGPREEGYYISPVIVADVDNGSKTAREEIFGPVLAVIKARDFDHAVEIANDTRYGLTAGIATRSLRYAEEFIERSQTGLVNVNLPTAGVEFQVPFGGSKQSGVGGREQGMAAIEFYTGWKTASVLAL

SEQ ID NO: 1564 - protein, 179 aa, Malus x domestica x Pyrus communis
MASSMISSGTVATVSAPAQARMVAPFTGLKSSSAFPVTRKSNDITSIASNGGRVQCMQVWPPLGLKKFETLSYLPPLSTESLAKEVDYLLRKNWVPCLEFELEHGFVYRENNRSPGYYDGRYWTMWKLPMFGCTDSSQVLKELEEAKKAYPQSFIRIIGFDNVRQVQCISFIAYKPPGV

SEQ ID NO: 1565 - protein, 343 aa, Aspergillus nidulans FGSC A4
MDIKFVLVTGATGFIGAHIVDALLGHGLRVRGATRSLAKGEEMLKARLHYKEQLEFVKINDFENPGGLAEAVKGVDGIIHTASPFTYDTKDNEKELVIPAINGVKAVFEAAAAADASTTKIKRIVLTSSFASVIDVNRRAGPGSGPDGYFTYTAADWNPLSYAEAIDTSTNAVVAYRGSKKFAELAAWEFIRDRKPSFDLVTLCPPMTFGPVVHPVPSVESLNESNAMLWKVAVGEPLPVARVPFWIDVRDLADAHIGALLKPGVGGRRYTVAAPERFSYGLAAGIIKEEFADLRERVTGTRQDVDESHGLDGETAGRELGISYRRFRETVRDLVRQGVERGW

SEQ ID NO: 1566 - protein, 806 aa, Coccidioides immitis RS
MASYNPPGHLPVPVPKRRRVAILTSGGDAPGMNGVVRAVIRMSIHCGCEAYAIHEGYEGLVQGGELIRRMHWEDVRGWLSRGGTLIGSARCMSFLQREGRLKAAKNMVTRGIDALIVCGGDGSLTGADVFRSEWPGLLDELVKKGELTANQTSPYKTLNIVGLVGSIDNDMSTTDATIGCYSSLHRICEAVDEVFDTAASHQRGFVIEVMGRHCGWLALMSAISTGADWLFIPEMPPRDGWEDDMCEIITQARKRRTIVIVAEGAQDRSLNKITSDAVKAILSNRLKLDTRVTVLGHTQRGGPACAYDRWLATLQGTEAVRAVLEATPDSPSPIITIRENKIERGSLIDAVAATKKVAKCVAEKRFEEAMQLRDSEFKAYHRAYINTTTPHHPKMLLPQEKRMRIAIIHVGAPAGGMNPATRAAVAYCIARGHTPVAIYNGFPGLCRHHADKPLGSVREVNWLESDSWVNEGGSEIGTNRGLPSEDMPTTAYCFERYKFDALFIIGGFEAFTAASQLRKARKDYPSLKIPIVVLPATISNNVPGTEYSLGSDTCLNTLVNFCDVIRQSASSSRRRVFVIETQGGRSGYIAVMAGLAVGAYAVYIPEEGIDIKMLARDIEYLRHNFATDRGASHAGKIILRNEKASSTYTTQVIADMIKEEAKGRFESRAAVPGHFQQGGKPSPMDRIRALRLALRCVQHLESFSGRSRDEIDADEMSSVVIGIRGSEVVFGPMSGEEGLEATNTDWEHRCPRNQFWMKLRNLVDTLSGRPSESKDGKVKLADDEGWDSGAVSDPCHLCGTPKIAIG

SEQ ID NO: 1567 - protein, 391 aa, Mesorhizobium loti MAFF303099
MAKGKFERTKPHVNIGTIGHVDHGKTSLTAAITKYFGEYKRYDQIDAAPEEKARGITISTAHVEYETANRHYAHVDCPGHADYVKNMITGAAQMDGAILVVSAADGPMPQTREHILLARQVGVPSIVVFLNKVDQVDDAELLELVELEVRELLSKNEFPGDDIPIVKGSALAALEDSNKTIGEDAIRELMAQVDAYIPTPVRPLDKPFLMPIEDVFSISGRGTVVTGRVERGVVKVGEELEIIGIRPTTKTTCTGVEMFRKLLDQGQAGDNIGALLRGVDREGVERGQVLAKPGTVKPHKKFVAEAYILTKDEGGRHTPFFTNYRPQFYFRTTDVTGIVSLPAGTEMVMPGDNITVDVELIVPIAMEEKLRFAIREGGRTVGAGIVVTIKE

SEQ ID NO: 1568 - protein, 326 aa, Lachancea kluyveri
SIVGRPRHQGIMVGMGQKDSYVGDEAQSKRGILTLRYPIEHGIVTNWDDMEKIWHHTFYNELRVAPEEHPVLLTEAPMNPKSNREKMTQILFETFNVPAFYVSIQAVLSLYSSGRTTGIVLDSGDGVTHVVPIYAGFSLPHAILRIDLAGRDMTDYLMKILSERGYSFSTTAEREIVRDIKEKLCYVALDFEQEMQTAAQSSAIEKSYELPDGQVITIGNERFRAPEALFHPSVLGLEAAGIDQTTYNSIMKCDVDVRKELYGNIVMSGGTTMFPGIAERMQKEITALAPSSMKVKIIAPPERKYSVWIGGSILASLTTFQQMWIS

SEQ ID NO: 1569 - protein, 609 aa, Magnetococcus sp. MC-1
MCGILAEVGQQSPAAARQRALDRLRHRGPDHGGQWSAQQPVPVWLGHRRLAIVDTSSAGNQPLHLHAADLHLVGNGEIYNAPALQKTLEALGHVFHSHSDNEAILHAYREWGSDCLAHLEGMFAFVLWDARQQTLLAARDRMGIKPLFYAATPAGGLVLASEASALVGLDGVAQQGYEPQALSHVLAYGHIPDPYAIWRGVNKLSPGQFLRWTPQQGLRLHTYWSPPSQSDAPSDDQAWGQRFEQVLQEHLLSDVPLSLFLSGGLDSTSVAVGVKRLGHQLKAFSLGFPGHPRDESALAQATAERLGHPFEAVVMDGRDLLQQVDAALLQQDEPHLFGSYLTMLNICSAVAKEYKVVLSGDGGDELFAGYNWYRDIPTALPTLAPWKAALAKPLLRHSPLPAALLERARLAFACCSPLHRHAWRTSQRFLPAEVEALLRPAAIRYDDEAFLAPLQRWFTPELPLVRALQRIDLMSFCSNHVCAKVDRASMAHALEVRVPYLDRRLVEWAISRPADPREAQGSKPLIRDYIAPHVPAQVLEQRKQGFSLRTTPPANLESTFVAWIEQSPLISQSILRRDWPRFLRADDRLRAQKLWHLALLARWMHHHPA

SEQ ID NO: 1570 - protein, 158 aa, Streptococcus intermedius
MTKIYDFSIFDQNNRSISLEIYKGNVLLIVNTATGCGLTPQYKGLQHLYTRYQNQGFEILDFPCNQFMGQAPGTAEEINRFCSLHYQTTFPRFAKVKVNGKEADPLYIWLKEQQAGPLGKRIEWNFTKFLINREGQVVKRFSSKAEPKEIEESLQKLL

SEQ ID NO: 1571 - protein, 602 aa, Oryza sativa
MDSDYGVPRELSALQKARALYRPDLPPCLQGTTVKVEYGDAAIAADVAGAHVISHAFPHTYGQPLAHFLRKTAAVPDATVITEHPVVRVGVVFSGRQSPGGHNVIWGLHDAIKAHNANSKLIGFLGGTDGLFAQKTLEISDEVLSSYKNQGGYDLLGRTRDQIRTTEQVNAAMTACQALKLDALVIIGGVTSNTDAAQLAETFAESKCSTKVVGVPVTLNGDLKNQFVETTVGFDTICKVNSQLISNVCTDALSAEKYYYFVRLMGRKASHVALECALQSHPNMVILGEEVAASKLTIFDITKQICDAVQARAEKDKNHGVVLIPEGLVESIPELYALLQEIHGLHDKGVSVENISSHLSPWASALFEFLPPFIRKQIETEKLLAQLVEAEMNKRLKEGTYKGKKFNAICHFFGYQARGALPSKFDCDYAYVLGHVCYHILAAGLNGYMATVTNLRSPVNKWKCGAAPITSMMTVKRWSRGPAASQIGKPAVHMASIDLKGKPYELLRQNSSSFLMEDIYRNPGPLQFEGPGGETKPISLCVEDRDYMGRIKQLQEYLEKVKSIVKPGCSQDVLKAALSAMASVTEMLTIMSSPSFSGQATI

SEQ ID NO: 1572 - protein, 528 aa, Xanthomonas oryzae pv. oryzae KACC10331
MTTHAATTQGKFHKRLSLTDLTFIGLGSIFGSGWLFSASHVSSIAGPAGIVSWILGGIAVLLLGLVYCELGAALPRAGGVVRYPEYSHGALLGALTGFITLIAFSSLIAIEVEAARQYAAAWFPSLSQANSTHPSVWGWLVQLALLVLFFLLNYFSVKTFALANNIVSIFKFLVPILVIVLLMRHFNADNLTVHGVAPSGMAGVEAAISAGGIIFAYLGLTPIVSVASEVRDPQRNIPIALILSVALSTVIYVLLQLAFLGSIPAGQIAQGWTGIDKAFSLPYHDIALALGMAWLATLVICDAVVSPSGTGNIYMNATPRVVYGWARSGGFLPGLTRVHPVSGIPRPALWLSLGLSIFWTLPFPSWETLIGVVSAALVLSYAVAPVAVAALRRSAPALPRPFFVRGLTVLGPLSFMVAALIVYWSTWPTLSWLLGLQVLAFALYVLYRLPSREGRTRLLRQVCASLWLIVFFVLVMLVSWAGTFGGHGWIAYPFDTLSVAAIAFFIYHWGARSGLRSDELALEEDDGE

SEQ ID NO: 1573 - protein, 92 aa, Bartonella grahamii
IIDHLADSHMVFITAGMGGGTGTGAAPVVARAAREKGILTVGVVTKPFQFEGARRMKTAESGIEELQKSVDTLIVIPNQNLFRIANDKTTFA

SEQ ID NO: 1574 - protein, 219 aa, Leymus triticoides
  misc_feature (50)..(50): Xaa can be any naturally occurring amino acid
GRRRVEMEDRHVAKLALGGDPEVALFAVFDGHGGAAEFAAENMPKFMAEXVRKVDGGGSEEIEGAVKKCYLKTDEEFLKREESGGACCVAALLQKGGLTVSNTGDCRAVLSRAGTAEALASDHRASCEDERERIENLGGFIVNNRGTWRVQDSLAVSRGIGDAHLKQWVVADPDTRTLLVDPQCEFLVLASDGLWDKVDNQEAIDIARPLCIGNDKASR

SEQ ID NO: 1575 - protein, 476 aa, Bacillus thuringiensis serovar konkukian str. 97-27
MQNKIIVMFQKDFRLYDNPALFEAAQSGEVVPVYVHDETFSMGSASKWWLHHAIIDVKKQLEALGSTLIIRKGSTQEEILSLVEQLGITAVYWNICYDPDRLQFNQKMKMMLEHKGMICKEFNSHLLLEPWVIKKKDNTEYKVFTPFYNAFQKQVIHKPISKVQSIKGGNSLPVSLSVSELHLLPTIPWTSHMESIWEPTEEGAYKTWKEFFSSKLASYSEGRDFPNQNAHSMLAPYLSFGQISVKLIYHYLINKSTESQCSLFEKQVNSFIRQLIWREFSYYLLYHYPFTAYKPLNKSFEHFPWNNEEELLRVWQKGDTGYPFIDAGMRELWQTGFMHNRTRMAVASFLVKHLLIPWQEGAKWFMDTLLDADIANNTMGWQWVAGSGADASPYFRIFNPITQGEKFDKNGEYIREWVPELKDMPNKYIHKPWEAPEHILQKANIQLGHTYPLPVVDHKAARERALCAYKSMKEFV

SEQ ID NO: 1576 - protein, 471 aa, Mycobacterium tuberculosis CDC1551
MSLRELMLRRRPVSGAPVASGASGNLKRSFGTFQLTMFGVGATIGTGIFFVLAQAVPEAGPGVIVSFIIAGIAAGLAAICYAELASAVPISGSAYSYAYTTLGEAVAMVVAACLLLEYGVATAAVAVGWSGYVNKLLSNLFGFQMPHVLSAAPWDTHPGWVNLPAVILIGLCALLLIRGASESARVNAIMVLIKLGVLGMFMIIAFSAYSADHLKDFVPFGVAGIGSAAGTIFFSYIGLDAVSTAGDEVKDPQKTMPRALIAALVVVTGVYVLVALAALGTQPWQDFAEQETAGLAIILDNVTHGEWASTILAAGAVVSIFTVTLVTMYGQTRILFAMGRDGLLPARFAKVNPRTMTPVHNTVIVAIFASTLAAFIPLDSLADMVSIGTLTAFSVVAVGVIVLRVREPDLPRGFKVPGYPVTPVLSVLACGYILASLHWYTWLAFSGWVAVAVIFYLMWGRHHSALNEEVP

SEQ ID NO: 1577 - protein, 93 aa, Bartonella grahamii
EIIDHLADSHMVFITAGMGGGTGTGAAPVVARAAREKGILTVGVVTKPFQFEGARRMKTAESGIEELQKSVDTLIVIPNQNLFRIANDKTTFA

SEQ ID NO: 1578 - protein, 221 aa, Leymus cinereus
GRRRVEMEDRHVAKLALGGDPEVALFAVFDGHGGKNAAEFAAQNMPKFMAEEVRKVDGGDSDEIEGAVKKCYLKTDEEFLKREESGGACCVTALLQKGGLTVSNTGDCRAVLSRSGTAATLTSDHRASREDERERIENLGGFVVNNRGTWRVQGSLAVSRGIGDAHLKQWVVADPDTRTLLVDPQCEFLVLASDGLWDKVDNQEAIDIARPLCIGNDKASR

SEQ ID NO: 1579 - protein, 206 aa, Triticum aestivum
MGSVGTGLLKGLRRVLEQQRKSVDLCRTSRAWSSTVSFSDIDEKDDMGDDGDLKDSRRELEPQSVDPKKGWGFRGVHRAIICGKVGQAPVQKILRNGRTITIFTIGTGGMFDQRVIGSADTPKPAQWHRIAVHSEHLGAYAVQKLVKNSAVYIEGEIETRVYNDGIDGQVRNIPEICIRGDGKIRLVKSGESAASISLDELRDELF

SEQ ID NO: 1580 - protein, 132 aa, Synechococcus sp. CC9605
MRMLHTMLRVADLERSLGFYTEVLGMQLLRRKDYPSGRFTLAFVGYGSEKDHTVLELTHNWDTDSYTLGDAYGHIALGVEDIHSTCAGIADKGGRVVREPGPMKHGTTVIAFVEDPDGYKVELIEMSSKAHA

SEQ ID NO: 1581 - protein, 236 aa, Silicibacter pomeroyi DSS-3
MTEHGHSPQEVSQRIGAPPGRGVLRDVVYGGIDGSVTTFAIVAGVAGAGLSPFVIVALGLANVLADGFSMAAGNYSGTKADLDNLHRLRAIEERHIAHYPEGERLEVREILSQKGLSGEVLDQATDAITADRENWIALMIDGEYGLGGVDPHPMRAAIATFLAFLVAGMIPLVPFLLGLAEAFTVSAWMTGAVFFAIGALKSRWSLAPWWRSGLETLAIGGTAAAIAYGVGTLFQG

SEQ ID NO: 1582 - protein, 402 aa, Bordetella bronchiseptica RB50
MLSPEVRALVKATAPVLKEHGEALTRHFYTRMLGGNPELRQLFNQGHQQSGQQQQALAAAVAAYAEHIDDPSVLLPVVERIAHKHVSLGVRAEHYAIVGKHLLASIREVLGEAATDELIDAWAAAYGQLADLLIGRERALYAAAASRDGGWTGWRAFKVVRKTPESAEITSFYLAPADGGATPDYLPGQYVSVRVYVPELGLMQPRQYSLSEAPGMPGQLRISVKREAGSPAGMVSGTLHNRINEGDVLDVSPPQGDFTLDAEDGRPVVLLSGGVGLTPMVSMLNHLTARDDGRQIRFVHACREAGVHAMKEHINALAAKRPNVRKAVFYERVGADDRRGVDYDYEGRVDLHAIRDEVILPDADYYLCGPLPFMQAQRRALADLGVAEHRIHAEVFGTGGVA

SEQ ID NO: 1583 - protein, 483 aa, Ehrlichia ruminantium str. Gardel
MSIPVTVAYGDGIGPEIMEAVLLILSEAKSGLVIETIELGHNLYKKEWSCGIAPSSWDSIHRTKVLLKSPTMTPQGQGHKSLNVTLRKKLGLYANVRPCISYHPVIKTKYPNLNVVIIRENEEDTYTGIEHRLTSDTYQCLKVITRSGSERICNYAFQYAITHNRKKVTCLVKDNIMKMTDGIFHKSFSKIAEGYPSIISDHYIVDIGMARVATNPENFDVIVTTNLYGDIISDIVAELSGSIGLAGSANIGDNYAMFEAVHGSAPDIAGKNIANPSGLLSAAIQMLVYLKKFNEAELIHNAFLKTLEDGIHTADIYQDNISKEKVSTMDFAKAVVENFGQSPCNIQKPVLSIMNSTSGTTSVPYVYQPSYTDKILVGVDVTIGCDVIDLNLNQLIVDLRNIKHDQLELVLVHSKGLEIWPDESSTVNLSYVDQICCRFYMKCKSEIIHDHVNQLLLELDKKKINVVKMEKLYLYDDQPGFFT

SEQ ID NO: 1584 - protein, 550 aa, Desulfovibrio desulfuricans G20
MSENDSAQNSEERRWLIPEEGRKHLAGVFAGLPGEVTLDVFTDGDEKNQYNEYTVRFAQELAELADKIDTRVHALDSAEAQRLGVTLGPSTLLNAGTYAIRFTGAPLGEEARGFIEAIMLVSAGKAAVSENVGRILERLEEKRTVRVFSSPGCPYCPGQVVNAVKCAIASPQLVSAEAVNSDEFPELSRKYGVGSVPHTNINDEFDAVGLMPEERFAVELVTMKDASGMVREAGQDAGTGDYPVEKVDLVIVGAGPAGLTAGIYAERSGLKSVVLDKAVVGGQVAVTPVVENYPGFKNVGGMNLVEMLAAHTREYAHVQEHEEIEEIKIGRNIEVYTARNVYLARALVFATGAQWRELGVPGEDTYFGKGVSHCASCDGFMFKGKKVIIVGGGNTALTDALHLKNLGVDITVVHRRDAFRAEQQLQDALEREQIPVLWDTVVEEILGTDGLVTGARLKNVKSGDVHEVALDGVFVAVGHVPNSALAAELGVTLNEDGTIAVDRAMRTNIPRVYAAGDVTGGIRQIVTAVGNGATAALSAFEDLQSSRWKK

SEQ ID NO: 1585 - protein, 433 aa, Robiginitalea biformata HTCC2501
MHIVIIGNGISGITAARFIRKAADHSITVISAETDHFFSRTALMYIYMGHLTYEQTKPYEDSFWKKNRIDLVNAWVESVDPAAKTVRLSEGASIRYDKLILATGSKPNKFGWPGQDLPGVQGLYSKQDLDNLEANAPDNRTCKRAIIVGGGLIGIELAEMLRTRDIPVTFLVRENSFWSGVLPAGESAMINEHIREHHIDLRLGTNLVEILADDTGRARAVTTDKGETIDCDLVGLTAGVTPNIGFLDGSGIETGKGVLVNRFLETNHADIYAIGDCAEQREPIGNRRPVEAVWYTGRMMGEAVAQTICGNRREYKPGHWFNSAKFLDIEYQTYGWVMSGKNRGPRELHFHWRHPEKKICLTLAYDSKTRQLLGANTFGMRMRHEVFDAWLTEQRSIDAVVRDLRVACFDPEFHRDYHPLITRAFKEHEPVNA

SEQ ID NO: 1586 - protein, 169 aa, Glycine max
SEGDDFVDISEKNAVTLSKTKKKGRDHKETIVNGIKDAAEKYGCVYVFSFENMRNQKLKEFREQLKSNSRFFLGSNKVMQVALGRSASDEIRPGLHKVSKLLRGDSGMFFTNLSKEEVERLFKEFEEYDFARTGSIATEKVIGVSSYDYDFFIQHGMVLGLWGGAAKQP

SEQ ID NO: 1587 - protein, 866 aa, Colwellia psychrerythraea 34H
MNTDKQLLTKTNIVVVGNGMVGHHFVEEMAKNPNYQITVLSAESRLAYDRVHLSEYFGGKTADDLAMTTPEHYEALGVTFKTNAKVILIDKIVQYVTTESGETYHYDKLILATGSYPFVPPIPGKDQDHCLVYRTIDDLEDIAASAKESKVGVVIGGGLLGLEAANAIKQLGLQTHVVEFAPQLMGVQIDGGGGRLLRQKIEDLGVQVHTSKATSVIEKGNTSRYKLCFSDETELETDLILFSAGIRPYDNLAREFDLTLGERGGIVVNNQCQTSDENIYAIGECALWNNFIFGLVAPGYAMAKVVAKHIAGFTNEGNGENGEIAEFTGADMSTKLKLMGVEVGSIGDAHGKTEGALTYTYENQPEGVYKKIVVSSDKKSLLGAVLIGDTSEYDTLLQYMLNAIELPESPEGLILPMAADKPTLGVDALPDTATICSCHNVTKGDIIASIDAGAMTVGDVKSCTKAGSGCGGCAALVKSVADNEFEKRGVEVKKDICEHFAYSRQEIYDIVSVGKIKTFDELLEKHGRGLGCEICKPVAGSVLASVWNDYILKKPHLSLQDTNDTYLGNMQKDGTYSVVPRIAGGEITPDKLIVLGEVAKKYNLYTKITGGARVDLFGARVEQLPPIWKELVDAGFETGHAYGKSLRTVKSCVGSTWCRYGVQDSMSMAIDLEHRYKGLRAPHKIKFGVSGCTRECAEAQGKDIGIIATDNGWNLYVAGNGGMKPRHGDLFATDLDDETLVKYVDRILMFYVQTGDRLQRTSTWIDNLEGGLAYLQDVIINDSLGLNDALETQMKAIVGTYQCEWKTTIEDPEALKRFQPFVNSDKSDSNIQFVTEREQIRPARGQEKIDVKFIDATEKEAVAEEA

SEQ ID NO: 1588 - protein, 130 aa, Brassica napus
MAARRAHAAATLALLVAALVLSAAPAPAEGAVANCGQVVSYLAPCISYAMGRVSAPGGGCCSGVRGLNAAAATPADRKTTCTCLKQQASGIGGIKPNLVAGIPGKCGVNIPYAISQGTDCSKVRYSVRSF

SEQ ID NO: 1589 - protein, 333 aa, Thermus thermophilus HB27
WGLGSRTGPGSKRLQGLLDDRQRLMYDGATALAEGVLLALRETGRMGVLVSQGVHPEYRAVLRAYLEAVGAKLLTLPLEGGRTPLPEVGEEVGAVVVQNPNFLGALEDLGPFAEAAHGAGALFVAVADPLSLGVLKPPGAYGVDIAVGDGQSLGLPMGFGGPHFGFLATKKAFVRQLPGRLVSETVDVEGRRGFILTLQAREQYIRRAKAKSNITTNAQLTALMGAMYLAALGPEGLREVALKSVEMAHKLHALLLEVPGVRPFTPKPFFNEFALALPKDPEAVRRALAERGFHGATPVPREYGENLALFAATELHEEEDLLALREALKEVLA

SEQ ID NO: 1590 - protein, 262 aa, Polaromonas sp. JS666
MSYETIVTSTQGPDTRKVGIITLNRPKQLNALNDQLMDELGSALKGFDADNSVGCIILTGSDKAFAAGADISVMANYGFADVYNNDFITRNWEQIRGVRKPVIAAVSGFALGGGCELAMMCDFIIAADNAKFGQPEIKLGIIPGAGGTQRLPRAVGKAKAMDMTLTGRMMDAAEAERAGLVSRVVPLDKLMDEALGAALMICSYGPISLMAAKEAINRAFESGLSDGVMFERRLFHATFATDDQKEGMDAFLNKRKPVFSHR

SEQ ID NO: 1591 - protein, 618 aa, Spinacia oleracea
MASSLSNLYSSTSLKPKISHLPTITKNPISGPKSLSFKPISSVARDTPADLSTSSSSSTNNLPSLQKKKADGSLEKDPRALWARYVEWLYQHKDLGLYLDVSRIGFSDEFVKEMEPRFEKAFKHMEGIEKGAIANPDEGRMVGHYWLRNSSLAPTTFLKNQIDVTLDRVWQFANDVISGKIKAPTGERFTHILSVGIGGSALGPQFVAEALAPDNPPLKIRFIDNTDPAGIDHQIAQLGPELATTLVMVISKSGGTPETRNGLLEVQKAFRDAGLVFAKQGVAITQENSLLDNTARIEGWIDRFPMFDWVGGRTSEMSAVGLLPAALQGIDIKEMLAGAALMDEATKIPVLRSNPAALLAMSWYWASDGVGSKDMVVLPYKDSLLLFSRYLQQLVMESLGKEFDLDGNKVNQGLTVYGNKGSTDQHAYIQQLRDGVHNFFATFIEVLRDRPPGHDWELEPGVTCGDYLFGMLQGTRSALYANNRESISVTVQEVTPRSVGAMVALYERAVGLYASLVNINAYHQPGVEAGKKAAAEVLALQKRVLAVLNEASCKDPVEPLTIEEVADHCHCPDDIEMIYKIIAHMAANDRVILAEGDCGSPRSIKAFLGECNVDELYA

SEQ ID NO: 1592 - protein, 427 aa, Anabaena variabilis ATCC 29413
MTQTVKPSLAQSPIHRTVLDNGIVLLVAENPAADIIAGRIFIRAGSCYEKREQAGLAHLLAALMTKGCEGLSSLEIAEQVESVGASLSADTSTDYFLVSLKTVTSDFPEILALAGRILRSPTFPETQIELERRLALQDIRSQKEQPFTLAFEQMRQVMYQNHPYAMSVLGDETTLNSITRADLVEYHQTYFRPDNLVISVAGRITLQEVVALVEQVFGDWQTPSVAPAVVNLPKISVNPQHRLKPVQTQQSIVMLGYLGPSVSSPDYASLKLLSTYLGNGLSSRLFVELREKRGLAYEVSAFYPTRLYPASFVVYMGTAPENTSIALEGLRTEVELLCSKEVSTTNLQAAKNKILGQYALGKQTNGQIAQIYGWYEILGLGIDFDREFQELIAAVTAQDALTSAQQYLQQPYVSLVGQEEAINRAIN

SEQ ID NO: 1593 - protein, 566 aa, Spinacia oleracea
MAPSTLICDTDSWQNLKTHVAEIKKTHLRDLMSDADRCKSMMVEFDGLLLDYSRQNATHDTMSKLFQLAEASHLKDKINQMFNGEHINSTENRSVLHVALRASRDAVINGDGKNVVPDVWQVLDKIRDFSEKIRSGSWVGVTGKPLTNVVAVGIGGSFLGPLFVHTALQTESEAAECAKGRQLRFLANVDPIDVAKNISGLNPETTLVVVVSKTFTTAETMLNARTLREWISSALGPAAVAKHMVAVSTNLTLVEKFGIDPKNAFAFWDWVGGRYSVCSAVGVLPLSLQYGFPIVEKFLKGASSIDQHFHSAPLEKNLPVLLGLLSLWNVSFLGHPARAILPYCQALEKFAPHIQQVSMESNGKGVSIDGVVLPFEAGEIDFGEPGTNGQHSFYQLIHQGRVIPCDFIGIAKSQQPVYLKGEVVSNHDELMSNFFAQPDALAYGKTQEELQKENISPHLVPHKTFTGNRPSLSLLLPSLTAYNVGQLLAIYEHRVAVEGFVWGINSFDQWGVELGKSLANQVRKQLHASRTNGEAVKGFNFSTTTVMAKYLQETSDVPAELPTKLP

SEQ ID NO: 1594 - protein, 266 aa, Streptomyces coelicolor A3(2)
MSEERFGEFVLVRRRGEGHVAELALDRPKAMNAVSTAMARSVGAACAALGEDRSVRVVVLTSTHERAFCVGADLKERNSFTDADLLRQRPVTRGAYTAVLELPVPTVAAVHGFALGGGFELALSCDVIVADPTAVVGLPEVSVGVIPGGGGTQLLPRRVGAARAAELVFTARRVAAEEARELGLVDQLVPEGRDREEALELAARMAANSPVGLRAAKRALRLGHGLDLRAGLEVEDAAWRSVAFSGDRAEGVAAFNEKRAPRWPGE

SEQ ID NO: 1595 - protein, 206 aa, Zea mays
MASRRRTLLKVIILGDSGVGKTSLMNQYVNKKFSNQYKATIGADFLTKEVQFEDRLFTLQIWDTAGQERFQSLGVAFYRGADCCVLVYDVNSMKSFDNLHNWREEFLIQASPSDPDNFPFVLLGNKVDVDGGNSRVVSEKKAKAWCASKGNIPYFETSAKDGTNVEDAFQCIVKNALKNEPEEELYVPDTVDVVGGNRAQRSSGCC

SEQ ID NO: 1596 - protein, 740 aa, Arabidopsis thaliana
MADFKILLLILILISLFELDLLHFHHDFFSPFPVKIGLLLISIFFYAYSTTRSKPVYLVDFSCHQPTDSCKISSETFFNMAKGAQLYTDETIQFMTRILNRSGLGDDTYSPRCMLTSPPTPSMYEARHESELVIFGALNSLFKKTGIEPREVGIFIVNCSLFNPNPSLSSMIVNRYKLKTDVKTYNLSGMGCSAGAISVDLATNLLKANPNTYAVIVSTENMTLSMYRGNDRSMLVPNCLFRVGGAAVMLSNRSQDRVRSKYELTHIVRTHKGSSDKHYTCAEQKEDSKGIVGVALSKELTVVAGDSLKTNLTALGPLVLPLSEKLRFILFLVKSKLFRLKVSPYVPDFKLCFKHFCIHAGGRALLDAVEKGLGLSEFDLEPSRMTLHRFGNTSSSSLWYELAYVEAKCRVKRGDRVWQLAFGSGFKCNSIVWRALRTIPANESLVGNPWAIGVTMWTVKLAAMPVQFLMEQSPLAIYSHHHRIKATPWELPNWSHLVSAAYATDFVNGLLIFKDVQLQQHSMELSLLMLISNMSGGKKSHTQRECITCLDYPHSFGDFTPAEQDHSIHRRLIGTTTVLIPDVYGQRWSHSKMHIDGTTNESNVVVKLRSNASDIIWEVKMEGRRLIQGWLKLPTSRVGDVVVFRHDGDLLFIVTSFGPSCYEIRLLPGTILMADGVEKVRKITLVDRYGVKREMSLKPEDRYGRMSSSHDTSLWSIDLKGKVNGAVETCGVTFHRLDTY

SEQ ID NO: 1597 - protein, 492 aa, Oryza sativa
MVLSHGVSGSDESVHSTFASRYVRTSLPRFRMPEQSIPKEAAYQIINDELMLDGNPRLNLASFVTTWMEPECDKLIQASVNKNYVDMDEYPVTTELQNRCVNMIAHLFNAPLGDSETAVGVGTVGSSEAIMLAGLAFKRRWQNKMKAAGKPCDKPNIVTGANVQVCWEKFARYFEVELKEVKLSDGYYVMDPAKAVDMVDENTICVAAILGSTLNGEFEDVKLLNDLLTKKNAETGWDTPIHVDAASGGFIAPFLYPELEWDFRLPLVKSINVSGHKYGLVYAGIGWCIWRSKEDLPEELIFHINYLGADQPTFTLNFSKGSSQVIAQYYQLIRLGFEGYKNIMENCQENAMVLKQGLEKTGRFNIVSKDNGVPLVAFSLKDSARHNEFEISDFLRRFGWIVPAYTMPPDAQHVTVLRVVIREDFSRTLAERLVLDVEKVLHELDALPARVVANGGDAAAASASEREMEKQREVISLWKRAVLAKKKTNGVC

SEQ ID NO: 1598 - protein, 395 aa, Rickettsia rickettsii
MRVNIIVPSLGESITEATIAKWYKKEGDSVKTDELLLEIETEKVTLEVHAPCNGTIGKISKTDGANVAVGEEIGEINEGASVNTAGTNNESAKAQPVTQPTSEKPAVANNTLAPSVQKLVTENKLDPNNIKGTGRDGRITKGDVLATINTTTTSAPAISKSNEERVQRVRMSRLRKTIAQRLKDSQNTAAILTTFNEIDMSKVIALRNQYKEEFEKKHTVKLGFMSFFVKATIEALKLIPSVNAEIDGDDLVYKNYYDIGVAVGTEQGLVVPVVRDADKMGFAEVEKTIGILAKQAREGKLSMADLSGGTFSISNGGVYGSLLSTPIINPPQSGILGLHKTEERAVVIDGKIEIRPMMYIALSYDHRIIDGKEGVSFLVKIKQLIENPEKLLLNL

SEQ ID NO: 1599 - protein, 536 aa, Glycine max
MDSNSSSPSPNNHASTTKINGFFHPKLGSQPATSSRSRLAMASPVNSDPKVVTGTAGYILEDVPHFTDYIPNLPTYPNPLQDNPAYSVVKQYFVHVDDSVPQKVVVHKDGARGVHFRRAGPRQKVYFEADEVQAAIVTCGGLCPGLNTVIRELVCGLHHMYGVKRVLGINGGYRGFYARNTITLTPKSVNDIHKRGGTVLGTSRGGHDTKKIVDSIQDRGINQVYIIGGDGTQKGASAIFEEVRRRGLKVSVVGIPKTIDNDIPVIDKSFGFDTAVEEAQRAINAAHVEAESVENGIGVVKLMGRNSGFIAMYATLASRDVDCCLIPESPFYLEGPGGLYEYIEKRLKENGHMVIVIAEGAGQELVSESVQSMSKQDASGNKLFQDVGLWISQKIRDHFAAQKTLPITLKYIDPTYMIRAIPSNASDNVYCTLLAQSAVHGAMAGYTGYTSGLVNGRQTYIPFYRITERQNHVVITDRMWARPLSSTNQPSFLDSKGDNEEKKEEEAALNQLPDGHCSKDTSLANKEINSIYPTTC

SEQ ID NO: 1600 - protein, 146 aa, Triticum aestivum
  misc_feature (82)..(82): Xaa can be any naturally occurring amino acid
  misc_feature (99)..(99): Xaa can be any naturally occurring amino acid
  misc_feature (116)..(116): Xaa can be any naturally occurring amino acid
  misc_feature (122)..(122): Xaa can be any naturally occurring amino acid
  misc_feature (133)..(133): Xaa can be any naturally occurring amino acid
VRIALDVADAMAFMNGYGIAYRDLNARKILLDRQGNACLGDMGIVTPCSNVGEVTEYETSGYRWLAPEIIAGDPETVSETWXMSNVYSYGMVLWEMITXEKEAYSTYSPMQAAVRXAACRLXRPEIPKNCPPXLRSLMNKCWDIPL

SEQ ID NO: 1601 - protein, 503 aa, Oryza sativa
MASITSELLFFLPFILLALLTFYTTTVAKCHGGHWWRGGTTPAKRKRMNLPPGAAGWPLVGETFGYLRAHPATSVGRFMEQHIARYGKIYRSSLFGERTVVSADAGLNRYILQNEGRLFECSYPRSIGGILGKWSMLVLVGDPHREMRAISLNFLSSVRLRAVLLPEVERHTLLVLRAWPPSSTFSAQHQAKKFTFNLMAKNIMSMDPGEEETERLRREYITFMKGVVSAPLNLPGTPYWKALKSRAAILGVIERKMEERVEKLSKEDASVEQDDLLGWALKQSNLSKEQILDLLLSLLFAGHETSSMALALAIFFLEGCPKAVQELREEHLGIARRQRLRGECKLSWEDYKEMVFTQCVINETLRLGNVVRFLHRKVIKDVHYKGYDIPSGWKILPVLAAVHLDSSLYEDPQRFNPWRWKSSGSSGGLAQSSSFIPYGGGTRLCAGSELAKLEMTVFLHHLVLHFRWELAEADQAFVFPFVDFPEGLPIRVHRIAQDDELEL

SEQ ID NO: 1602 - protein, 487 aa, Ralstonia sp. SJ98
MQTQLFIDGRFVAALSGETLATLNPHDNSEIAQVSMAGREDVDRAVQAAKKAFPAWSAMAAADRGRLLLKLADAIEANADELARLESMDTGHPIRDTRNLDVPRTAATFRYFGGMADKFEGSVIPVEASFLNYLTREPVGIVGQVVPWNFPLMFTSWKMAPALAAGNCVVMKPAELTPLSSLAIAQLMAEVGFPAGVVNVLPGFGHVAGQYIAEHPEIGKVAFTGSTAVGRKIVQASSGNLKKVQLELGGKGANVVFGDANLDAVVQGSAFGIFHNQGQACIAASRLIVHESIADDLLERFTSLARSIRIGDPLDPSTEMGPLTSQMHRDRVLSYVDVAREQGGRVLAGGKSPDAAGLAKGCYVEPTIVQAKPTDRVAQEEVFGPFVTVSTFKSDEEGLAIANGTEYGLGAGLWTRDLQRAHLFARQLKSGMVWINCYKRVNPGSPFGGVGASGYGREMGFEVMREYTQAKSVWVNVDANIPPYYPR

SEQ ID NO: 1603 - protein, 917 aa, Bifidobacterium longum NCC2705
MATPEEQITPADAAIVTTGTGRKGPEEHDLPESLKYDMDLCLEILRNVLGEYNPELLSTFDTVRHYAVEASAEHFAELKDPNPDQDGLKEAVNVIDNMTLHDAQLLARAFATYFHLANLSEENYRVSVLHERENNVSVDQAVDPINELTVAYHQLINETGPAKAKELLNQLEFHPVFTAHPTEARRKAVEGKIRRVSELLEEYKRLGGSDKKECLRRLYNEIDALFRTSPIALKKPTPVEEADTILDIFDNTLFNTIPKVYRRFDDWVLGDKAGLVEPACPAFFHPGSWIGSDRDGNPNVTAKVSRAVARKFSDHVIAALEQATRTVGRNLTMEAETTPPSAELKSLWSHQKEMSERLTDKAALISTKEMHRAVMLVMADRLHYTIERDADLMYHSCDDFLADLKVVQRSLAAAGAKRSAYGPLQDLIWQTETFGFHMVEMEFRQHSVVHARALADIREHGLHGERGELQPMTHEVLDTFRALGAIQKRNGLKAARRYIISFTKSAQNIKDVYELNRLAFSHPEDVPTIDVIPLFEQLEDLQNSVDVLEEMIKIPEVQARLKATGNKLEVMLGYSDSSKDAGPTSATLALHSAQERIAKWAESHDIDLTLFHGRGGAVGRGGGPANRAVLAQPVGSVKCRFKLTEQGEVIFARYGNPVLAIRHVESVAAATLLQSAPSVEKRNTEMTEKYADMAAQLDEAAHNRFLDLLNTDGFAPWFSIVTPLTEIGLLPIGSRPAKRGLGAKSLDDLRTIPWIFSWAQARINLAAWYGLGTACEKFGDLETMRQAYEEWPLFSTFIDNIEMSIAKTDERIARMYLALGDREDLNEKVLNEMELTRKWVLAIVGDKWPLQHRHVLGQAIRIRSPYVDALSVTQVLALKSLRKKVDKEELSQSQQAGFIYLILCTVSGVAAGLQNTG

SEQ ID NO: 1604 - protein, 571 aa, Arabidopsis thaliana
MADEAKAKGNAAFSSGDFNSAVNHFTDAINLTPTNHVLFSNRSAAHASLNHYDEALSDAKKTVELKPDWGKGYSRLGAAHLGLNQFDEAVEAYSKGLEIDPSNEGLKSGLADAKASASRSRASAPNPFGDAFQGPEMWSKLTADPSTRGLLKQPDFVNMMKEIQRNPSNLNLYLQDQRVMQALGVLLNIQIRTQQAGDDMEIGEEEMAVPSRKEPEVEKKRKPEPEPEPEPEFGEEKQKKLKAQKEKELGNAAYKKKDFETAIQHYSTAMEIDDEDISYITNRAAVHLEMGKYDECIKDCDKAVERGRELRSDYKMVAKALTRKGTALGKMAKVSKDYEPVIQTYQKAITEHRNPETLKRLNEAERAKKELEQQEYYDPNIGDEEREKGNDFFKEQKYPDAVRHYTEAIKRNPKDPRAYSNRAACYTKLGAMPEGLKDAEKCIELDPTFLKGYSRKGAVQFFMKEYDNAMETYQKGLEHDPNNQELLDGVKRCVQQINKANRGDLTPEELKERQAKGMQDPEIQNILTDPVMRQVLSDLQENPAAAQKHMQNPMIMNKIQKLISSGIVQMK

SEQ ID NO: 1605 - protein, 398 aa, Legionella pneumophila subsp. pneumophila str. Philadelphia 1
MFELMESSQQENNAVIKVVGVGGGGGNAVEHMVAENIDGVEFICANTDAQALRGSSAKIHIQLGDALTKGLGAGANPQIGREAAEEDREHIKEILSGADMVFITAGMGGGTGTGAAPVFAEIAKELGILTVAVVTKPFSFEGKQRALAAEEGIRRLAEHVDSLITIPNNKLLSVLGKNISLLNAFKAANNVLLGAVKGISDLITRPGLINVDFADVRTVMSEMGMAMMGTGSAVGEQRARQAAEAAIASPLLEDVNFSGARGILVNITAGLDMSIGEFEEVGDVVKEFISDDATVVVGTVIDPEMTDEMRVTVIVTGLGDNRQRQQQPQQPLRARLVETTRSDGSLDYQQLERPAVIRKQAQTGTATTATKQTNNGNESVPDVDYLDIPAFLRRQEEA

SEQ ID NO: 1606 - protein, 500 aa, Idiomarina baltica OS145
MLKIKSTDSNRTLLSLDDSYLFDDVHDWRAQRLTEIDLKPAKQQLVIGEYKNVTEGRKVTHTLCRSRAAIEALQQPTHSFTAIVNKIRSSQWLGVTGKPITDVVNIGVGGSDLGPQMASFALKEFDDESSSSAVDVHFVSSMDGGQLYAVLPIVDPETTLFVIASKSFGTIDTFANVDTVKCWVNHVMSESAWLEHHVIGVSSNKEKMTAYGIPEHHQLSFDEGVGGRFSLWSTIGLSIAVSIGMAPFCKMLAGALAVDEHFLTVPDNDNVPVRLALNGVYLRQQKGINNLAILPYDGRLRMLPSYLQQLDMESNGKQATRDNKSLHQPTGPILWGGFGPNGQHAFYQHLHQGYDDFAADFVLVLNRSATRFPPQVAASLQQQQRLSVANCLAHRRLLWWGDKSVESPRDNYPGSHASNLLLLDELTPESFGALIAVYEHKIFIQGLLWDVNSFDQPGVEKGKKYALSVLDALSDNQSEDFDDVTNALIDYYRQHINRDS

SEQ ID NO: 1607 - protein, 595 aa, Caulobacter crescentus CB15
MGGGGAPMSAETKDIDLERAVASRRVNTYLRLSSTFAICATLHLVVGLRWVWIWGALYTAIQFLETWLALQLIKRPQSSPDRWRRFSVIALPFLTSAVFGFLAIPLFASDARFAPTLGGMLLAGALMNVVIVHGGLRSATIAAATPYVGYLLVIPIVARQANPDAPLANALWFGALLLIAAVAVASRTLHAALKAEADAKTEAERRRHEAEEAVAAKSAFVAMISHELRTPISAILAGAGRLHSEAPEASSKVHAQLIADAGGLMRTLLNDLLDFSRLEAGRMSVEKSPFNLRQSLSDTLRFWRPELARKGLKLRVVGASTIPQWTLGDAMRLKQVLNNLLSNAAKFTRSGGVSVTLRAEIVGDQVRLVVDVVDTGPGIPEAALPRLFTPFDQLNESVARLHGGSGLGLAISRELARLMGGDLTASNALGQGAHFRFSALLEAAEAPVVPTLGPSISGLRVLVVDDHVVNRRAVELVLQPFGVEATLAESGEEALELLRSEVFDAILMDVYMPGMDGRETTRTLRAGQGPNRDAPVVAVTASATIKDWEACAAAGMNAHVAKPIDPAELFSALAQVMAARDAVGPFRTDVAASSA

SEQ ID NO: 1608 - protein, 657 aa, Oryza sativa
  misc_feature (250)..(250): Xaa can be any naturally occurring amino acid
MDFTNLLITVLLLLSPLKYESDVATASDDEDFFKTCSSQRCSKHGPEIRYPFRLSTQPPSCGAPGMQLSCSGQDTILDHPVLGSCKVTMIYYRHVIMNAIPLVDSLPHCPLQKLVSVNQSTAVYKPHTSEVASVVGCSRDSIDTNQYGIVGPTSCPSLANNASQFWYLAYPYTYMSILPLGCTIVSKDIPMPYSYDKNGPNFDISIFTETAKRVISTGETVFTWYTSNVTSICQQCEREGRRCGFSSQRXSSILPASYVNRVETRTYPSYTTLVRKLCTCIFPAMLCKIIESGPRVTIIAATSSVGTFIVLSLIVATALYISLKSRYNEEIHLKVEMFLKTYGTSKPMRYTFSEVKKIARRFKDKLGHGAFGTVYKGELPNGVPVAVKMLENSVGEGQEFINEVATIGRIHHANIVRLLGFCSEGTRRALIYEFMPNESLEKYIFPHGSNISRELLVPKKMLDIALGIARGMEYLHQGCNQRILHFDIKPHNILLDYSFNPKISDFGLAKLCARDQSIVTLTAARGTMGYIAPELYSRNFGAISYKSDVYSFGMLVLEMVSGRRNTDPTVESQNEFYFPEWIYERVINGQDLVLTMETTQGEKEMVRQLAIVALWCIQWNPKDRPSMTKVVNMLTGRLQNLQVPPKPFISSQNQLVI

SEQ ID NO: 1609 - protein, 227 aa, Neisseria meningitidis MC58
MELVFIRHGQSEWNAKNLFTGWRDVKLSEQGLAEAAAAGKKLKENGYEFDIAFTSVLTRAIKTCNIVLEESDQLFVPQIKTWRLNERHYGQLQGLDKKQTAEQYGDEQVRIWRRSYDTLPPLLDKDDEFSAHKDRRYAHLPADVVPDGENLKVTLERVLPFWEDQIAPAILSGKRVLVAAHGNSLRALAKHIEGISDEDIMGLEIPTGQPLVYKLDDNLKVIEKFYL

SEQ ID NO: 1610 - protein, 425 aa, Pinus taeda
MEGLKEFSPRLMIVSDLDNTMVDHHDPENISLLRFNALWEADYRHDSLLVFSTGRSPTLYKELRKEKPLLTPEITIMSVGTEITYGDSMSPDKGWEEVLNQGWDRGTVVKEASRFPQLKFQVETEQRPHKVSFYIEKTKSSEVINALSKRLEEHQLDVKIIYSGGIDLDILPQGAGKGQALAYLLKKFNSKGKSPQNTLVCGDSGNDAELFSVADVYGVMVGNAQEELLQWYEGNAKSNPKVILAHERCAAGIIQAMQHFNLDPNVSPRDIVGLSQTGAKYFLLGHEIVEFHLLCERWRRAEVEDSNEIFQRFKSAIDPNCSLLHPWGVEENLFTSIDVLRQCYGDQKGKQFRIWIDRIRPLKISLDIWLVRFDKWELIERERRCCCTTALLKVKPDAPNSLSWIHIHETWLDGCGSSTNLCCSI

SEQ ID NO: 1611 - protein, 548 aa, Mycobacterium tuberculosis CDC1551
MSDARVPRIPAALSAPSLNRGVGFTHAQRRRLGLTGRLPSAVLTLDQQAERVWHQLQSLATELGRNLLLEQLHYRHEVLYFKVLADHLPELMPVVYTPTVGEAIQRFSDEYRGQRGLFLSIDEPDEIEEAFNTLGLGPEDVDLIVCTDAEAILGIGDWGVGGIQIAVGKLALYTAGGGVDPRRCLAVSLDVGTDNEQLLADPFYLGNRHARRRGREYDEFVSRYIETAQRLFPRAILHFEDFGPANARKILDTYGTDYCVFNDDMQGTGAVVLAAVYSGLKVTGIPLRDQTIVVFGAGTAGMGIADQIRDAMVADGATLEQAVSQIWPIDRPGLLFDDMDDLRDFQVPYAKNRHQLGVAVGDRVGLSDAIKIASPTILLGCSTVYGAFTKEVVEAMTASCKHPMIFPLSNPTSRMEAIPADVLAWSNGRALLATGSPVAPVEFDETTYVIGQANNVLAFPGIGLGVIVAGARLITRRMLHAAAKAIAHQANPTNPGDSLLPDVQNLRAISTTVAEAVYRAAVQDGVASRTHDDVRQAIVDTMWLPAYD

SEQ ID NO: 1612 - protein, 94 aa, Bartonella vinsonii subsp. arupensis
DEIIDHLADSHMVFITAGMGGGTGTGAAPVVARAAREKGILTVGVVTKPFQFEGARRMKTAEAGIEELQKSVDTLIVIPNQNLFRIADEKTTFA

SEQ ID NO: 1613 - protein, 433 aa, Arabidopsis thaliana
MAIIPLAQLNELTISSSSSSFLTKSISSHSLHSSCICASSRISQFRGGFSKRRSDSTRSKSMRLRCSFSPMESARIKVIGVGGGGNNAVNRMISSGLQSVDFYAINTDSQALLQSSAENPLQIGELLTRGLGTGGNPLLGEQAAEESKDAIANALKGSDLVFITAGMGGGTGSGAAPVVAQISKDAGYLTVGVVTYPFSFEGRKRSLQALEAIEKLQKNVDTLIVIPNDRLLDIADEQTPLQDAFLLADDVLRQGVQGISDIITIPGLVNVDFADVKAVMKDSGTAMLGVGVSSSKNRAEEAAEQATLAPLIGSSIQSATGVVYNITGGKDITLQEVNRVSQVVTSLADPSANIIFGAVVDDRYTGEIHVTIIATGFSQSFQKTLLTDPRAAKLLDKMGSSGQQENKGMSLPHQKQSPSTISTKSSSPRRLFF

SEQ ID NO: 1614 - protein, 91 aa, Bartonella vinsonii subsp. arupensis
EIIDHLSRFHMVFITAGMGGGTGTGAAPVVARAAREKGILTVGVVTKPFQFEGARRMKTAEAGIEELQKSVDTLIVIPNQNLFRIADEKTT

SEQ ID NO: 1615 - protein, 318 aa, Silene latifolia
NFLFKSPKEDSPLKATDFGLSDFIKPSRKFTDIVGSAYYVAPEVLKRKSGPESDVWSIGVITYILLCGRRPFWDKTEDGIFKEVLRNKPDFRRKPWPSISNSAKDFVRKLLVKDPFVRPTAAQALSHQWVREGGSALDIPIDISVLHNMRQFVKYSRMKQFALRALASTLNDDELANLRDQFDAIDVDKSGTISLEEMRQALAKDLPWKLKDSRVMEIVEAIDSNTDGFVDFTEFVAATLHVHQLHELDNEKWQELSQRAFEKFDVDKDGYITPDELRMQTGLKGSMEPLLEEADIDKDGRISLAEFRRLLRSASMSS

SEQ ID NO: 1616 - protein, 318 aa, Silene latifolia
NFLFKSPKEDSPLKATDFGLSDFINRSRKFTDIVGSAYYVAPEVLKRKSGPESDVWSIGVIMYILLCGRRPFWDKTEDGIFKEVLRNKPDFRRKPWPSISNSAKDFVRKLLVKDPLVRLTAAQALSHQWVREGGNALDIPIDISVLHNMRQFVKYSRMKQFALRALASTLNDDELANLRDQFDAIDVDKSGTISLEEMRQALAKDLPWKLKDSRVMEIVEAIDSNTDGFVDFTEFVAATLHVHQLHELDNEKWQELSQRAFEKFDVDKDGYITPDELRMHTGLKGSMEPLLEEADIDKDGRISLAEFRRLLRSASMSS

SEQ ID NO: 1617 - protein, 236 aa, Saccharomyces cerevisiae
MPRSKRSKLVTLAQTDKKGRENKERIFDEVREALDTYRYVWVLHLDDVRTPVLQEIRTSWAGSKLIMGKRKVLQKALGEKREEEYKENLYQLSKLCSGVTGLLFTDEDVNTVKEYFKSYVRSDYSRPNTKAPLTFTIPEGIVYSRGGQIPAEEDVPMIHSLEPTMRNKFEIPTKIKAGKITIDSPYLVCTEGEKLDVRQALILKQFGIAASEFKVKVSAYYDNDSSTVESTNINME

SEQ ID NO: 1618 - protein, 380 aa, Candidatus Kuenenia stuttgartiensis
MKKRIAVLAGDGIGPEIMKEGLKVLDAIAKQFNHIFDYKEALVGGCAYDKYGHPLPDETKEVCNNSDAIYFGAVGGPKWENLPPELTPERGALLPLRGTYNLFANLRPAIIFGPLADAASLKSERLEGGLDILIVRELTGGIYFGRNKVKTLTLHEGALQGNYAVDYMIYSVPEIERIAAVACDAAMKRNKKLTSVDKANVLESSKLWRKVVTDYVQSHFPQIQLNHMYVDNAAMQLATNPKQFDVIVTENMFGDILSDLASAITGSIGMLPSASLAKTGFGLFEPIHGSAPDIAGLNKANPLAQILSGAMLLKYAFGLNRESKAIEEAIMKALENGYRTADLANKTTQEGKILLTSQMGDKVVEYLMVKSETNSNEKMI

SEQ ID NO: 1619 - protein, 357 aa, Desulfotalea psychrophila LSv54
MKKIAVLAGDGIGPEVMEQALKVLVAVQKKFGFELSFQHADVGGAAIDSHGVALPESTLTLCAESDAILFGSVGGPKWEHLPPAEQPERAALLPLRKHFDLFCNYRPARVFKSLTAACPLRADIIGDGFDILCVRELTSGIYFGTPKGREGAGEDEYAYDTMGYKRSEVRRIAHMAFAAARQRSGKVTSVDKANVLTTMVLWREVVLEVAKEYPDVKLNHIYVDNATMQLVRDPHQFDVMLCGNMFGDIISDEAAMLTGSMGLLASASLNTENFGLFEPAGGSAPDIAGQGIANPIAEILSAAMMLRYSLGYGEAADAIEAAVEKTLDRGICTADIAVDRSQAVNTAEMGDAIVAAL

SEQ ID NO: 1620 - protein, 420 aa, Pyrococcus abyssi GE5
MVEQDPFEIAVKQLERAAQYMKISEEALEFLKRPQRIVEVTIPVEMDDGSVKVFTGFRVQYNWARGPTKGGIRWHPEETLSTVKALAAWMTWKTAVMDLPYGGGKGGIIVDPKKLSDREKERLARGYIRAIYDVISPYEDIPAPDVYTNPQIMAWMMDEYETIARRKTPAFGIITGKPLSIGGSLGRNEATARGASYTIREAAKVLGWDDLKGKTIAIQGYGNAGYYLAKIMSEDYGMKVVAVSDSKGGIYNPDGLNADEVLKWKREHGSVKDFPGATNITNEELLELEVDVLAPAAIEEVITKKNADNIKAKIVAEVANGPVTPEADEILFEKGILQIPDFLCNAGGVTVSYFEWVQNITGYYWTLEEVREKLDKKMTKAFYDVYNTAKEKNIHMRDAAYVVAVQRVYQAMLDRGWVKH

SEQ ID NO: 1621 - protein, 376 aa, Candida albicans SC5314
MLAARSSIRRCFSTSSTTLKSLKIGLIPGDGIGREVIPAGKAVLENLPAKHDLQFEFVNLDAGFELFKKTGTALPDETVDVLKKECDGALFGAVSSPTTKVAGYSSPIVALRKKLGLYANVRPVKSVEGIGRPVDMVIVRENTEDLYIKEERVYKKEDGTKVAEAIKRITETASTRIAKMAYEIALQREAVRKGTSGKQLHEKPSVTVTHKSNVLSQSDGLFRETCRAVYDANANEYGGIEYKEQIVDSMVYRMFREPEIFDVVVAPNLYGDILSDGAAALVGSLGVVPSANVGDNFAIGEPCHGSAPDIEGKGISNPVATIRSTALMLEFMGYPEAAATIYQAVDANLAEDKIKTPDLGGNSTTQEVIDDIIRRF

SEQ ID NO: 1622 - protein, 249 aa, Arabidopsis thaliana
MKFNVANPTTGCQKKLEIDDDQKLRAFYDKRISQEVSGDALGEEFKGYVFKIKGGCDKQGFPMKQGVLTPGRVRLLLHRGTPCFRGHGRRTGERRRKSVRGCIVSPDLSVLNLVIVKKGENDLPGLTDHESKMRGPKRASKIRKLFNLKKEDDVRTYVNTYRRKFTNKKGKEVSKAPKIQRLVTPLTLQRKRARIADKKKKIAKANSDAADYQKLLASRLKEQRDRRSESLAKERSRLSSAAAKPSVTA

SEQ ID NO: 1623 - protein, 119 aa, Glycine max
MASLKFACVVAVICMVVVITAPMTNAITCGEVARSLSPCINYLRSRRGGSPEAECCRGVTSLNRAASNTADRRTACNCLKSVAASISGLNANNAASLPGRCRVRVPYRISTSTNCNRIR

SEQ ID NO: 1624 - protein, 464 aa, Listeria monocytogenes
MLYSKENKESYLEPVFGSSAEDRDIPKYTLGKEPLEPRIAYRLVKDELLDEGSARQNLATFCQTYMEDEATKLMSETLEKNAIDKSEYPRTAELENRCVNIIADLWHAPKDQKFMGTSTIGSSEACMLGGMAMKFAWRKRAEKLGLDIYAKKPNLVISSGYQVCWEKFCVYWDIDMRVVPMDKEHMQLNTDQVLDYVDEYTIGVVGILGITYTGRYDDIYALNEKLEEYNSKTDYKVYIHVDAASGGFFTPFVEPDIIWDLRLKNVISINTSGHKYGLVYPGIGWVLWKDESYLPEELIFKVSYLGGEMPTMQINFSRSASHIIGQYYNFLRYGFEGYRTIHQKTSDVAQYLAHAVEQTGYFDIFNDGSHLPIVRYKLKDDANVNWTLYDLADRLQMRGWQVPAYPLPKSLENIIIQRYVCRADLGFNMAEEFIQDFQASIQELNNAHILFHDTQQSGVHGFTH

SEQ ID NO: 1625 - protein, 638 aa, Bifidobacterium longum NCC2705
MTQTNNLYDVVVIGGGPAGLTAGLYLARARYRVLILEKDDFGGQITITNEVVNYPGVGRTTGRALTQTMRQQAQDFGAEFLSAEATGLDVDGDIKTVHTSRGDLKTFGILIATGASPRKLGFEGEAEYAGRGVAYCATCDGEFFTGKEVLVVGGGFAAAEESVFLTKYASKVTVLVREPDFTCDAAVAAEAKNNPKIDVRYQVELKGVTAGQGGLREASILNLATGQTETWKPADAGTFGVFVFAGYVPATDLVRGVVELDDHGYVVTHDYLRTSVPGVYAAGDLRVKNLRQVVTATADGAIAAVELERYAKQMSEKTGLVPPRPTASAYEESEAKAASAASAAGTTPAPAPAKRSADAAAAASAAKKPGELFSAAVKQQLGVVFGRMTRPVTLALELDGTPLSAELQGFIGEMVALSGGKLNSVAVDAAGLITAVDGASVPTSLVVGEPLSVTLPDGTELPTYGSLDDSGRATFDVAGVLPLARPTVRICVPAEGDGKAGKDGNGSLVFTGLAFHGVPSGHEFNSFVLGLYNAAGPGQPLGDDLVERAKSITDPLNIMILVSLTCTMCPETVLASQRIASLSPAVRAEAYDVSHFPELKDQYGAMSVPCIVITHADGTQQVEFGKKSIPQMLELVGA

SEQ ID NO: 1626 - protein, 541 aa, Mesorhizobium loti
MIRTVPTKPYADQKPGTSGLRKKVPVFQQEHYAENFIQSIFDALDGFKGKTLVIGGDGRFYNREVIQKAIAMAAANGFGKVMVGQGGILSTPAASHVIRKYKTFGGIILSASHNPGGPHEDFGIKYNAGNGGPAPEKLTDAIAKTKAISSFKTSDIDPIDMDTIGTVKAGGMTVEIIDPVADYAELMESLFDFDALRRLFKSGFRMRFDAMHAVTGPYAKEILENRLGAPNGTCRNFKPLPENGGHHPDPNLVHAKHLYDEMMGPDAPDFGAASDGDGDRNLIIGKGIFVTPSDSVAMLAANAKLAPGYKDGLKGIARSMPTSGAADRVAEKLGIGIYETPTGWKFFGNLLDAGMATICGEESAGTGSNHVREKDGLWAVLLWLNILAARGESCKQVVTEHWATYGRNYYSRHDYEEVESDRANALVDELRAKLGSLPGTSVNGLKIAKADDFAYHDPVDGSTSEHQGIRIRVRSGSRVVFRLSGTGTSGATLRVYIERYEPDKARHDLDTQAALADLIAAADDIAGIKSHTGRNKPSVIT

SEQ ID NO: 1627 - protein, 850 aa, Caulobacter crescentus CB15
MRRVLILFVLVMTFGASGAWAKSDAPLAQRLEQLSQKIGAHEVRKPPRDNDDIERAGRSALREAGQERLYGLWRVLYALKSNQIQGRFDAWAARTREVARRDKDATLEALVDLEVLAYRHESGGFQAFQDKDWDRFLKSSGPDIRLMAGIERVRHLGQIGRWAEAARLAAELTGDLERRGHIAQPLLAELHQVHSYTLSDLGDKEGALDHMAQAAALDERDTFYVRKIERIYDIAFSAADLGELAAAERFATLHHKLTMADGDPGLVTWDRFLCARIAGLREAPERVIQCLAPAAGLLANPDRRLQVRMLGQRALALAQLGQSQAARRDLERLKTIPETLASRDRPLEALVEAYIDQYEGRSADAFRKLDAWRKADGLVSRNAYAKGVAEMSAALESELRVKRDESRRLTEQVRLSRSLARASVVIALLLGVLVAGAAAWAVHQRGASRRLRLAQERAEAASTAKSAFLAVMSHELRTPLNGMLGLAQALRSDQLTPAQREQVDLILDSGDTLLVLLNDILDLSKIEAGKLEIAPTAGDLVQTCARLVGGYQPTAREKGVTLSFQLDGEAPGWLMFDGVRVRQCLSNLVSNALKFTSQGKVEVALACYPEAGDRVRVRLRVADTGIGMNAATVAKLFRPFTQADASTTRNFGGTGLGLNITRRLVEMMRGDIQVESEEGVGSVFTIEMVMDQALAIEAAPSEAGATSESIGAAALQGRRVLVVDDHPVNRRVIRLFLEPFECELVEAENGRHALDVLQHEAVDLVLMDVNMPVMDGLEATRRLRQDPRFARLPVVALTADVMSAQIKTCLDAGCDAHVAKPIDLRNLLSVMDRCLAQSLARDAAARLGAL

SEQ ID NO: 1628 - protein, 272 aa, Corynebacterium efficiens YS-314
MTNSITSITEQDTAVGFETITAEATDRIGVITINRPEKRNALSKTVLAEIGRVLDTWEEDPDVQAVIFTGAGEKAFVAGADISQLAHYDLHYGLAAHMQKLYDRIEDYPKPTIAAINGVALGGGLELAMSCDIRIVSENAKVGLPEATLGVLPGAGGPQRLSRLVGKGRAVEMILTSRVLTAQQALDYGLATEVHPLAELVDAARTTAGTILSKGPLAVQLAKLVIGNGAETDQRTGLLLERLAQTLLYTTEDKAEGADAFLNKRTPEFKGN

SEQ ID NO: 1629 - protein, 184 aa, Aspergillus nidulans FGSC A4
MVRYAAQDIPAAKSARARGSYLRVSFKNTRETAQAINGMKLQRALAFLENVKTKTEVVPFRRFASSTGRCAQAKQWGVARARWPVKSAEFLLDLLKNAEANADTKGLDTGNLVVKHIQVNQAPKGRRRTYRAHGRINPYMTNPCHIELILTEGEEEVKKATVVERTRLSSRQRGAQIRKALTSA

SEQ ID NO: 1630 - protein, 519 aa, Brassica napus
MSGAITCSAADLATLLGPNATAAADYICGQLGTVNNKFTDAAFAIDNTYLLFSAYLVFAMQLGFAMLCAGSVRAKNTMNIMLTNVLDAAAGGFFYYLFGYAFAFGGSSEGFIGRHNFALRDFPTPTADYSFFLYQWAFAIAAAGITSGSIAERTQFVAYLIYSSFLTGFVYPVVSHWFWSPDGWASPFRSADDRLFSTGAIDFAGSGVVHMVGGIAGLWGALIEGPRRGRFEKGGRAIALRGHSASLVVLGTFLLWFGWYGFNPGSFTKILVPYNSGSNYGQWSGIGRTAVNTTLSGCTAALTTLFGKRLLSGHWNVTDVCNGLLGGFAAITAGCSVVEPWAAIVCGFMTSLVLIGCNKLAELVQYGDPLEAAQLHGGCGAWGLIFVGLFAKEKYLNEVYGATPGRPYGLFMGGGGKLLGAQLVQILVIVGWVSATMGTLFFILKRLNLLRISEQHEMQGMDMTRHGGFAYIYHDNDDESHRVDPGSPFPRSALPLAFNFQLFGNLLPFKYCLGFGFEI

SEQ ID NO: 1631 - protein, 507 aa, Karenia mikimotoi
MCSRLLALTCAFCVCHARKMQTPSYQQQVKYVAEQMSAKDDKLDLNSLATLLLASIPRSAFAASGAGAHLPTPNRHDGIKMSTNPDAPIKLGVNGFGRIGRQVVRIAMDREAFVLKHINSPMSPEYMKYLLNHDTVHGRFDGTVEISDDGLIINGLPVSLSATRDPTEIPWKSAGVEYVCESTGAFTTTEGCLKHIESGAKKVIISAPAKDADTPTIVVGVNTDDYDPSMKVVSCASCTTNGLAPLVKVINEKFGIKQGLMTTVHAATASQLTVDGSMKGKDWRAGRAASANIIPSSTGAAKAVAKAYPVMKGKLTGMAFRVPTVDVSVVDLTCELEKETTYDDIKAEVKLASETYAKGVVGYTEDQVVSSDFIGETCSTVFDAEAGIMLTPTFVKLVSWYDNEWGYSTRLVDLVGLMAAADGVTTKEKALAYFTARAVEDTRQSKRSGDVRMEDWAQAMEEADEKLKKVIAAVLDVSESKIVPDATFESLGVQQDEIDPDEMFNPK

SEQ ID NO: 1632 - protein, 446 aa, Sulfolobus solfataricus P2
MALIVKIGGSIQKDEKDYELIVKKIQDFSKKSDKIIVVTSAIKNVTNELISATSNTDNSPNIVTEIYERHIKLLSKLADGKEFENSFKDISRLSDELFRVAWSIRVLDEVTPRVRDYILSFGERMATLLLSAILRSNGIEAEGIITPPFLTDENYGEANVIEDLSKNEIANILENAKANVIVLPGFIGRTREGRYTTLGRGGSDYTATLLGKLVGVREVRLVTEVPGIMTGDPKKFENAKTISRLSLEEAIELSQLGAKRLHPRTFDPVFGSDMKVIVESLYEDGFTIINGECQNNDGLKGISLLDNAKLITVESTKIVGKIGSAARITNEAKEAGVNIISISQPASETTIQLVVDSLSANRLLSKLEEIRGTLVKDIEVNDINIVGIVGCGIKKKEISTKVLSIASSYDPLAISRGISNVSMTFIVNKDEGEKLAKELHKVIVSG

SEQ ID NO: 1633 - protein, 331 aa, Zea mays
MATSTSQHALSSIKLLSTGCLHPDKRNCRVLSVSVGRRCPSARNLGLLCASNSQSSVIEPVQLPRSPKSGVTPKKSGESALILIRHGESLWNEKNLFTGCVDVPLTPKGVDEAIEAGKRICNIPVDVIYTSSLIRAQMTAMLAMMQHRRKKVPIILHNESEQAHMWSQIYSEETKKQSIPVITAWQLNERMYGELQGLNKQETADRFGKEQVHEWRRSYDIPPPNGESLEMCAERAVAYFKDQIIPKLVDGKHVMIAAHGNSLRSIIMHLDKLTSQEVISLELSTGIPMLYIFKEGKFIRRGSPAGPSEAGVYAYTKNLAQYRQKLDGIVQ

SEQ ID NO: 1634 - protein, 450 aa, Exiguobacterium sibiricum 255-15
MKVAVIGCTHAGTAAVKELTSQHEQLDITVYERNDNVSFLSCGIALHVGGVVEHAESLFYSSPDELAELGANMRLKHDVLEIDSTNQTIVAKNLVTGETVYDTYDKLIMTTGSWPIIPMLPGIELNQIELCKNYHHAQTIIKKATDAKRITVVGAGYIGAELVEAFEAYGKEVTFIDSADRILNKYLDRSFTDIIENELTDRGIRLELNQTVQSFTGVDGNVTQVVTDKGTFETDLVILCVGFRPSTELLKGQIDMLPNGAIIVDDFMRTSNPNIFAAGDSCAVYYNPARTHAYIPLATNAVRMGTLVGKNLLAPTIRYQGTQGTSGLRLYDLNIASTGLTEDAAPFFGLEVTSTTVQDAYRPEFMPTAENVQLKLVYETTTHRLVGAQIISKVDLTQAMNTLSVAIQNDMTLEELAFVDFFFQPHYNKPWNLLNQAALQGMNELTSERV

SEQ ID NO: 1635 - protein, 301 aa, Vibrio fischeri ES114
MSKRDYYEVLGVSKSSTEKEIKKAYKRLAMKYHPDKNQGDAQAADKFKEIKEAYEVLTDPDKRGQYDDFGHAAFQNGGNGGFGGGFGGGHSQGFGGFEDIFGSAFGGRSRGGFGSGGFEDMFSQHRQPRAQKGQDRQFNLTVDFADAIKGCEQIIELPVNGVNKKINVKVPAGIEDGEKIRFAGKGESGINGGPAGDLLIQINTRPHATLKRDGNDLICPVTTDFVTAALGGEVEIQTLESRFKLKVPAGTQNGRKFRMKEKGVKSRKGVTGDLLVEITVATPTNLTEEQKTLLMKFKEIA

SEQ ID NO: 1636 - protein, 493 aa, Triticum aestivum
  misc_feature (376)..(376): Xaa can be any naturally occurring amino acid
MVLTHVQSDEAAASAAVFASRYVQEPVPSYELGARSISKDAAYQIIHDELLLDGSPRLNLASFVTTWMEPECDRLILEGMNKNYADMDEYPVTTELQNRCVNIIARLFNAPVGAGETAVGVGTVGSSEAIMLAGLAFKRRWQNRRKAEGKPYDKPNIVTGANVQVCWEKFARYFEVELKEVKLSEGCYVMDPDKAVEMVDENTIFVAAILGSTLTGEFEDVKRLNDLLAAKNKRTRWDTPIHVDAASGGFIAPFLYPELEWDFRLPLVKSINVSGHKYGLVYPGVGWVIWRNKEDLPDELIFHINYLGADQPTFTLNFSKGSSQIIAQYYQFLRLGFEGYRNVMDNCMENAMVLKEGLVRTGRFNIVSKDQGVPLXAFSLKDSSRHDEFEISEFLRRFGWIVPAYTMPPDAQHVTVLRVVIREDFSRTFAERLVIDIEKVLHELDALPSRSSGPALQHPNGDTVSEKDLARQREVVSVWKRAVAARKKTQGVC

SEQ ID NO: 1637 - protein, 317 aa, Staphylococcus warneri
MAEQVDFDVAIIGAGPAGMTAAVYVSRANLSTVMIERGMPGGQMANTEEVENFPGFEMVTGPDLSTKMFEHAKKFGAQYQYGDIKSVEDKGDYKVINLGNKEITARAVIISTGAEYKKIGVPGEQDLGGRGVSYCAVCDGAFFKGKKLFVIGGGDSAVEEGTFLTKFADNVTIVHRREELRAQKILQDRAFKNDKIDFIWSHTLKTINDKDGKVGSVTLESTKDGSEQTLDADGVFIYIGMKPLTTPFLDLGITNDVGYIETNEDMSTKVSGIYAAGDVRDKGLRQIVTATGDGSIAAQSAIAYIEHLNDQSEILSI

SEQ ID NO: 1638 - protein, 104 aa, Staphylococcus warneri
MATITVTEKTFNKTIEKGVTLVDFWATWCPPCQMQSPVLEELSDELEGKVIIGKVDVDEEKALAAKYQIQSIPTLLIFKDGELVNTLIGFNPKPNLENVLTKYL

SEQ ID NO: 1639 - protein, 325 aa, Arabidopsis thaliana
MTSLKAVRCTCKKWNVLSKDRIICAARKEFLGFMMMDSRVCWMKFDLQGIRNNTLVDISLYKASQTVRIQPRNSFHRLDRYALGYDKNRNHKILRFVDDHLAVGEHVFGYEIYDFSSSSWRVLDVTPDWDIQFYQRGVSLNGNTYFFAQEKITEDGEYEEFEDFLLYFDFSTERFEPRLPLPFHFYVLETVSLSSVRDEQLAVLYQRLDSYEILDIWLTTKIEPSAVSWSMFLKLDMRPLTGFQFMVDGGSFFIDEEKKVAVVFDLTKHKQTVTRRYQTAYIIGQDGYFKPVSLGEAPYLGDPHELYCLPLVCPSYAPSLVQLYN

SEQ ID NO: 1640 - protein, 285 aa, Vibrio fischeri ES114
MTAQIIDGKLISQTVRSEVGARVKARVEAGLRAPGLAVVLVGQDPASQVYVGSKRRACEEVGFVSKSYDLPTTTSESELLNLIDELNQDPEIDGILVQLPLPAGMDSTKILEHIDPEKDVDGFHPYNVGRLSQRIPKLRSCTPKGIITLLDRYNIQVRGMHAVVVGASNIVGRPMTLELLLAGCTTTTCHRFTKDLESHIRQADLVVVAVGKPNFIPGEWIKEGAVVVDVGINRLDSGKLIGDVEYDVAKTKASYITPVPGGVGPMTVATLIENTLLACEQYHSK

SEQ ID NO: 1641 - protein, 318 aa, Silene dioica
NFLFKSPKEDSPLKATDFGLSDFIKPSRKFTDIVGSAYYVAPEVLKRKSGPESDVWSIGVITYILLCGRRPFWDKTEDGIFKEVLRNKPDFRRKPWPSISNSAKDFVRKLLVKDPFVRPTAAQALSHQWVREGGSALDIPIDISVLHNMRQFVKYSRMKQFALRALASTLNDDELANLRDQFDAIDVDKSGTISLEEMRQALAKDLPWKLKDSRVMEIVEAIDSNTDGFVDFTEFVAATLHVHQLHELDNEKWQELSQRAFEKFDVDKDGYITPDELRMHTGLKGSMEPLLEEADIDKDGRISLAEFRRLLRSASMSS

SEQ ID NO: 1642 - protein, 144 aa, Glycine max
  misc_feature (109)..(109): Xaa can be any naturally occurring amino acid
NVTYVRSYLSSGFYSGTLRHCCRSFCRRVLFRKITSLVPAVLTKGSCFELEERACSYAMLVMRTETCTVDRVAKERMERYEIVDNVVAAIAGIVDAVPNKWCTVRSLHXQLLESLAVPVYQTVPDVKLKIDGSKAEAKKNENDT

SEQ ID NO: 1643 - protein, 388 aa, Arabidopsis thaliana
MATMISNLPRDLMEEILSRVPLKSMRAVRLTCKNWHTLSITISESLAKMYISKTTRESREGESTIITLMNYKLCLTSLVVDVDPYIEHKDDTITTRLVVWNPYWGQTRQIKTRYSHHAFSGRDSTYMFNYSLGYENKNSCRSHKLLRFIDYHWNYRGLHQFFWYEIYDFDSDLWTTLDVTPHWFIVISQSGVSLKGNTYWCARKRSGGYSDHIICFDFTRERFGPLLPLPFSFIDRHHSCVILSCVSEEKLAVLFQYKDHYYKNVVEIWITAKLEAEMVSWSKFLRINTGPIIHTSFFINEEKKVAIGFNDNRKTINIIGEAGYFRELDLGEHAEPYRRRHVFSYVPSSVQIKETAPGNIKKHQSSIETRLFDRNMLRLVAFEKKVSE

SEQ ID NO: 1644 - protein, 103 aa, Shigella dysenteriae
RGKTGQFERTILVADEDSYVSYIEGCSAPVRDSYQLHAAVVEVTIHKNAEVKYSTVQNWFPGDNNTGGILNFVTKCALCEGENSKMSWTQSETGSAITWKYPS

SEQ ID NO: 1645 - protein, 318 aa, Silene dioica
NFLFKSPKEESPLKATDFGLSDFINRSRKFTDIVGSAYYVAPEVLKRKSGPESDVWSIGVIMYILVCGRRPFWDKTEDGIFKEVLRNKPDFRRKPWPSISNTAKDFVRKLLVKDPLVRLTAAQALSHQWVREGGNALDIPIDISVLHNMRQFVKYSRMKQFALRALASTLNDDELANLRDQFDAIDVDKSGTISLEEMRQALAKDLPWKLKDSRVMEIVEAIDSNTDGFVDFTEFVAATLHVHQLHELDNEKWQELSQRAFEKFDVDKDGYITPDELRMHTGLKGSMEPLLEEADIDKDGRISLAEFRRLLRSASMSS

SEQ ID NO: 1646 - protein, 318 aa, Silene diclinis
NFLFKSPKEDSPLKATDFGLSDFIKPSRKFTDIVGSAYYVAPEVLKRKSGPESDVWSIGVITYILLCGRRPFWDKTEDGIFKEVLRNKPDFRRKPWPSISNSAKDFVRKLLVKDPFVRPTAAQALSHQWVREGGSALDIPIDISVLHNMRQFVKYSRMKQFALRALASTLNDDELANLRDQFDAIDVDKSGTISLDEMRQALAKDLPWKLKDSRVMEIVEAIDSNTDGFVDFNEFVAATLHVHQLHELDNEKWQELSQRAFEKFDVDKDGYITPDELRMHTGLKGSMEPLLEEADIDKDGRISLAEFRRLLRSASMSS

SEQ ID NO: 1647 - protein, 389 aa, Salmonella enterica subsp. enterica serovar Typhi str. CT18
MDTLRHPKRALIVDIPVQMDDGTIRHFEGYRVQHNLSRGPGKGGVRYHPDVDLNEVMALSAWMTIKCAALNLPYGGAKGGIRVDPFSLSEGELERLTRRYTSEIGIIIGPQKDIPAPDVGTNGKVMAWMMDTYSMNHGTTVTGVVTGKPIHLGGSLGREKATGRGVFVSGLEAARRANIAVEGARVAVQGFGNVGSEAARLFAGAGARVVAIQDHTATLFNATGIDMKALTAWQTEHKQIAGFPGAETIASDAFWRLEMDILIPAALEGQITRQRAEALTCKLVLEGANGPTYPDADDVLASRGILVVPDVVCNAGGVTVSYFEWVQDMASFFWSEEEINARMDKIMTDAIVHVWEKAAEKSCSLRTAAYIVACERILLARKDRGIYPG

SEQ ID NO: 1648 - protein, 266 aa, Triticum aestivum
MAATLFSISPMFLSLPSSSSSFKQAPSAFFPSKTPQHRALASAGWRHPLASLAVSVSSDVETEVAQEFSEDLRVFVGNLPFSVDSAQLAGLFEQAGSVEMVEVIYDKLTGRSRGFGFVTMSTVEEVEEAVERLNGYVLDGRSLKVNSGPPPPRDQSSPRGFREQSGGFRQQSSRGPGGGDNRVYVGNLSWNVDDSALANLFNQQGSVLGARVIYDRESGRSRGFGFVTYGTSDEVEKAVSNLDGSDLDGRQIRVTVAEARQPRREY

SEQ ID NO: 1649 - protein, 318 aa, Silene diclinis
NFLFKSSKEDSPLKATDFGLSDFINPGRKFHDIVGSAYYVAPEVLKRRSGPESDVWSIGVITYILLCGRRPFWDKTEDGIFKEVLRGKPDFGRKPWPTISNSAKDFVRKLLVKDPLVRLTAAQALSHQWVREGGNALDIPIDISVLHNMRQFVKYSRMKQFALRALASTLNDDELANLRDQFDAIDVDKSGTISLEEMRQALAKDLPWKLKDSRVMEIVEAIDSNTDGFVDFTEFVAATLHVHQLHELDNEKWQELSQRAFEKFDVDKDGYITPDELRMHTGLKGSMEPLLEEADIDKDGKISLAEFRRLLRSASMSS

SEQ ID NO: 1650 - protein, 318 aa, Silene vulgaris
NFLFKSSKEDSPLKATDFGLSDFINPSRKFTDIVGSAYYVAPEVLKRKSGPESDVWSIGVITYILLCGRRPFWDKTEDGIFKEVLRNKPDFRRKPWPSISNSAKDFVRKLLVKDPLVRLTAAQALSHQWVREGGSALDIPIDISVLHNMRQFVKYSRMKQFALRALASTLNDDELANLRDQFDAIDVDKSGTISLDEMRQALAKDLPWKLKDSRVMEIVEAIDSNTDGFVDFTEFVAATLHVHQLHELDNEKWQELSQRAFEKFDVDKDGYITPEELRMHTGLKGSMEPLLEEADIDKDGRISLAEFRRLLRSASVSS

SEQ ID NO: 1651 - protein, 422 aa, Ehrlichia ruminantium str. Gardel
MSLNIYLPDQSLLRPRITVFGVGGAGGNAVNNMIQSNLHGVNFVVANTDAQALENSLSEKKIQLGIGLTKGLGAGSLPEIGKGAAEESINEIIEEIVDSNMLFITAGMGGGTGTGAAPVIAKAAKENKILTVGVVTKPFHFEGAHRMRTAEYGLEELQRYVDTLIVIPNQNLFRIANEKTTFADAFKLADTVLHTGVRGITDLMIMPGLINLDFADIRAIMSEMGKAMMGTGEAEGENRAILAAEAAISNPLLDNVSMKGAKGILINITGGLDMTLFEVDAAANRIREEVDSHANIIFGSTFDKESEGKMRVSVLATGIDNEEVVIQNKSMNKDREDHSINFSEVSNKNFNHSDNEIAYYKPNDPGEDNFNSMNHNKRHSHYKTDNQKSNTIPNSEHKKVYPNRNDYWDEDSFNIPTFLRKK

SEQ ID NO: 1652 - protein, 447 aa, Salmonella enterica subsp. enterica serovar Paratyphi A str.
MDQTCSLESFLNHVQKRDPHQTEFAQAVREVMTTLWPFLEQNPRYRHMSLLERLVEPERVIQFRVVWLDDKNQVQVNRAWRVQFNSAIGPYKGGMRFHPSVNLSILKFLGFEQTFKNALTTLPMGGGKGGSDFDPKGKSEGEVMRFCQALMTELYRHLGPDTDVPAGDIGVGGREVGFMAGMMRKLSNNSACVFTGKGLSFGGSLIRPEATGYGLVYFTEAMLKRHGLGFEGMRVAVSGSGNVAQYAIEKAMAFGARVVTASDSSGTVVDESGFTPEKLARLCEIKASRDGRVADYAREFGLTYLEGQQPWSVPVDIALPCATQNELDVDAARILIANGVKAVAEGANMPTTIEATDLFLEAGVLFAPGKAANAGGVATSGLEMAQNAARLSWKAEKVDARLHHIMLDIHHACVEYGGDNKHTNYVQGANIAGFVKVADAMLAQGVI

SEQ ID NO: 1653 - protein, 189 aa, Mycoplasma genitalium G37
MAEQKRDYYEVLGITPDADQSEIKKAFRKLAKKYHPDRNNAPDAAKIFAEINEANDVLSNPKKRANYDKYGFDGVDGEPAFNFQADVFQSFFEEIAKSGVFNNQTNPEQKEKKKRYHWFSKKPKQEQPEINLDHVVEQTIKKVQQNQNQNKDPDELRSKVPGEVTASDWEALVGDTRYGYFDETGDWSW

SEQ ID NO: 1654 - protein, 546 aa, Nicotiana benthamiana
MASLVTNGISCFSPQQITEQPKLPKGCQFLQKSATSRYPNSRNLKVKAAELTSSTLETPGKDSSFSTNENDQLQKFLKRDYKWGFNEKIESFALPKGLSEETVKLISAKKSEPSWMLEFRLKSYEKFIKMKEPNWSDNRYPDIDFQDIVYYSEPKKKPTLNSLDEADPELIKYFDKLGVPLNERNRLANVAVDAVLDSVSIATTHRKTLEKSGVIFCSISEAIREYPDLVKKYLGRVVPPEDNFYAALNSAVFSDGSFVYIPKNTRCPMQISTYFRINAMETGQFERTVIIAEEGSFVEYLEGCTAPAYDTNQLHAAVVELYCDEGAEIKYSTVQNWYAGDEEGKGGIYNFVTKRGLCAGARSKISWTQVETGSAITWKYPSVVLEGDESVGEFYSVALTNNYQQADTGTKMIHKGKNTRSRIISKGISAGHSRNCYRGLVQVLSNAENAKNSSQCDSMLIGDTAAANTYPYIQSKNPTARIEHEATTSKIGEDQLFYFQQRGIDYEKAMAAMISGFCRDVFNELPDEFGAEVNQLMSLKLEGSVG

SEQ ID NO: 1655 - protein, 489 aa, Burkholderia pseudomallei K96243
MTTAHETLALKDPALLRERAFVAGEWQAADGGATLEVRNPATGALIGTVPAMGAAETRRAIDAANAAWPAWRKKTAKERAAILRKWHDLMIAHADDLALILTTEQGKPLVEAKGEIGYAASFLEWFAEEGKRVYGDTIPTPAADKRIVVTKEPVGVCAAITPWNFPAAMITRKVGPALAAGCPIVVKPAEATPFSALAMAVLAERAGVPAGVFSVVTGEPKAIGGELTSNPIVRKLSFTGSTPVGRLLMAQCAATVKKVSLELGGNAPFIVFDDADLDAAVEGAIASKYRNSGQTCVCTNRFYVHEKVYDAFAEKLTAAVAKLKVGPGTEAGVVQGPLINGAAVRKVEAHIADALDKGARVTTGGQRHPLGHGFFEPTVLTGVTPDMKVAKEETFGPLAPLFRFSTEEEAIRYANDTEFGLAAYFYSRDIGRVWRVAEALEYGMVGINAGIISNEVAPFGGVKQSGLGREGSHYGIDDYVVIKYMCVAV

SEQ ID NO: 1656 - protein, 222 aa, Arabidopsis thaliana
MTIKSLSFLAALSLFALTLPLVIASDPSPLQDFCVGVNTPADGVFVNGKFCKDPRIVFADDFFFSSLNRPGNTNNAVGSNVTTVNVNNLGGLNTLGISLVRIDYAPNGQNPPHTHPRATEILVVQQGTLLVGFISSNQDGNRLFAKTLNVGDVFVFPEGLIHFQFNLGGTPAVAIAALSSQNAGVITIANTIFGSKPDVDPNVLARAFQMDVNAVRNLQARF

SEQ ID NO: 1657 - protein, 580 aa, Nitrosomonas europaea ATCC 19718
MICSICLNGCQPVLRLKSRPDEVWREAGNRKSNIDINSLAGEYKMKPLRGKALLNDPVQNKSTAFTREERERYGLQGLLPYSVTDIGKQQQRVLANLRSKNSNIEKYGYLNDLLERNQRLFYRTLIDYIGEIMPLVYTPTVGEACMKFTQIFRKPQGFYITPEDRGKILPLFENWPENDVRIIVVTDGERILGLGDLGANGMGIPIGKMALYVACAGIRPEYCMPVMLDVGTSNQILREDPLYLGYPRPRLTGQDYLSLVEEFVAAVQNKFPQALIQFEDFSSQNAFRLLDRYAGSVRCFNDDIQGTAAVTLAGIYASCRITHKPFVDLKIMLLGTGSAATGVAELLLSAFMMAGLSEAEARSRISFVDRQGLVVTVREEIKPRVRSFASEHAAMDFVGAITAIRPDVLIGATGTAGAFDEIAIRQMARCQEHPVIIALSNPTSHTECTADQAYRWSDGRAVFASGSPFAPVTLDGRTRYPAQGNNVYIYPGIGLGMVASHARLVVEHMFLATAEELANCVLPEEIERGSIYPEIARVRDVSQKIAVKVCQVARQEGLAGVDLPDDLETYVYTLMYEPGY

SEQ ID NO: 1658 - protein, 445 aa, Oryza sativa
MERKQAEYSNLDERYAIQGEKYQGQQYSHIYFTRLHHMRNLLHALVPSWKPHLPVTTVLGLEEGKDCIIVGTLYKHMKLKPSILDEYSKERSAIPLVKPHNFMHPDDHLILEDESGRVTLAGAIPPAAYVTGVVIALHGKETSAGNFLVEDILEAGIPPQITLPSINEDKYVVFVSGLSIGSEKFNPLQFQLLIDHITGHLGDENEQSIASNIVRVVVAGNSVHISPRFFNGQAVASKDQSRIAEPIKELDIMLTQVSLVASLPVDMMPGSNDPANFSLPQQPLHRCLFAGAATYNTFSSCSNPHQFELDSVRFIGTSGQNIDDLYKYSDAKDKLEFVERTLRWRHLAPTAPNSLGCYPYTDKDPFLVESCPHVYFVGNQDKYETQLLQGLEKQKVRLICIPRFCDSGVAVMVNTSSCMLTIGKAALFYLCNLESYKEAKSSSGD

SEQ ID NO: 1659 - protein, 164 aa, Zea mays
GDWVPRGRPGVQLSSSPSRPFLFFWNSPQRFVSSALISAVPDFSSSSSPPTRNRTEKGEEALSTQRSPSTPPPRIGTPALRNPPMAEESGRPLPKFGDWDVNDPASADGFTVIFNKARDEKKGGNGQDTESPSKDTRTERVESYAAKPSTKKWFCCVTASPTQS

SEQ ID NO: 1660 - protein, 458 aa, Bradyrhizobium sp. BTAi1
MSMQHVVSDPIRLTAPRRNSLTHIPGDEGWPIIGKTFEVLADPKGHVERNARKYGPVYRSHMFGEVNVVLLGPEANELVLFDQAKLFSSAHGWGHILNLLFPRGLMLLDFEEHRMHRKALSVAFKAGPMKSYLTGLDRGIAARIAQWKQTPGEMLFYPAIKQLTLDLAATSFLGTEIGPEVDAINRAFVDMVAASVAPIRKPLPGTQMARGVKGRQRIVAYFSEQIPLRRAKGDGDDLFSHLCRATDDHGALLSTQDIVDHMSFLMMAAHDTLTSSITSFIAQLAAHPEWQQKLRDEVASLGLVAGAPMASEHLEKMKLTEMAFQETLRLMPPVPSLPRRPIRDFTFKGYAIPAGTGVGVNPMFTHHMPEIWPEPERFDPLRFTDEAQRGRHRFAWVPFGGGAHMCLGLHFAYMQVKCFARHFLSNIEVSFAPGYRPNWQVWPIPKPRDGLRVMLKAV

SEQ ID NO: 1661 - protein, 815 aa, Exiguobacterium sibiricum 255-15
MKTIIVGGVAGGATAAARLRRLDETAEIILLERGKEISFANCGLPYYIGDVIKDRNKLLVQTPEGMNARFNLDVRNLSEAIRINRQQKTVTTRKVDTGEEYEESYDQLILSPGAKPIRPGIPGLAEATNVFTLRNIPDTDKMRQYVDESRPAHATVIGGGFIGLEMAENLVERGARVTLIEMSDQVMAPVDPEMAAIVHEHLRAKGVELILADGVSRFEEAGTRVVLTSGKTIQTEMNILSIGVMPESNLASEAGLKLGIKQTIQVDETLRTSDPAIFAIGDAIEVKDYITGEPVHVPLAWPANRQGRLVADIIAGRDVRYTGTLGTAVAKVFDLTVASTGNNEKRLRQSGRRYEAIHLHPGSHAGYYPGASPISMKLLFDPVDGTIFGAQAIGMTGVEKRIDVLATAIKGGLTVLDLPDLELSYAPPYSSAKDPVNMAGYIASNIVLGDSENVHWHEIDQIVTDGGLLLDVREPSENELGSIPGSVNISLPTLRQSLDELPKDQPIYVTCQVGLRGYVASQLLKQNGFDVKNLSGGYKTWATVNRDREARSQVREETAVTTIKSEPKQVTKEQITLLDTCGLQCPGPILELKTKIDQLQDGDQVFVKASDPGFLPDVQAWAKKLGHTVHTAEMNKGVVEVLLEKGNATNQPVQSAAATADDATMVVFSGDLDKALASFVIAQGAQAMGKQVTMFFTFWGLNVIRKPDAPAVDKAPMERMMGMMMPKHAGELPLSNMNMAGAGQKMMKKVMKDKQVDALETMMAKAQAAGVRMIACTMSMDIMGIKKEELLDDIDYGGVASYLGATDGSNLNLFI

SEQ ID NO: 1662 - protein, 139 aa, Coprinellus disseminatus
MVKEVDVDGQTVTFMIWDSSGQERFQTLGTAFYRGSECCVLVFDVTSSKSFEALGRWRDNFFENAHVRDPEGFPVVVLGNKVDEDLGKREVSKEQAKEWCRANGNLTYFETSAKECINVEEALASVVAAALEQNRKDEK

SEQ ID NO: 1663 - protein, 282 aa, Mycobacterium leprae
MGAITLDGKATRDEILIDLKQRVAALTESGRTPGLGTILVGDDPGSHAYVRGKHADCAKVGITSIRRDLPVDITTAVLHDTIEELNANPDCTGYIVQLPLPKYLDENTALERVDPAKDADGLHPTNLGRLVLSTPAPLPCTARGILHLLRRYGVEIAGTHVVIIGRGVTVGRPLGLLLTRRSENATVTLCHTGTRNLAALTKQADIIVAAVGVPHLLTADMVRPGAVVVDVGVSRVETRLVGDVHPDVWEVAGHVSPNPGGVGPLTRVFLLTNVVELAEGRQ

SEQ ID NO: 1664 - protein, 433 aa, Arabidopsis thaliana
MAIIPLAQLNELTISSSSSSFLTKSISSHSLHSSCICASSRISQFRGGFSKRRSDSTRSKSMRLRCSFSPMESARIKVIGVGGGGNNAVNRMISSGLQSVDFYAINTDSQALLQFSAENPLQIGELLTRGLGTGGNPLLGEQAAEESKDAIANALKGSDLVFITAGMGGGTGSGAAPVVAQISKDAGYLTVGVVTYPFSFEGRKRSLQALEAIEKLQKNVDTLIVIPNDRLLDIADEQTPLQDAFLLADDVLRQGVQGISDIITIPGLVNVDFADVKAVMKDSGTAMLGVGVSSSKNRAEEAAEQATLAPLIGSSIQSATGVVYNITGGKDITLQEVNRVSQVVTSLADPSANIIFGAVVDDRYTGEIHVTIIATGFSQSFQKTLLTDPRAAKLLDKMGSSGQQENKGMSLPHQKQSPSTISTKSSSPRRLFF

SEQ ID NO: 1665 - protein, 277 aa, Asparagus officinalis
ACENWGFFELLNHGISIELLDKVEGMTKGHYKKCMEQKFKEFAKQALERGEELDMISNMDWESTFFLKHLPQSNITGIPDLEDEYREVMKEFALELEKLAERLLDLLCENLGLEQGYLKNRFGGSNGPTFGTKVTNYPPCPRPELFKGLRAHTDAGGLILLFQDDKVTGLQLLKDANWVDVPPMTHSIVVNLGDQLEVITNGKYKSVMHRVVAQTDGNRMSIASFYNPGGDAVIYPAPALIKEEEEEKENEVTTYPKFVFEDYMKLYVAQKFQAKEP

SEQ ID NO: 1666 - protein, 178 aa, Glycine soja
MASSMISSPAVTTVNRAGAGMVAPFTGLKSMAGFPTRKTNNDITSIASNGGRVQCMQVWPPVGKKKFETLSYLPDLDDAQLAKEVEYLLRKGWIPCLEFELEHGFVYREHNRSPGYYDGRCWTMWKLPMFGCTDASQVLKELQEAKTAYPNGFIRIIGFDNVRQVQCISFIAYKPPSF

SEQ ID NO: 1667 - protein, 291 aa, Brassica napus
  misc_feature (163)..(163): Xaa can be any naturally occurring amino acid
MGNVNAREKEEEEEEEANSNNHHNDNDAATRSHQASDFTPSEQLMGGHHHHQSPPHSPRATQSPLMFAPQVPVIPLQRPDEIHIPNPSWMMQSPYEEASNEQGIPTMITWCHGGKEISVEGSWDNWKSSRLQRSGKDFTIMKVLPSGVYEYRFIVDGQWMHAXPELPFARDDAGNTFNLLDLQDYVPEDIQSISGFEPPQSPEASYSSLLLGAEDYSKEPPLVPPHLQMTLLNLPPANPDVPSPLPRPQHVVLNHLYMHKGKSGPSVVALGSTNRFLAKYVTVVLYKSLQR

SEQ ID NO: 1668 - protein, 737 aa, Bordetella bronchiseptica RB50
MSATSAPDTPTPFDDAWRQLAAAGLDDAGQRQLAHAAAWAWPRFEAQKALTGEPLASHAAGAVRILASLHTDQATRVAAVLASLPADLNAPAPTLRNDPVASEFGVEVARLVQGARALLRLGIVARHASDSEAESGSQKEMQRKMLLAMAADLRIVLMRLASRLQSLRWHAETRTPCAAGFARETLDLYTPLANRLGIWQLKWEMEDLAFRFLEPERYKQIAHLLEEKRVEREAFIAEAIARMQEALARAGVVAEVSGRPKHIYSIWNKMRLKGLDFSQMYDLRALRIIVDDVRACYTALGLVHEMWTPLPEEFDDYISRPKPNGYRSLHTVVTDAQGRAFEVQIRTREMHQFAEYGMAAHWRYKEAGARGGQVAASSEYDRQLSWMRQLLAWNSDVEDEGEAARRADQRIYVLTPQARVIELPAGATPVDFAYHLHTDLGHRCRGARVDGQMVPLNTRLATGQTVEVIAAKSGGPSRDWLNTQLGYLASPRARAKVRMWFNAIELQQRITQGQALVEKELQRLGKTAVNLEQLAQGLGFARADDLYVAAAKDEFSLRQIDAVFQQPAPVAEPEPAALAHARSADSAEKSGKSGVLVVGVGSLLTQLARCCRPAPPDEIAGFVTRGRGVSIHRADCPSYKALAEREPERVIEVAWGKTSDSFYPVDISVRAQDRPGLLRDLSEVFARQRLNVVGVNTQSRQSLAHMVFTVEVRGGESLHKALDALGEVAGVTSAARR

SEQ ID NO: 1669 - protein, 316 aa, Pseudomonas fluorescens Pf-5
MNDAKHSRLIILGSGPAGYSAAVYAARANLKPTVITGLQAGGQLTTTTEVDNWPGDVEGLTGPVLMERMQRHAERFDTEIVYDHIHTAQLQQRPFILIGDSGTYSCDALIIATGASAQYLGLPSEEAFAGKGVSACATCDGFFYRNQVVAVVGGGNTAVEEALYLSNIAKEVHLVHRRDKLRAEKILQDKLFDKAANGNIRLHWNQHLEEVLGDASGVTGARLKDSHSGETKDLPLAGVFIAIGHKPNTDLFQGQLEMRDGYLLVRGGSEGNATATGIQGVFAAGDVADHVYRQAITSAGAGCMAALDAEKFLDDN

SEQ ID NO: 1670 - protein, 592 aa, Daucus carota
MLIRCFHIKMALVTCFHSMLFLSAVVFIFSLDVNIRGVEASHQVFPELQSVSAVNVQLVHRTGYHFQPKKHWINDPNGPMYYKGFYHLFYQYNPKGAVWGNIVWAHSISKDLINWVALEPAIFPSKPFDKYGCWSGSATVLPGGKPVIMYTGIVTPSPVNTQVQNFAVPANYSDPYLREWIKPDNNPIVRARSENSSSFRDPTTAWFDGVHWKILVGSRRKHRGIAYLYRSRNFLKWTKAKHPLHSKDRTGMWECLDFYPVAPKGMNGLDTSVTGQDIKHVLKVSLYSTRYEYYTVGEYDRDNDIYVPDNTSVDGWAGLRYDYGNFYASKTFFDPDKQRRILWGWANESDSKQDDVQKGWAGIQLIPRKLWLDPNGKQLIQWPIEEIQLLRGQNVHMGSQVLNTGEHIEVKGVTAAQADVDATFSFKSLDRAEWFDPNWAKLDALDVCDWMGSTVRGGLGPFGFLTLASEKLEEYTPVFFRVFKTKDKLKVLMCSDAKRSSTTAEGLYKPPFAGYVDVDLSDKKISLRSLIDNSVVESFGAHGRTCITSRVYPKIAIYNNAHVFVFNNGTEAITIDSLDAWSMKAPSLMNNN

SEQ ID NO: 1671 - protein, 583 aa, Daucus carota
MARTKILVFSSDSSLFLLSIFSFIFLNINGVDSTHRVFPELQSISAVDVKLVHRTGYHFQPQKHWINDPNGPMFYKGYYHLFYQYNPKGSVWGNIVWAHSVSKDLINWIALEPAIFPSKPFDQYGCWSGSATILPGNKPVILYTGIVSPDPENAQVQNYAVPANYSDPFLREWVKPDNNPLVGVHTENPSAFRDPTTAWFDGGHWKMLVGSSRKHRGIAYLYRSKDFKKWKRSPHPIHTKAETGMWECPDFYPVSPRSEDGLDNSKMGRGIKHVLKVSLNSTRYEYYTIGRYNRVRDFYVPDNTSVDGWAGLRYDYGNFYASKTFYDPIKKRRILWGWANESDSQIDDVQKGWAGIQLIPRRIWLDPSGRQLVQWPIEEVEGLRGSELHMRNQKLDMGVHVEVTGITAAQADVDATFSFKSLDKAESFDPEWINLDAQDVCDSMGSTIQGGLGPFGLLTLASKDLEEYTPVFFRIFKAEDQKLKVLMCSDAKRSSLAEGLYKPSFRGFVDVDLSDKKISLRSLIDNSVVESFGAQRKNLISSRVYPTLAIYNNAHLFVFNNGTEPITVDNLDAWSMNSPSEMN

SEQ ID NO: 1672 - protein, 159 aa, Triticum aestivum
MQFLRGVGGGGGGGAGGAGSMAWEVLRRHFSRKRAVDIRRINPKVPKEEAVAISGRLLQILADHGPLTVGSTWNHAKDAAIDGLNSKTHMKILLKWMWGRRIIKLSCTQAGNTKKFLYSPFTAEDTEAAEEPAEEQPKRKGWKGKHPKYQTKKQPATAA

SEQ ID NO: 1673 - protein, 416 aa, Alternaria brassicicola
MGDLANRKVFKVFNQEFIVDERYNVTKELGQGAYGIVCAATNNQTGEGVAIKKVTNVFSKKILAKRALREIKLLQHFRGHRNITCLYDMDIPRPDNFNECYLYEELMECDLAAIIRSGQPLTDAHFQSFIYQILCGLKYIHSANVLHRDLKPGNLLVNADCELKICDFGLARGFSMDPEENAGYMTEYVATRWYRAPEIMLSFQSYTKAIDVWSVGCILAELLGGKPFFKGRDYVDQLNQILHYLGTPNEETLSRIGSPRAQDYVRNLPYMQKISFQSLFKNANPDALDLLDRMLAFDPSSRISVEEALEHRYLQIWHDASDEPSCPTTFDFQFEVVEEIPEMKKMILDEVSRFRQMVRVQPGAGAGANQAPQVPIPNNYDRAGYEDPRPQEAFNQGGWNGSDLERDLQGLDGRMR

SEQ ID NO: 1674 - protein, 167 aa, Lycopersicon esculentum
MAEGSPKSIYDFTVKDIQGNEVPLSNYRGKVLLIVNVASKCGLTDSNYKELNILYEKYKDQGFEILAFPCNQFLWQEPGTNEEIQQTVCTRFKAEFPVFEKIDVNGDNAAPLYKFLKSEKGGFLGSAVKWNFTKFLVDKEGKVVERYAPKTPPLQFEKDIKNLLGVA

SEQ ID NO: 1675 - protein, 669 aa, Glycine max
MPAGFAIQIPTTTFYVTMNTSRSSFLSSILTLAFFFLTTLPQSYSQKNDTHSICSQLSFSCGTLRNISYPFWGGNRPQFCGRNGFKLTCMHDQNTSVQVGSQRFNVLNINQTASTLRMARTDLVYDRCSSNFTNTSLSVSPFSFPSTVQNVTIFYECPSGINSVVGNNFTCQNDSNNKHAFYVVNGTQLKQFPGLQKCGVSVQMQVSEGVVWDSEGGIGALEKALEKGFDVRYDAELSSQCTACRDSGGACGTNENDLAQFSCYCSGGTHGSLCSTHKSQRKNRVLKLVLGFVATGFALPLIAVIICRNKARIWKFILVQVGKIKKNDQVIEAFLESQGSVGLKRYSFSDIKKITNSFKIKLGEGGYGSVYKGKLLNGCSVAVKILNESKENGEEFINEVASISKTSHVNIVSLLGFCLDGSRKALIYEFMSNGSLEKYIHEKTAETKTTTPSLSWERLHQIAIGIARGLEYLHKGCNTRILHFDIKPHNILLDEAYRPKISDFGLAKLSTRDESIISMSNARGTVGYVAPEVFSKSFGGVSHKSDVYSYGMMLLEMVGGQKNMDVEASRSSEIYFPQLVIYKKLEQGNDLGLDGILSGEENEIAKRMTMVGLWCIQTIPSHRPTISRVIDMLEGSVDSLEMPPKPFLSSPPRSSTDFSTAISKSLASV

SEQ ID NO: 1676 - protein, 323 aa, Debaryomyces hansenii CBS767
MPSFNKSFVMNHTCLRIKDPKVSIPFYTENLGMKLIATLPFPDSKFTLYMLAYDNGDNNNDVSWSAREGVLELCHNHGVENDESYTLNNGNGEKFRGFGHICVSVDNIEAAEAQFLSKGVKFQKKLSDGRQKNIAFALDPNGYWIELIEHGQGKASDKTDSTHYKLNHTMIRVKDPKKSLDFYRNVLGMKLFSTSVHEGAKFTLYFLGYEHDASFKEDTLSRDEQSKKQGLIELTHNWGTESDNDFEGYHNGNSTENGAIQGYGHTCVSCSDPGKFCKEINEEFGEANIDWAVQWGKGGIKQLAFIRDPDGYSIEIINSVFKQ

SEQ ID NO: 1677 - protein, 477 aa, Desulfitobacterium hafniense Y51
MTYNREYFYVTSVTLIGTEDGKLKQRRLGGKLNMTYVQEVLEQAVKRNPGEAEFHQALREVLESLEPVLEKRPDLKEAGILERIVEPERQILFRVPWVDDQGKVQVNRGFRVEYNSAIGPYKGGLRFHPSVYLGIIKFLGFEQIFKNSLTGLPIGGGKGGSDFDPKGKSEGEIMRFCQSFITELYRYLGADTDVPAGDIGVGGREVGYMFGQYKRITNRYEGVLTGKGLTFGGSLGRTEATGYGLVYFMEEALKAVGKSFSGATVVVSGSGNVAIYATQKATQLGGTVVAMSDSNGYIYDKDGINLDTVRQLKEVERKRLKDYVSIHPTAEYYEGCAGIWTIPCAIALPCATQNELDGEAAEVLVKNGCYAVGEGANMPSTPEAVDVFLQHKIIYGPGKAANAGGVAVSALEMSQNSMRYSWTFEEVDAKLKNIMVNIYHNASKAAQEFGFEGNLVAGANIAGFLKVAEAMKAQGTV

SEQ ID NO: 1678 - protein, 408 aa, Bacillus subtilis subsp. subtilis str. 168
MGLIVQKFGGTSVGSVEKIQNAANRAIAEKQKGHQVVVVVSAMGKSTDELVSLAKAISDQPSKREMDMLLATGEQVTISLLSMALQEKGYDAVSYTGWQAGIRTEAIHGNARITDIDTSVLADQLEKGKIVIVAGFQGMTEDCEITTLGRGGSDTTAVALAAALKADKCDIYTDVPGVFTTDPRYVKSARKLEGISYDEMLELANLGAGVLHPRAVEFAKNYQVPLEVRSSTETEAGTLIEEESSMEQNLIVRGIAFEDQITRVTIYGLTSGLTTLSTIFTTLAKRNINVDIIIQTQAEDKTGISFSVKTEDADQTVAVLEEYKDALEFEKIETESKLAKVSIVGSGMVSNPGVAAEMFAVLAQKNILIKMVSTSEIKVSTVVSENDMVKAVESLHDAFELSKHPSAV

SEQ ID NO: 1679 - protein, 177 aa, Coprinellus disseminatus
MVGRSALLKVIILGDSGVGKTSLMNQYVNKRFSNQYKATIGADFLTKSVEVDDQQVTIQLWDTAGQERFQSLGVAFYRGADCCVLVFDVNSSKSFQALEGWRDEFLIQASPQGDPEEFPFVVVGNKVDVTQKRAMAWCAAKGNLPYFETSAKEAINVEQAFQSVAVKALQQGHDESM

SEQ ID NO: 1680 - protein, 548 aa, Burkholderia sp. 383
MQRNPQDKYRPFEPVRLNGRKWPSRTIERAPVWMSTDLRDGNQSLIEPMSIEQKLEFFEMLVAIGFKEIEVGFPSASQTDFDFVRKLIDDKRIPDDVTIEVLVQAREDLIARTFDALEGVPRAIVHLYNAVCPSFRRIVFGMSKADVKALAIDGTRIIKEHCAARPDTQWTLQYSPETFSMTELTFAREICDAVAQTWRPTRDHKMIVNLPATVEAAGPNVFADQIEWMDRNLAYRDSIVLSVHPHNDRGTAVAAAELALLAGADRIEGCLFGNGERTGNVDLVTLALNLYTQGIDPGLDFSDIDAVRRVVERCNQIPVHPRHPYAGDLVFTAFSGSHQDAIRKGFAQQRPDAAWEVPYLPIDPADLGRSYDAVIRVNSQSGKGGATFLLERGMGFTPTRRVQIEFSHAVQTLADASGEEVTGDAICALFAREFFDTDGPATRHGNGARWQNREIAAAPVADTTPDEAVRRLAAAFAAAAGAAIDVASCEHARTTDGRIAVSVGCRVGDAPLRHGVGLHADAASAALDAVVSAINRSAWHCADHRAAA

SEQ ID NO: 1681 - protein, 171 aa, Hamamelis virginiana
LHLFYQYNPKGAVWGNIVWAHSVSKDLVNWEALDHAIYPSKPFDINGCWSGSATILKNNKPVILYTGIDTQNRQVQNFAIPANLSDPYLREWIKPDNNPLVVAGDGMNSSAFRDPSTAWLGEDGHWRIVVGSKRKHRGIAFLYKSRDFMKWTKAQHPLQSKPKTGMWECPD

SEQ ID NO: 1682 - protein, 392 aa, Acinetobacter calcoaceticus
MHPIVIIGSGMAGYTLAREFRKLNPEHELVMICADDAVNYAKPTLSNALSGNKAPEQIPLGDAEKMSTQLKLQISSDTWVKAINPETHELKLEKNGQETIQPYSKLVLAVGANPTRLAIAGDGSDDIHVVNSLIDYRAFRENLAKRQDKRVVILGAGLIGCEFANDLQHTGHQVTVIDLSPRPLGRLLPAHIADAFQKIWRKRIHFVLSTTVEKVSKINDGQDYAVTLANGQTLVADIVLSAIGLQPNIDLAKHAGVHTSRGILTNSLLETNLEDIYAIGDCAEVNGTLLPYVMPIMQQARALAKTLSGETTHVHYPAMPVAVKTPAAPLTVLPVPVDVDVNWETEEFEDGMLAKAIDNTDTLRGFVLLGATAGKQRLTLTKLVPDLIPAQL

SEQ ID NO: 1683 - protein, 104 aa, Bacillus subtilis subsp. subtilis str. 168
MAIVKATDQSFSAETSEGVVLADFWAPWCGPCKMIAPVLEELDQEMGDKLKIVKIDVDENQETAGKYGVMSIPTLLVLKDGEVVETSVGFKPKEALQELVNKHL

SEQ ID NO: 1684 - protein, 595 aa, Oryza sativa (japonica cultivar-group)
MARLGLAVCAASFHLFLLLASTSSLRRAPTEADTANHARRTAYHFQPAKNWQNDAGPMYHNGMYHLFYQYNPHSALWDIGNLSWGHSVSGDLLNWAALDTALDPTSPFDANGCWSGSATILPGALPAILYTGIDASKEQVQNVAFAKNPSDPLLREWEKPAYNPVIALPADVPGDKFRDPSTAWLGRDGLWRIAVSAEVDGVASTLVYRSKDFVRWERNAAPLHASRAAGMVECPDLFPVAERGEDGLDTSANGAGGVRHVLKLSVMDTLQDYYMVGTYDDAADAFSPAEPERGDDCRSWRRLDYGHVYASKSFFDVRKNRRVLWAWANESDSQADDVARGWSGVQTFPRKMWLAKDGKQLLQWPIEEIKTLRRKRAGLWQGTRLGAGAVQEIVGVASSQADVEVVFKIPSLEEAERVDDPNRLLDPQKLCGEKGAAVRGGVGPFGLLVMASGDLHEHTAVFFRVFRHHDKYKLLMCTDLTKSSTRAGVYKPAYGGFVDMDIDDHKTISLRTLIDHSVVESFGGGGRACITARVYPEHVATSSSHLYVFNNGSDAVKVAKLEAWDLATATVNVVVGDHHGLVAPALELEPTRTTQ

SEQ ID NO: 1685 - protein, 328 aa, Streptomyces carzinostaticus
MTMPADTMTLAKALNRSLRKALEDDPGVLVMGEDVGRLGGVFRVTDGLQKDFGEDRVMDSPLAESGILGTAIGLALGGYRPVVEIQFDGFVFPAYDQIVTQLAKLHARSHGTIRMPVVVRIPYGGGIGAVEHHSESPEALFAHVAGLKVVSPSNPSDAYWMLQQAIRSDDPVIFFEPKRRYWDTGEVDEAAAPAPLHRARVVRPGTDLTLVAYGPMVRLCLEAAEAAAEEGRSLEVVDLRSVSPVDFDTVQDSVSKTHRLVVVHEAPVFFGAGAEIAARITTRCFYSLEAPVLRVGGHHAPYPAARLEEHYLPDLDRVLAAVDHALAY

SEQ ID NO: 1686 - protein, 170 aa, Hamamelis virginiana
HLFYQYNPKGAVWGNIVWAHSVSKDLVNWEALEHAIYPSKPFDINGCWSGSATILSDNKPVILYTGIDTQNRQVQNFAIPANLSDPYLREWIKPDNNPLVVAGDGMNSSAFRDPSTAWLGEDGHWRIVVGSKRKHRGIAFLYKSRDFMKWTEAQHPLQSKPKTGMWECPD

SEQ ID NO: 1687 - protein, 442 aa, Streptomyces carzinostaticus
MTDTAGRLLEFRMPDVGEGLTEAELLTWYVRPGDTVVDGQTVCEIETAKAVVELPIPFDGVVRELRCAEGETVPVGTVVITVAQARAPDPSPAPPAREPVLVGYGVASGPTSRRRRTAVPPPIRPAEPGSGPVLAKPPVRKLAKDLGVDLTRVVPSGPQGVILRADVHAAAHTAGTVVAPAPAPAAPSVPQESAPGPDGEPMETRGTGQPRETRVPVRGVRRATAAAVTASAFSAPHVTEFVTVDVTRTMKLVRDLRREPRFADRRVGPLLLVAKALLVAVERNPEINASWDDGAQEIVRKHYVDLGIAAATPRGLIVPAVKDAHTLSLAELAGALDDLVDAARAGRTSPAALSGGTVTLTNIGVFGVDSGTPILNPGEAAILAVGAITPRPWVHKGKVVPRQVVSLSLSFDHRLVDGELGSKVLADVAAVLERPHRLIAWS

SEQ ID NO: 1688 - protein, 96 aa, Arabidopsis thaliana
MEIESHVSVPGKNLVKLEFKLGTESYTIDSIKGDTVLDQLVSMKEESMKILKDFITRHNVPDDDVPDQILSDDEEGDDGDASPVICPVKPPKKTKI

SEQ ID NO: 1689 - protein, 662 aa, Zea mays
MISARTAAASPASLWKQGGRSEGGGSCDGCRTYRNTLRRAAAAKVRALPSRAVEAVKMGSAAEMEQEEAEVAAAAAGVVVEDHYGEDSATEELPILPWAFSVARYVSFSWLKKYAEESYFYISGYTLLRDPHHNKGLAFMEKERDAHHLRGLLPPAVVPQELQIKKIMHNLRQYQVPLQRYMAMMDLQERNERLFYKLLIDNVEELLPVVYTPTVGEACQKYGSIFRQPQGLYVSLRDKGKVLEVLRNWPHRNIQVICVTDGEAILGLGDLGSQGMGIPVGKLALYTALGGVRPSACLPITIDVGTNNEKLLNDEFYIGLRQKRATGEEYHELMEEFMAAVKQIYGEKVLIQFEDFANHNAFNLLAKYSKSHLVFNDDIQGTASVVLAGLLAALKVVGRTLAEHTYLFLGAGEAGTGIAELIALEISKQTSAPIEECRKKIWLVDSKGLIVDSRKNSVQSFKKPWAHEHEPLTTLYDAVQSIKPTVLIGTSGVGRTFTKEVVEAMASFNERPIIFSLSNPTSHSECTAEEAYNWTQVVIFASGSPFDPVEYDGKVFVPGQSNNAYIFPGFGLGLVISGAIRVHEDMLLAASEALAAQATQENFDKGSIFPPFTNIRKISARIARAVAAKAYELGLATRLPPPRDLVKYAQSCMYTPVYRNYR

SEQ ID NO: 1690 - protein, 175 aa, Triticum aestivum
MAATVMASSATSVAPFQGLKSTAGLPVSRRSNGASLGSVSNGGRIRCMQVWPIEGIKKFEILSYLPPLSTEALLKQVDYLIRSKWVPCLEFSKVGFIFREHNASPGYYDGRYWTMWKLPMFGCTDATQVINEVEEVKKEYPDAYVRIIGFDNMRQVQCVSFIGFKPPGCEESGKA

SEQ ID NO: 1691 - protein, 423 aa, Streptomyces sp. NRRL 5331
MGLVVQKYGGSSVADAEGIKRVAKRVVDAKRNGNQVVVVVSAMGDTTDELIDLAEQVSPIPAGREFDMLLTAGERISMALLAMAIKNLGHEAQSFTGSQAGVITDSVHNKARIIDVTPGRIRTSIDEGNIAIVAGFQGVSQEGKNITTLGRGGSDTTAVALAAALDAEVCEIYTDVDGVFTADPRVVKKAKKIDWISFEDMLELAASGSKVLLHRCVEYARRYNIPIHVRSSFSGLRGTWVSNEPQGDQKVEHAIISGVAHDVSEAKVTVVGVPDKPGEAAAIFRAIANAEVNIDMVVQNVSAASTGLTDISFTLPKAEGRKAIDALERAKGSIGFESLRYDDQIAKISLVGAGMKTNPGVTAGFFEALSDAGVNIELISTSEIRISVVTRADDVNEAVRAVHTAFGLDSDSDEAVVYGGTGR

SEQ ID NO: 1692 - protein, 310 aa, Shewanella oneidensis MR-1
MSENRIRIATRKSPLAMWQAEFVKAELERIHPGIVVELLPMSTKGDVILDTPLAKVGGKGLFVKELEVAMLEDQADIAVHSMKDVPVDFPEGLGLEVICEREDPRDAFVSNIYKSISELPLGATVGTSSLRRQCQLRASRPDLIIKDLRGNVGTRLAKLDNGEYDAIILAAAGLIRLKLSERIASFISAEESLPANGQGAVGIECRTNDERVKALLAPLEHLETRYRVIAERAMNTRLEGGCQVPIGAFAEIDGDEMTLRGLVGNPDGSEIIEGVITGPKTEATQLGVALAEELLSKGAKSILDAVYAKA

SEQ ID NO: 1693 - protein, 405 aa, Arabidopsis thaliana
MAAALQTNIRTVKVPATFRAVSKQSLAPFRVRCAVASPGKKRYTITLLPGDGIGPEVVSIAKNVLQQAGSLEGVEFNFREMPIGGAALDLVGVPLPEETISAAKESDAVLLGAIGGYKWDNNEKHLRPEKGLLQIRAALKVFANLRPATVLPQLVDASTLKREVAEGVDLMVVRELKGGIYFGEPRGIKTNENGEEVGFNTEVYAAHEIDRIARVAFETARKRRGKLCSVDKANVLEASILWRKRVTALASEYPDVELSHMYVDNAAMQLVRDPKQFDTIVTNNIFGDILSDEASMITGSIGMLPSASLSDSGPGLFEPIHGSAPDIAGQDKANPLATILSAAMLLKYGLGEEKAAKRIEDAVLVALNNGFRTGDIYSAGTKLVGCKEMGEEVLKSVDSQVPASV

SEQ ID NO: 1694 - protein, 398 aa, Vigna radiata
MAVQAASLVSGYFSVAKEGKPGMSLRNTTMFGLSLEDALKADFSSLSFSCKREFQKKVCPLRVQSVATTPGVTKASPEGKKTLRKGSVIITGASSGLGLATAKALAETGKWHVIMACRDFLKAERAAKSSGISKENYTVMHLDLASLDSVRQFVDNFRQSGRPLDVLVCNAAVYLPTASEPTHTADGFELSVGTNHLGHFLLSRLLLEDLNKSDYPSKRLIIVGSITGNTNTLAGNVPPKANLGDLRGLAGGLNGLNTSAMIDGGSFDGAKAYKDSKVCNMLTMQEFHRRYHEETGITFASLYPGCIATTGLFREHIPLFRLLFPPFQKFITKGFVSEDESGKRLAQVVSDPSLTKSGVYWSWNKASASFENQLSQEASDADKARKVWEISEKLVGLA

SEQ ID NO: 1695 - protein, 477 aa, Bordetella bronchiseptica RB50
MRTITSLIDGQWAGGAGDSENINPSDLSAPVCLVAQASAQQAAQAVEAARRAQPGWAATGLAARAQILKDIGRGIVANSQQLAHTLASEQGKTLPEARGEVQRAADIFDYYAGEVFRLGGEMFPSIRAGVEVEISREPLGVVALITPWNFPIAIPAWKTAPALACGNAVVLKPSEFTPATAVMLAEIIRAAGVPDGVFNLVLGTGADVGQVLTGHPAVAGVSFTGSSATGRKIAASAVAGHKKLQMEMGGKNPLVVLDDADLEIALACALDGAFHATGQRCTASSRLIVTPGIYNRFVQELAQRVMALNVGHALDERSQIGPVSNGAQFDKDLSYIALARDEAQRVVGGAALQRAQRGYYLQPCLALDVSLDARIAREEVFGPLACVLRAQDYEHALAIANDTEYGLSAGICTQSLKHATHFRRHVQSGLAMVNMPTSGVDFHVPFGGRGASSYGSSEQGHYAREFFTSLKTSYIRP

SEQ ID NO: 1696 - protein, 295 aa, Xylella fastidiosa 9a5c
MIVSMLAATDLARILDGRRIADDLLDALKTRVDARVAAGKLPPTLAVVLVGSDPASVVYVRNKRRAAEKVGIKAYDFDLPEATTEAELAALIDRLNADPKIHGILIQLPLPGIPDAHRLIQRVDPRKDVDGFHPQNVGHLALREFGLRPCTPRGIVTLLGHTDRPVRGRNATIVGVSNHVGRPMGLELLMAGCTVTSCHKFTPPQMLEAAVRQADILIVAVGRPGVIPGEWVKPGAVVIDVGINRLDDGRLVGDVGFESAVKRASWITPVPGGVGPMTVATLMQNTLEAAEAADC

SEQ ID NO: 1697 - protein, 488 aa, Aspergillus nidulans FGSC A4
MVASAVRMRVPSASFISKGACSLRRPQASYKFTAAIQHQLPALAALSRYYASKSFPPHTIISMPALSPTMTAGNIGAWQKKAGDALQPGDVLVEIETDKAQMDFEFQEEGILAKVLKESGEKDVSVGSPIAVLVEEGTDVAAFESFSLEDAGGEGAGAAPPKETQETPKEAPKASEPSTPQPAAGAYEPDTSGEKLQPSLDREPAISPAAKALALEKGVPIKALKGTGRGGQITKEDVEKYKPTAAAAAAGPASEDIPLTSMRKTIASRLQQSWNQNPHFFVSTTLSVTKLLKLRQALNASSEGKYKLSVNDFLIKACAAALRKVPQVNSSWTEENGQVVIRQHNSVDISVAVATPVGLITPIVKNAQGLGLSSISNQVKDLGKRARDNKLKPEEYQGGTFTISNMGMNPAVERFTAIINPPQAGILAVGTTRKVAVPVETEEGTSVEWDDQIIVTASFDHRVVDGAVGAEWIKELKKVVENPLELLL

SEQ ID NO: 1698 - protein, 306 aa, Mycobacterium sp. KMS
MSANTKWTAADVPDQEGRVAVITGANTGIGYEAAAVLAAKGAHVVLAVRNTDKGGAAAERIRSALPHADVTVRELDLTSLDSIREAADGLRADYPRIDLLINNAGVMMTEKGATKDGFELQLGTNHLGHFALTGQLLDNLLPVEGSRVVTVSSNAHRWGRVNFDDLQSERSYNRVTAYGQSKLANLLFTYELNRRLSAKGAPTIAVAAHPGTSSTELTRNLWPVARRPVELVWGLVAQTPEMGALPTLRAATDPDVRGGQYYGPDGIGEQRGHPKLVQSNARSYDEAAQRRLWSVSEELTGVTFPV

SEQ ID NO: 1699 - protein, 532 aa, Desulfotalea psychrophila LSv54
MMRNLMRIEIYDTTLRDGTQAENFNISVDDKLRIAQELDTLGVDFIEGGWPGSNPVTIEFFNRIGEIDLKHSKIVAFGSTRHIKNRPEEDANLQALLAAKTPAIIIFGKSWDIHATDALNISLEENLQIIEDSLAYLRPHVEHLFYDAEHFFDGFKNNEEYALKTVASAIAGGAERIVLCDTNGGTLPHEIPPIIKRVKEFVAGLSETVGLGIHPHNDSDSAVANALMAASSGVEQIQGTMNGFGERCGNANLTSIIPALVFKMGFDCGVKEHISRLYGCSRLVTELANLPHNHYQPYVGKSAFAHKGGIHVSAVKRNPLTYEHIAPELVGNSRRILLSDQAGRANILFKAKEWGIHIRPDDPILPAIIKELKELENLGYQYEAAEASFELIMRKLLGLRRNYFSFQGFRVTDNKYRMDKPPLTEATIRLSVGGVEVHTAAGGDGPVNALDSAIRKALIRFYPILEEMELVDFKVRVLSGEYGTEAKVRVLIESRDGEESWGTVGVSVNIIEASWQALIDSITYKLMKEEKK

SEQ ID NO: 1700 - protein, 518 aa, Burkholderia sp. 383
MCVARRHHAAQPRQYVSLSAFVIEVPVPAKSSVAPAIVWFRDDLRVTDQPALTRAVESGRPLVCVFVDDTGDGAGRALGGAARWWLHGSLAGLDAALARHGGRLLLLRGDAQREIERVVHDTGAEAVYWNRRYAQPQRDADAALKASLKARGVTVESSNGSLLNEPWEVLTGSGGPYQVFTAYWRAARRDRTVAVPLPEPERIAFHPWPKAVRDCALALDVLALRPPVPDWAGGLRDAWPAPDEAGAHARLDAFLTASLAGYADARDLPDRPATSRLSPFLRFGNLSPRQVWHAVQGAANAGGAAVAADADKFLSELGWREFSYTLLYHFPALASDNFRAQFDAMPWRDDPAALRAWQRGRTGYPLVDAGLRELWTTGWMHNRVRMVVASFLIKHLLIDWRAGEAWFWDTLVDADPANNAASWQWVAGCGADAAPYFRIFNPVAQGQKFDPDGAYVRRWVPELAGLDNASIHAPWEASPLELDAAGVRLGVDYPAPLVEHAAARARALDALAALPKRR

SEQ ID NO: 1701 - protein, 390 aa, Yarrowia lipolytica CLIB122
MGNAQSQEEANNNGAARQHRPADNNGHHDPKGTADPQPIPQEGSDNTQNHVSHSPEQMSANSSHVSATPFNNPFEPASYHKESPAPESVPVPVAPAKSHPQRPKMRRKSTLLLDEDEPVGENDDDIPFDKLNITHPTSNEPKPLSRVDSGEEIELTSPQVTEGKIPLEIKWTQGGSKVYVTGTFTGWRKMVALTPDPNKKGVFSTTLHLPPGTHRLRFVVDNELRCSDYLPTATDSMGNLLNYVEVGLSDTEERADQKDLHPISRAGIIPSNDDLGGGYERFTEEDLPKEEYEFTPEIPALFTDTEVMEQYISKELPTPPQLPPHLDSVILNTNSTEKEDNSVLPIPNHVILNHLATTSIKHNVLAVASVSRYSRKYVTQVLYAPLPLQA

SEQ ID NO: 1702 - protein, 379 aa, Eutreptia viridis
IGHVDHGKTTLTAAISMTLASINNSKAKRYEDIDSSPEEKARGITINTTHVEYETENRHYAHVDCPGHADYVKNMITGAAQMDGAILVVSGADGPMPQTKEHILLAKQVGVPNIVVFLNKEDQVDDEELLELVELEIRETLNNYEFPGDEIPIIAGSALLSVQALTENPKIKKGENKWVDKILLLMENVDNYIPTPTRDTDKDFLMAIEDVFSITGRGTVATGRVERGIVKVGETVELVGLKDTRSTIVTGLEMFQKSLDEALAGDNIGILLRGVQKTDIERGMVLVKPKTINPHTKFDSQVYILTKEEGGRHTPFFEGYRPQFYVRTTDVTGKIESFRADDDSPAQMVMPGDRIKMEVELIQPIAIEKGMRFAIREGG

SEQ ID NO: 1703 - protein, 131 aa, Pseudomonas aeruginosa UCBPP-PA14
MRILHSMLRVADLEAALEFYTRALDMRLLRRRDYPEGRFTLAFVGYQDERAAAALELTHNWDRDGYTQGDGYGHLAIEVEDAAVTCARARALGYRVTREAGPMQHGRSVIAFLEDPDGYKVELIQKGTQFD

SEQ ID NO: 1704 - protein, 363 aa, Rubrivivax gelatinosus PM1
MKIAVLPGDGIGPEIVDEAVRVLEVLDLRFELEAAPVGGAAYEAAGHPLPESTLQLAQSADAILFGAVGDWKFDKLDRPLRPEQAILGLRKHLGLFANFRPAICYPQLTHASSLKPELVAGLDILIIRELTGDIYFGQPRGRRSAPDGHFPGAEEAYDTMRYSRPEVERIAHVAFQAARKRGGKLTSVDKANVLETFQFWKDIVTEVHAQYPDVKLDHLYVDNAAMQLVKAPKAFDVIVTGNMFGDILSDEAAMLTGSIGMLPSASLNAKNQGLYEPSHGSAPDIAGKGVANPLATILSAAMMLRFSLNQPEAAARIERGVDAVLAAGLRTADIWSEGTTKVGTRAMGDAVVAAITGKTITKS

SEQ ID NO: 1705 - protein, 177 aa, Triticum aestivum
MDMPGEDEYVYGYEYEFDLENPFTSPADEPIASLLDAEAHHAPSVSAAASAVRRDAARFISKVRYDGELAVHPRVAYLALNYVDRFLSKGQLPFERKPWAPRLLAISCLSIAAKMQRVDAISMDYIQREEEFMFDAVTIRRMERVVLGALEWRARSVTPLAFLGFFLSACFPPPRHP

SEQ ID NO: 1706 - protein, 560 aa, Caulobacter crescentus CB15
MLVVTRRSRAARLIATAMVGGLLFFYLGWTALIVWLVANTICELWVVYLERAYRPHWGQGVIRFMRIGPPSAFAMVWSFMSAYCVLNGPMAMRYAALLILFGIVVEGVRYAMNSLAAMLSLTVWPFLMLAALPLLAKRFDLLDRLAAFAILLGLIGYVADAVRTMRASAKAREEAEAQALEASRAKSAFLAMMSHELRTPMNGVLGLAHALRGTKLDAQQSEYLEMIEQSGHGLMTILNDILDLSKIEAGKLNLEVAPFDLRKLALQTRAVWSESARLKGLDLILEVSPSAPPWVSGDATRVRQILMNLVSNALKFTESGRVVIRLGGEAGGVVTLSVTDTGVGMTAEQIGRLFTPFAQGDASIARRFGGTGLGLSICRQLAELMAGEIIVSSEPGVGSTFTVRLGLPAAAPLVAAPARAAVTQLDGARVLVVDDNLVNQTVARTILEAVGAAVAVAGDGHAALARLRIEDFDVVLMDVHMPGMDGVEAVRRIRAGEAGRTDLPVVALTADAMVGDAERLLAQGFDDAHPKPVQPAGLLATVASLRKAPTELQRLRAVGM

SEQ ID NO: 1707 - protein, 371 aa, Agrobacterium tumefaciens str. C58
MDGTPISPTARAKASSSDCNRGILLKTHRIALIPGDGIGQSVTDAAWQVLNAVAKTSGFVLEGTEFPWSCAFYKETGAMMPKDGIETLRGFDAIMLGAVGWPAEVPDSVSLHGLLLPIRKAFVQYANIRPHRLLSGVQGPLKADGFDILCIRENTEGEYSGAGGRVHQGTEDEVAVETSIFTRKGVERILRFGFEQAQKRRGKLASITKSNAQKYSMVFWDEVTHKLAAEYPDVEVSSYHIDAMAARMVMAPESLDVVVASNLFGDILTDLGAAIQGGLGFAASANINPDRSAPSMFEPVHGSAPDIAHLGIANPIAAIWSGAMMFEHLGEKDAAAKIMAALETATGRGIGTVPGKDKTDTITAAVLAALA

SEQ ID NO: 1708 - protein, 173 aa, Hamamelis virginiana
LHLFYQYNPYSAVWGNITWAHSTSTDLVNWIPHEYAIYMSQPSDINGCWSGSATMLPTGKPVILYTGINTQNQQVQNLAVSKNLSDPFLREWVKSPNNPLMAPTTMNKINASSFRDPTTAWLGPDRLWRVIIGSKRNRRGLAILYRSKDFLRWTKAQHPLHSSKNTGMWECPD

SEQ ID NO: 1709 - protein, 635 aa, Mannheimia succiniciproducens MBEL55E
MPTLRRMINMSKQIQIPDIGADEVTVTEVMVKVGDTVTEEQSIINVEGDKASMEVPSPEAGVVKEILVKVGDKVTTGSPMFVLESADSAPASAPQAAAVAPAAAPTTSAVIEIHVPDIGSDEVNVTEIMVKVGDSVAEEQSIINVEGDKASMEVPAPQAGVVKEILIKEGDKVSTGSLIMKFEVAGGAPAAETPATTVQAAPAVSAVQDVNVPDIGGDEVNVTEIMVKAGDSVAEEQSLITVEGDKASMEVPAPFAGVVKEILVKSGDKVSTGSLIMRFEVAGSAPAVQAAAPAQAAPAPVAPAPQAAPAQSLAPVNQDSIATSASYAHATPVVRRLAREFGVNLDKVKGTGRKGRILKEDVQEYVKNALKALESGATASTGAASGAGLGLLPWPKVDFSKFGEVEEIELTRINKISGANLHRNWVMIPHVTHFDRADITDLEAFRKEQNVLAEKQKLGVKITPVVFIMKAAAKALEAYPRFNSSISEDGQRLTLKKYVNIGVAVDTPNGLVVPVFKDVNKKGIIELSRELMEVSKKARDGKLTASDMQGGCFTISSIGGLGTTHFAPIVNAPEVAILGVSKSEMAPVWNGKEFMPRLMLPLSLSFDHRVIDGADGARFISYINGVLSDLRRLVM

SEQ ID NO: 1710 - protein, 300 aa, Glycine max
MSDSLLTFYSLSAILALLPIFIFILIKRKQSKPRLNLPPGNMGWPFLGETIGYLKPYSATTIGEFMEQHIARYGTIYKSKLFAGPAIVSADAGLNRFILQNEGKLFECSYPRSIGGILGKWSMLVLVGDMHRDMRVISLNFLSHARLRTHLLKEVEKQSLLVLNSWSQNSIFSAQDEAKKFTFNLMAKHIMSMDPGDIETEQLKKEYVTFMKGVVSAPLNLPGTAYRKALKSRSIILKFIEGKMEERVRRIQEGNESLEEDDLLNWVLKNSNLSTEQILDLILSLLFAGHETSSVAIALA

SEQ ID NO: 1711 - protein, 474 aa, Vigna radiata
MVSLPTLLLLFAASAAAIFLHRAFSRRKFRLPPGSYGLPFIGETLQLISAYKSSNPEPFMDERVRRYGSIFMTHVFGEPTVFSADPELNRFILQNEGKLLDCSYPGSISNLLGKHSLLLMKGALHKRMHSLTMSFANSSIIKDHLLHHIDRLIGLNLDTWSDRVTLMDQAKKITFELTVKQLMSFDPDEWTESLRKEYVLVIEGFFTLPLPLFSTTYRRAIKARTKVAEALTLVVRQRREEYNQGKEKKSDMLGALLASGDHFSDDQIVDFLLALLVAGYETTSTIMTLAVKFLTETPLALAQLKEEHDQIRARSDPGAPLEWTDYKSMVFTQHVVNETLRVANIIGGIFRRATTDIDIKGYTIPKGWKVFASFRAVHLNPEYYKDARTFNPWRWQSNSSEAANPANVYTPFGGGPRLCPGYELARVVLSVFLHRIVTRFSWVPAEEDKLVFFPTTRTQKRYPIIVKRRNANHV

SEQ ID NO: 1712 - protein, 235 aa, Glycine max
HSPSGVLLIMATPASITNVTVEFLQFPALVTPPGSTKSYFLGGAGVRGLNIQEEFVKFTGIGVYLEDKAVSSLAAKWKGKSAAELLDSLDFYRDIIKGPFEKLIRGSKLRTLDGREYVRKVSENCVAHMQSVGTYSDEEEKAIEEFRNAFKDQNFPPGSTVFYKQSPTGTLGLSFSKDETIPEHEHAVIDNKPLSEAVLETMIGEIPVSPALKESLATRFHQFFKELEANPNIEN

SEQ ID NO: 1713 - protein, 148 aa, Solibacter usitatus Ellin6076
MDMKKPSRPIEILLVEDNAADAQLVERAFRFSRTPVRLYVVEDGVQALDYLRRTAGYTDSVRPDLIMLDLNLPGRDGHQVLKELKNDPDLKEVPVVIYSGSAMQRDVKLAYRLGGNCYIRKPVDLEEFFGVVASIERFWLNTALLPSL

SEQ ID NO: 1714 - protein, 691 aa, Sorghum bicolor
MSAVSSSSLCGGDPAMRSVVWFRRDLRVEDNPALAAAARAGGEVVPAYVWSPEEEGPYYPGRVSRWWISQSLKHLDASLRRLGAGKLVTRRSADAVVALLQLVRDTGATHVYFNHLYDPISLVRDHRLKEMLAAEGIVVQSFNADLLYEPWEVVDDERQPFTMFTAFWNRCLSMQYDPPAPLLPPKKINSGDLSMCPSEDLIFEDDSERGSNALLARAWTPGWQNADKALTAFLNGPLADYSVNRKKADSASTSLLSPHLHFGELSVRKVFHLVRMKQLVWSNEGNHAAEESCTLFLRSIGLREYSRYLSFNHPSSHERPLLAHLRFFPWVVNESYFKIWRQGRTGYPLVDAGMRELWATGWLHDRIRVVVSSFFVKVLQLPWRWGMKYFWDTLLDADLESDALGWQYITGSLPDSRELDRIDNPQFEGYKFDPHGEYVRRWIPELVRLPTEWIHHPWDAPVSVLQAAGIELGSNYPLPIVELDAAKARLQEALSEMWQLEAASRATMNNGMEEGLGDSSEVPFPEELQMEVDRATANVVMTVRRREDQMVPTMTSSLNRAETEVSADLGNSEDTRAQVPFHAHFHPRVEREDMIQNTEGPALRINGTHQHNIFQQPQNHRREALAPSVSEASSSWTGREGAVVPVWSPPAASGHSETFAADEADVSSRSYLDRHPQSHRLMNWSQLSQSL

SEQ ID NO: 1715 - protein, 491 aa, Pseudomonas fluorescens Pf-5
MHAALLEQAHRAIEKKLPGRGDVYRLAYHLAPPVGWMNDPNGLVYFRGEYHVFYQHHPYSAQWGPMHWGHAKSRDLVHWEHLPIALAPGEAYDRDGCFSGSAVVMDDVLYLIYTGHTWLGAPGDERSIRQVQCLASSTDGVAFSKHGPVIDRAPEPGIMHFRDPKVWRRGEQWWMALGARQGDAPQLLLYRSGDLHHWTYLRCALQGQRESDGYMWECPDLFELDGCDVFLYSPQGLNPSGYDNWNKFQNSYRMGLLDDRGYFSEGGELRELDHGHDFYAAQTLLAPDGRRLLWAWMDMWDSPMPSQAQHWCGALSLPRELSRNGERLRMRPARELAALRQSQRTLAIGVVESGNCILAERGALLEFELTLDLAGSTAERFGLALRCSEDRQERTLVYFDAMARRLVLDRQHSGAGVSGARSVPIAKGQMQIALRIFLDRSSIEVFVDDGAYSLSSRIYPSPDSVAVMAFAVNGSGGFGQASVWHLADLHL

SEQ ID NO: 1716 - protein, 167 aa, Zea mays
MEYGQQGQRGHGATGHVDQYGNPVGGVEHGTGGMRHGTGTGGMGQLGEHGGAGMGGGQFQPAREEHKTGGILHRSGSSSSSSSEDDGMGGRRKKGIKEKIKEKLPGGHKDDQHATATTGGAYGQQGHTGSAYGQQGHTGGAYATGTEGTGEKKGIMDKIKEKLPGQH

SEQ ID NO: 1717 - protein, 502 aa, Mentha x piperita
MYSIAFMLVLRKMDEIISHTLAFQALVSLILLISITKWLSNSPKNKNSSPPSPRKLPILGNLLQLGSLPHHNLRSMARKHGPIMLLHLGSVRPVSSRRRPRGNHENSRSRLRRPRGSRSAALQLQGRVGGYGEYWRQLKTICVVQLLSNKRVQSFRSVREEETELLMKKIGDSSGNVNLSHMFTQLTNDVVCRSAIGRKYGAGDENGEKFLEILREFLELLGAISIGDFVPSLWWINRINGFDRRVDRIAKEMDEFLEKVIHERLENPAAKAEENFVDILLEIYRNNSAGVSIDRDSIKAIILDVFAAGTDTTAVVLEWAMTELLRHPEIMKKLQSEVRQVVKDKHNITDDDIEKMHYLKAVMKETMRFHTPIPLLVPRVARNDVEVMGYDVPVGTMVMINAWAIGRDPTSWDEPEKFRPERFLNSSVDFKGLDFELIPFGAGRRGCPGTTFPMATLEFTLANLMQKFDWELPHECRELDMSERPGVAIRRVIPLLAIGTKM

SEQ ID NO: 1718 - protein, 283 aa, Brassica napus
  misc_feature (228)..(228): Xaa can be any naturally occurring amino acid
MAENADLVEWPKKDKRRFLHVVYRVGDLDRTIQFYTECFGMKVLRKRDVPEEKYSNAFLGFGPETSNFVVELTYNYGVSSYDIGTGFGHFAISTQDVSKMVEAVRAKGGNVTREPGPVKGGGSVIAFVKDPDGYTFELIQRGPTPEPLCQVMLRVGDLDRAIKFYEKALGMRLLRRIERPEYKYTIGMMGYAEEYESIVLELTYNYGVTEYTKGNAYAQIAIGTDDVXPTRPVVKIVNQELGGKITREAGPLPGLGTKIVSFLDPDGWKTVLVDNEDFLKELE

SEQ ID NO: 1719 - protein, 421 aa, Sulfolobus solfataricus
MEEVLSSSLYTQQVKKLYKVGELLGLDNETLETLSQPERIIQVKIQIRGSDGKLKTFMGWRSQHNSALGPYKGGVRYHPNVTQDEVEALSMIMTWKNSLLLLPYGGGKGGVRVDPKKLTREELEQLSRKYIQAIYKYLGSELDIPAPDVNTDSQTMAWFLDEYIKITGKVDFAVFTGKPVELGGIGVRLYSTGLGVATIAKEEAANKFIGGVEEARVIIQGFGNVGYYAGKFLSEMGAKIVGVSDSKGGVINEKGIDVGKAIEIKEKTGSVINYPEGRKVTNEELLISDCDILIPAALENVINKFNAPKVKAKLIVEGANGPLTADADEIMRQRGIAVVPDILANAGGVVGSYVEWANNKMGEIISDEEAKKLIVDRMNNAFNTLYDYHQKKKLEDHDLRTAAMALAVDRVVRAMKARGIL

SEQ ID NO: 1720 - protein, 145 aa, Zea mays
MQLERGQLLMVAPYLVKRKKQHFHHLEKYNVDLILGCNGFIWAGEHVVVGEKPKTTGGQQGFSTEAENFTPLETRKHICRLANSVRVLSALGFTLTVELIIETMEASASSNVEINDMLGAEFYVQTAEREAKRRADLLRKKNDAR

SEQ ID NO: 1721 - protein, 128 aa, Triticum aestivum
MDFDDHDDGDEEMQMSMPMPVSSSYEPPPPLSTGFGGAGVAPNKPPGGGGGGGGELGGRAKAPGGGARYRECLKNHAVGIGGHAVDGCGEFIAAGEEGSIDALRCAACNCHRNFHRRESDFPAGPEGS

SEQ ID NO: 1722 - protein, 557 aa, Desulfitobacterium hafniense Y51
MKNVDNYRRGYFMPPVKSLKWAEKEYITTPPTWCSVDLRDGNQALVVPMSLEEKLEYYHMLLKIGFKEIEVGFPAASETEYAFLRTLIEQNLIPEDVTIQVLTQSRDHIIEKTFKALVGVKKAVVHLYNSTSVAQREQVFKMSREEIVEIAVSGARLLKKYAAETEGNFQFEYSPESFTGTEMEFALEICNQVLDVFEPTPENKVIINLPATVSLSMPHVYASQIEYMSEHLKYRDNVILSLHPHNDRGTAVADAELGLLAGGQRIEGTLFGNGERTGNVDIVTLALNLFSHGVDPGLNFASMLEITAKYEALTRMKVHDRQPYGGKLVFAAFSGSHQDAITKGIKWREEHECHYWNVPYLLIDPQDIGREYEGDVIRINSQSGKGGIAYMLEQHYALDLPAKMREAFGYKVKNVSDNLHKELMPEEIKDIFFKEYVNIENPIKFLNFHFLNHDDFQTTVTLEFKGEIQELSGEGDGRLDAISNALQARLGLSYSNLIYKEHALELGSKSQAVSYVGVTGPDGVIHWGCGIHTDIFTSSVKALISAINTMIKDSAAV

SEQ ID NO: 1723 - protein, 682 aa, Debaryomyces hansenii CBS767
MALEQSLAALSLATVSSESAVSTKTLVFKPKTAKSATPVPVVVFALQSTQTPSPVIAKAAGVKEPRLAKDDLVTEFFTVSAKEVSIANLHKDLAGKIKLVVDENITKASDDTVLELSTASAKASISAKVLNEYIASTGIEVVSVDFSAEQAAAPAADTSKKDALKKEKQAAKLEDAKLIGITVDKAKDFSSWYSQIVTKGEMLDYYDVSGCYILRPNSYSVWETIQEWFNLRIKKMGVQNSYFPMFVSSRVLEKEKDHIEGFAPEVAWVTRAGNSELDEHIAIRPTSETVMYPYYAKWIRSHRDLPLKLNQWNSVVRWEFKHPQPFLRTREFLWQEGHTAHLTKESAAEEVEQILDLYAGIYEELLAVPVVKGKKTENEKFAGGDYTTTCEGFIAETGRGIQGATSHHLGTNFSKMFNISVENPEGADKPRVHAFQNSWGLSTRVIGVMVMTHSDNKGLVLPPRVAQTQVVVIPVGLTAKTPDEQRKAINDGAANIEHILKQTDVRVTGDYRDNYSPGWKFSNWELKGTPLRLEFGPKDLASEQVTAVRRDNSQKYSVKLNELEKRIPEILQEMQVGLLEKARKDFDEHRVMVHEWKDFVPTLNAKNVIVSPWCGDGDCEDDIKDSSAKKDDGEEEEVDEKSPSMGAKSLCIPFDQPELKSGQKCVKCDRPAVTYCMFGRSY

SEQ ID NO: 1724 - protein, 373 aa, Francisella tularensis subsp. holarctica
MALHGKKDTIDNLDFFEQSLPKFKLPLNSQDPLEVYQEIKDELMLDGNSKQNLETFCQTEVDDFIHKLMDDCIDKNMIDKDEYPQTAEIESRCVNILANLWNSSAENAIGCSTTGSSEAAMLGGMAMKWRWRDKMKAQGKDYTKPNLVTGPVQVCWHKFARYWDIELREIPMSNESLIMTPEAVLERCDENTIGVVPTLGVTFTGQYEPVEQVCKALDDFERQTGVDIPVHVDAASGGFLAPFVEPELKWDFRLPISPLGVGWVIWADKKYLPDDLIFNVNYLGGNMPTFALNFSRPGGQIVAQYYNFVRLGFEGYKKVHQLCYDIAEYIAKELRKMEIFEIIHAGEGGIPAVSWSLKATKEYSLFDISESSR

SEQ ID NO: 1725 - protein, 265 aa, Pyrococcus abyssi GE5
MKRIFVQNRELVVPGTLLAQGPYKNGRGTFREGSRIYSTVIGLVDIKGNTIRVIPLEGPYIPEVGDNVIGKIVDVKFSSWVVDIGAPYPANLKIQDFTDEKIDLLRTDLRKFFDIGDIIYAKVKAITEVNNIDLTTKGMPFNGGPLKGGQIVKITPSRVPRVIGRGGSMINMIKKLTMTRIIVGQNGWIWVSGKNDALEKLAIEAILKIDKESHTRGLTDRIKALLLSRLQELKEKGVIEEIPKLEEEPQGEDEVNGNDGEARGA

SEQ ID NO: 1726 - protein, 117 aa, Oryza sativa
  misc_feature (44)..(44): Xaa can be any naturally occurring amino acid
MARAQLVLVALVAALLLAAPHAAVAITCGQVNSAVGPCLTYARXGGAGPSAACCSGVRSLKAAASTTADRRTACNCLKNAARGIKGLNAGNAASIPSKCGVSVPYTISASIDCSRVS

SEQ ID NO: 1727 - protein, 600 aa, Sulfolobus solfataricus P2
MRVAVINYDFCKPDKCNLECINFCPVDRSGGKAIELSEIVKGKPVIYEETCIGCGICVKKCPYEAISIVNLPDELEGEVIHRYKVNGFKLFGLPTPKNNTILGVLGKNGVGKTTVLKILAGEIIPNFGDPNSKVGKDEVLKRFRGKEIYNYFKELYSNELKIVHKIQYVEYASKFLKGTVNEILTKIDERGKKDEVKELLNMTNLWNKDANILSGGGLQRLLVAASLLREADVYIFDEPSSYLDVRERMNMAKAIRELLKNKYVIVVDHDLIVLDYLTDLIHIIYGESSVYGRVSKSYAARVGINNFLKGYLPAENMKIRPDEIKFMLKEVSDLDLSKDLKTKMKWTKIIKKLGDFQLVVDNGEAKEGEIIGILGPNGIGKTTFARILVGEITADEGSVTPEKQILSYKPQRIFPNYDGTVQQYLENASKDALSTSSWFFEEVTKRLNLHRLLESNVNDLSGGELQKLYIAATLAKEADLYVLDEPSSYLDVEERYIVAKAIKRVTRERKAVTFIIDHDLSIHDYIADRIIVFKGEPEKAGLATSPVTLKTGMNEFLRELEVTFRRDAETGRPRVNKIGSYLDRVQKERGDYYSMVLSTQ

SEQ ID NO: 1728 - protein, 371 aa, Brucella suis 1330
MSYNQKQVVDAIRAFERGEIVVVMDDDGRENEGDLIVAAVHCTPEKMAFIVRHTSGIVCTPMTREEAKRLNLTPMVAENESAHTTAFTVTVDYRHGTTTGISAEDRTLTVRNLANPNAGASDFVRPGHIFPLVAREGGVLMRSGHTEAAVDLCKLANLPPIGVICELVNDDGTVKRGPDVAAFAEEHKLHRVTVADLIAYRQRKETLVRRIGDAPVETCAGKAHAYSYELPWEPMRHVAVVFGDIRDGEEVPVRLHREDVLNDVFGKGGSNLDAIMQRMGQEGRGILVYLREGSVGVRSDHRDARAREALQGEHEAHAEAVAREEEWRQIGLGAQILKDLGVSSIVLLASRERHYVGLEGFGICITRTEII

SEQ ID NO: 1729 - protein, 370 aa, Cytophaga sp. KUC-1
MDATFATGKELQKMDPVFGQLSFDDHEQIVFCNDKDTGLKAIIGIHNSVMGPALGGTRMWNYNTEWEALNDVLRLSRGMTYKSAITGLNIGGGKAVIIGDAKTQKTPELMRKFGEFVHSLGGRYITAEDVGMETKDMDTVRDVTPYVTGISEGRGGSGNPSPITAYGVYLGMKAAAKSQFGTDVLEGKKVLVQGIGHVGEALVEYLTKEGAIVTITDINEEKLFQVAQKYNATVYTGTDLYTADVDIYAPCAMGAIINDDTVNKIKAKVIAGAANNQLADENVHGQRLQERGILYAPDFLINAGGIINVYAELEHYGKAEIMTKTENIYNTTLEIIDYAVKNGMTTHKAALTIAQNRIDLRKIENAAAKK

SEQ ID NO: 1730 - protein, 144 aa, Larix laricina
VRYRNHEEAALAIQLANGRVICGKSIKCSWGSKPTPPGASSNALPPPSAPFQGVVAAQGLNQGYTAADILAYRQMNMSQAGAGQPLLPLSAQQGMGLGLGHGPMGVVGPAGNQNLYDNFQAGAGLPSAAAAAAAAMRQQIMYYQ

SEQ ID NO: 1731 - protein, 566 aa, Kluyveromyces lactis NRRL Y-1140
MSSNLSEKAVDQQKEFGLLKSTSSVDSVHEVEAGVKVGEDDDNYFFSEDQILTQIKVYEDEIANTPVTKTLRQRMRRMEFCEVNFSNKTYMVIMLGFFASFAGILSGVDQSTISGASYGMKASLKLTSDEDSLISSLMPLGAVGGSILLTPLSEYFGRKVALVISCIFYTIGGILCAAAQDVHTMYAGRFLIGVGVGIEGGGVGVYIAESVPSTVRGSLVSLYQFNIALGELVGYVIGVIFFDVKGGWRYMLGSSLVFSTILFVGLFFLPESPRWLIHKGYDVEAYKVWRRLRDTSDLGNKREFLEMKHAAEQDRQLKEQESRFKSMFDLILIPRNRRALLYSIMMVSLGQLTGINAIMYYMSTLMGQIGFSPKQAVAMSMVGGAALLIGTIPAILYMDKFGRRPWSMTIIGFSVGLVLVGVGYQIDLNTNLAAAEGVYLTGQILYNIFFGTYATLTWVVPSESFSLATRSIGMTICSAFLYLWAFTVTYNFNKMKDAFTYTGLTLGFYGGIAIVIGIPYQLLFMPETKDKTLEEIDDIFEMPTRQLVKQNLKNLKDYVSGNRKSI

SEQ ID NO: 1732 - protein, 174 aa, Glycine max
MRSVSLRPELHIPICSSNPPSCVKPIKLVVASSYGKNLKNPPSKFAITLREHRTTLEHAARLPLLKHDSGIVVMGAVCVVGILAVVLSEEKALALGPEGPLVEEFWDNVRRYGLYALTVSTGALYTIFRPIAELLKNPISAIFILALFGGSIFIVSQVLSAMVGVSEFSYDFGY

SEQ ID NO: 1733 - protein, 208 aa, Oryza sativa (japonica cultivar-group)
MASYHQQQGGSTFMAIPTINFQMYSEIAGDDEWWEYIPCPFCYIEVEVHFLCDHLQEEHCFDMKNAVCPICADNLDKDTDEHFRVQHSHLLKRRKSSSFSCKPSSAAADKGSYEEDSYFEAPSHCMGRPAPDSSPDPLLSQFICCSLAPPVDSPRRSEADAEGHGSSSSDDQKRREQGVMDDASKEELEERLQRIEFVKQMLMTTIAY

SEQ ID NO: 1734 - protein, 162 aa, Zea mays
MSAAEGAVVFSEEKEALVLKSWAIMKKDSANLGLRFFLKIFEIAPSAKQMFPFLRDSDVPLEKNPKLKTHAMSVFVMTCEAAAQLRKAGKVTVRETTLKRLGATHLRYGVADGHFEVTGFALLETIKEALPADMWSLEMKKAWAEAYSQLVAAIKREMKPDA

SEQ ID NO: 1735 - protein, 508 aa, Sulfolobus solfataricus P2
MWRQAKWNEPLIFELNKSGAARQGFLINKDEEIRSQIKEMKIPKNLLRENEPDLPSLSELEVVRHFVRLSQMNFGVDIGIMPLGSCTMKYNPKIEEKATAITEFHHPLEDEDYIQGILEMIYELQNWFSEITGMDECSLQVPAGSAGEFAGVLMIKKYHEEHNRNYKDTILVADTAHGTNPASAAMAGYKVMYVKSNAEGLVDMDILREIVNDKTAGFMLTNPNTLGLFEENILEISKIIHSTNAVLYYDGANLNGVLGIARPGDMGFDIVHLNLHKTFAVPHGGGGPGAGAICAKGELVNYLPYPMVEKVNGKYKLSKIPKNSIGKIATFYGNVGNLARSFAYILGLGPQGIQMIGKMSTLATNYLIAKLRDVKELELIAPNRHRKHEVVFSVKQLMENYGVSANDVAKALLDNGFYAPTIYFPPIVEEALMIEPTETETKETLDMFAETLKKIVNDAKINPEQVMKSPNNTSIARLDQAYANHPSTITPTYRVLRLRRLGKIDYLK

SEQ ID NO: 1736 - protein, 337 aa, Omphalotus olearius
MVVKVGINGFGRIGRLVIRNALEAQGVEVVAVNDPFIPLDYMVYMFKFDSVHGRYKGTVEAKDGKLIIAGKPIAVFGERDPASIPWGASGADYVVESTGVFTTIDKASAHLKGGAKKVIISAPSADAPMYVCGVNLDAYDPRRPSISNASCTTNCLAPLAKVIHDKFGIVEGLMSTIHATTATQKTVDGPSNKDWRGGRSVNNNIIPSSTGAAKAVGKVIPSLNGKLTGLSFRVPTLDVSVVDLVVRLEKEATYDEIKAAVKEAVAGPLKGILDYTEDALVSTDFTGNTHSSIFDASAGIALNKNFVKLIAWYDNEWGYSRRVVDLITFVAQKDGNA

SEQ ID NO: 1737 - protein, 323 aa, Mannheimia succiniciproducens MBEL55E
MKSSKTGILLANLGTPDTPSPKAISRYLKEFLSDPRVVDLPRWKWLPLLNGIILPIRSRRIAKNYGAIWTEQGSPLFAITQKQKALLTEFFQQRQQNVIIEIGMTYGNPSMQYAIDNLIEQKVDKIIVLPLYPQYSSTTTAPVFDVFAQALKRHRHIVPFEFIHSYHLDENYIEALVKSIKVRLKNDEFLLFSFHGIPKRYEQEGDFYRPQCEQTAQAVVQKLGLKKEQWRLCFQSRFGSEPWLQPYTDKFLETAAQQGITKLAVICPGFSADCLETLEEIKEENKRIFLAYGGESYHYIPALNDSPEHIACLGNLLLKRMTI

SEQ ID NO: 1738 - protein, 605 aa, Triticum aestivum
  misc_feature (440)..(440): Xaa can be any naturally occurring amino acid
  misc_feature (538)..(538): Xaa can be any naturally occurring amino acid
MADRLTRIAIVSEDKCKPKKCRQECKKSCPVVKTGKLCIEVSPAAKLAFISEELCIGCGICVKKCPFDAIEIINLPKDLEKDTTHRYGPNTFKLHRLPVPRPGQVLGLVGTNGIGKSTALKVLAGKLKPNLGRFKNPPDWQEILTYFRGSELQNYFTRILEDNLKAIIKPQYVDHIPKAVQGNVGQVLEQKDERDMKNELCVDLELNQVIDRNVGDLSGGELQRFAIAVVAVQSAEIYMFDEPSSYLDVKQRLKAARVIRSLLRSNSYVIVVEHDLSVLDYLSDFICCLYGKPGAYGVVTLPFSVREGINIFLAGFVPTENLRFRDESLTFKIAETQENAEEVATYQRYKYPTMSKTQGNFKLTVVEGEFTDSQIVVMLGENGTGKTTFIRMLAGLLKPDTMEGTEVEIPEFNVSYKPQKISPKFQHPVRHLLHFKKRRXYTHPQLVSDVMKPLQIEQLMTQKVINLSGGELQRVALCLCLGKPADIYLTDEPSAYLDSEQRIVASKVIKRFILHAKKTAFIVEHDFIMATYLADKVXIVYEGLASIDCTANAPQSLVSGMNKFLSHLDITFRRDPANYRPRIHKLESTKGREQKYAGSYYYLDD

SEQ ID NO: 1739 - protein, 357 aa, Synechococcus sp. CC9605
MAQHRVVLLPGDGIGPEITAVARQLLEVVSRRHGFSLSFEEQPIGGSAIDATGEPLPASTLDACKAADAVLLAAIGSPCFDSLPREKRPETGLLGLRAGMELFANLRPVKIVPALIDASSLKREVIEGVDLMVVRELTGGIYFGQPKGRIETEGDERGFNTMTYSASEVDRIAKVAFEIAQERRGRLCSVDKANVLDVSQLWRDRVDAMAPSYGPVEVSHMYVDNAAMQLVRDPRQFDVLLTGNLFGDILSDEAAMLTGSIGMLPSASLGSEGPGLFEPVHGSAPDIAGQDKANPMAMVLSAAMMLRIGLKQAAAADDLEAAVDAVLAGGFRTGDLMAEGCTQLGCRAMGEQLLKAL

SEQ ID NO: 1740 - protein, 484 aa, Hordeum vulgare
MECVRSGALDLGRSGNFLGKSGSTTSCGKVRCSTNLAGSTKCEQNLHGKAKPLLLSASGKARGTSGLVHRSPVLKHQHHLSVRSTSTDVCTTFDEDVKGVSSHAVEEKVGVLLLNLGGPETLNDVQPFLFNLFADPDIIRLPRLFRFLQRPLAKLISTFRAPKSKEGYASIGGGSPLRKITDEQANALKVALKSKNLEADIYVGMRYWYPFTEEAIDQIKKDKITKLVVLPLYPQYSISTSGSSIRVLQNIVKEDPYFAGLPISIIESWYQREGYVKSMADLIEKELSVFSNPEEVMIFFSAHGVPLTYVKDAGDPYRDQMEDCIALIMEELKSRGTLNDHTLAYQSRVGPVQWLKPYTDEVLVELGQKGVKSLLAVPVSFVSEHIETLEEIDMEYRELALESGIENWGRVPALGCTSSFISDLADAVVEALPSASAMATRKVKDTDSDMDMMHYLTKMFLGSVLAFFLLLSPRLVSAFRNTLQ

SEQ ID NO: 1741 - protein, 309 aa, Bacillus thuringiensis serovar konkukian str. 97-27
MRKIIVGSRKSKLALTQTNWFIDQLKALGLPYEFEVKEIVTKGDVILDVTLSKVGGKGLFVKEIEHALLTKEIDMAVHSMKDMPAVLPEGLMIGCTPKRVDPRDAFISKSGASFKELAEGAILGTSSLRRSAQLLAARPDLQVKWIRGNIDTRLRKLKEEDYDAIILATAGLQRMGWDDEVITEHLDETLCVPAVGQGALAIECREDDKDLLQLLAHINDAVTERTVAAERVFLHKLEGGCQVPIAGYATLTENDAIELTALVGSMDGSILLKETVVGTDPEKVGLEAADRLIKQGAKELILAANKGQQ

SEQ ID NO: 1742 - protein, 502 aa, Xylella fastidiosa Temecula1
MHNGFDALQLHANRLRGVTIPDLLAAELKRPEQYARQVGPLYFNFARQKYDCVALEALFALARNHNVTGAFQRMFCGEQVNVTEGRAVLHTALRGDLSGTSVAVAAYTAAAKVRERMYALIAGLDASEVTDIVSVGIGGSDLGPRLVVDALRPISQGRFRVHFVSNVDGAAMRRTLDMLDPSRTAGILISKTFGTQETLLNGRILYDWLGGSERLYAVTANPERAANAFDIVPTQVLPIWDWVGGRYSLWSAVGFPIALAIGSQRFEELLAGAAEFDAYALRVPLEENVAVLHGLTAVWNRNFLGCATYAVMAYDQRLALLPTYLQQLVMESLGKRVKCDGTPVDRDTVPVWWGGVGTDVQHSFFQALHQGTNIVPADFIGTIRNDDLYTENHFALNANLLAQIEVLANGQLSDNPHRVYPGGNPSTLILLDALTPQALGGLIAMYEHSVYVQSVIWGINAFDQFGVELGKHLAVQLLPALKGESVEVADPVTRAVLLRLRG

SEQ ID NO: 1743 - protein, 321 aa, Brassica juncea
MEKNIKFPVVDLSKLIGEERDQTMAWINDACENWGFFEIVNHGLPHDLMDNAPKKMTKEHYKKSMEQKFNDMLKSKGLEILEREVEDVDWESTFYLRYLPQSNLYDVPDMSDEYRTAMKDFGKRLENLAEDLLDLLCENLGLEKGYLKKVFHGTKGPTFGTKVSNYPACPKPEMIKGLRAHTDAGGIILLFQDDKVSGLQLLKDGDWIDVPPLNHSIVINLGDQLEVITNGRYKSVMHRVVTQKEGNRMSIASFYNPGSDAEISPASSLACKETEYPSFVFYDYMKLYAGVKFQPKEPRFEAMKNANAVTELNPTAAVETF

SEQ ID NO: 1744 - protein, 976 aa, Ralstonia eutropha JMP134
MNAPLPMTATQGNRPTLAELEARDAFAARHIGPDTPEQQHMLKVLGYDSRAALIDAVIPEAIRRRDGMPMGEFTEPLPEEAALAKLRKLAGKNKVLKSFIGQGYYNTLTPAVVLRNIFENPAWYTAYTPYQPEISQGRLEAMLNFQQMVTDLTGLDIANASMLDEGTAAAEAMTLLQRVNKHASNTFYVADDVLPQTLEVVRTRAKPLGIEVKVGPAADAAAAHAFGVLLQYPGVNGDVTDYRAIADAVHAAGGLVVAAADLLALTLITAPGEWGADVAVGNSQRFGVPLGFGGPHAGYMAVKDAFKRSMPGRLVGVTVDAQGNKAYRLALQTREQHIRREKATSNICTAQVLLAVMASMYAVYHGPQGLKRIAQRVHRLTATLAAGLQTLGFTRTNATFFDTLTFETGFNTDAIHAAATARGINLRHAGATRIGVSLDETATRDDVVALWEIFSHGKPLPASLTFDAIEAAAEDAFPANLARTSAYLTHPVFNTHHAEHEMLRYLRMLADKDLALDRTMIPLGSCTMKLNATSEMIPVTWPEFSQIHPFAPLDQTVGYREMIDQLEAMLCAATGYAAVSLQPNAGSQGEYAGLLIIHAYHASRGESHRDICLIPSSAHGTNPASAQMAGMKVVVVACDENGNVDLEDLAKKAELHSKNLAAIMITYPSTHGVFEQGVQQICEIVHQHGGQVYVDGANMNAMVGTAAPGHFGGDVSHLNLHKTFCIPHGGGGPGVGPVAVGAHLADFLPNQDSVGYRRDDNGIGGVSAAPFGSASILPISWMYIAMMGSAGLTAATENAILTANYVAKRLSPHYPVLYTGQHGLVAHECILDLRPLQKETGISNEDVAKRLMDYGFHAPTMSFPVPGTLMIEPTESEALHELDRFIDAMIAIRKEIGRVEDGSFDRDDNPLKHAPHTAAVVTANEWTRKYTREEAAYPVASLRTQKYWPPVGRADNVYGDRNLFCSCVPMSEYAQD

SEQ ID NO: 1745 - protein, 614 aa, Oceanobacter sp. RED65
MSESSTGFASLGLPFNLLRAIEEQGYEQPSPIQEQSIPHLLEGKDVLGLAQTGTGKTAAFTLPLLARTQNEVREPQVLVLAPTRELAQQVAMAVESYSKHESNVKVASIYGGSDFGSQFRALKQGPQWVVGTPGRVMDHIRRGTLKLEGIRAVVLDEADEMLRMGFIDDVDWVLDQVPEKRQIALFSATMPKQIKAVAEKHLREPTEIRIKSKTATNESIEQKYWLVKGVDKNQALLRICETSEFDAMMVFVRTKQATEEVADYMRSHGLRCEALNGDVAQAQRERAVDRLKKGQVDMLVATDVAARGLDVERISHVVNYDIPYDAESYVHRIGRTGRAGRSGEAILFVRPRERRMLSTIERVTRKKIQQIELPTAKEVNAKRRDQFKVRALEHIEGRDIEIFKKIASEILAEQPALDPIELAAAFAQMSQGNKPLFMDESEPRFKPETDRGERGERKERRNNSGREERKPIELEAMPLKDFPDVEMRRYRLAVGYKDGVKPGNIVGAIANEADIESKFIGHIEIYDTFASVDLPSGMPEETLTHLKKARVCGRPINIEPLKNRGAGGGQKPRRNAKGGNKGKKPQGERGQNKGGAKSGKPKRTGDRKPRMSAL

SEQ ID NO: 1746 - protein, 125 aa, Brassica napus
MVLVLALGDLHVPHRAADLPPKFKSMLVPGKIQHIICTGNLCIKEIHDYLKTICPDLHIVRGEFDEDARYPETKTLTIGQFKLGLCHGHQVIPWGDLDSLAMLQRQLDVDILVTGHTRQSPPPPP

SEQ ID NO: 1747 - protein, 276 aa, Solanum sogarandinum
MAQTMLLTANAKVDLRSKESLVERLKPKPLSSLFLPSLPLRFSSSTTNFSSSKFTSTTVALFKSKAKAPPKKVAPPKEKQKVEDGIFGTSGGIGFTKQNELFVGRVAMIGFAASLLGEAITGKGILAQLNLETGIPIYEAEPLLLFFILFNLLGAIGALGDRGRFIDDPAPATGLEKAVIPPGKSFKSALGLSEGGPLFGFTKANELFVGRLAQLGIAFSIIGEIITGKGALAQLNFETGVPINEIEPLLLFNIAFFFFAAINPGTGKFITDEEED

SEQ ID NO: 1748 - protein, 412 aa, Oceanobacter sp. RED65
MSTEIKAPVFPESVADGTIATWHKQPGEQVSRDELLVDIETDKVVLEVVAQNDGVLKEIIKAEGDTVLSSEVVGIFEEGATGSAGGSKDEAPAAKEETAQEADEDDLKVNPAARKLAEEKGVQLSAVKATGKDGRITKEDVLNHIKAEKEAPAAAPAPKAESAPAPASAPSMPSFNAGERAEKRVPMTRLRATIAKRLVSAQQNAAMLTTYNEVDMKAVMELRSQYKDMFEKKHDGVRLGFMGFFVKAATEALKRFPSVNASIDGNDIVYHGYQDIGVAVSTDKGLVVPVLRDVDAMGLADIEGGIVDYAKKAKQGKLGIEEMQGGTFTITNGGVFGSLMSTPILNPPQTAILGMHKIQERPMAINGQVEIRPMMYLALSYDHRMIDGKEAVQFLVTIKELLEDPARILLDV

SEQ ID NO: 1749 - protein, 957 aa, Shigella flexneri 2a str. 301
MTQTLSQLENSGAFIERHIGPDAAQQQEMLNAVGAQSLNALTGQIVPKDIQLATPPQVGAPATEYAALAELKAIASRNKRFTSYIGMGYTAVQLPPVILRNMLENPGWYTAYTPYQPEVSQGRLEALLNFQQVTLDLTGLDMASASLLDEATAAAEAMAMAKRVSKLKNANRFFVASNVHPQTLDVVRTRAETFGFEVIVDDAQKVLDHQDVFGVLLQQVGTTGEIHDYTALISELKSRKIVVSVAADIMALVLLTAPGKQGADIVFGSAQRFGVPMGYGGPHAAFFAAKDEYKRSMPGRIIGVSKDAAGNTALRMAMQTREQHIRREKANSNICTSQVLLANIASLYAVYHGPVGLKRIANRIHRLTDILAAGLQQKGLKLRHAHYFDTLCVEVADKAGVLTRAEAAEINLRSDILNAVGITLDETTTRENVMQLFSVLLGDNHGLEIDTLDKDVAHDSRSIQPAMLRDDEILTHPVFNRYHSETEMMRYMHSLERKDLALNQAMIPLGSCTMKLNAAAEMIPITWTEFAELHPFCPPEQAEGYQQMIAQLADWLVKLTGYDAVCMQPNSGAQGEYAGLLAIRHYHESRNEGHRDICLIPASAHGTNPASAHMAGMQVVVVACDKNGNIDLTDLRAKAEQAGDNLSCIMVTYPSTHGVYEETIREVCEVVHQFGGQVYLDGANMNAQVGITSPGFIGADVSHLNLHKTFCIPHGGGGPGMGPIGVKAHLAPFVPGHSVVQIEGMLTRQGAVSAAPFGSASILPISWMYIRMMGAEGLKKASQVAILNANYIASRLQDAFPVLYTGRDGRVAHECILDIRPLKEETGISELDIAKRLIDYGFHAPTMSFPVAGTLMVEPTESESKVELDRFIDAMLAIRAEIDQVKAGVWPLEDNPLVNAPHIQSELVAEWAHPYSREVAVFPAGVADKYWPTVKRLDDVYGDRNLFCSCVPISEYQ

SEQ ID NO: 1750 - protein, 528 aa, Anabaena variabilis ATCC 29413
MDAKALWQRYQEWLYFHEGLGLYLDVSRMRFDDAFVKSLLPKFDKAFADMAELEKGAIANPDENRMVGHYWLRNPDLAPTPEIAQEIVQTLEQIEAFAEKIQTGAIHPPKANRFTDIISIGIGGSALGPQFVAEALAPEFPPLKIHFIDNTDPAGIDKILTHLRNNLASTLVLVISKSGGTPEPRNGMIEVKKAYAGQNLDFAQYAVAITSTGSNLDKVAQAEGWLATFPMYDWVGGRTSEMSSVGLVPAALQGIDVRAMLEGAKEMDDATRVPEVKNNPAALLALSWYYSGNGKGEKDMVVLPYKDSLLLFSRYLQQLVMESLGKEKDLDGKTVYQGIAVYGNKGSTDQHAYVQQLREGVPNFFATLIEVLEDRNGASPEIDPGVTSGDYLSGFLLGTRQALYENQRDSITVTIPQVNARTVGALIALYERTVGLYASLVNINAYHQPGVEAGKKAAAVILDLQTKVVGLLQKEKTALSLEQIAEKIGAADQVEAIYKILRHLQANQRGVVFQGNLGQPSSLKVSIS

SEQ ID NO: 1751 - protein, 234 aa, Thiobacillus denitrificans ATCC 25259
MHVFEAEIAAVVAATPQIRVLRLAVADPGFRFLPGQWVDLSVDVDGARHTSGYSITTSPLHPGTIELAVKASARHPLARWVHDEAAPGDRVRVSQGQGPFVYLPEMSDNVVLIGGGVGITPMLSIFRHVRDAGLGTQAHLVYSVSDSREILFRDELEAAVRNHRNLHLSITVTQPDPAWHGLTGRIDPVKLHALDVPDDTLYYLCGPRGMVEDMSTLLHDLGVPMNRIIFEKWW

SEQ ID NO: 1752 - protein, 878 aa, Yersinia pestis CO92
MNEQYSAMRSNVSMLGTLLGDTIKEALGEHILDRVETIRKLSKSSRAGNEASRQELLTTLQNLSNDELLPVARAFSQFLNLTNTAEQYHSISPHGEAASNPEALAQLFTRLKDKKLSDQDMRSAVDDLSIELVLTAHPTEITRRTLIHKLVEVNTCLSQLDHNDLADYERNKIMRRLRQLVAQSWHTDEIRKLRPSPVDEAKWGFAVVENSLWEGVPAFLREFNEQLENSLDYRLPVEAVPIRFTSWMGGDRDGNPNVTAEITRHVLLLSRWKATDLFLRDIQVLVSELSMSECTPELRELAGGEEVLEPYRQLMKNVRTQLTNTQAYLEARLKGERVLPPHDLLVSNDQLWEPLYACYQSLKACGMEIIANGQLLDTLRRVRCFGVPLVRIDVRQESTRHTDAIAELTRYLGLGDYESWSESDKQAFLVRELNSKRPLVPLKWEPSAETQEVLETCRVIAEAPQGSIAAYVISMAKVPSDVLAVHLLLKEAGCPFTLPVAPLFETLDDLNNADDVMTQLLGIDWYRGLIQGKQMVMIGYSDSAKDAGVMAASWAQYRAQDALIKTCEKAGITLTLFHGRGGSIGRGGAPAHAALLSQPPGSLKGGLRVTEQGEMIRFKFGLPEVTISSLALYAGAILEANLLPPPEPKKEWIEVMDLLSDASCDMYRSYVRENPEFVRYFRAATPELELGKLPLGSRPAKRRPDGGVESLRAIPWIFAWTQNRLMLPAWLGAGAGLQRAIDAGKQDVLATMCRDWPFFSTRIGMLEMVFAKADLWLAEYYDQRLVDKSLWPLGQQLRDQLAADIKVVLAIANDDHLMADLPWIAESIALRNVYTDPLNVLQAELLHRSRQQEHPDACVEQALMVTIAGVAAGMRNTG

SEQ ID NO: 1753 - protein, 363 aa, Chorispora bungeana
GTGMVKAGFAGDDAPRAVFPSIVGRPRHTGVMVGMGQKDAYVGDEAQSKRGILTLKYPIEHGIVSNWDDMEKIWHHTFYNELRVAPEEHPVLLTEAPLNPKANREKMTQIMFETFNTPAMYVAIQAVLSLYASGRTTGIVLDSGDGVSHTVPIYEGYALPHAILRLDLAGRDLTDYLMKILTERGYSFTTSAEREIVRDVKEKLAYIALDYEQEMESAYTSSSVDKSYELPDGQVITIGGERFRCPEVLFQPSLVGMEAAGIHETTYNSIMKCDVDIRKDLYGNIVLSGGTTMFPGIADRMSKEITALAPSSMKIKVVAPPERKYSVWIGGSILASLSTFQQMWIAKAEYDESGPSIVHRKCF

SEQ ID NO: 1754 - protein, 379 aa, Lepocinclis spirogyroides
IGHVDHGKTTLTAAITMALAATGNSKAKKYDEIDSAPEEKARGITINTAHVEYETPNRHYAHVDCPGHADYVKNMITGAAQMDGAILVVSGADGPMPQTKEHILLARQVGVPNIVVFLNKEDQVDDTELLELVELEVRETLNNYEFPGDEIPIISGSALLSVEALTQNPKIKKGENKWVDKILNLMENVDSYIPTPSRDIEKDFLLAVEDVFSITGRGTVATGRIERGKVKVGEIVELVGLKATRSTTVTGLEMFQKSLEEALAGDNIGILLRGIQKNDIERGMVVAKPGTIKPHVKFDSQVYILTKEEGGRHTPFFEGYRPQFYVRTTDVTGKIESFRADDETPTQMVMPGDRIKMQVELIQPIAIEKGMRFAIREGG

SEQ ID NO: 1755 - protein, 343 aa, Solanum lycopersicoides
MEMDLPVSAIGFEGFEKRLEISFVEPGLFADPNGKGLRSLTKSQLDEILGPAECTIVDNLSNDYVDSYVLSESSLFVYSYKIIIKTCGTTKLLLAIPPILRLAETLSLKVQDVRYTRGSFIFPGAQSFPHRHFSEEVAVLDGYFGKLAAGSKAVIMGNPDKTQKWHVYSASAGTVQSNDPVYTLEMCMTGLNREKASVFYKTEESSAAHMTVRSGIRKILPKSEICDFEFEPCGYSMNSIEGAAVSTIHITPEDGFSYASFESVGYDPKTTELGPLVERVLACFEPSEFSIALHADVATKLLERVCSVDVKGYSVAEWSPEEFGKGGSIVYQKFTRTPYCESP

SEQ ID NO: 1756 - protein, 657 aa, Nicotiana sylvestris
MMAANLYYSQIEELMFELSMWRCNDDLRVRAAELYRSSRRDTKHYIEFWKTIPPSEPYRVILGDVRDKLYQTRERTRQMLAHGISDIPEDATYNNVEQFLEPLELCYRSLCECGDRPIADGSLLDFLRQVSTFGLSFVRLDIRQESDRHTDVLDAITQHLEIGSYREWSEERRQEWLLSELSGKRPLFGPDLPRTEEIADVLDTLHVIAELPSDCFGAYIISMATAPSDVLAVELLQRECHVKQPLRVVPLFEKLDDLESAPAAVARLFSIEWYRNRINGKQEVMVGYSDSGKDAGRFSAAWQLYKAQEELIKVAKEHGVKLTMFHGRGGTVGRGGGPTHLAILSQPPDTIQGSLRVTVQGEVIEQSFGEEHLCFRTLQRFTAATLEHGMHPPVSPKPEWRALMDEIAVIATEKYRSIVFKEPRFVEYFRLATPELEYGRMNIGSRPSKRKPSGGIESLRAIPWIFAWTQTRFHLPVWLGFGAAFKYAIEKDIKNLRMFHEMYNEWPFFRVTIDLVEMVFAKGNPGIAALYDKLLVSEDLLPFGELLRSNYEETRSLLLQIAGHKDLLEGDPYLKQRLRLRDSYITTLNLLQAYTLKRIRDPNYHVTLRPHISKDYMESKSAAELLQLNPTSEYAPGLEDTLILTMKGIAAGLQNTG

SEQ ID NO: 1757 - protein, 947 aa, Kluyveromyces lactis NRRL Y-1140
MAIIDGKAIANGIRDEIKDEISSLKEKYAVFRPTLTIFQVGNRPDSNTYVKMKLKAAKDAGIDVKFIHLDETVTEVELLGQIDDENSDDSVHGILVQLPLPAHLNEDKITSRVSACKDVDGFGPVNIGELNKRNGTPYFQPCTPRGIIELLKRSGVTIAGSEAVVIGRSDIVGSPVATLLTSLDATVTILHSKSKDLREFISRADIVVVAIGQPEFIRGEWFANNKRGAVVIDVGTNFVKDETRKSGYRNVGDVEFAAAEPYVKLITPVPGGVGPMTVAMLMQNTFESAKRYLDKQLNSGNDFEPLKLNLLKPVPSDFEISRAQVPKPITQIAAESGILPSELEPYGDTKAKVKLDLLNRLKNRENGKYILVTGITPTPLGEGKSTTTVGLAQALGAHLKKKVFANVRQPSMGPTFGIKGGAAGGGYSQVIPMDEFNLHVTGDIHAISMANNLLAAAIDTRMFHESTQSNAALYKRLVPAKKGVRKFTPTMLRRLKKLGINKTDPNELSAEESARFARLDIDPETITWRRVVDCNDRFLRGITVGQAPTERGHTRYTGFDISVASECMAVLALANSLEDMRERLGRIVIAASKSGEPITCEDIGCAGAMTALLKDAIKPNIMQTLEGTPVFVHAGPFANISIGANSVLADKMALKLAGVPTDLPEDVKKTQKGYVVTEAGFDFTMGGERFINIKCRSSGLVPDVVVIVATVRALKVHGGGPEVKAGAPLPSEYLNEDVELLRKGCANLAKHISNARAYNLPVVVAINKMSSDTDNEHEVIREESIKAGAVDAIVSNHWEEGGKGAVDLAEGIINTANNQSNEDFKFLYEVEGQSVEDKISAIAKEMYGAGEVEFLPEAQAKIDLYTKQGFNNLPICIAKTQYSLSHDANLKGVPTGFKFPIRDVRASIGAGYLYALAAEIQTIPGLPTHCGFMNVEVNEDGEIDGMF

SEQ ID NO: 1758 - protein, 112 aa, Yersinia pestis KIM
MKKIDAIIKPFKLDDVREALAEVGITGMTVTEVKGFGRQKGHTELYRGAEYMVDFLPKVKIEIVVADDIVDTCVEAIMQTAHTGKIGDGKIFVFDVSRVVRIRTGEQDEEAI

SEQ ID NO: 1759 - protein, 162 aa, Kluyveromyces lactis NRRL Y-1140
MAGTGLPEPWVIKFSRSKKREYFFNPETKESVWEAPSGTDEDQSKKYLEENPLRVRALHLLIKHKDSRRPASHRNENITITKDEAKEELETYIKRLNGGEPFESLAKERSDCSSAKRGGDLGFFGHGEMQPSFEKAAFALKIDQVSDIVESDSGLHIIKRVA

SEQ ID NO: 1760 - protein, 285 aa, Actinobacillus pleuropneumoniae serovar 1 str. 4074
MTAHIISGTAVAKQVKANIAEQIQAYTAQDKRKPGLAVILVGMDPASQVYVNSKRKSCAEIGIESKSYDLPAETGEAELLAIIEQLNHDDSVDGILVQLPLPKQIDATKVTEAIVPHKDVDGFHPYNVGRLCQKIPTLRSCTPYGVMKLLESTGVNLAGLHAVVVGASNIVGRPMAMELLLAGCTVTITHSRTKDLAYHVSQADIVVAGVGKPNFVKGEWIKPGAIVIDVGINRVEGKLIGDVEYSAAEAKASFITPVPGGVGPMTVAMLMQNTLQAYQVHLQAV

SEQ ID NO: 1761 - protein, 402 aa, Mannheimia succiniciproducens MBEL55E
MSNFDIITPDLPESVADATVVKWHKAVGDKVRRDEVLVEIETDKVVLEVPALNDGIIESIIEPEGATVVSKQLLGKAALLPVGEVTVRAETPTVAPQIEDSAVASSADTLGPAARRLIAEHDLNVNEIKGSGVSGRITREDVEAVIAQKAASVAAKSAVENTVISSPAAVRTEKRVPMTRLRKRVAERLLEVKNSTAMLTTFNEVDMQPIMQLRKKYAEKFEKQHDTRLGFMSFYVKAVVEALKRYPVINASIDGDDIVYHNYFDISIAVSTPRGLVTPVIRNCDKLSMAEIERQIKALAEKGRDGKLTVDDLTGGNFTITNGGVFGSLMSTPIINPPQAAILGMHAIKDRPVAIDGQVAIRPMMYLALSYDHRLIDGKDSVGFLVTVKELLEDPTRLLLEI

SEQ ID NO: 1762 - protein, 135 aa, Streptococcus thermophilus CNRZ1066
MTVNTRKQPTQPLWVWIRRRILMKKIEAIIRSDKLEDLKNTLTGNGLTKGMTVSQVLGHGTQRGFAEFVRGQRIVPTLLAKVKVEIVVKDLAVDEVVDTIRSAVATGEVGDGKIFIVPIDDVIRIRTGERGGDAI

SEQ ID NO: 1763 - protein, 116 aa, Brassica napus
  misc_feature (110)..(110): Xaa can be any naturally occurring amino acid
  misc_feature (114)..(114): Xaa can be any naturally occurring amino acid
MGLDYYTILKVDKNATEDDLKKSYRKLAMKWHPDKNPTTKTEAEAKFKQISEAYEVLSDPQKRAVYDQYGEEGLSGMPPPGSTGNNGRAGGFNPRDAEDIFAEFFGSSPXGFGXAG

SEQ ID NO: 1764 - protein, 404 aa, Solibacter usitatus Ellin6076
MALIDGDMDDLKYEMEEEARSGTRIKVIGVGGGGCNAVARMVAEGLEGVQFYAMNTDTQALSACAVPNKLQLGARVTNGLGAGSNPEIGRQAALENTDAIVELLQGADMVFVTAGLGGGTGTGAAPVIASLAKELDALTVAVVTKPFGFEGPRRMRLAEEGLGRLAGTVDTVIAIPNDRLLNLVPRGTSFFESFKVADDLLRQAVQGISDIIITPGLINRDFSDIKATMVGMGYAMMGTAIGRGEKAAVDAARQAISCPLLEDTRIAGSRGILINITGSSRLGLHEVNEACSIIREAAECDDVQINFGVILNESLADAVKITVIATGFQPESAPLPERRGSVTPVIRVQQRLPEPEPVVEQEIAASAPEPVPEPAPVLVAEPEPVLDLDDLDTPAYLRQGRLLN

SEQ ID NO: 1765 - protein, 354 aa, Solibacter usitatus Ellin6076
MKTFTIGVIAGDGVGTEVTPQAKRVLEKSAHKHQVTFSFQDFEWGAEHFFRWGRMMPAGAIDLLQPCDAILLGAVGHPEIPDHTTLNGLLLPIRRAFDQYANVRPAYLYPGVQSPLARPKGGDIDFVVVRENTEGEYAQVGGFVYHLQPEEIAIQTSVFTRRGIDRIVRFAFELAVKRNKKRRVTSITKSNAQGYSMVLWDRAFQEIAAQFPEVETESLLVDAAAMNFIRRPESFDVVVGSNLFADILSDISAIIVGSMGLAASANLDPLRRFPSMFEPVHGSAPDIAGKGIVNPLATILSAGMMLDHLGMTEAAKELDAAVAAILADGKVSTPDIGGKSSTEEVTDAVLEKLG

SEQ ID NO: 1766 - protein, 135 aa, Methanocaldococcus jannaschii
MIIMPGTKQVNVGSLKVGQYVMIDGVPCEIVDISVSKPGKHGGAKARVVGIGIFEKVKKEFVAPTSSKVEVPIIDRRKGQVLAIMGDMVQIMDLQTYETLELPIPEGIEGLEPGGEVEYIEAVGQYKITRVIGGK

SEQ ID NO: 1767 - protein, 164 aa, Ralstonia eutropha JMP134
MSNVYQFEAKSLAGQPVPLSQFRGKVLLIVNTASECGFTPQYAGLQALHDAYAARGLEVLGFPCNQFGKQEPGDAQQIGQFCESRFSVKFPMFAKIDVKGPDAHPLYQWLTSAKRGVLGTQAIKWNFTKFLLRRDGTVYKRYGSITKPEEIRADIETLLADPAA

SEQ ID NO: 1768 - protein, 174 aa, Triticum aestivum
  misc_feature (151)..(151): Xaa can be any naturally occurring amino acid
MSTSSGAKEAPANNPGLQAEADPATKGYIMQQTMFRVKDPKVSLDFYSRVMGMSLLKRLDFPEMKFSLYFLGYEDLSAAPADPVQRTGWTFGQKATIELTHNWGTESDPEFKGYHNGNSDPRGFGHIGVTVDDVYKACERFESLGVEFVKXPDDGKMKGIAFIKDPDGYWIENI

SEQ ID NO: 1769 - protein, 211 aa, Glycine max
MGVDFYKILQVDRSAKDEDLKKAYRRLAMKWHPDKNPNNKREAEAKFKQISEAYDVLSDPQKRGVYDQYGEEGLNGVPMGAGGFPGGGGGGSSGDGGATSFRFNPRSADDIFSEFFGFSRPFGGGMPDMGGRAGGSGFSRGGPFGEDIFAQFRSAAGEGSGHMPRKGAAIERPLPCSLEDLYKGTTKKMKISRDVSDASGRPSTVDEILTI

SEQ ID NO: 1770 - protein, 120 aa, Triticum aestivum
MAAPRGAALVLAMVLAAMLVAPPATVHAISCSTVYSTLMPCPQYVQQGGSPARGCCTGIQNLLAEANNSPDRRTICGCLKNVANGASGGPYITRAAALPSKCNVALPYKISPSVDCNSIH

SEQ ID NO: 1771 - protein, 115 aa, Oryza sativa (japonica cultivar-group)
GAAVRFIGQSEFEAEVLQSDLPVLVDFVADWCGPCRLIAPVVDWAAEEYEGRLKIVKIDHDANPQLIEEYKVYGLPSLILFKDGKEVPGSRREGAITKAKFKEYLEPLLSTSTVA

SEQ ID NO: 1772 - protein, 334 aa, Wolbachia endosymbiont of Hypolimnas bolina jacintha
QALEKSLCDKKIQLGINLTKGLGAGALPDVGKGAAEESIDEIMEHIKDSHMLFITAGMGGGTGTGAAPVIAKAAREARAVVKDKGAKEKKILTVGVVTKPFGFEGVRRMRIAELGLEELQKYVDTLIVIPNQNLFRIANEKTTFADAFQLADNVLHIGIRGVTDLMIMPGLINLDFADIETVMSEMGKAMIGTGEAEGEDRAISAAEAAISNPLLDNVSMKGAQGILINITGGGDMTLFEVDSAANRVREEVDENANIIFGATFDQAMEGRVRVSVLATGIDSCNDNSSVNQNKIPAEEKNFKWPYNQIPILETKEYASTEQTNERVKWGSNVY

SEQ ID NO: 1773 - protein, 828 aa, Shigella flexneri 2a str. 301
MKLSRRSFMKANAVAAAAAAAGLSVPGVARAVVGQQEAIKWDKAPCRFCGTGCGVLVGTQQGRVVACQGDPDAPVNRGLNCIKGYFLPKIMYGKDRLTQPLLRMKNGKYDKEGEFTPITWDQAFDVMEEKFKTALKEKGPESIGMFGSGQWTIWEGYAASKLFKAGFRSNNIDPNARHCMASAVVGFMRTFGMDEPMGCYDDIEQADAFVLWGANMAEMHPILWSRITNSRLSNQNVTVAVLSTYQHRSFELADNGIIFTPQSDLVILNYIANYIIQNNAINQDFFSKHVNLRKGATDIGYGLRPTHPLEKAAKNPGSDASEPMSFEDYKAFVAEYTLEKTAEMTGVPKDQLEQLAQLYADPNKKVISYWTMGFNQHTRGVWANNLVYNLHLLTGKISQPGCGPFSLTGQPSACGTAREVGTFAHRLPADMVVTNEKHRDICEKKWNIPSGTIPAKIGLHAVAQDRALKDGKLNVYWTMCTNNMQAGPNINEERMPGWRDPRNFIIVSDPYPTVSALAADLILPTAMWVEKEGAYGNAERRTQFWRQQVQAPGEAKSDLWQLVQFSRRFKTEEVWPEELLAKKPELRGKTLYEVLYATPEVSKFPVSELAEDQLNDESRELGFYLQKGLFEEYAWFGRGHGHDLAPFDDYHKARGLRWPVVNGKETQWRYSEGNDPYVKAGEGYKFYGKPDGKAVIFALPFEPAAEAPDEEYDLWLSTGRVLEHWHTGSMTRRVPELHRAFPEAVLFIHPLDAKARDLRRGDKVKVVSRRGEVISIVETRGRNRPPQGLVYMPFFDAAQLVNKLTLDATDPLSKETDFKKCAVKLEKV

SEQ ID NO: 1774 - protein, 887 aa, Desulfotalea psychrophila LSv54
  misc_feature (346)..(346): Xaa can be any naturally occurring amino acid
MKKVTLTINGRSVTAPEGSYVLQAALQKGIYIPHLCYHNDLEPVGACRLCTVRVNGRWDALSCKTPVEEGMVIETETETIAKTRKIAIELLIADHDMDCLACARNTTCKLQQAADYIGVNKKHLARLKKPEVLLPIDDSNPFFDFDPNRCVLCGICIRTCDELQNINAIDFAYRGLTTKVAGFGDKARILSNCESCGECVARCPVGALTEKDYVKPSHWVKTVCAYCGCGCGLDLGVRDNKIVSARGEHGNPANRGRLCVKGRFGFNYVNSKERLTTPMVRRPEGFVPVSWDEALDLIADNFAKNKGDSFAAVSSAKCTNEENYLLQKFTRTVMKTNNIDHCARLXHAPTVAGLATAFGSGAMTNSIAEIGDAQVILAIGTNTTAAHPIIALQIKDAVRRGAKLIVINPKRIDLCKHAHIFLQNTPGSDIPLLMTMMRIIVEEDLIDKEFIEERCENYPAFLASLQQFELEDVAELTGIPAETIREAALCYATESPATILYCMGITQHVHGTDNVLATSNLALLTGNVGKESTGVNPLRGQNNVQGSCDMGALPDVYPGYQKVVNNTAAFEEKWQTSLSAVPGKTHTEIFDGLYDGSIKSVYLIGENPVLSEANASHAIEAMNRAKFLVVQDIFFSETAELADVILPASSFAEKDGTFTNTERRVQRVRQAIEPVGDSRPDWWIIKEIATRMGAKGFDHEGPEQIMEEISATIPNYAGINYDRLQHGTLQWPCPSTDHPGTKFLHAERFATANGRARFMPLKTRKTTEQVDKKYPLLLNTDRSLFHFHGTMTRRVFGLNVLDRGENLIIHPEDAEKFSLTDGEIVEVRSRRGAVKVAVEINDSCRPGSVSMSFHFSETPTNMLTSGALDPVAKTPGTKICAVQINKL

SEQ ID NO: 1775 - protein, 360 aa, Candida albicans SC5314
MCKAGFAGDDAPRAVFPSLVGRPRHQGIMVGMGQKDSYVGDEAQSKRGILTLRYPIEHGIVSNWDDMEKIWHHTFYNELRVAPEEHPVLLTEAPMNPKSNREKMTQIMFETFNVPAFYVSIQAVLSLYSSGRTTGIVLDSGDGVTHVVPIYAGFSLPHGILRIDLAGRDLTNHLSKILSERGYSFTTSAEREIVRDIKERLCYVALDFEQEMQTSSQSSAIEKSYELPDGQVITIGNERFRAPEALFRPADLGLEAAGIDQTTFNSIMKCDMDVRKELYGNIVMSGGTTMFPGIAERMQKEITALAPSSMKVKIIAPPERKYSVWIGGSILASLSTFQQMWISKQEYDESGPSIVHHKCF

SEQ ID NO: 1776 - protein, 617 aa, Desulfitobacterium hafniense Y51
MCSILGLVNFKRKISPQEIQCLSTMGKTLIHRGPDQNGLEYGEHFAFQHNRLAIIDIEKGRQPMTATHQGYDYTIVYNGELYNTADLRQELLEHGVKFKTYCDTEVVLYAYIIWGEQCSSKLNGIYAFVIYDSKEKKTYLSRDRFGVKPFFYTFVEGALLFASEIKALLKHPQVKPRLDYQGLWQLLYMMPVKEEGTAIFKDIFELPTASHAFYSLAPGASEAELKIAKYWTMEAYENQDSEAAIVATTRDLLVDAIERQLVSDVPLCTFLSGGLDSSIITAVAAQKYQAEGRQLATYSFEHEGNKDHFKQTLFQPQSDDEFAVYLAQHLHTQHQILTAKKEHLVDYLDEAVRYRDYPGMADIDSSLLFYCRQVKEHHTVALSGECSDEVFGGYPWFYRPEMLTRGFFPWIHEPHARISLFKPELVRPQEGFAYTSEIYRRSVEACPLLPDESETMQNSRIASWLSINYFMTSLLERKDRMSMASGLEVRVPFSDHRLVQYVYNVPWEIKFKDGVEKALLRAAMQDYLPPKILYRKKSPFPKTHDPHYEELVFHLFRKRLDSGSGMLAELLQKDVLNRLISPGNNTWFGQLMGLPQLLAWLVQLDYWFEAYQVQLVG

SEQ ID NO: 1777 - protein, 285 aa, Oceanobacter sp. RED65
MTATLIDGLAVSASLKQQVADQIAQRVEQGKRAPGLAVVLVGSDPASEVYVGKKRQACAAIGIESVAHDLPSDTKEDDLLALIDSLNQDDSVDGILVQLPLPKHIDSTKILERIDPTKDVDGFHPYNVGRLSQRIPVLRSCTPAGIMTLLKHYDLNVKGKHAVIVGASNIVGRPMCMELLLAGATTTVCHRFTEDLEHHVSQADLLVVAIGKRGIVNSEWIKPGAIVIDVAMNRLENGKLAGDLDFDTAASKASYITPVPGGVGPMTVATLMENTLYACENFHDK

SEQ ID NO: 1778 - protein, 110 aa, Pinus banksiana
HVMQAAKTLVNKGYDPEIIDIRSLKPFDLHTIGNSIKKTHRVLIVEECMRTGGIGASLRAAIIENFWDYLDAPIMCLSSQDVPTPYAGTLEDWTVVQPPQIVSAVEQLCQ

SEQ ID NO: 1779 - protein, 326 aa, Ralstonia metallidurans CH34
MAELHMVEAVNLALAHALANDPDVVLLGEDIGVNGGVFRSTVGLQSRFGEARVIDTPLAEGAIVGAAIGMAAMGLKPVAEIQFAGFIYPAIDNILNHAGHMRHRTRGRITCPMVVRAPSGAGIHAPEHHSESPEALFAQMPGIRVVMPSSPARAYGLLLAAIRDPDPVIFLEPTRLYRLFRQEVADDGQALPLDACFTLREGTDLTLVSWGAMLRETLAAADVLADDGVSAAVIDVATLKPLDMETILESVAQSGRCVIVHEAPRTAGLGAEIAANLADAGLYSLSAPVQRVTAPDTVVPLARLEHSYMPSVARIVDAARRALEAA

SEQ ID NO: 1780 - protein, 262 aa, Rubrivivax gelatinosus PM1
MDYQHLLTEVRGSAALKTGWITLNRPKALNALNDALMDELGDALRVYDADASIGCVVITGSEKAFAAGADIGGMASQTYMDAYKGDFITRNWEAVRSVRKPVIAAVAGYALGGGCELAMMCDLIIAADTARFGQPEIKLGIIPGAGGTQRLPRAVGKAKAMDLVLTARMMDAAEAERAGLVSRVVPADRLLAEAQEAADAIGAMGLPAILVAKECVNRAYESPLSDGVWFERRMFQSLFGTEDQKEGMDAFANKRKPVFRHR

SEQ ID NO: 1781 - protein, 337 aa, Chaetomium globosum
MAIKVGINGFGRIGRIVFRNAVEHADVEIVAVNDPFIEPKYAEYMLKYDSTHGVFNGTIAVEGSDLVVNGKKVKFYTERDPAAIPWKDTGAEYIVESTGVFTTTEKAGAHLKGGAKRVIISAPSADAPMYVMGVNEKTYDGSAQVISNASCTTNCLAPLAKVVNDKFGIVEGLMTTVHSYTATQKTVDGPSAKDWRGGRGAAQNIIPSSTGAAKAVGKVIPELNGKLTGMSFRVPTSNVSVVDLTCRLQKEASYDEIKAALKEASEGDLKGILGYTEDEIVSSDLNGNPNSSIFDAKAGISLNKNFVKLVSWYDNEWGYSRRVLDLLAYVAKVDASK

SEQ ID NO: 1782 - protein, 429 aa, Zea mays
  misc_feature (212)..(212): Xaa can be any naturally occurring amino acid
MGMFFSKAEPPPPMVLVPPLFDYPPIAARTRMAVPAYELMFGKVSLHNLFEDYFDQAGNMTSRIMLKPLEDPHVDLIATVSAAADRNSGTEVKGDALFRWQRELDDPHTFVDLLVSTSNPLLQLRLCAYHPKYRIGAFGTLPLLMGNRVRSEDYGVMGVRYGSENLSVGASFVPISLSSEVPFGAWLVGRKGSLSAGVQYKPLSECYQAKWXSKYPMPFTELENWNYAISYGVGSTSPLSPSFIFSLELARSTQLTASFYQHLVVQRRVKNPFEDDQVVGITNYIDFGLELAARVDKDKVSGDGNSFQLAGSWQANKNFLLKGKLGPSTSSVALAFKSWWRPSFTFSVTAVNDHSKGTTSYGFGLRVEDLRRASYQRADPNYVMLTPSKEHLAPGVLREYGKRPMFQTQIDSGNYDHLPTELKPLGRIF

SEQ ID NO: 1783 - protein, 104 aa, Actinobacillus pleuropneumoniae serovar 1 str. 4074
MTINISSKQMDVTPAIRTHIEERLAKLEKWQTQLINPHFMIHKLPNSYEVEASIGTPVGELFAKANNEDLYLAINEVETKLETQLNKLVHKNEARRTDSTLKNV

SEQ ID NO: 1784 - protein, 500 aa, Pseudonocardia sp. K1
MTVIAKPDHLLRDDVQKFIDRPKKLFINGQWHDSIKGETLEVYDPAVGTKICTVAAGDAEDVDRAVAAARHAFDEGPWSKLNPSERGRLVWRLADLLEEHADEFAQIDALDNGKPVTDARAVDVAFSIELLRYMAGWSNKIYGETIPLTNPADFHAYTLREPVGVVGQIVPWNFPLMMAVWKVAPALAAGCTVILKPAEQTPLSALRLAELTEEAGFPPGVFNVITGFGETAGAAIAAHDNIDKVAFTGSTEVGRLIAQAASGNLKKVSLELGGKSPVIVFGDSDIEQAVAGASSAIFYNNGQTCTAGSRLYVHRKVYDKVVEGIASEASALPIGHGLDPATRIGPLISAEQRDRVTGYIAQGREAGAEVIVGGDTVGDGGYFIQPTILTKTDPSMSVVREEIFGPVLCAMAFDEDTIDSVVREANNSVYGLAASIYTRDISVAHRVAKRLKAGTIGINTHHVVDVALPFGGFKQSGYGRDMGRDAIDQYTEVKSIGIAL

SEQ ID NO: 1785 - protein, 136 aa, Mannheimia succiniciproducens MBEL55E
MMRILHTMLRVGDLDRSVKFYQDVLGMRLLRTSENPEYKYSLAFLGYDDEDKTAVIELTYNWGVTEYELGSAFGHIAIGVDDIHATCEAVKAHGGKVTREPGPVKGGSTVIAFVEDPDGYKIEFIENKNAKAALGN

SEQ ID NO: 1786 - protein, 394 aa, uncultured bacterium
MDNVRIFDTTLRDGEQSPGFSMTVPEKVRLARQIESLGVDIIESGFPISSAGDLEGVRAVAREIRGCTVAALARARKQDIDVALDGLSEAKHPRLHTFLATSDLHLQTKLRMTREQALEAISTNVRYARERCAEVEFSAEDASRSDMDYLCQAVGAAVKAGATIINLPDTVGYAVPEEYSAMFRRVIAFLDGAEGVTLSAHCHNDLGLGVANSLAAIQGGARQLELTINGIGERAGNAALEEVAVLLRVRQASLGVTTNLHIEKLYATSRMLSEITGVPVAPNKAVVGANAFAHEAGIHQDGILKNPLTYEIISPEAVGVPKRQLVLGKHSGRNALRSALVEFGYDPSAEELDECYKRVSVLADQSKNVSNRDLLAIAHQVMRKRGSETAIAAE

SEQ ID NO: 1787 - protein, 230 aa, Zea mays
EPCFRNVIIYKVPETPLHRPTELSPLLNHSPVNDSTDQHSQEQGIPTLITWSQGGDEVFLEGSWDNWTSRRALERSGKDHAVLLVLPSGVYHYRIIVDGELRYIPELPHAADERGRVANVLDVHDYVPESLDSVAEFEAPPSPVHSYDLHCPGDEEFAKEPPTLPPQLLMSVLAGDVDSAGNQALKPQHVVLDHLFIEKGWGSQSLLALGVTHRFESKYVSFVLYKPLER

SEQ ID NO: 1788 - protein, 433 aa, Caulobacter crescentus CB15
MTAVRSKPLGVWMCAALVVGNMIGSGVFMLPASLAPYGWNAVIAWILTIGGSLCLAYVFAKLAGAFPRAGGPFAYTEEAFGRAPGFLVAWSYWISVWVANAAIAIAAISYLSVFLPVIAKVPALPALLTVAVVWTATAINCAGARSAGWTQVVTTVLKLVPLIAVAGLAVSVLLRKGPAAITPFEPSALSGASITAAAALTLWALLGVETATIPADKVKDPARTIPRATLAGTAFAGLVYLVVSSGVLLLTPTAVLQGSNAPFVDFVSYHGGGDFRLALAAFATISALGALNGWSLIQGELPAAMAREGVFPAWFAKTSANGTPVRAHLVSSVLVTILVLMNYAKSMADAFTFMALLSTTSTLFAYLFCSLAVLRLQGQGRMDRSKALTLVAALGALYSVWTFSGAGWSVTLWGLVLLAVGAPIYWLMRRAAR

SEQ ID NO: 1789 - protein, 283 aa, Rubrivivax gelatinosus PM1
MSARAIDGNALSRHLRHEVAQRAATLREHGITPGLAVILVGENPASQVYVRNKVKACHDSGLHSVLEHYPAAMTEAELLARVQALNADPAIHGILVQLPLPPHIDAHRVIETIAPHKDVDGFHVASAGALMVGQPGFKPCTPYGCMKMLESIGYDPKGKHAVVIGRSNIVGKPMAMLLLQANATVTVCHSATPDLALHTRQADIVVAAVGKRKVLTADMVKPGAVVIDVGMNRDDHGKLCGDVDYAGVAKVAGWITPVPGGVGPMTITMLLMNTLESAERLVG

SEQ ID NO: 1790 - protein, 119 aa, Glycine max
  misc_feature (85)..(85): Xaa can be any naturally occurring amino acid
HDHVFVFSIVDDHIWFRNYQISVHHNEADKLPRGGLDKMTLIEVGPRFCLNPIKIFGGSFGGPTLYENPLYVSPNQIRALEKKKXAGKFAKKVKAKTRRKMHEMSNPLEPDEFADMWKD

SEQ ID NO: 1791 - protein, 280 aa, Bradyrhizobium sp. BTAi1
MQTDQSGSRDRPAAATLYVGDVMHARMRPVPHRFQYRVMSLLIDLGRLGEADRQSPLFGVNRRALYSFHERDHGLRDGSPLLAYVQARAAEHGIDLAGGRVLLLCYPRLLGYVFNPLSVYFCYRSDGTLALMIYEVRNTFGEIKPYVLPVEPDQLSTAGLRQQQDKTFYVSPFIDMAMRYHFRISPPAESVKLRILETDGNGPLLAATFFGQRRALTTSSLLAALLSLPLVTLKIFGAIHWEALRLWAKGVRLVPRGEIAADGTDTGLAGNDSHAYISRR

SEQ ID NO: 1792 - protein, 479 aa, Pseudonocardia sp. K1
MQAEPFWIAGRPATGSTVIDVQYPYDGRTVASVFVPSAEQVEEAVAAMHAARDVVGATSAHRRASALSHVADRLEQRSEEAAQVIVLESGKPIKWARVEVARAASTFRWAAEEARRWSGTLQRLDTDAGGAGRLALVRRFPRGSLLAITPFNFPLNLVAHKVAPAIAVGVPVIIKPAPSTPLSSLFLGQLLAETDLHQGSWSVLPVPNSQMEHLILDPRLPIISFTGSGPVGWDIKSLVPRKHVTLELGGNAAAVVCSDWSSEQDLEWAAQRIALFANYQAGQSCISVQRVYVPRELYEVFTVLLSRHIGALRQGNPNDDATDVGPVINEASAIRIEQWIDDAVHAGAKILVGGRRNGTSLEPTLLADVPLAARILRDEAFGPVVSITPFDSLDSAFAAVNDSDFGLQTGVFTRDIRTAFRAHRDLEVGGVIIGDVPSYRADQMPYGGMKDSGIGREGVRSAMDDFTVEKVLVLAGVAL

SEQ ID NO: 1793 - protein, 377 aa, Rhodospirillum rubrum ATCC 11170
MTDGTSPVPYRDYLASPEDIIEDARQGKMFILVDDENRENEGDLVIPAQMATAEVVNFMAKHGRGLICLAMTRERCEQLDLPLMAQQNSSRHSTAFTISIEAKDGVTTGISAADRALTIQVAIDPAKGRGDIATPGHVFPLVARDGGVLVRAGHTEAAVDVARMAGLVPAGVICEVMNDDGTMARMPDLVRFAQEHGLKVGTIADLIAYRRTKERLVRRELETDFRSVHGGDWRMMLYVSTVSYGEHIALVKGDPRGSDPVLVRMHALNVLDDVLGDSDGNAHGQLHRAMDVIGRAGRGVLVLIREGRPTALSERLRARIEQGPSAQRLVDYGVGAQILLDLGVTDMTLLTNTPKHIIGLEGYGLRVAGHQPLSDKE

SEQ ID NO: 1794 - protein, 543 aa, Rubrivivax gelatinosus PM1
MALMEVKVPDIGDFEAVEVIEVLVKPGDAIKAEQSLVTVESDKASMEIPSSHAGVVKELKVKLGDKVSEGTVVLVIEAADAAASTPAPAPAPAVASVPPAAPIAASVAAGPVEVVVPDIGDFDAVEVIELLVKPGDAVKAEQSLITVESDKASMEIPSSHAGTVERLLVKLGDKVSKGTPVVVLQGAGGAPAAAKAADVAPAAAAAPASPLASQPVERTAPTAALPAHEQTAPQGHLPHASPSVRRFARELGVPLAEVKGSGLKGRITLEDVQGFVKGVMSGETRTAQAAKAPAAGGGAGLDLLPWPKVDFAKFGAVERKDLSRIKKISGANLHRNWVVIPHVTNHDDADITELEAFRVQLNKENEKSGVKVTMLAFLIKACVAALKKFPEFNASLDGEQIVLKQYFHIGFAADTPNGLVVPVIKDADKKGVLQISQEMSELAKKARDGKLGPADMSGGCFSISSLGGIGGRYFTPIINAPEVSILGVCKSSTEPRWDGKAFQPRLILPLSLSWDHRVIDGAAAARFNAYLGQILADFRRVLL

SEQ ID NO: 1795 - protein, 248 aa, Arabidopsis thaliana
  misc_feature (117)..(117): Xaa can be any naturally occurring amino acid
MGCLRSLVRRKQFDSSNGKAETHHHHQQLAKALTFPHLIAIGVGSTIGAGVYILVGTVAREHSGPALALSFLIAGISAALSAFCYAELSSRFPSAGSAYHYSYICIDIVVDPCAAVXFIVTGLCCLGVKESTFAQGIVTTANVFVMIFVIVAGSYLCFKTGWVGYELPTGYFPYGVDGMLTGSATVFFAYIGFDTVASMAEEVKNPRRDLPLGIGISLLLCCLLYMMASVVIVGSEPYFALDPDTPIS

SEQ ID NO: 1796 - protein, 212 aa, Zea mays
  misc_feature (86)..(86): Xaa can be any naturally occurring amino acid
  misc_feature (180)..(180): Xaa can be any naturally occurring amino acid
MAPSIAPPSSPSCLRGKLFPRFTGTNSQPMNSVLRCDISVSPTLASNSLRRTSSVHLANNNRIKSFHVCHAGVDPSERIVVNGQVXSSKTVQADAAALGTISADMAPVVDGFSADDDELDLDLPTEGFSSIPEAIEDIRQGKYVIVVDDEDRENEGDLIMAASTVTPEAMAFIVRHGTGXIVCVSMKEDDLERLQLSLMVVGKENEEKLPTA

SEQ ID NO: 1797 - protein, 448 aa, Lactococcus lactis
MSQATEYIKEVRANLAQRDGNQAEFLEAVDNFLATITPVFEAHPEYIEANILGQITEPERAFQFRVPWVDDAGKVQINRGFRVQFNSAIGPYKGGLRFHPSVNLSVVKFLGFEQIFKNSLTGLPIGGGKGGSDFNPKGKSDGEVMRFAQSFMTELQKHIGPDIDVPAGDIGVGGREIGYLFGQYKRLNGFSGGILTGKGLSYGGSLVRPEATGFGLLYYVDAMLKAHRDDLSGKKIKLSGAGNVAIYAIQKATELGAKIVTVSDSDGYIYDERGIDYKVVQQIKEVERGRISEYAKRVSTAEYSKGSVWEAPIDCDVALPCATQNEIDVDGAKLLISSGVQVVAEGANMPSTPEAIKAYRQAGLLYGPAKAANAGGVAVSALEMSQNSQRLAWSFADVDQRLQKIMQDIFQKSADAAKQYNLGDDYVAGANIAGFLKVADAMYAQGIV

SEQ ID NO: 1798 - protein, 453 aa, Aspergillus nidulans FGSC A4
MASRLSLRQFSAQRLRTFTTSKGSENARSASGLIQGLQKGPALRNGFSRVNVIPISNYQVRTYADTVVKVPQMAESITEGTLKQFSKQVGDYVERDEEIATIETDKIDVSVNAPESGVIKELLVNEEDTVTVGQDLVKLEAGGTPEKKSEEATEKPKEPASTGSEAEKPKEPESAPSSSAPEKSTSSTKAPQAETSKPTQEVASKSRPTEEAKPALGNREERRVKMNRMRLRIAERLKQSQNTAASLTTFNEVDMSSLMEFRKLYKDEILKKTGVKLGFMSAFSRACVLAMKDVPAVNASIEGPNGGDTIVYRDYVDISVAVATEKGLVTPVVRNAETMDLVGIEKSIADLGKKARDNKLTIEDMAGGTFTISNGGVFGSLMGTPIINLPQTAVLGLHAIKDKPVAIGGKVEIRPMMYLALTYDHRLLDGREAVTFLVKVKEYIEDPRRMLLG

SEQ ID NO: 1799 - protein, 397 aa, Shewanella sp. MR-4
MLDSRTIQIIKSTIPLLESAGPALTQHFYQRMFTHNPELKDVFNLAHQHSGGQPVALFNAVAAYAKNIDNLGALGTAVERIAQKHTGFLIQPEQYAIVGGHLLATLQELGGEAVTEEVLTAWGDAYQFLANIFIQREAQIYQESAQQDGGWSGVREFIISEKKAESAVITSFVLTPTDGQAVKDFTPGQYLSIKLQHPKLAFDEIRQYSLSDAPNGRTYRISVKREPNGQVSNLLHDMLQVGDTVSVMPPAGDFALTAQPKTPIVLISAGVGQTPMKSMLNQLLKLKHPSAVTWLHACEHGEVHGFKTAVKSKLGQHANLASHVWYREPKEADILGQDYDFEGTMNLTSVADKIATDAHYYFCGPIGFMASIKQQLLAFGVPSEQMHYEVFGPHAEL

SEQ ID NO: 1800 - protein, 634 aa, Desulfotalea psychrophila LSv54
MCGLAGFFNYQFIADNTILHLQSMGKSISHRGPDASGTWYDADTGIGLVHTRLAIVDLSSAGHQPMHSQCDRYVIAFNGEIYNHLMLRQKLEQANQAPAWRGHSDTETLLACFVAWGIEQTLKVTVGMFALALWDKQEQNLTLARDRAGEKPLYWGWQGDTLLFGSELKALKAHPDFKAKVSRDALAVYMRHNYISAPQSIYEGIYKLLPGHYVTLNSVSNIDTATPKAYWTMNQAIESGIAQPFSGTDIEAVDLLEHRLSQSIGGQMLADVPLGAFLSGGVDSSVVVALMQKQAQQSVKTYAIGFDDPRYNEAQYAAAVARHLGTEHTELYVSAQDALELVPQLPSIYCEPFADSSQLPTFLVTKMARQHVTVALSGDGGDELFGGYTPYLFTPRYWNLLKCYPQPLRAALAASMSRLPLPDKFLKLAEVMGASNKESFYRSIMSHWGQPEDVVIGAKEPASVLNSSDLWPETDSFEHWMMAMEAQMYMPDDILVKVDRAAMANSLETRVPLLDHRVIELAWQLPLSMKIRDGKGKWVLREVLYRHVPRELIERPKKGFSIPLANWLRGPLRDWAEALLDEKRLRGEGYFYPAPIREAWQQHVQGKRDNASKLWSVLMFQAWLDEQDANSITL

SEQ ID NO: 1801 - protein, 138 aa, Lactobacillus plantarum
TNEMLKANQLSFPGQRVAISGAGNVAIYAIQKVEELGGKVITCSDSNGYVIDENGIDFKIVKQIKEVERSRIKDYADRVASASYYEGSVWDAQVAYDIALPCATQNEISGDQAKNLIANGAKVVAEGANMPSSPEAIA

SEQ ID NO: 1802 - protein, 338 aa, Aspergillus oryzae
MATPKVGINGFGRIGRIVCSYSIASGDVDVVAVNDPFIETHYAAYMLKYDSTHGRFQGTIETYDEGLIVNGKKIRFFAERDPAAIPWGSAGAAYIVESTGVFTTTEKASAHLKGGAKKVIISAPSADAPMFVMGVNNKEYKTDINVLSNASCTTNCLAPLAKVINDNFGLVEGLMTTVHSYTATQKTVDAPSAKDWRGGRTAAQNIIPSSTGAAKAVGKVIPSLNGKLTGMSMRVPTANVSVVDLTCRTEKAVTYEDIKKTIKAASEEGELKGILGYTEDDIVSTDLIGDAHSSIFDAKAGIALNEHFIKLVSWYDNEWGYSRRVVDLIAYISKVDGQ

SEQ ID NO: 1803 - protein, 124 aa, Methanococcus maripaludis S2
MAFKVVVSDSKTGKSYQFETESNALIGKKIGDEISGSIVELEGYKLKITGGSDRCGFAMRHDIHGAMKMRVLLKEGPGYNVKEKGLRRRKSLRGNTISKDITLINTKVVEYGSAPLGGEPESTE

SEQ ID NO: 1804 - protein, 118 aa, Triticum aestivum
MASLKVAFLAAVLCMVVVSAPMAHAAITCGQVTSSLANCIGYLQKGGTPSSGCCNGVKSLNAAAKTTADRQTACNCLKSAASQISGFNANNAASLPGKCGVSIPYKISTSTNCATIKV

SEQ ID NO: 1805 - protein, 101 aa, Nicotiana tabacum
MASSVLSSAAVATRSNVAQANMVAPFTGLKSAASFPVSRKQNLDITSIASNGGRVQCMQVWPPINKKKYETLSYLPDLSQEQLLSEVEYLLKNGWVPCLEF

SEQ ID NO: 1806 - protein, 974 aa, Ralstonia metallidurans CH34
MNAPLPMNAAAQGARPTLAELEARDAFAARHIGPDSAEQQHMLKVLGFESRAALIDAVVPAAIRRRDGMSLGEFTAPLTEEAALGRLRALAGKNRVLKSFIGQGYYNTLTPGVILRNIFENPAWYTAYTPYQPEISQGRLEAMLNFQQMITDLTGLDIANASMLDEGTAAAEAMTLLQRVNKHASNTFYVAEDVLPQTLEVVRTRALPLGIEVKVGPAADAAQAHAFGVLLQYPGVNGDVADYRAIAEAVHASGGRVVAAADLLALTLIAAPGEWGADVTVGNSQRFGVPLGFGGPHAGYMAVKDEFKRSMPGRLVGVTIDAQGNKAYRLALQTREQHIRREKATSNICTAQVLLAVMASMYAVYHGPQGLKRIAQRVHRLTATLAAGLKTLGHTPLNATFFDTLTLETGFNTDAFHASATARGINLRHVDATRIGISFDETASRDDVIALWEIFAHGKAVPDFDTIEASVQDGFPATLARQSAYLTHPVFNTHHAEHEMLRYLRALADKDLALDRTMIPLGSCTMKLNATSEMIPVTWPEFSNIHPFAPLDQTVGYREMIDQLEAMLCAATGYAAVSLQPNAGSQGEYAGLLIIHAYHASRGESHRDICLIPSSAHGTNPASAQMAGMKVVVVACDENGNVDLADLAKKAEQHSKNLAAIMITYPSTHGVFEQGVQQICDIVHKHGGQVYVDGANMNAMVGVAAPGQFGGDVSHLNLHKTFCIPHGGGGPGVGPVAVGAHLADFLPNQDSVGYRRDENGIGGVSAAPFGSASILPISWMYIAMMGSAGLTAATENAILTANYVARRLSPHFPVLYTGQHGLVAHECILDLRPLQKATGISNEDVAKRLMDYGFHAPTMSFPVPGTLMIEPTESEALHELDRFIDAMIAIRGEIARVEDGSFDREDNPLKHAPHTAAVVVSDKWNHKYTREEAAYPVASLRTQKYWPPVGRADNVYGDRNLFCSCVPLSEYAED

SEQ ID NO: 1807 - protein, 233 aa, Gibberella zeae PH-1
MFSNAKLSVITAFLAYSSIATAAPQGKDMATEAGLVTKLQQAESVIDRYNLLPEDKDFHFSFNSTPARNANGKTFPALTGAGISLAFAELPGCSMITIHTHPRAAELFAVISGNLYTEAVPESGVLDKQGKPRVIRNELGAGEATIFYQGAMHYQINTDCDPALALAAFPSEDAGFAGVAAGLFSVKNEALINSFGEVIKGEDVDKLRGGIPQVASIKVTECLAKCGKQKRQA

SEQ ID NO: 1808 - protein, 421 aa, Bacillus clausii KSM-K16
METVLMDNLWLTISAILVLLMQGGFILLEAGSTRMKNAGHIAGKTIFTVGIASLVFWAVGYGFIYGDGNPFIGMADFFFGNYADGVGSVDFFFQLTFAAIALTIAFGGFAERGKLAAYAIFAVLFSAFVYPLVAHWIWSDQGWLANLGKQDFAGSTVVHLTGAMAALAATLMLKPRLGKYDKNGKVNDLFGHNQVYTALGVLILWVGWFGFNAGSTGGVADAFFGYVALNTQLAAGAGTIAALFLVWALNGKADVPTTLNGTLAGLVAITASCAFVAPWAAVLIGVIGGLIVVVSMNMFDKLKIDDPIFALSVHGVAGVWGTLSNGLFATPELAEMNGGLPGLFYGGGFEQLGVQLLSVVVCGVFAFVASYVLLFITKGLLGGNLRVTEEEEILGLDMSEHGSYGYPETVQSEKTSTQTGS

SEQ ID NO: 1809 - protein, 553 aa, Oceanobacter sp. RED65
MVAGNELLFQDDESQHDAPKPSYKKPEQEYLVLVVDDDEYVHQLTKMVLRGFTFEGSPIRLASALSAKEAKYYIATHDNVAVALVDVVMETDNAGLDLVNFIREEHNNNEIRLLIRTGQPGAAPEESVFQDYDINDYLSKTDITAHKLRMALLNALRSYRDIRRAADLQKQIMLAEQESMTAAAANEAKSQFLAHMSHEIRTPLNGILGLTDILAQTQLNENQLEFIKTIRHSGEALLAIINDILDFSKIEAGKLELESIDFSLPTLCDDLEGLFISQVQDKGLQFDINLDPNIPEFLNGDPLRIKQVLLNLISNSLKFTHEGYVKLDIRQSQATPLVLEFKVSDSGIGISEEKQDQLFKPFTQVDSSTTRKYGGTGLGLQISQRLVQLMGGNIRLHSQVDKGSTFIFDLHLNAGIKPVSVDDDSAIRSNKPVENIRILVAEDNKTNQLVISTMLKRLGYQYDLCGDGQEALSQLDKQDYDLVLMDCQMPTMDGFIATQNIRKNPDLKNLPIIALTAGATEKEQKQCFDSGMNDFLSKPIKLNVLKDALERWH

SEQ ID NO: 1810 - protein, 284 aa, Ralstonia metallidurans CH34
MSATNETIDAGQQASQDWWRTEIIDMKPGEIRYRGYPIEQLIGNVSFAQMIWLMLRGELPGKREGELLDAALMAAVDHGPQAPSIAIARMAATCGVGLNNAMASAVNVLGDVHGGAGEQAVELYQDIARRFDAGTPFDDAVAAGLAHYRDLHGKFVSGFGHRFHPLDPRAPRLLALVDQAADDGVVSGRYAAIARAVEKALGAGRDKPIPMNIDGATAVIYAELGFPAPLARGLFCLSRSVGILSHAWEQTQQGGRNKGPIPRQFIWTYDGQPQRDVPVDGGAV

SEQ ID NO: 1811 - protein, 262 aa, Yarrowia lipolytica CLIB122
MTDRRRVLGPADAVPFTLDNIKPTEVEQKSLDIGSIFVKTGVVENANGSAYLELDDIKIVAIVHGPRPMRGLFTTSAILNVDTKFLPVSLCDIESKSAVVSSTQLTQYIRSASTTQSSSLQKNVSSYVHTSLLPSILVEKYPKSTIDVSISVLSSSNNTKTTVAAAVSCAGAALADSGLECTDIVTAGSVLLDENKATVSPSRAPTSEIDGVVSYMAASKKIVGMWIEGGNVSEKQMEEIFDKTEEMAREIRGVMHGVLLEQ

SEQ ID NO: 1812 - protein, 343 aa, Lycopersicon chmielewskii
MEMDLPVSAIGFEGFEKRLEISFVEPGLFADPNGKGLRSLTKAQLDEILGPAECTIVDNLSNDYVDSYVLSESSLFVYSYKIIIKTCGTTKLLLAIPPILRLAETLSLKVQDVRYTRGSFIFPGAQSFPHRHFSEEVAVLDGYFGKLAAGSKAVIMGNPDKTQKWHVYSASAGTVQCNDPVYTLEMCMTGLNREKASVFYKTEESSAAHMTVRSGIRKILPKSEICDFEFEPCGYSMNSIEGAAVSTIHITPEDGFSYASFESVGYDPKTTELGSLVERVLACFEPAEFSIALHADVATKLLERVCSVDVKGYSLAEWSPEEFGKGGSIVYQKFTRTPYCESP

SEQ ID NO: 1813 - protein, 379 aa, Monomorphina ovata
IGHVDHGKTTLTAAITMALAVTGNSKAKRYEDIDSSPEEKARGITINTAHVEYETKNRHYAHVDCPGHADYVKNMITGAAQMDGAILVVSGADGPMPQTKEHILLAKQVGVPNIVVFLNKEDQVDDKELLELVELEVRETLNNYEFPGDEIPVVAGSALLSVEALTQNPKITRGENKWVDKILDLMDKVDEYIPTPIRDTEKDFLMAVEDVFSITGRGTVATVRVERGTVKVGETVELVGLKNTRTTTVTGLEMFQKSLDEALAGDNVGVLLRGIQKTDIERGMVISKPGTINPHTTFDSQVYILTKEEGGRHTPFFEGYRPQFYVRTTDVTGKIESFRADNDSPAQMVMPGDRIKMQVELIQPIAIEKGLRFAIREGG

SEQ ID NO: 1814 - protein, 572 aa, Medicago truncatula
MAISPILLIALFSLIYGNYVIPIEATHHVYRTLESSSSYSSHHDQPYRTAYHFQPLKNWINGPMRYGGLYHLFYQYNPKGAVWGNIVWAHSASKDLVNWTPLDHAIHPSQPSDIKGCWSGSATILPGGKPAILYTGIDPNNHQVQNIAIPKNMSDPLLREWKKSPKNPLMEPTVANKINASSFRDPTTSWLGKDGYWRVLIGSKVHRKGIAIMYKSKNFVDWFEAKHPLHSAEGTGMWECPDFFPVLNKNPLTIGLDTSVNGDDVRHVLKVSLDDTKHDHYLIGTYDTVKDVFVPDNGFENNQNVLRYDYGKYYASKTFFDDGKNRRILLGWANESSSVVDDVKKGWSGIHTIPRVIWLHKSGKQLVQWPVKELENLRMNPVNWPTKVIKGGELIPITGVNSVQADVEISFEVKDFGKAELLDKWIDPQILCSQKGASVKGGVGPFGLHVFASKGLQEYTAVFFRIFRYQHKNLVLMCSDQSRSSLNKENDMTTYGTFVDVDPLHEKLSLRTLIDHSVVESFGGEGRACITARVYPTLAIHDKALLYAFNNGNSAVKITRLNAWSMKKAKIN

SEQ ID NO: 1815 - protein, 343 aa, Lycopersicon chmielewskii
MEMDLPVSAIGFEGFEKRLEISFVEPGLFADPNGKGLRSLTKAQLDEILGPAECTIVDNLSNDYVDSYVLSESSLFVYSYKIIIKTCGTTKLLLAIPPILRLAETLSLKVQDVRYTRGSFIFPGAQSFPHRHFSEEVAVLDGYFGKLAAGSKAVIMGNPDKTQKWHVYSASAGTVQCNDPVYTLEMCMTGLNREKASVFYKTEESSAAHMTVRSGIRKILPKSEICDFEFEPCGYSMNSIEGAAVSTIHITPEDGFSYASFESVGYDPKTTELGPLVERVLACFEPAEFSIALHADVATKLLERACSVDVKGYSLAEWSPEEFGKGGSIVYQKFTRTPYCESP

SEQ ID NO: 1816 - protein, 420 aa, Brucella suis 1330
MRRVVITGLGLVSPLASGVEETWKRLLAGESGARRVTEFEVDDLACQIACRIPVGDGTNGTFNPDLHMDPKEQRKVDPFIVYAVGAADQALDDAGWHPENDEDQVRTGVLIGSGIGGIEGIVEAGYTLRDKGPRRISPFFIPGRLINLASGHVSIKHKLRGPNHSVVTACATGTHAIGDAARLIAFGDADVMVAGGTESPVSRISLAGFAACKALSTKRNDDPTAASRPYDEDRDGFVMGEGAGIVVLEELEHALARGAKIYAEVIGYGMSGDAFHITAPTESGEGAQRCMVAALKRAGIVPDEIDYINAHGTSTMADTIELGAVERVVGEAAAKISMSSTKSSIGHLLGAAGAAEAIFSTLAIRDNIAPATLNLDNPAAQTRIDLVPHKPRERKIDVALSNSFGFGGTNASLVLRRYTA

SEQ ID NO: 1817 - protein, 586 aa, Oryza sativa
MATARARAALVFVALLQMAAVVVVRASHVVYPELQSLEANHVDGKLRTGYHFQPPKHWINDPNGPMYYKGLYHLFYQYNPKGAVWGNIEWAHSVSTDLIDWTALEPGIYPSKTFDEKGCWSGSATVLPSGVPVIMYTGIDPDERQVQNVAYPVNLSDPYLREWHKPDYNPIVNPDGGINASAFRDPTTAWYGPDGHWRLLVGSKVNMKGLAVLYRSRDFKKWVKAHHPLHSAHTGMWECPDFFPVAVAGGSRHYRRGVDTAELHDAAVAEEVKYVLKVSLDLTRYEYYTVGWYDHATDRYVPDAAFPDNDYGLRYDYGDFYASKSFYDPAKRRRIVWGWANESDTVPDDRRKGWAGIQAIPRKLWLSADGKQLVRWPVEELKALRAKHVNVTDKVIKKGNYFEVTGFKSVQSDVDMAFAIKDLSKAEEFDPAWRTDAEALCKKLGSDVDGGVGPFGLWALASGDLKERTAVFFRVFKANDSSHVVLMCNDPTRSSYESKIYRPTFAGFVDVDIAKNKQIALRTLIDHSVVESFGARGKTCILTRVYPRKAVGDDAHLFVFNNGESDVKVTNLDAWEMKTPKMNAEE

SEQ ID NO: 1818 - protein, 193 aa, Zea mays
RSIPFHPIPGKCKDGRESGRRVTNTTSPGAMAAAMTSFVAKNPLLAAAARRRAPPLAGRALPFSPLRLRTVTCFVPQDTAAPAAPVPALDEEARAAAARRVAEKEARKRSERRTYLVAAVMSSLGVTSMAVAAVYYRFSWQMEGGEVPVIETLGTFALSVGAAVGMEFWARWAHPGACGTPSPVAHCPNSTPG

SEQ ID NO: 1819 - protein, 181 aa, Paenibacillus polymyxa
MSIYDYSAIAMNGKEIVLSDYKDKVVLIVNTASQCGFTFQYQDLQRLYDQFKDRGLVILGFPCNQFADQEPDSNESVQTFCTLNYGVAFPMFQKVNVRDEQAHPLFTYLASSLPFEGFDETHSVAKILIPLIHERHPEYLPGDSIKWNFTKFLIDRNGKVIKRFEATTDPLDMEEYIEALL

SEQ ID NO: 1820 - protein, 917 aa, Pseudomonas syringae pv. phaseolicola 1448A
MLTKLGIKGRVLLLTILPASLMAAMLGGYFTWMQLSELQSQLLQRGEMIAQDLAPLAANALGRKDKVLLSRIATQTLEQTDVRAVSFLDTDRTELAHAGPTMISPSPIGSGSQLLSSTGTDATRYLLPVFGSQRHLTSPIIPAEADTLLGWVELEISHNGTLLRGYRSLFASLLLILTGLACTATLAVRMSRTINGPMSQIKQAVSQLKDGNLETRLPPLGSRELDELASGINRMAATLQNAQEELQLSIDQATEDVRQNLETIEIQNIELDLARKEALEASRIKSEFLANMSHEIRTPLNGILGFTHLLQKSELTPRQFDYLGTIEKSADNLLSIINEILDFSKIEAGKLVLDNIPFNLRDLLQDTLTILAPAAHAKQLELVSLVYRDTPLALSGDPLRLRQILTNLVSNAIKFTREGTIVARAMLEDETEEHAQLRISVQDTGIGLSSQDVRALFQAFSQADNSLSRQPGGTGLGLVISKRLIEQMGGEIGVDSTPGEGSEFWISLKLPKAREDKEESLNIPLGGLRAAVLEHHDLARQALEHQLEDCGLQTIVFNNLENLLNGVTAAHETPAAIDLAVLGVTALEISPERLRQHIWDLENLNCKVMVLCPTTEHALFQLAVHDVYTQLQAKPACTRKLQKALSELIAPRAVRADIGPPLSSHAPRVLCVDDNPANLLLVQTLLEDMGAEVVAVEGGYAAVNAVQQEAFDLVLMDMQMPGMDGRQATEAIRTWEAERNQSSLPIVALTAHAMANEKRSLLQSGMDDYLTKPISERQLAQVVLKWTGLALRNPAPERQNEAPEVHVGPLVLDHEEGLRLAAGKADLAADMLAMLLASLDADREAIRVARASQDVHALIERIHRLHGATRYCGVPQLRTACQRAETLLKQNAAHTEEALDDLDKAIIRLESEARVTA

SEQ ID NO: 1821 - protein, 340 aa, Bacillus subtilis subsp. subtilis str. 168
MKVKVAINGFGRIGRMVFRKAMLDDQIQVVAINASYSAETLAHLIKYDTIHGRYDKEVVAGEDSLIVNGKKVLLLNSRDPKQLPWREYDIDIVVEATGKFNAKDKAMGHIEAGAKKVILTAPGKNEDVTIVMGVNEDQFDAERHVIISNASCTTNCLAPVVKVLDEEFGIESGLMTTVHAYTNDQKNIDNPHKDLRRARACGESIIPTTTGAAKALSLVLPHLKGKLHGLALRVPVPNVSLVDLVVDLKTDVTAEEVNEAFKRAAKTSMYGVLDYSDEPLVSTDYNTNPHSAVIDGLTTMVMEDRKVKVLAWYDNEWGYSCRVVDLIRHVAARMKHPSAV

SEQ ID NO: 1822 - protein, 221 aa, Arabidopsis thaliana
MKVSMSLILITLSALVTIAKAYDPSPLQDFCVAIDDPKNGVFVNGKFCKDPKQAKAEDFFSSGLNQAGITNNKVQSNVTTVNVDQIPGLNTLGISLVRIDYAPYGQNPPHTHPRATEILVLVEGTLYVGFVSSNQDNNRLFAKVLNPGDVFVFPIGMIHFQVNIGKTPAVAFAGLSSQNAGVITIADTVFGSTPPINPDILAQAFQLDVNVVKDLEAKFKN

SEQ ID NO: 1823 - protein, 689 aa, Oryza sativa
MRRRGDQCDDDEIDAAALGVAHRVVGRQQTFLGRPFSLAYLLSIFFPSAGAATARGDGMSVLSFALQGSSTARHGWYNIVCGVAIARYSGLVLVGSHVANVALDQSESYPLTRRSGHKRECHQVAVMASSALICDTEQWKGLQAHYDFVFRHACGGEQAHVGAIQKTHLRDLMDDAERCKAMTAEYEGIFLDYSRQRATGETMEKLFKLAEAAKLKEKIEKMFSGDKINSTENRSVLHVALRAPRDEVIKSDGVNVVPEVWGVKDKIKQFSETFRSGSWVGATGKALTNVVSVGIGGSFLGPLFVHAALQTDPEAAESAKGRQLRFLANVDPVDVARSIKDLDPETTLVVVVSKTFTTAETMLNARTLKEWIVSSLGPDAVAKHMIAVSTNLELVEKFGIDPKNAFAFWDWVGGRYSVCSAVGVLPLSLQYGFPIVQKFLEGAASIDKHFRSSSFEKNIPAILPYSQALEKFAPHIQQLSMESNGKGVSIDGVQLSFETGEIDFGEPGTNGQHSFYQLIHQGRVIPCDFIGVVKSQQPVYLKGEIVSNHDELMSNFFAQPDALAYGKTPEQLHSEKVPEHLISHKTFQGNRPSLSLLLPSLSAYEIGQLLSIYEHRIAVQGFLWGINSFDQWGVELGKSLASQVRKSLHASRMEGKPVQGFNSSTASLLTRYLAVEPSTPYNTTTMPKV

SEQ ID NO: 1824 - protein, 298 aa, Triticum aestivum
  misc_feature (198)..(198): Xaa can be any naturally occurring amino acid
MAGGSGEGAAMSPPSSSGVGGGGGGGKRGRDPEEDVYVDNLHSHKRYLSEIMASSLNGLSVGDSLADNIMESPARSESSSCIRDEIISQYSPMSEDSDDYRYFDTQLNPNGSQGDAMVSPSTSPMSSPHRFQKPQAGFLPSSPYPLPSCSLSSVACSHPRRGSENEGRFPSSPNDMCHGADLRRTALLRSVQMRVHGXPHAYDPSFGSRQEQEHVHEHDDEHGHEHLEDLGGPERPSCRKSIDNEASGYQGAENSYGRQEHDIDYIDGCTADDVLSGPKFKQEDDNQGNSDASMDKTR

SEQ ID NO: 1825 - protein, 132 aa, Aspergillus nidulans FGSC A4
MTGGKSGGKASGSKNAQSRSSKAGLAFPVGRVHRLLRKGNYAQRVGAGAPVYLAAVLEYLAAEILELAGNAARDNKKTRIIPRHLQLAIRNDEELNKLLGHVTIAQGGVLPNIHQNLLPKKTPKAGKGSQEL

SEQ ID NO: 1826 - protein, 998 aa, Coprinellus disseminatus
MLRLRCVQRFPRLHNKRAAPLARGLASLKQPSSIFSPLDTFQERHIGPDDAEATTMLSNLGYDSMDAFIADTVPPKIRISPSTVSNESIPALSESELQANAKALGAQNKPFKSYIGMGYHNAVVPPVILRNVMENPSWYTQYTPYQPEIAQGRLESLINFQAMVMSLTSMDIANASLLDEATAAAEGMVMAHTSAPKKKTFIVDSGVAPQTLAVIRSRAKGFDVKIVVGDVSALVEDSSLIADVCGVLVQYPDVDGNIKDWAALAEQTHKIGGLVVAATDLLALTKLKAPGEWGADVVVGNSARFGVPAGYGGPHAAFFAVTDKLKRKMPGRLIGLSRDAQGKPAYRLALQTREQHIRREKATSNICTAQALLANMATMYAVYHGPEGLKRISNKVHGFTQVFKSSVESLGFKAINTTFFDTLTLDVTGAVANSWAVHASANAAAINLRRIDDKHVGVTFDESVTPAELVDLINVFATAANKSPFALSDLAESTESAISPHLKRTSKFLPHAVFNKHHSETEMLRYINHLSSKDLSLTHSMIALGSCTMKLNSTSSMVPLTWPEFSNVHPFAPQDQVEGYRTIIKELEEYLCKITGFHSASLQPNSGAAGEYAGLCVIRAFHESRGEGHRDICLIPLSAHGTNPASAHLAGLKVVPVKVHNDGNLDLADLKAKAEKHKDNLAAFMITYPSTFGVFESGVQDACQIIHGKGGQVYLDGANLNAQVGLTSPATCGGDVCHLNLHKTFAIPHGGGGPGVGPICVAEHLAPFLPGHTALPVQGESAINAVAAAPFGSASILLISWAYIKMLGGKGLADSSKLALLNANYMAHKLAPYYTLRYKNENGRVAHELLIDLAEFDKAAGLKVTDFAKRLQDYGFHPPTCSWPISTCMLIEPTESETLEELDRFCEAMIQIRKEADDVIAGKQPKENNLLKNAPHPISVISLSEDRWNRPYSRETAAFPLPWLKEKKFWPTVGRLDDAYGDLNLVCDCPSVEEVASN

SEQ ID NO: 1827 - protein, 379 aa, Aspergillus nidulans FGSC A4
MNATDIERCRKRIIQYIWDPEPKNDEEPGNPDHGQQQNTNTSAPGWPEAFLLDFESKIWMTYRSNFPPIPKDAGQEGSLSLTLGVRLRSQLIDAQGFTSDTGWGCMIRSGQSLLANSMAILLLGRDWRRGERLEEEGKLLSLFADSPHAPFSIHSFVKHGADFCGKHPGEWFGPTATARCIQGLAARYDQSNLQVYIADDNSDVHQDKFMSVSRDEKGTVRPTLILLGLRLGIDRITAVYWNGLKAVLQLPQSVGIAGGRPSASHYFVAVQGSHFFYLDPHNTRPALRYSESGTYTEDEVNTYHTRRLRRLNIQDMDPSMLIGFLIRDEDDWEDWKARIMSLEGKPIITILSESDAASWKGRREALDEVEAFDDLDVAL

SEQ ID NO: 1828 - protein, 172 aa, Triticum aestivum
  misc_feature (80)..(80): Xaa can be any naturally occurring amino acid
  misc_feature (91)..(91): Xaa can be any naturally occurring amino acid
  misc_feature (93)..(93): Xaa can be any naturally occurring amino acid
  misc_feature (100)..(100): Xaa can be any naturally occurring amino acid
  misc_feature (102)..(103): Xaa can be any naturally occurring amino acid
  misc_feature (109)..(109): Xaa can be any naturally occurring amino acid
  misc_feature (118)..(118): Xaa can be any naturally occurring amino acid
  misc_feature (127)..(127): Xaa can be any naturally occurring amino acid
  misc_feature (129)..(129): Xaa can be any naturally occurring amino acid
  misc_feature (137)..(137): Xaa can be any naturally occurring amino acid
  misc_feature (139)..(139): Xaa can be any naturally occurring amino acid
MAPTVMASSATSVAPFQGLKSTAGLPVSRRSNGASLGSVSNGGRIRCMQVWPIEGIKKFETLSYLPPLSTEALLKQVGLXLIRPKWVPFLXFXQVRFIFXFXXASPGYXTAANWTCWXLLISGATDXPXVNKLEESXRXYPDPYSASQKQQLMPKPPAQGSGRLTVYTGLRH

SEQ ID NO: 1829 - protein, 423 aa, Oryza sativa (japonica cultivar-group)
MAGSRFGSFKSEKGDPAATAAQRRDPYEVLGVGRNATDQEIKSAFRRMALKYHPDKNGDDPVASDMFQEVTFSYNILSDPDKRRQYDTSGFEAIEADSQELELDLSSLNTVNTVFAALFSKLGVPIKTTVSATVLEEALNGSVMVSQLQLGNSVHRKVEKQSAHFYSVDITEKEAKMGLVCRVKSTDRSKFKLLYFELEENGGLSLALQEDSVKTGKVTSAGMYFLGFPVYRFEQNNLAAAAKDPDSAFFKRLDSFQPCDINELKPGTHFFAVYEVVCGESFPAEKEKLQSVEAKILTKRAELSKFETEYREVLAKFTEMTSRYTQEMQAIDNLLKERNEIHASYTNNSPLKRSSSRSKAKSPSKFSKGEEENSQRKEKKVKDQPTGGCRSADEDSNEKKTKERFPKKKWLNIPFKIDRRKPC

SEQ ID NO: 1830 - protein, 613 aa, Zea mays
MACNRRRKLLCACLLLACAAPAAAAAVNISVYWGQNSNEGSLGQTCSSGRYALVAMAFLSTFGSGQTPVLNLAGHCDPASGGCTALAADIAACQARGVRVLLSIGGGAGSYNLSSASDAESVATYLWDNFLGGTSSSRPLGDAVLDGIDMDIEISPSSHFDGLARNLTSLYGGDRRGRKYLLTAAPQCPYPDASLGAALATGLFDHVWVQFYNNPGCEYQQKDGDGVANLAASWKAWTQSLPSSASVFLGLPASPAAAGSGYVPPDDLVSRVLPAVSGSANYGGLMLWNRYYDNSTGYSARILSSRALLHPKGYTYSEVKRMTRSFAHKLGQGGYGAVYRGSMPDGREVAVKMLTGMLEGDGEEFMNEGGEHQQDGPKRALLYEYMPNGSLERYTFGSSSGEDALSWDRLFGIVVGVARGLEYLHTGCNTRIVHFDIKPHNILLDQDMCPKISDFGLAKLCGQKASRVSIAGARGTVGYIAPEVFSRSYEAVGSKADVYSYGMVVLEMVGARKNVHVSATDDGGNSSSSRYFPQWLYENLDQFCRPTTTSNGEIRGDDDDATEVLLVRKMVVVGLWCIQSKPDSRPSMGQVLEMLESNAADLQLPPKALCTAY

SEQ ID NO: 1831 - protein, 138 aa, Lactobacillus plantarum
TNEMLKANQLSFPGQRVAISGAGNVAIYAIQKVEELGGKVITCSDSNGYVIDENGIDFKIVKQIKEVERGRIKDYADRVASASYYEGSVWDAQVAYDIALPCATQNEISGNQAKNLIANGAKVVAEGANMPSSPEAIA

SEQ ID NO: 1832 - protein, 154 aa, Brassica napus
ICPLSGGESQRVGIPLCLGKPADIYLIDEPSAYLDSEQRITASKVIKRFILHAKKTAFIVEHDFIMATYLAARVIVYEGHPSIKCMAHSPQSLLSGMNLFLSPLNITFRRDPTNFRPRITKLESPKDREQKSAGSYYYLDDCPFFFYEYAACPK

SEQ ID NO: 1833 - protein, 138 aa, Lactobacillus plantarum
TNEMLKANQLSFPGQRVAISGAGNVAIYAIQKVEELGGKVITCSDSNGYVIDENGIDFKIVKQIKEVERGRIKDYADRVASASYYEGSVWDAQVAYDIALPCATQNEISGDQAKNLIANGAKVVAEGANMPSSPEAIA

SEQ ID NO: 1834 - protein, 385 aa, Triticum aestivum
MTPALKLSPAAFSVTNQRSKSALVPSVSILNTNFFASCSLRPLYLTRLDDPHTFELKPRRQLLDFRCAASAADDKESKAEVLPASSEAAQKLKISIYFATWWALNVIFNIYNKKVLNAFPYPWLTSTLSLACGSAMMLFSWVTCLVEAPKTDLDFWKALFPVAVAHTIGHVAATVSMSKVAVSFTHIIKSAEPAFSVLVSRFILGESFPMPVYLSLLPIIGGCGLAAATELNFNMIGFMGAMISNLAFVFRNIFSKRGMKGKSVSGMNYYACLSIMSLVILTPFAIAMEGPQMWAAGWQKALADVGPNVLWWIGAQSVFYHLYNQVSYMSLDQISPLTFSIGNTMKRISVIVSSIIIFRTPVRPVNALGAAIAIFGTFLYSQAKQ

SEQ ID NO: 1835 - protein, 427 aa, Xylella fastidiosa Temecula1
MSSHYKSSSHMAKETLLYAQSGGVTAVINATAAAVITEARSHRIKVLAARNGILGALREDLIDTSKESITAIRALTHTPGGAFGSCRFKLKSLEADHEKYERLLEVFKAHNVRWFLYNGGNDSADTALKVSQLAKTFDYPLHCIGVPKTIDNDLAITDASPGFGSAAKYTAVSICEAARDVAAMAETSTKVFIYEAMGRHAGWLAAAAGLAGQGQEEAPHIILLPERTYDETAFLAKVQQVVDRVGWCVVVASEGIRSNDGRFVADAGGTTDAFGHTQLGGVAAYLANRVKQALGLKVHWTLPDYLQRSARHIASKTDWEQAQAVGKAAVHYALEGMNAVMPVIVRTSDTPYRWKIEPAALTKIANHEKTLPASFLRRDGFGISERARTYFEPLIRGEAPMPYERNGLPRHVHLKNQSVQKRLPAWE

SEQ ID NO: 1836 - protein, 668 aa, Arabidopsis thaliana
MASEKSTSKGQAWFCTTGLPSDIEIEVDDMTFHLHKFPLMSKSRKLHRLITEQETRSSSSMALITVIDPKVEETDKKGKGHEIEDDKEEEEVEEQEIEENGYPHIKLEDFPGSSESFEMVAKFCYGVKMDLSASTVVPLRCAAEHLEMTEEYSPDNLISKTERFLSHSVYKSLRESIKALKACESVSPLAGSLGITEQCIDSIVSRASSADPSLFGWPVNDGGGRGNISATDLQLIPGGAAKSRKKPSRDSNMELWFEDLTQLSLPIFKTVILSMRSGDLSSDIIESCLICYAKKHIPGILRSNRKPPSSSSTAVSENEQRELLETITSNLPLDKSSISSTTRFLFGLLRTAIILNAAEICRDLLERKIGSQLERATLDDLLVPSYSYLNETLYDVDLVERILGHFLGTLEQSNTAIVEVDGKSPSLMLVGKLIDGFLAEIASDANLKSDKFYNLAISLPDQARLYDDGLYRAVDVYLKAHPWVSEAEREKICGVMDCQKLTLEACTHAAQNERLPLRAVVQVLFFEQLQLRHAIAGTLLAAQSPSTSQSTEPRPSAAIRNLTITEEDGDEAEGERQVDAGKWKKTVRENQVLRLDMDTMRTRVHRLERECSNMKKVIAKIDKEGSSPATTTDRPRSWSITKKFGCKFKTQVCDSHEATMVDHRSRRS

SEQ ID NO: 1837 - protein, 214 aa, Desulfotalea psychrophila LSv54
MGQSLLSSFGDAQQRVEKSLQALRQGEGVLLVDDEDRENEGDLIYSAEHLTAKQMALMIREGSGIVCLCLTGEKVDELKLPQMVTNNNSRHGTGFTISIEARDGVTTGVSAADRTQTVKAAIAEGAVAEDLCQPGHVFPLRARDNGVLDRRGHTEGTVDLMKLSGLAPAGLLCELTNVDGTMARLPEIVDFARKRDMQVLSIEDIAQYRQGHNL

SEQ ID NO: 1838 - protein, 138 aa, Lactobacillus plantarum
TNEMLKANQLSFPDQRVAISGAGNVAIYAIQKVEELGGKVITCSDSNGYVIDENGIDFKIVKQIKEVERGRIKDYADRVASASYYEGSVWDAQVAYDIALPCATQNEISGDQAKNLIANGAKVVAEGANMPSSPEAIA

SEQ ID NO: 1839 - protein, 381 aa, Francisella tularensis subsp. holarctica
MFDFNDSMVSNAIIKVVGVGGGGGNAVQHMCEEVSDVEFFALNTDGQALSKSKVQNILQIGTNLTKGLGAGANPEIGKRAATEDRAKIEQLLEGADMVFITAGMGGGTGTGGAPVVAEVAKEMGILTVAVVTKPFPFEGPRRMKAAEQGIDELTKHVDSIITVPNEKLLSVLGKGASLIDAFNAANDVLGNAVKGVSELITKPGLINVDFADVRAVMTNMGLAMMGMGEASGENRAREAAEAAISSPLLEDINLDGAKGVIVNITAGMDMSIGEFEEVGEVIRSFISDEAIVIAGTVIDPDMSDSMKVTVVVTGIEKVAMKRGFGVEKTSSLQQSASSFSNKTSAPFLRKETEVVTGASNAPKTDSDDVNKSDIPSFLRRR

SEQ ID NO: 1840 - protein, 314 aa, Neorickettsia sennetsu str. Miyayama
MCDALESDVIIIGSGPAGCTAGIYAARASLSVVIVSGNQSGGQLTTTTEVENYPGFALPVQGPWLMEQMQQQAVNVGCRLVNDHILQIEAPYSSPFVLRGEGGNKYRARSIVVATGAQAKWLGLESEKKYQGYGVSGCATCDGFFFRDQDVIVIGGGNTAVEEALYLTRHAKKVYLLHRRERLRAETVLQERLFANAKVELIWNSVLDEILGRDSPPEVTGVRVRSLMDGTFREILVSGVFVAIGHAPNTALFSGILEMDSAGYIKTSSSDTSTSVSGIFACGDVQDPVYRQAVTAAGTGCMAALDAIRFLDCI

SEQ ID NO: 1841 - protein, 1044 aa, Arabidopsis thaliana
MERARRLAYRGIVKRLVNETKRHRNGESSLLPTTTVTPSRYVSSVSSFLHRRRDVSGSAFTTSGRNQHQTRSISVDALKPSDTFPRRHNSATPDEQAQMANYCGFDNLNTLIDSTVPKSIRLDSMKFSGIFDEGLTESQMIEHMSDLASKNKVFKSFIGMGYYNTHVPPVILRNIMENPAWYTQYTPYQAEISQGRLESLLNYQTVITDLTGLPMSNASLLDEGTAAAEAMAMCNNILKGKKKTFVIASNCHPQTIDVCKTRADGFDLKVVTVDIKDVDYSSGDVCGVLVQYPGTEGEVLDYGEFVKNAHANGVKVVMATDLLALTMLKPPGEFGADIVVGSGQRFGVPMGYGGPHAAFLATSQEYKRMMPGRIIGVSVDSSGKQALRMAMQTREQHIRRDKATSNICTAQALLANMTAMYAVYHGPEGLKSIAQRVHGLAGVFALGLKKLGTAQVQDLPFFDTVKVTCSDATAIFDVAAKKEINLRLVDSNTITVAFDETTTLDDVDKLFEVFASGKPVQFTAESLAPEFNNAIPSSLTRESPYLTHPIFNMYHTEHELLRYIHKLQNKDLSLCHSMIPLGSCTMKLNATTEMMPVTWPSFTNMHPFAPVEQAQGYQEMFTNLGELLCTITGFDSFSLQPNAGAAGEYAGLMVIRAYHMSRGDHHRNVCIIPVSAHGTNPASAAMCGMKIVAVGTDAKGNINIEELRNAAEANKDNLAALMVTYPSTHGVYEEGIDEICNIIHENGGQVYMDGANMNAQVGLTSPGFIGADVCHLNLHKTFCIPHGGGGPGMGPIGVKQHLAPFLPSHPVIPTGGIPEPEQTSPLGTISAAPWGSALILPISYTYIAMMGSGGLTDASKIAILNANYMAKRLESHYPVLFRGVNGTVAHEFIIDLRGFKNTAGIEPEDVAKRLMDYGFHGPTMSWPVPGTLMIEPTESESKAELDRFCDALISIREEISQIEKGNADPNNNVLKGAPHPPSLLMADTWKKPYSREYAAFPAPWLRSSKFWPTTGRVDNVYGDRNLVCTLQPANEEQAAAAVSA

SEQ ID NO: 1842 - protein, 159 aa, Oceanobacter sp. RED65
MSVYDFKATDITGQERELSEFKGKPLLIVNTASKCGLTPQFDGLEALYKQYKDQGFAILGFPCNQFAEQDKGSDSEIAGFCMKNYGVSFPMFSKIEVNGDNAHPLYRYLKDQAPGFLGSKKIKWNFTKFLINKEGKVVKRFAPTTKPAAIEKHVKALVE

SEQ ID NO: 1843 - protein, 440 aa, Pyrococcus abyssi GE5
MRVVVIGSGTAGSNFALFLRKLDRKAEIIVIGKEPTMQYSPCALPHVISGTIEKPEDVIVFPNEFYEKQKIKMMLGVEAKKIDRERKVVITDKGEVPYDKLVLATGSKAFIPPIKGVENEGVFTLKSLDDVRRIKEYIGKRNPKKAVVIGAGLIGLEGAEAFAKLGMEVLVVELLEHLLPTMLDKDMASIVQKNMEEHGVKFRFGVGVSEIIGNPVEAVKIGDETVEADLVLVATGVRANVDLAKDAGLEVNRGIVVNEYLQTSDPDIYAIGDCAEVIDAVTGKRTLSQLGTSAVRMAKVAAEHIAGKDVKFRPVFNTAITELFDLEIGTFGMTEERAKREGIDVVVGKFRGSTKPEYYPGGKPITVKLIFRKEEGRLIGAQIVGGERVWGRIMTLSALAQMGAKVEDIAYLETAYAPPISPTIDPITVAADMALRKMKR

SEQ ID NO: 1844 - protein, 481 aa, Burkholderia pseudomallei K96243
MPLRDHAAYRRETLRWCGQRAARARTLDVFDPYSGLRVGTVPLATVDDVRRAFDYAVAYRPALSRYERSQILERAAARLTARAEEASTLISLESGLSKQDSRYEIGRVADVFKFASIEALRDDAQSYSCDLTPHGKSRRVFSQRQPLDGVIVAITPFNHPMNQVAHKIAPAIATNNRVIVKPSEKVPLSALYLADVLYEAGLPEPMLQVLTGDPREIADELLTHPSATLITFTGGVAIGKSIAAKAGYRRIVLELGGNDPLIVLDDADLERAAALAAQGSYKNSGQRCTAVKRILVHKRVAPRFTELLVEHTRAWTYGDPFDPANRMGTVIDEAAAALFEARVDEAVAQGARLLTGNARRGALYAPTVLDRVDASMTLVREETFGPVSPIIAFDTIDDAIRISNGTAFGLSSGVCTDRADAIVRFVNELNVGTVNVWEVPGYRLELTPFGGIKDSGLGYKEGVQEAMKSFTNLKTFSLPWA

SEQ ID NO: 1845 - protein, 131 aa, Arabidopsis thaliana
LRVGDLERSIKFYEKALGMKLLRKKDVPDYKYTIAMLGYADEDKTTVLELTYNYGVTEYSKGNAYAQVAIGTNDVYKSAEAVDLATKELGGKILRQPGPLPGINTKIASFVDPDGWKVVLVDNTDFLKELH

SEQ ID NO: 1846 - protein, 493 aa, Bacillus clausii KSM-K16
MANFEQFGLDASVVQAVTNIGFTEATPIQQETIELVLAGKDVIGQAQTGTGKTGAFGIPLVNRIDSSNPLVQGLVLAPTRELANQVEQALRQFGRVKGVRTTVVYGGEDFGKQIRSLKQRPHIIVATPGRLLDHMRRKTIRLESIETVVLDEADEMLNMGFIEDIETILAETPQETRQTLLFSATMPKRMESLASKFMKNPTRIAVKAKEVTMENIAQQFIEVHEREKFDVLCRLIDLETPDLSIVFGRTKRRVDELAEALIKRGYRAEGLHGDLNQAKRNSVLRKFKEGLIDVLVATDVAARGLDISGVTHVFNFDLPQDPESYVHRIGRTGRAGRSGIAITLATKPEREHVKLIESVSKRRMTQRPKPTYEEALEGQKQSTLNELRELAAKGEQDSYRVAAKELLQETDAVTALAAALKLLTKEPDQTPVKLTSEAPLRTKKRHGNGGRDGRRHNDRDRRPWGQKRGRDGRRSGHQRKWASSNGKAGKRLS

SEQ ID NO: 1847 - protein, 519 aa, Buchnera aphidicola str. APS (Acyrthosiphon pisum)
MKSKVVIFDTTLRDGEQALQASLSVKEKLQIALSLEKCGIDILEIGFPVSSPGDFKSVQTISKNIKNSRICSLARCIEKDIDAAGEAMSSSDSFRIHIFLATSTLHMESKLKKNFNEIIDMAVFSVKKALRYTDDIEFSCEDATRTTMDNLCRIVETLIKSGVKTINIPDTVGYTVPNELSCIIKNLFERVPNIHKSIISVHCHDDLGMAVGNSISAIQAGARQIEGTINGIGERAGNTALEEIIMAIKVREDILSVSTNINYKEIYRTSKIVSQICNMPIPSNKAIVGSNAFAHSSGIHQDGVLKNRKNYEIMEPSSIGLKEVKLNLTSRSGRAAVKHYMDEMGYNNSDYNIDELYTAFLKLADKKGQVFDYDLEALAFINKQQDEWEYFSLKFFSVQSISNSLSTASVKLLCGKKTYTESSTTSNGPVDAIYQALNRIACFPIILQKFQLVAKGKGKDALGQVDILVEHKKRKFHGVGLATDIIEASAQAMINVLNNIWKAKQVNKKLKILKDFKKK

SEQ ID NO: 1848 - protein, 363 aa, Buchnera aphidicola str. APS (Acyrthosiphon pisum)
MKKNYRIAVLSGDGIGPEVMQEACKILNVLKKYFFLSLEIQKFNIGGIAIEREGVALPKTTLLGCENSDSILLGSVGGKKWDNLPVEQRPERAALLPLRKHFNLFSNLRPAKLYPELKCLSPLRSDIVKNGFDILCVRELTGGIYFGEPKGFVNKNNTKYAFDTEIYHEYEIIRIAHLAFKLARSRKKKVCSIDKSNVLQSSILWREVVESVSKKYPDVHLSHLYIDNAAMQIIKDPNQFDVLLCSNLFGDIISDECATITGSIGMLPSASFNEKNFGLYEPAGGSAPDIEGKNIANPIAQILSLSMLVRYGMNLNQIADKIDKAVNNVLKKGYRTSDISHDNNFLKTDEMGDLIVDSLINGE

SEQ ID NO: 1849 - protein, 112 aa, Rubrivivax gelatinosus PM1
MKQITAVIKPFKLEEVREALAEVGVSGLTVTEVKGFGRQKGHTELYRGAEYVVDFLPKVKLEVVVKDVDVDRCLEAIVKAAKTGKIGDGKIFVSSVEQVVRIRTGETDEAAV

SEQ ID NO: 1850 - protein, 473 aa, Candidatus Pelagibacter ubique HTCC1002
MTKKAIVWIREDFRIEYNEALATATQNHEYVSAIYIYNPKNFDKKREAQKWWLSKSLENLSIDLKKLNITLEVQLGDELEVLSILKKKDDVTVYWSKVYEPDVINKGKKIRDLFIKNEIQYKYFKGNILIEFQEMTKDDGTPYKVFTPFWKKTEQHYISKAPSKLIRVKSKIKKINIFKNSISIKEILPKKNWHKKFEKYWDPSEKEAKKYLQELINNKIEDYGDARDIPGVNGTSKLSPFLKFGQIHVETIWKKCQDIKVKKIGYRKYINELGWREFSHSLINYFPQMLKGNLRKDFDNFPWVKNDKFLKAWKAGMTGYPIVDAGMRELYETGWMHNRVRMIVASFLVKHLRIHWMEGEKHFKNCLVDYNEASNVAQWQWVAGCGADAAPYFRIFNPILQGEKFDKAGIYTKKWVPELKNMPNKFLYKPWELETKYQEQIKVIVGINYPKPIVDHVEARNAALDAFKTIKKS

SEQ ID NO: 1851 - protein, 181 aa, Coffea arabica
MASSMISSAAVATTTRASPAQASMVAPFNGLKAASSFPISKKSVDITSLATNGGRVQCMQVWPPRGLKKYETLSYLPDLTDEQLLKEIDYLIRSGWVPCLEFELEKGFVYREYHRSPGYYDGRYWTMWKLPMYGCTDATQVLNEVGECLKEYPNCWVRIIGFDNVRQVQCISFIAAKPKGF

SEQ ID NO: 1852 - protein, 99 aa, Brassica napus
  misc_feature (22)..(22): Xaa can be any naturally occurring amino acid
  misc_feature (80)..(80): Xaa can be any naturally occurring amino acid
  misc_feature (89)..(89): Xaa can be any naturally occurring amino acid
MAEKADWLEGPKKDKRGFFHVXHRVGDLDRTIQFYTEGFGMKLLRKRDVLEEKHSKAFLGLGPETSNLVVELTNNNGVGXYDIGTGFGXHFVISTQDVS

SEQ ID NO: 1853 - protein, 260 aa, Xanthomonas campestris pv. campestris str. ATCC 33913
MSNHVILIADHANVRTITVNRPDKLNALNQQTMQALDAAFAEAAAAEDVRVVVLTGAGPKAFVAGADIAEMSELSAMQGREFSLLGQRLMRRIERMPKPVIAMVSGFALGGGLELAMACHLRIAAATARIGQPEINLGLIPGFGGTQRLLRLTGRAAALELCLLGTPIDAARALQLGLVNRVVEPEALQAETTALAERLAGSAPLALRGILDAVVVGGECGMEEGLQLETAQFSLLFATDDMREGTRAFLDKRPAQFRNR

SEQ ID NO: 1854 - protein, 217 aa, Ipomoea trifida
MSIQVQSLYSIYNKKREKLNIDEIHDIRGLRFKALRVIHQLWHEVPGRFKDYIMHPKFNGYQSLHIIFIGGGMVPLEVQIRTKEMHLQTEYVALLLIGDTRKMLVQEFATIPDKSLTDYRVEIQPKHLVLKWHVVATLRWEVMSSSLSGGDLEIDSLCFNRLRKSIDEHYYYNDCSFRGGWKGIGGKTGRSSRVSFSKDGKEGIQAVRGLSTRVFSV

SEQ ID NO: 1855 - protein, 271 aa, Saccharomyces cerevisiae
MKRFNVLKYIRTTKANIQTIAMPLTTKPLSLKINAALFDVDGTIIISQPAIAAFWRDFGKDKPYFDAEHVIHISHGWRTYDAIAKFAPDFADEEYVNKLEGEIPEKYGEHSIEVPGAVKLCNALNALPKEKWAVATSGTRDMAKKWFDILKIKRPEYFITANDVKQGKPHPEPYLKGRNGLGFPINEQDPSKSKVVVFEDAPAGIAAGKAAGCKIVGIATTFDLDFLKEKGCDIIVKNHESIRVGEYNAETDEVELIFDDYLYAKDDLLKW

SEQ ID NO: 1856 - protein, 418 aa, Candidatus Pelagibacter ubique HTCC1002
MKNTMVIPLVTVTWFFFGWWIYWAFPTGPGIAPSIMNESSALITDESTFSAKWYVANTEFMAVNLGDRISGVFWAAFLLFSWTAASIVSGAIIERITTFAFGILAIAIGSCFWVIDAAWGWHFDGWMLKILGYHDAYASGVIHAIAGGFALGVLIVLGPRIGKFSSSGEPRNIGPRNPWLVTVGLFLIYTGFWGFYAACNIPIFDLGPEYGMEGVTYWTATNIYVTPTTLSGITYNFLMSLSGGLLAGYVVAKGDPFWTYSSGLAGIICASAGNDLYHPIQAMLIGAIGVVISYKMHYWVERKFKIDDAVGAVAVHGYAGVVGLIICGFVLNGYPSSGYSVGAMWDGSTYASINPLGQFLGAIIMFGVLGMLPGYVLARILSAFGKLRIPREVEIAGLDYEIMEDDREAEKAVASATR

SEQ ID NO: 1857 - protein, 363 aa, Escherichia coli K12
MSKNYHIAVLPGDGIGPEVMTQALKVLDAVRNRFAMRITTSHYDVGGAAIDNHGQPLPPATVEGCEQADAVLFGSVGGPKWEHLPPDQQPERGALLPLRKHFKLFSNLRPAKLYQGLEAFCPLRADIAANGFDILCVRELTGGIYFGQPKGREGSGQYEKAFDTEVYHRFEIERIARIAFESARKRRHKVTSIDKANVLQSSILWREIVNEIATEYPDVELAHMYIDNATMQLIKDPSQFDVLLCSNLFGDILSDECAMITGSMGMLPSASLNEQGFGLYEPAGGSAPDIAGKNIANPIAQILSLALLLRYSLDADDAACAIERAINRALEEGIRTGDLARGAAAVSTDEMGDIIARYVAEGV

SEQ ID NO: 1858 - protein, 386 aa, Pisum sativum
MADAEDIQPLVCDNGTGMVKAGFAGDDAPRAVFPSIVGRPRHTGVMVGMGQKDAYVGDEAQSKRGILTLKYPIEHGIVSNWDDMEKIWHHTFYNELRVAPEEHPVLLTEAPVNMRAPLNPKANREKMTQIMFEAFNTPAMYVAIQAVLSLYASGRTTGIVLDSGDGVSHTVPIYEGYALPHAILRLDLAGRDLTDFLMKILTERGYSFTTSAEREIVRGHSDVKEKLSYIALDYEQELETARTSSSVEKSYELPDGQLITIGDERFRCPEVLYQPSMIGMEAAGIHEATYNSIMKCDVDIRKDLYGNIVLSEGTTMSPGIADRMSKEISALAPSSMKIKVVAPPERKYSVWIGGSILASLSTFQQMWIAKAEYDESGPSIVHRKCF

SEQ ID NO: 1859 - protein, 283 aa, Bordetella bronchiseptica RB50
MTARIIDGAALSQRIREEVAQRVQALTAKGVRPGLAVVLVGDDPASQVYVRNKVAACEKAGLHSVKEQYPADLTEAQLLERIDALNRDPSIHGILVQLPLPRHMDAHKVIEAIAAEKDVDGFHISNAGLLMTGQPLFRPCTPYGVMKMLESEGVALRGAEAVIVGASNIVGKPMAMLLLQAGATITICNSKTRDLGAQTRRADVLVVATGKPGMIDGSMIKPGAVVIDVGINRGADGKLCGDVDMASAREVAGAISPVPGGVGPMTIAMLLVNTVEAAERAAA

SEQ ID NO: 1860 - protein, 114 aa, Triticum aestivum
  misc_feature (3)..(3): Xaa can be any naturally occurring amino acid
  misc_feature (6)..(6): Xaa can be any naturally occurring amino acid
  misc_feature (9)..(9): Xaa can be any naturally occurring amino acid
RSXPPXPPXTQVLNRPSFALHYSVKTMSGRRSRGSVSEEEINELISRLQTLLPTARRRGSSSRQASTTKMLKETCSYIKSLHREVDDLSDRLSDLMSTMDNNSPAAEIIRSLLR

SEQ ID NO: 1861 - protein, 159 aa, Corynebacterium glutamicum
MTSIHDISVTLNDGTETTMADWAGHLLLIVNVASKCGLTPQYEGLQKLYEEYQDRGFFVIGVPCNQFNGQEPGTDAEVCAFAQNQYDVTFPLLSKTEVNGEGTHPLYKVLKEATDGSEIEWNFEKFLVDAEGNTIKRFAPRTEPSAAEVVEAIEENLPI

SEQ ID NO: 1862 - protein, 180 aa, Triticum aestivum
  misc_feature (109)..(109): Xaa can be any naturally occurring amino acid
  misc_feature (118)..(118): Xaa can be any naturally occurring amino acid
  misc_feature (145)..(145): Xaa can be any naturally occurring amino acid
  misc_feature (161)..(161): Xaa can be any naturally occurring amino acid
PCDFIGVVKSQQPVYLKGETVSNHDELMSNFFAQPDALAYGKTPEQLHSEKVPENLIPHKTFKGNRPSLSLLLPTLSAYEVGQLLSIYEHRIAVQGFIWGINSFDQVGXVELGKSLRXSSKWRKQLHGNPGWEGKPVGGFNHSTXSLLARYLAVQPPPRYXTTVLPKCITQLFAAMPIAS

SEQ ID NO: 1863 - protein, 245 aa, Oryza sativa
  misc_feature (92)..(92): Xaa can be any naturally occurring amino acid
MKFNIANPTTGCQKKLEIDDDQKLRAFYDKRISQEVSGDALGEEFKGYVFKIMGGCDKQGFPMKQGVLTSGRVRLLLHRGTPCFREYGRPDXSAEGKSVRGCIVSQDLSVINLVIVKKGDNDLPGLTDTEKPRMRGPKRASKIRKLFNLAKDDDVRKYVNTYRRTFTTKNGKKVSKAPKIQRLVTPLTLQRKRARIAQKKQRIAKKKSEAAEYQKLLAQRLKEQRERRSESLAKRRSKLSAATTA

SEQ ID NO: 1864 - protein, 556 aa, Debaryomyces hansenii CBS767
MSNSTKKDDCHDVTIDSTISDIEIERSGSTNNVMIEPSPKSSSELLSSESVISDSDARPSKLIILITLTSSISGFMFGYDTGYISSALVNIGTDLSNKLLSNGEKEFITSATSLGALIGAIIGGILANLIGRKMVLLGSNVIFVIGTIIQLAAHTVWTMIVGRFVLGLGVGIASLISPLMLSELAPSKYRGRLIVTNCMFITGGQLVAYFINWGLTGVNNGWRVSVGLCMVPPIIQFVLFCFLPDTPRFYIMVGRVEEARKVLSKTHHNPSNAFVNATIQDMIASNSTVPGNNPLVQAWNSIKIIHTNPANFRALILACGLQGIQQFTGFNSLMYFSATIFETIGFDNATAVSIIIAATNFVFTGIALCIIDKIGRRRILLGAIPCMCISLVLCAIAFHFLGVKFTSDSDVIVEARGITGWGIVIILGMVWFVASYAIGIGNSAWTGVELFSDVNVRAVGCMYAAATNWAGSLVIASTFLTMLENITPPGTFAFFAGLCFVAFFFVFFLLPEVSGLELEETTEFLANGFNVKASRQISKDRKKVSKFVTQNDDHSA

SEQ ID NO: 1865 - protein, 335 aa, Silicibacter pomeroyi DSS-3
MARTLSMKDAINEALDQEMTRDPTVIMMGEDIVGGAGAAGEDDAWGGVLGVSKGLYHKHPKQMIDTPLSESAYVGAAIGAATCGLRPVAELMFIDFMGVCLDQIYNQAAKFRYMFGGKAETPVVIRAMCGAGFRAAAQHSQMLTPIFTHIPGLKVVCPSNAYDTKGLLIQAIRDNDPVIFLEHKNLYASECDVPEEPYAIPFGEANIAREGSDVTIVTYGLMVPNSLAAAETLKKEGIDVEVIDLRTLSPIDMDTVIESVENTGRLVCVDEANPRCSIATDVSASVAQDAFKALKAPIAMVTAPHAPVPFSPALEDLYIPSPDRIAAAVRKTMGA

SEQ ID NO: 1866 - protein, 385 aa, Methanococcus maripaludis S2
MDFEKYDVVIVGGGPCGFITGENIKNKKVLVLEEHQEIGVPFQCAGLLSKKCINDLGNPKGSINKVRGAHIYSKNSSITVGNEEIRAEVFERKVMDKDIAVRASKNVDILLKSYGKIKNSNNSSNTNKIMHNLEIMHMGDTFEISPEIIIGADGIRSTIGRSLNMHDKKREIISGVQIEFVNAKVDDDFVYVIYDKKYSEKFFTWIIPLGNDRVRVGMCDSNNSYNKLMDFVENNPVAKEILKNATPVEFICGAIPIGYSKSVKNNVMLVGDSAGQVKPLSGGGLYYGAKCGKICADTINQYFEGNYGIEFLKNYEKNWKSEISSEIDKNIKIRKILNMINNDKLDRIFDFINKNNLVEFINEKGDMDNPSTVVKPILDRVIFGK

SEQ ID NO: 1867 - protein, 246 aa, Triticum aestivum
  misc_feature (181)..(181): Xaa can be any naturally occurring amino acid
  misc_feature (204)..(204): Xaa can be any naturally occurring amino acid
MQLNTMSHLPHEPEFEQAYGELASALENSSLFNEHPEYRTALAVAAIPERVIQFRIVWEDDKGNLQVNRGYRVQFNSALGPYKGGLRFHPSVNLSILKFLGFEQIFKNALTGLSMGGGKGGADFDPKGKSDAEIRRFCQSFMTELSKHIGAETDVPAGDIGVGGREIGYLFGAYRKLRNRXWEGVLTGKGLFWGGSLIRPEATXGYGLVYYVDYMLKHANRGSFEGKRVALSGSGHVAQYAALRSS

SEQ ID NO: 1868 - protein, 525 aa, Shewanella sp. MR-7
MLDANLKNQLQTYLQNLKRPVELVVSADESRKSQELKSLANDIVSLSTLVSLKEAQGPRTPAMTVVNPELNTQISFAGLPMGHEFTSLVLALLHTGGHPIKLSDEIIEQIRNLPGKYEFETYVSLTCQNCPDVIQALNMMAAINPNITNVMIDGALFQDEVASRNIMAVPSVYLNGEAFAAGRISIGEILNKLDTGAASRKAEELSQKAPYEVLVVGGGPAGAAAAIYAARKGLRTGVVADKFGGQVAETVGIENFISVKATEGPKLVANLEAHVRDYEVDIMDNQKAVKLASDGLFELELASGAKLRSRTILLATGARWREMNVPGEKEYRGKGVAYCPHCDGPLFKGKRVAVIGGGNSGIEAAIDLANIVEHVTVLEFDSKLRADDVLQRKAASMGNIHIITEAMTTEVTGDGTRVNGLNYTDRATGESHHIALEGIFVQIGLVPNAEWLKGTVDLTPRGEIIVDERGQTSVPGVFAAGDVTNSPYKQIIIAMGSGANASLGAFDYLIRHSDDSTETTATKAA

SEQ ID NO: 1869 - protein, 215 aa, Debaryomyces hansenii CBS767
MSGRKKTLLKVIILGDSGVGKTSLMQQFVNNKFSHQYKATIGADFLTKEITIDNNKQVTLQIWDTAGQERFQSLGVAFYRGADCCVLCYDVTNEKSLNNLSSWKDEFLIQSNVSNPQDFPFIIIGNKIDVDDSKKIPSLQKKLNNITNNQLGGLNYPVFETSAKDSINVELAFEVVAKMALQQEELNDANGNDVSDDYNDAINIHLENDAGGCAC

SEQ ID NO: 1870 - protein, 372 aa, Pyrococcus abyssi GE5
MLKLVENVVERVSAEEQKPQEIQVPQSSIDEELKKIVEQIKARIYVVGVGGAGCNTVNRMMEVGVTGAKIIAVNTDAQDLLKIKAHQKILIGKELTRGLGAGNDPKIGEEAAKESERELREALEGADMVFVTCGLGGGTGTGAAPVIAEMAKKMGALTVSVVTLPFTMEGIRRAKNAEYGLKRLAKASDTVIVIPNDKLLEVAPKLPIQMAFKVADEILVQAVKGITELITKPGLVNLDFNDVRAVMKDGGVAMIGIGESDSEKRALEAAEQALNSPLLDVDISGAKGALISISGADVKLEEAQQIIEYVTRNVDPKAQVIWGIQLEPELEKTIRVMVIVTGVTSRYITFQEETPEPSEEEVPPVKIDIPEL

SEQ ID NO: 1871 - protein, 299 aa, Triticum aestivum
  misc_feature (231)..(231): Xaa can be any naturally occurring amino acid
  misc_feature (244)..(244): Xaa can be any naturally occurring amino acid
  misc_feature (275)..(275): Xaa can be any naturally occurring amino acid
NKFVQKSRLVPVRNSRDIVDPRVRGRVGGVKMLEGNSNCNGEDFISEVSTIGRIHHVNVVHLLGFCSEDMRRALVYEYMPRGSLDKYIFSAEKSFSWDKLIEIALGIARGINYLHQGCEMQILHFDIKPHNILLDSNFVPKVADFGLAKLYPRDKSFVPSRALRGTFGYIAPEMMSRSFGVISSKSDVYSFGMLLLEMAGGRRNADPNTANSSQAYYPSWVYDRLTAQEVXLRNPVDDMHELEXKLCIVGLWGIQMNSHDRPTMREVIEIRKGVXGCKSSKHLMITAFGSTLYPATNPR

SEQ ID NO: 1872 - protein, 378 aa, Agapanthus praecox
MSVAIARDSGEMKGPVVVTGAGGYIGSWLVMKLLQHGYTVRATLRNPSNMKKTKPLLDLPGAEKRLTIWKANLNDEGSFDEAINGSTGVFHVATPMDFDSKDPENEVIKPTIEGMLGIMKSCKKAGTVKRVIYTSSAGTVNVEEHQKPEYNEDSWSDLEFCRRVKMTGWMYFVSKSLAEKAAWDFARENGLDLTTIIPTLVVGPFITSTMPPSMITALSLITGNKAHYSIIKQAQLVHLGDLCDAHILLLNHPKAKGGYICSSNDPTIYDIAKMLREKYPQYDIPQKFKGIDEKIPPVHFSSKKLLQLGFRFKYSMEEMFDEAIKSCIEKKLIPLKTAEEVPELVEEQTAVAKIIVEQAIVTKVNRDGSEERVPIATH

SEQ ID NO: 1873 - protein, 272 aa, Pyrococcus abyssi GE5
MKVIMTTKVDKASMNIMQKLIENFGFKETELKFDGNPVYKKDDMVILTTNDEMIYYDYLDREIEKQLSFKPEIIAFASRHSSKQKLPALTTHVTGNWGEAMYGGKDESFAIAIPSAMKLALLKMNELNDLGWTVCYEATHHGPSELEVPSFFIEIGSSEEEWVNDRAGEIIAETIVYVLDNYENSKFKVALGIGGGHYAPKQTKRALNSDLAFGHILPKYAQPVSRDVILKAINRFHEKVEAIYVDWKGSKGETRQLAKSLAQELGLEFIKD

SEQ ID NO: 1874 - protein, 95 aa, Photorhabdus luminescens subsp. laumondii TTO1
MQLKITGHNIEITDALRDIITAKCSKLDQYFDRINLTQVILRVEKVQQIAEATVHINGGELHASSEHEDMYAAIDGLVDKLARQLTKHKDKLKHH

SEQ ID NO: 1875 - protein, 1268 aa, Vibrio cholerae
MKSLISVPKFSLRSWLMSLWLPLGLLVIGYFVATSKVDQQQQTQAKRISDAVTVRLNLIAAGVQEKVTLYQYGLRGIRTAVMLLSPEHFDYNDMQAYTQARDYKREFPGARGFGLIIKVEPNQTAAFLDRMAAERPSYNFQIRQLTPHQDSLFVITYIEPEQNNREAVGVDIGSEAMRRKAALDAAFNNDVRLTAPITLVQANERAQQGFLILMPVYKTTTVPQDSRQRLEHLFGWSYATILINDVLNSVAGLENDVFLQISDITEQTPIEFFSQEVKDTYDAALQQKLNLSVFGRQWQLSLTPTNRFINELQLRSGTSLFFEVMAVSTILAFGVYLLQLMLMRRSQLIRHKQELASIAEQTLLKANAELEQQVALRTAEISRVNILQRSILSSAGYAIIATDEEGIITAFNPAAEKLLGYRAEEVLFQQTPSIFHLPAEVEHHAAKLTTELGSNIAVGFETLVAKARLGQTDNARWTYLTKTGEQVQVKLNVSALKDEQGQLAGFLSIAFDLTKQLKYEAELAQAKEQAESANKAKSEFLANMSHEIRTPMNGVLGLLQLVANSTLDQRQADYIEKAYSAAKSLLTLLNDILDFSKIEAGKLELDPHPFSLTDLMQDIGLVFSSSAEQKGLEVLYDVTADVPEHLLGDSFRIKQVLINLVGNAIKFTDKGEILISIRSQSLPEGEINLSFSIKDTGIGITLEQQNALFSGFQQADSSISRRYGGTGLGLAISKRLVNLMGGEIGVESEFGCGSTFSFNVVVRNAEKRAIQNSQTFTRSNEKLSVLIVDDNDSSRIILQGIAVSLGWQAKIASDAQEASLLVKQAHRDSTRYDVVFVDWRMPGKDGLTFARELRELHSSVVSLIVMITAHGKELLDEQNNDYERYLDGFLIKPVTKNMMLQAVKSVVFGDLDLSLPTSPLPHELPLQGISLLLVEDNLTNQLVASELLQQLGATIKIASSGEEALEMLESTAEHFDMVLMDIQMPGMDGYQTTREIRKLPRHQLLPIIAITAHAMSDDIAACLAAGMQDHIAKPFDLNELTTKILSHHKAEKAPHVKQVNKSNLNFDQAALAFCQQHHIELEAAVQRLGYSLTIYVNVLKQFEQDLRQALQQLEDKTLTRRNARLLFHSLKGAAGTLGFSNLAKLTARLEDELREHSDDGYQVDNNVLDILKLTLNTATDLVKLLQVEQQIATAQAPVSRTEQAAQLMTLKQHLNLANMAALPLYQQLAPSLQAQTPELNKELEEALVNLTFEQAVVIVDKMLSQFKE

SEQ ID NO: 1876 - protein, 1682 aa, Oryza sativa (japonica cultivar-group)
MAARRLTSRVAVVDEDRCKPNKCGQECRRSCPVVKIDLTFRVVGSIALISEELCIGCGICVKKCPFGAITIINLPKELDKDTTHRFGQNSFKLHRLPVPIPGQVLGLVGINGIGKSTALNILAGQIKPNLGRYDKIRGGGSLLSDKRSVSLHFLGDGILGPYPCAGIASCSSISTVTPIASQPWILDSGASFHMSFDDSWLTSCRLVKNGATVHTANGTLCKVTHQGSISSPQFTVPNVSLVPKLSMNLISVGQLTDTNCFVGFDDTSCFVQDRHTGAVIGTGHRQKRSCGLYILDSLSLPSSSTNTPSVYSPMCSTACKSFPQWHHRLGHLCGSRLATLINQGVLGSVPVDTTFVCKGCKLGKQVQLPYPSSTSRSSRPFDLVHSDVWGKSPFPSKGGHNYYVIFVDDYSRYTWIYFMKHRSQLISIYQSFAQMIHTQFSSAIRIFRSDSGGEYMSNAFREFLVSQGTLPQLSCPGAHAQNGVAERKHRHIIETARTLLIASFVPAHFWAEAISTAVYLINMQPSSSLQGRSPGEVLFGSPPRYDHLRVFGCTCYVLLAPRERTKLTAQSVECVFLGYSLEHKGYRCYDPSARRIRISRDVTFDENKPFFYSSTNQPSSPENSISFLYLPPIPSPESLPSSPITPSPSPIPPSVPSPTYVPPPPPSPSPSPVSPPPSHIPASSSPPHVPSTITLDTFPFHYSRRPKIPNESQPSQPTLEDPTCSVDDSSPAPRYNLRARDALRAPNRDDFVVGVVFEPSTYQEAIVLPHWKLAMSEELAALERTNTWDVVPLPSHAVPITCKWVYKVKTKSDGQVERYKARLVARGFQQAHGRDYDETFAPVAHMTTVRTLIAVAATRSWTISQMDVKNAFLHGDLHEEVYMHPPPGVEAPPGHVFRLRRALYGLKQAPRAWFARFSSVVLAAGFSPSDHDPALFIHTSSRGRTLLLLYVDDMLITGDDLEYIAFVKGKLSEQFMMSDLGPLSYFLGIEVTSTVDGYYLSQHRYIEDLLAQSGLTDSRTTTTPMELHVRLRSTDGTPLDDPSRYRHLVGSLVYLTVTRPDIAYAVHILSQFVSAPISVHYGHLLRVLRYLRGTTTQCLFYAASSPLQLRAFSDSTWASDPIDRRSVTGYCIFLGTSLLTWKSKKQTAVSRSSTEAELRALATTTSEIVWLRWLLADFGVSCDVPTPLLCDNTGAIQIANDPIKHELTKHIGVDASFTRSHCQQSTIALHYVPSELQVADFFTKAQTREHHRLHLLKLNVDPPDWHEILAYFHGSELQNYFKRMVEDNLKPIMKPQVEIMHKNRNSFQVSVGQLLDRKDERGMKDQLCNGLQLNEVIDRKVAKLSGGELQRVGIAAAALQSADVYMFDEPSSYLDVKQRLNAARVIKSLLRTNSFKKFTIICLPNFVFSYVIVIADAQEDAEIKTYQRYKYPTMSKTIGNFKLTVMEGEFTDSQIFVMLGENGTGKTTFIKMLAGVEKPDTVDGIDIEVPEFCVSYKPQKLASTYQGTVRQFLHEKIRDSYTHPQFVSDVMKPLKMQQLMDQEVQHLSCGQLQRVALCICLGKPADIYLIDEPSASLDSEQRLVASKVIKRFIMHAKKTAFIVEHDFIMATYLADRVIVYEGQPAVDCTANAPQSLLSGMNKFLSHLEITFRRDPTNFRPRINKLDSAKDREQKSAGSYYYL

SEQ ID NO: 1877 - protein, 379 aa, Lepocinclis ovum
IGHVDHGKTTLTAAITMTLAATGNSKAKKYDEIDSAPEEKARGITINTAHVEYETANRHYAHVDCPGHADYVKNMITGAAQMDGAILVVSGADGPMPQTKEHILLAKQVGVPNIVVFLNKEDQVDDKELLELVELEVRETLNNYEFPGDEIPVVSGSALLSVEALTQNPKLKKGENKWVDKILDLMDQVDSYIPTPSRDIEKDFLLAVEDVFSITGRGTVATGRIERGKVKVGEIVELVGLKPTRSTTVTGLEMFQKSLDEALAGDNIGILLRGIQKNDIERGMVVAKPGTIKPHVKFDSQVYILTKEEGGRHTPFFEGYRPQFYVRTTDVTGKIESFRADDESPTQMVMPGDRVKMQVELIQPIAIEKGMRFAIREGG

SEQ ID NO: 1878 - protein, 501 aa, Matricaria chamomilla
MATSNSMITILIFLTYVSYSISTKTLPSEFSILEGQENDILSSAKVSDLFGKWKELHGKTYQHEEEENLRLENFKKSVKFVMEKNSERKSELDHTVGLNKFADLSNEEFKEMYMSKVKGSRSNELKMGGVKRNMSVSSRTCDAPTSLDWRDKGVVTPMKDQGQCGSCWAFSVSGSIESANAIATGDLIRLSEQELVDCDTYDYGCDGGNMDTAYRWIIKNGGLDSEDDYPYTSSNGRDGKCDKTKSAKSVVSLDSYVEVESNEDAVLCAVATTPVTIGIVGSAYDFQLYTGGVYNGQCSSKPYDIDHAVLIVGYGSQDGKDYWIVKNSWGTYWGLEGYILMERNTDIKNGVCGMYLEPVYPITAAPTPPGPPPPPAPPSPPHPPPPPTPPAPSKCGDFHYCAADQTCCCIFEFYNYCLIYGCCGYSDAVCCKNSAACCPSDYPICDVQAGYCYKNSAKTFGVPAKKRQLAKHKMPWEKIEETIKEEFQPLAWNRNPFAAAA

SEQ ID NO: 1879 - protein, 306 aa, Mycoplasma genitalium G37
MRPFISTIKEFQRLTYLCINKKLDVLFYIRQNKMSFDGKLKAQSILETYKNFDWSKCKLVIIQANDDDSSDSFIKQKLIACNTVGAKSELIKLSNQITQAELIEKIISLNHDVNVTGIILQLPVYPHLDKNSLLEAINPLKDVDGLTTNHLAEIKPCIVEAIITLKELFNLEFNNQKIVVVGLGITGGKPIYEFLKTSGYKVQACDKDTPNTFELIKSADIVFTAIGKSHFFQAKNFKKGVILFDIGVSRNKQNKLCGDINPEGIEKKARWWTKTPGGVGPFTVLAIIKNLWILHEKNKRCLQSSI

SEQ ID NO: 1880 - protein, 370 aa, Rhodospirillum rubrum ATCC 11170
MPVSKKILFLAGDGIGPEVMAQVRRVMDWLNQTGRTAFEVEDALVGGAAYDAQGTPLHDDTVALALAADAVLLGAVGGPKWDASLPFELKPERGLLRLRKDLELFANLRPAMVFDALAEASTLKTELVSGLDVMIVRELTGGVYFGQPRGISALPNGERRGVNTQVYDTHEIVRVAKVAFDLAGKRGKRLCSVEKANVMESGLLWREEVTKLGADYPEIALSHMYADNCAMQLVRQPKQFDVIVTDNLFGDILSDCAAMLTGSLGMLPSASLGAADAAGNRRAMYEPVHGSAPDIAGQDKANPLATILSFSMMLRYSFDLAEEADLVDNAVRGVLAKGLRTGDIFQPGKTLVGTTGMGDALLAEMAQLAN

SEQ ID NO: 1881 - protein, 380 aa, Shewanella sp. MR-7
MDTKTMNISTMQNIMPSPALSSAPASVVGFSQLVCVERWNETADVVSFRFQAGEPMKFDYKPGQFMTLVLEINGEQACRSYTLSSTPSRPYSLMLTIKRVDGGLVSNYLIDHLQPGQTVRVLPPTGQFNLFDIPAKKYLFLSAGCGITPMYSMSRYLTDSQMNADIAFVHSARTQADIIFKTSLETMATRHRDFKLRYIVEDVTADTAWHPEAVLHDIGRLSADNLRDLVPDFAERTVFLCGPEPYMQAVKTILAELNFDMTQLYHESFATAVKEAQSRVRQAEMQTEAPVSGGNSFMLSIGDKKRALTTDQTLLEGIEAEGLPIIAACRSGVCGACKCKVLEGETESTSSMTLTPAEIEAGYVLACSTKLKSDVTLSLT

SEQ ID NO: 1882 - protein, 513 aa, Rubrivivax gelatinosus PM1
MADKLIIFDTTLRDGEQSPGASMTKDEKLRIARQLERLRVDVIEAGFAASSNGDFEAVRAIADVIKESTVCSLARANDRDIARAAEALKSAARSRIHTFIATSELHMEKKLRMTREQVLEQARLSIRFARNLCEDIEFSPEDGYRSDPDFLCRVIEAVINEGATTINVPDTVGYGIPELYGNFIRTLRERVPNSDKAVWSVHCHNDLGMAVANSLAGVKIGGARQIECTINGLGERAGNCSLEEVVMAVRTRRDHFGLEVGIDTTQIVPASRLVSQTTGFIVQPNKAVVGANAFAHASGIHQDGVLKARDTYEIMRAEDVGWSANKIVLGKLSGRNAFKQRLQELGIELESETDVNAAFARFKDLADRKSDIFDEDIIALVGDESVTHEQETYRLLSLEQQSATGERPHAKVAFAVGETEFHAESEGNGPVDASLKAIESKLKSGAEMLLYSVNAITSGSTESQGEVTVRLQHGGRVVNGVGADPDIVVASAKAYLSALNKLHSKNERVAAQG

SEQ ID NO: 1883 - protein, 430 aa, Brucella suis 1330
MGVEVTRLPNGLTIATDTMPHVESVALGIWVKVGARNEAPDRHGIAHLLEHMAFKGTENRTAWQIASDIENVGGEINAATSVETTSYYARVLRNDMPLAIDILSDILTASKFDEGELEREKQVIMQEIGAAHDTPDDIVFDRFTETAYRHQPIGRAILGEPETVMSFTSDDLRQYMQEQYSVDRMVVTAAGGIDHDEFVREVEKRLGSFRPHNTAPTLDLAHYVGGDFRENRELMDAQVLIGFEGRAYHVRDFYASQLLSMILGGGMSSRLFQEVREKRGLCYSVYAFHWGFSDTGLFGIHAATGRDELVELVPVIIDELHKAADSIGIEEVDRARAQYRASLLMSQESAASRAGQIARQFLLYGRPVENSELLDRLSLITPERLTDLAGRLFLNNKPTIAGVGPVGCLMSFDRLTDALSTNAHTRKIAV

SEQ ID NO: 1884 - protein, 263 aa, Burkholderia sp. 383
MSAELLASRPPESESTLVLTLSNPGARNALHPDMYAAGIEALATAERDPGIRAVVLTGADRFFCAGGNLNRLLDNRSKDPSYQADSIDQLAAWVAAIHASTKPVIAAVEGAAAGAGFSLALACDLIVAAHDAKFVMSYARVGLTPDGGGSWFIARALPRALAAEILFEGKPVAAERLHTLGVVNRLAVPGAALTDALAWADALAGISPNALTRIKSLLDDATMQPLDAHLATERDHFVASLHHADGLEGITAFLEKRPPRYKR

SEQ ID NO: 1885 - protein, 319 aa, Bacillus subtilis subsp. subtilis str. 168
MKRIGVLTSGGDSPGMNAAVRAVVRKAIYHDVEVYGIYNGYAGLISGKIEKLELGSVGDIIHRGGTKLYTARCPEFKTVEGREKGIANLKKLGIEGLVVIGGDGSYMGAKKLTEHGFPCVGVPGTIDNDIPGTDFTIGFDTALNTVIDAIDKIRDTATSHERTYVIEVMGRHAGDIALWAGLAGGAESILIPEADYDMHEIIARLKRGHERGKKHSIIIVAEGVGSGVEFGKRIEEETNLETRVSVLGHIQRGGSPSAADRVLASRLGAYAVELLLEGKGGRCVGIQNNKLVDHDIIEILETKHTVEQNMYQLSKELSI

SEQ ID NO: 1886 - protein, 489 aa, Mycoplasma hyopneumoniae 232
MNFKRNYIQSFYANEFHSEENPKTLDIFSPYDGSVLAKLEITSTSTLDKIVAQAKIAQEKWASLTFKKRSEVIYKYRELVIRYKQELAHLIHIDNGKTLKEAVAEVEKVVELTEFACSIPQLVSGETQMVSRGIIAREERRPVGVFGIIAPFNFPLMVPNWSIPNAIALGNAVILKGSELCGLSASFMADLWKQAGLPSGIFNLVNGQSEIANAMINHPQIDGITFVGSTEIAKLVHKNASNLNKRVLALGGAKNHIFVLKDAPIETASSEVLAAALGMAGQRCMAASVALVVGQNEEFIQALIEKARKFKLDFDLPPLVSKASVDKLVTYLNWAKEQGAKILVNGITDFLIPENKKEGFWFGPTIIDWSEIPEKMGSQEVFGPILEIIRTKNLSEAIKIQQKSPYGNAASVYTQSGRAAEEIIAKVKPGMLGVNIGVPVPREPFSFGGTRSSKFGYGDITGKSSINFWTNLIKVTTKWNPEDKQDWMS

SEQ ID NO: 1887 - protein, 474 aa, Rhodococcus ruber
MTAGHFTELYINGSWVASTSKTVIEVLNPATEEVIGTVPDGTAADVDAAVAAARAAFDGWASTPVDKRAQYLRAIAAGIADRSDELARTISAEMGAPLSFAQAMQVPLPINSFSHAAAVAESFPFERTEGSSVIVREPIGVVGAITPWNYPLHQIAAKVAYALAAGNTIVVKPSEVAPLNAWMLAEIIDAAGVPAGVFNLVSGTGPVVGEALASHHEVDMISFTGSTNAGKRVSELAAQTVKRVALELGGKSANIVLDDADIDELMPNAVQWAMINSGQTCSALTRLLVPRAILTEAETAAKTIAEAYTVGAPDDPDTTLGPLVSATQLKRVRGYIDRGVQEGATLITGGSEPVEGLAVGYYVKPTIFSEVTPDMTIHREEIFGPVLSIAPYDTEEDAVRIANDSEYGLRGGVWSRDVDRARAVAARMRTGQVMINGGEFNPNAPFGGYKQSGTGREFGTHGLEEFLEIKSLQF

SEQ ID NO: 1888 - protein, 192 aa, Glycine max
MATMVALSSFAVVGWSATRSPVAAPRRRALVVRAQTEPGMESTKETTSASTSSSSPSTSAAPTPIPAAPKPMTKKANPSVWDALAFSGPAPERINGRLAMVGFVAALTVEAARGGGLLDQAGSGAGLGWFLVTAGVFSVASLVPLLQGQSVESKSSGFWSADAELWNGRFAMLGLVALAATEFITGAPFVNI

SEQ ID NO: 1889 - protein, 229 aa, Zea mays
MAASLLHAAAASLQSSTQHARAGAAAFHPLACAPSLRLTRSSFSTNRHLEISLRAISASRRFAGRGAPRDRHVVAALAGEQTEGSEVGDDRNGEIKPEEAQEIWKVMLEQFKAEALRMQALSMQAYDVYSERTREVLLEASEKLKIQADKAQKDLSVVATEIGQEGQEYLMMAARNSPDSIKDITTTFRALGKLNWPSEYEDYHVGIPFGTFLTAGGFLNFMSFVTYIV

SEQ ID NO: 1890 - protein, 551 aa, Bordetella bronchiseptica RB50
MSNIVEIKVPDIGDFKEVEVIEVLVSAGDTIKAEQSLITVESDKASMEIPASAAGVVKSVKVKVGDKIAEGTVILEVEAAGEAAAAPKAEQAPEAAEAPKADAAKAEAPQAEAPAAAGPIEVKVPDIGDFKEVEVIEVLVAEGDTIKAEQSLITVESDKASMEIPASAGGVVQSLKVKVGDKVAMGTVIAVVQGQGAAAPAAKAEAPAAAPAAAEPAAPASPAAPAPAPAQRPAPAAALQDEDLKPGQLPHASPSVRKFARELGVNLSRVTGSAAKGRITADDVRAYVKQALSAGAPAGASGGGDGAALGLLPWPKIDFTKFGPIEAKPLSRIKKISGANLHRNWVMIPHVTNNDEADITDLEALRVALNKENEKSGVKVTMLAFLIKAVVAALKKFPEFNASLDGDNLVLKQYYHIGFAADTPNGLVVPVVRDADKKGILELARETSELARKAREGKVSPAEMQGGCFSISSLGGIGGTHFTPIINAPEVAILGVSRSAHKPVWDGKQFVPRLTLPLSLSYDHRVIDGASAARFNAYLGQLLADFRRIAL

SEQ ID NO: 1891 - protein, 498 aa, Solanum tuberosum
MAKKRKTRASEPSQPVEEPVEIKQEPEVETAQEEEYENDAVEVEEEEAVHEDEEEQDPEEEDEEGGDDEEEEEEMPGSGNDAVEDDNEKSVNEQEQVNGGAEVKMEEGNEEDLEDEPLENLLEPFTKDQLTALIKEALAKYPDFKENIQKLADKDPAHRKIFVHGLGWDTTAETLTSVFATYGEIEDCKAVTDKVSGKSKGYGFILFKHRSGARKALKEPQKKIGTRMTSCQLASAGPVPAPPPTTATPPVSEYTQRKIFVSNVAADLEPQKLLEYFSKFGEVEEGPLGLDKQSGKPKGFCLFVYKTVEGARKALEEPHKTFEGHTLHCQKAIDGPKHSKNFHQQQQPQSQQHYPQHHHHNQQQHYYQHPAKKGKYSGSSAGAGSAGHLMAPSGPAPVGYNPAVAAVTPALGQALTALLATQGRWFGDWEFAWRSWWASESSGVQPVVNNAAGYGAQVDMEFSLICNTKTLRCRWCKTTRWWCPILWLWRSLGKLRYL

SEQ ID NO: 1892 - protein, 578 aa, Kineococcus radiotolerans SRS30216
MPDAAVSRPVLMTVDDDPAVSRAVARDLRRRYGQAYRVLRADCGDDAIAALREVKLRGGTVAAVLADYRMPQMDGVQLLEQAMDLFPTARRVLLTAYADTSAAIRAINDVDLDHYLLKPWNPPEEKLYPVLDALLESWHAAPPRPADEVVVIGDRWSARSFAVRDFLARNEVPYRWLRVDEAEAGRLLEAAGLGWTDDLGRLEGPIRLPVVLTPPRPGTSAAEGGRPAVLVDPDDTTLAEHVGLSTRPARDFYDVAIVGGGPAGLGAAVYAASEGLRTVMIEERATGGQAGQSSRIENYLGFPDGLSGAQLADRARRQVAKFGAETLSARSVTRLEVSGSARVLHFTDGTSVAAHTVLLATGVAYRTLQGPGVEQYTGRGIYYGAALSEANACADEDVFVVGAANSAGQSAVNLARSARSVTMLVRGPSIDASMSSYLIEQIAQRPNIRVLTCTEVVQARGGEHLSSIVLRDRAGGDEREVAAQHVFVFIGAEPRTSWLDGVVERDAKGFIVAGPDLHREGDRPPGWVLDRAPYHLETSVPGVFVAGDARAESVKRVASAVGEGAMAVMLVHRYLAQS

SEQ ID NO: 1893 - protein, 480 aa, Medicago sativa
MSLPPPIPPPSLATPPKARPTELPIRQIPGSHGWPLLGPLSDRLDYFWFQKPENFFRTRMEKYKSTVFRTNVPPTFPFFTNVNPNIIAVLDCKSFSHLFDMDLVDKRDVLVGDFVPSVEFTGNIRVGVYQDVSEPQHAKAKNFSMNILKQSSSIWVPELISNLDIFLDQIEATLSNSSSASYFSPLQKFLFTFLSKVLARADPSLDPKIAESGSSMLNKWLAVQLLPTVSVGTIQPLEEIFLHSFSYPYALVSGDYKNLYNFIKQHGKEVIKNGTEFGLSEDEAIHNLLFVLGFNSYGGFSIFLPKLIESITNGPTGLQEKLRKEAREKGGSTLGFDSLKELELINSVVYETLRMNPPVPLQFGRARKDFQLSSYDSAFNVKKGELLCGFQKLVMRDPVVFDEPEQFKPERFTKEKGAELLNYLYWSNGPQTGSPTVSNKQCAGKDIVTFTAALIVAHLLRRYDLIKGDGSSITALQKAK

SEQ ID NO: 1894 - protein, 374 aa, Aspergillus oryzae
MSSQPAEAAPPTSATNAVLVASEPVPEGTHQVQGVDFERFQGRDITVAEMVDNMRYMGFQGTAVAEATRIMNDMRAYRHPESGEKTTIFLGYTSNLISSGLRDTIRYLVRHRHVSAIVTTAGGVEEDLIKCLAPTYMGSFTAPGAGLRAKGLNRIGNLLVPNSNYCAFEDWLIPILDKMLEEQEAAKKKAQQTGDEEDELHWTPSRIIERLGREINHEDSVLYWAARNNIPIFCPALTDGSLGDMLYFHTFRSSPQRLRVDIVDDVRRINTMAVRAARAGIIILGGGVVKHHIANACLMRNGAEHAVYVNTAQEFDGSDAGARPDEAVSWGKIKADAKAVKVYAEATVVFPMMVAASFARADQSSANAADQAQN

SEQ ID NO: 1895 - protein, 112 aa, Pseudoalteromonas tunicata D2
MKKIEAIIKPFKLDDVREALSEIDITGMTVCEVKGFGRQKGHTELYRGAEYMVDFLPKVKLDIVLADEDVDRAIDVIIKTAQTGKIGDGKIFVTDIERVVRIRTGEEDEAAI

SEQ ID NO: 1896 - protein, 480 aa, Xylella fastidiosa 9a5c
MSFLPSFLKRKSIDLITVHEEGRRLVPTLSWPHLIALGIGAIVGTGIYTLIGVGAEKAGPAILLSFVIAGVICACAALAYAEMATMMPVAGSTYTYSYVALGEGIAWIVGWSLILEYSLVVSTVAVGWSGYMSGFLKSVGVDMPLALTAGPYAGGIINLPAVVITCVVAGLLIVGTKESTTLNAVLVVVKIIALSVFVVIALPHFDMAHLKPFMPYGFTKSIDTGGVERGVMAAAAIIFFAFYGFDAISTAAEETKNPSRDLSIGIIGSMIGCTLIYVLVALAAIGAMHYTVFGPSTEPLALILRQLDQGNTARLIGAAAIIALPTVLLAFLYGQSRILFVMSRDGLLPRGLSTVNARTGTPIATTLFTAILVATAAGLVPLGEIAALANAGTLTAFIAVALCLLVLRVREPQRVRAFRTPLAWVVGPIAIAGCLYLFWSLPKMTQSLFLLWNALGLCVYLVYGRHTSLLSKAVSIDTPR

SEQ ID NO: 1897 - protein, 480 aa, Medicago sativa
MSLPPPIPPPSLTTPPKARPTELPIRQIPGSYGWPLLGPLSDRLDYFWFQKPENFFRTRMDKYKSTVFRTNIPPTFPFFTNVNPNIIAVLDCKSFSHLFDMDLVDKRDVLVGDFVPSVEFTGNIRVGVYQDVSEPQHAKAKNFSMNILKQSSSIWVPELISNLDIFLDQIEATLSKSSSASYFSPLQQFLFTFLSKVLARADPSLDSKIAESGSSMLNKWLAVQLLPTVSVGTIQPLEEIFLHSFSYPYALVSGDYNNLYNFIKQHGKEVIKSGTEFGLSEDEAIHNLLFVLGFNSYGGFSIFLPKLIESIANGPTGLQEKLRKEAREKGGSTLGFDSLKELELINSVVYETLRMNPPVPLQFGRARKDFQLSSYDSAFNVKKGELLCGFQKLIMRDPVVFDEPEQFKPERFTKEKGAELLNYLYWSNGPQTGSPTVSNKQCAGKDIVTFTAALIVAHLLRRYDLIKGDGSSITALRKAK

SEQ ID NO: 1898 - protein, 346 aa, Mycobacterium sp. KMS
MIADVDSPSEPRTVRLTVTDVIEESHDARSLVFAVADGARFDYRPGQFLTLRVPGEQGGAVARCYSLASSPHTDAAPKVTIKRVDGGYGSNWLCDNVVAGQVIEALPPSGVFTPGDLDRDLVLWAGGSGITPVMSILKSALAVGSGRVVLVYANRDERSVIFAAELRDLTARHPDRLTVVHWLESVQGLPRQDQIATLARRFTGGEAYLCGPAPFMAAVQAALAEAGVPRDAVHTEVFRSLTGDPFAEVAPVPVDGDAADLQVELDGGKHSLRWPRQATLVDAMIAAGLDVPYSCREGQCGSCAATLLRGRVDMPDTEILEPEDIEAGTILGCQARPASDEIHIEF

SEQ ID NO: 1899 - protein, 1193 aa, Cryptococcus neoformans var. neoformans JEC21
MSSPTSTSPKSSFVFSPTSFPHAAIASNNVRPRTNLPPPPPPDRIPPPKGRSHQQKFKILRKEKDKDRRQPIDLEDDWTIEDVTVNGDGVEQESQYLDDLQPEENELKPGPRFLEMANREEKKEKTSKSRGLVKKTSRLFGRDKDKDRGKPEEPAVTGSSSSTLAAMRQSSSTSTDSTTSRSITSAFTRQNSIQSRRSPRTSFGQAHSRRASQDSQMSWPAPRSIRSSTTSHDPSSDPQNSASSTGVPIPQRQGASMSSLSRYSLPHPNGGTSRSPDTFPNKMSTWFSHLLPVSSGSPPSSSYETSSSIRKQSSVAASLFNAARQKAVDGVRHLLDSEAQPDKCMDTIWVRGVAHPGWRPITPENSTSNLPALEPGGSGGGVEDRRASLSMNGPSPNSLRPSSWKRNTSLPPTGQPQSPAHVHTQASNQTTSPSKGFTGIWNPSTLSLGMPIGGSPNKEKENGSGAESPSKKKSKEIVKWPEQFYDDFKSTVWFTYRNQYAPISSLSPNLLIPSPEAYYASFGPPLDATSPSSLRVTTPTAAAQQSASGSGGWGWSKEERGLTSDAGWGCMLRTGQSLLVNALIHIHLGRDWRVPSTPASFSEATTTQEIAALKDYAKYAQMLSWFLDDPSPLCPFSVHRMALIGKELGKEVGEWFGPSTAAGALKTLANSFAPCGVAVATATDSIIYKSDVYTASNLPSDDWNSISPTFNSSKKKRRGDNEAKEEKWGKRAVLILVGVRLGLDGVNPIYYDSIKALFTFPQSVGIAGGRPSSSYYFVGSQANHLFYLDPHLTRPAIPLQIPPLPVHSAKEKGSTESSSIMSTAEEESEEGVMIRTPETPRSTTPSMFSAPEHVEDEDQEEWGQGSKYKLDVVDADGVEVEGIDDDKGRNEGKMIREEVPKSSFESNGAAQEQPKKQKGFTSTASIDSQVDSQVDPHMLWYTTAYPDPLLRTYHCEKIKKMPLSGLDPSMLLGFVCKDEDDFEDFVERVAQLPKKIFTVQDEMPSWEEDDDAGLESVSEPDFEGDEFEEPGTAKPRFDSSSPVNEDSLKGPRVVSASTTATPLAAKEEDHLDVEEANSTDDDNESIGTTTAAGPMDIARHLNRVDLSSKREQEGDDDDGEWVGGTPSSQGVLVEPPSLKGTPSKSRSSAFEPRYEQNGETEQERPVFPARNRMESWVEPVCEGKEAPNGDNLL

SEQ ID NO: 1900 - protein, 480 aa, Medicago sativa
MSLPPPIPPPSLATPPKARPTELPIRQIPGSHGWPLLGPLSDRLDYFWFQKPENFFRTRMDKYKSTVFRTNVPPTFPFFTNVNPNIIAVLDCKSFSHLFDMDLVDKRDVLVGDFVPSVEFTGNIRVGVYQDVSEPQHAKAKNFSMNILKQSSSIWVPELISNLDIFLDQIEATLSNSSSASYFSPLQKFLFTFLSKVLARADPSLDPKIAESGSSMLNKWLAVQLLPTVSVGTIQPLEEIFLHSFSYPYALVSGDYKNLYNFIKQHGKEVIKSGTEFGLSEDEAIHNLLFVLGFNSYGGFSIFLPKLIESIANGPTGLQEKLRKEAREKGGSTLGFDSLKELELINSVVYETLRMNPPVPLQFGRARKDFQLSSYDFAFNVKKGELLCGFQKLVMRDPVVFDEPEQFKPERFTKEKGAELLNYLYWSNGPQTGSPTVSNKQCAGKDIVTFTAALIVAHLLRRYDLIKGDGSSITALRKAK

SEQ ID NO: 1901 - protein, 571 aa, Buchnera aphidicola str. APS (Acyrthosiphon pisum)
MEILSGAEMVVRSLIDQGIQHIFGYPGGAVLDIYDALKTVGGIEHILVRHEQAATHMADGYSRSTGKTGVVLVTSGPGATNAITGIATAYMDSIPMVVISGQVASSLIGYDAFQECDMIGISRPIVKHSFLVKKTEDIPIVFKKAFWLASSGRPGPIVIDLPKDILKKDNKYLYKWPDNINIRSYNPTTKGHIGQIKKALHTLLKAQRPVIYAGGGIISSNSSEELRIFAEKINCPVTTSLMGLGSFPGTHDQNISMLGMHGTYEANMTMHHADVIFAIGVRFDDRTTNNLNKYCPNAIVLHVDIDPTSISKTVSANIPIVGDAKHVLQKMIELLKKEKKISLLEDWWNTIKKWKKINSLQYNQLSNKIKPQTVIKTLFKLTKGTSYITSDVGQHQMFTALYYPFNKPRRWINSGGLGTMGFGLPAALGVKLALPKETVICITGDGSIQMNIQELSTARQYNLAVLILNLNNSSLGMVKQWQDMIYSGRHSHSYMDSLPDFVKLSESYGHFGIQITEPIELEEKLMLALSKLSDGHLVFVDVQIDNSEHVYPMQIQGGGMNEMRLRKKEVA

SEQ ID NO: 1902 - protein, 339 aa, Vitis vinifera
SARAMFHGRGGTVGRGGGPPILLYCLSPPDTIHGSLRVTVQGEVIEQSFGEEHLCFRTLQRFTAATLEHGMHPPVSPKPEWRALMDEMAVIATKEYRSIVFQEPRFVEYFRLATPELEYGRMNIGSRPSKRKPSGGIESLRAIPWIFAWTQTRFHLPVWLGFGGAFKHVIGRDPRNLPMLQQMYNEWPFFRVTIDLVEMVFAKGDPGIAALYDRLLVSEELWLFGKRLRTNYEETKRLLLQIAGHRDLLEGDPYLKQRLRLRDAYITTLNVCQAYTLKRIRDPNYHVMERPHLSKEIMESSKPAAELVKLNPTSEYAPGMEDTLILTMKGIAAGLQNTG

SEQ ID NO: 1903 - protein, 414 aa, Arabidopsis thaliana
MATHSSRSENKDAGEEDELRRRNPYEVLGIPSNSTDQEIKSAYRRMALRYHPDKNPDDPVAADMFKEVTFAYEVLSDPENRRLYDTTGSEAVGPENEDLELDLSSLGAVNTIFAALFNKLGVQIKTTVSANLLGEALNGTVTTLPLMVGQVVSRKVEKQSAHFYSVTLTEEEAQDGLICKVHSSAKNKFKLLYFDQVENGGLSLALQEDSRKTGKLSTAGLYFFGFPVYRFDHRVNSRALSRDPETGFFKRLDAFQPFEITELKAGSHVFAVYGDNFFKSVSYTLEIFSSAPFGNEKESLRSTEAQIVSKRTELLKFESEYHEVFAQFTEMASKCTGEVQEIDELLKRRNEICAAYTIFPPTKQGSSKSRSWSKKKSSLLMEPREEGEVAVREEGGVKKKKWYNIQLRQDKKKN

SEQ ID NO: 1904 - protein, 1212 aa, Candida albicans SC5314
MNNQDPDSQYHNKKVYPPNLPSIPPPPQQPLSGRPATPRMLRSISGTLKSKTELAHSDKGQESNNETKNSNSPHYVPDTHTRQPPPESLKSNIQAPTAVHGNQQKGSLLPPPSIPNPNTMKPAPTPTGVDQPPAKQKPSPAPKQPQPQQQQQQQQQQQFHRKSIGDWNFVKTIGAGSMGKVKLAQHNATHEICAVKIIPRAAKLYQRAHANDPPPQTTQEAAQRHKEFEKEVARDRRTIREGALGRLLYHPFICRLYEMVPMTNHYYMLFEYIEGGQMLDYIVAHGSLKERHARKFARGIASALDYCHRNNVVHRDLKIENIMINEKGDIKIIDFGLSNLYAPKNLLKTYCGSLYFAAPELLSAKPYIGPEVDVWSFGVVLYVLVCGKVPFDDQSVSVLHEKIKKGNVEYPAFLSRECVSLLSRMLVVDPTKRASLYEVCSHPWMNKGYDYKVNNYLPRREPLRLPLDPEIIKTIANFELGTVQGVADELTSILTSVEYQMSCENWYKITETGREYASSQNAQILPDPTGGFHPLVSIYYLVDEMRKRKKAKEEALKAQRRAQVPTIAVPTPKQQQQQQPQPAQPQPQPQPEVSQPLPEPKPVPPEEIINPAVATQAQANMTAPKIVETFSETPQRTLDPSKQSVDEKPSAPGPSIAVPEQAHTTSVPSSFVKTQTSIDEDQLSIPEQQSPRTSTPQTLDPAKVVGGSSGSAISAPNAGSGAGFNSLLRRLSSKKYKGASSPKRSTSPSPNVEGLSPQPTKADPMVRRGVSMKVTAKEKQTNTRPPKSELIKKKPQHGRSSSTSNKMQGFIPVEYLPPLPTIDTNTNTIVSDGAKQQNLTVPSTARHMHPTARAKSVGGGHMRKDSYGRVSHGSQNPLPPLPTSMASQNSQEVVGKDTSEGFFDDVQLDDVGYQEVPQLTESEIIEQYNISKPNSMPSIEHCKTLFLKGFFSVQTTSAKPLPVIRYNIINVLSKLGVKFQEVKGGFVCMHTPSVQPSHSNELDEENKLYGDAFKSKSSDSFEAAEPEGSKTPSRQPSLQLPSHTPTTPSGPKSHKSSNSIGSIGGNVPRRKFSIGNAFNTYRKKNGSQVMMPPNTPATAKVIHGLYDDDDKERNGEDDDDEDDYGYDDSADSLNGYGGGSDMLISSRIEQRAKHQRTVSSSSQKASKSPLKFEIHIVKVPLVGLYGVQFKKILGNTWNYKTLASQILNEMNL

SEQ ID NO: 1905 - protein, 1118 aa, Shewanella sp. MR-7
MGLKYMAFDWFSQFFISSQDSLLLNVYYNPLLVTISILIAIFSAFMAFQVTTQAVLSQSKSRQQIMLLTGSVVLGGGVWSMHFIGMLAFDLCSPVTYDFGLTALSLLPSIGASWVALNLLSKPSFKFSQVLISGILVGAGIGTMHYVGMAAMDMAPLLRYDPWIFALSIVVAVLLAIIALWVRTGLNQLIASNMSAITSNFIASIVMGLAISGMHYTGMAAARFVKPEGLELSEQSSEISFYLALGVSVTTVIIICLVLIVNVIFKYKDLSLLAKSNEDRMRAMMNTAVDGIITIDGQGIIVNVNKAVTTILGWSPAELLGENVKKIVPESIRPHHDGYLARYINTREAQIIGTGREVEAQHKAGHSVPVRLSIGHVMQGKAHYFVGFLSDLSLRNEMEQELKNNEAKFRSLITNIPGIAYRCKSTEGWPMVFISEAVLNITGYPAEDFELPHPKRFFSDLYYPDDIESIYAQAQPPTFSMEYRIIRADGEVRWLFEHGNYILDETSNEVWIDGFLMDITERKVMEQDLVTAKNNAEQAAAARAAFLANMSHEIRTPMNAIIGFSDILLESVLDNEQHKQLSTINRSAKSLMHLLNDVLDSAKLDKGKLELENRVFCLTDEIDTVISTLWLQAKKQRLSLEVDIAPSMAANFIGSPERIRQVLINLIGNAVKFTCEGKVTVSVFPQNDNLVTFEIIDTGIGMTPEQLNRVFEAFAQADASMSRKYGGTGLGTTISKQLVELMGGQLEAESTLGQGSTFRFTIPLQPSSEPLETERADHGSLPPLTLLVVDDIQQNIDLLSVWLTRQGHKVITARDGEQALLRMQKADIDITLMDLQMPVMDGLTAAKMRREQEAESQLPHMPIIALTASVLEQDKSAAEQAGMDGFANKPIDFALLTREIARVLQLNPPQAEFESLQPLGNQLVDEAKGVKLWGSKPQFIKELMKFIAQWPEKSQALQQAISEQDTATIKLLSHSLKGVSGNLGLLQWMSYFAQLEKLTQAESLSFEAMEAIIAKISDSLVEIGDYIESTTVSSASGSELAQSGTDDPAQLLAHIDALLASVVHHSFDESDLEALTARIDEHLRLSVTIITEALDNFDFDIAHNELLELRRIITANQE

SEQ ID NO: 1906 - protein, 480 aa, Prochlorococcus marinus str. NATL2A
MTQSNTVEEIVSQPYKYGFITEIETEKIPKGLNEDVIRLISAKKNEPEFLLKFRLRAYEQWLKMKEPDWSGLTYSKVDYQDLVYYSAPKQDIKKKSLDEVDPKLLETFEKLGIPLSEQKRLSNVAVDAVFDSVSIATTYKEKLAEHGVIFCSISEAISEYPDLIEKYMGTVVPINDNFFAALNSAVFSDGSFVYIPKGVECPMELSSYFRINSGDTGQFERTLIIAEESSSVSYLEGCTAPMFDTNTLHAAVVELVALDNASIKYSTVQNWYAGNEEGVGGIYNFVTKRGECRGKKSKISWSQVETGSAITWKYPSCVLQGDNSIGEFYSIALTNNCQKADTGTKMIHIGKNTKSKIVSKGISAGKSKNSYRGLVSISPNAEGARNYSQCDSMLIGDKASANTYPYIQSKQPQSNIEHEASTCRISEDQLFYLQSRGIDFEESVSMLVSGFCSDVFNELPMEFASEADKLLALKLEGSVG

SEQ ID NO: 1907 - protein, 152 aa, Casuarina glauca
MALTERQEALLKQSWEVLKQNIPGHSLRLFALIIEAAPESKYVFSFLKDSNEIPENNPKLKAHAAVIFKTICESATELRQKGQAVWDNNTLKRLGSIHLKNKITDPHFEVMKGALLGTIKEAVKENWSDEMGCAWTEAYNQLVATIKAEMKE

SEQ ID NO: 1908 - protein, 431 aa, Blastopirellula marina DSM 3645
MPNTLARPPKKQHNFRRVAILFAGGPAPAANAVISTAAVSFLRNDVEVLGIKHGYSNLMQFGPDRPMELGRDYIMLDHQALSRSRAQQGIMIGTARANPGKQVSHPDHLKDPERSAPLQTTYDALCSLGVDALISIGGDDTLKTANKFKLFQETLPEGSQKIPVVHLPKTIDNDYMGIDFTFGYFTAVDFLAGEVRNLLYDAEAGQAYFLVECMGRSAGWLPYGTAIAGEASLVISVEDIIGDYVGKEEEVDGRTKKVMNVDKVVDRIVKTMLAREAEGKKFGVIILAEGLAEMLPPEYLEGIKRDDHGHISITEVSLGRQFAKWISKRYEEQTGRSRKVTGLQLGYEARCSKPHAFDVMLGSQLGVGAYRALVEEGLNGVMVSVSGQLNLHYVAFENLVDPETLVTVVRYINPMSDFHRLARFLETYIND

SEQ ID NO: 1909 - protein, 110 aa, Brassica napus
  misc_feature (103)..(103): Xaa can be any naturally occurring amino acid
MESELIALFETAKKAADAAAVDGVTSSSPEVSQSLDAFEKLKTFPVTYNTLVATQVGKKLRSLAKHPVEEIKSVATDLLETWKRVVIEETTSKAKKTESTNGXSQTGGGS

SEQ ID NO: 1910 - protein, 333 aa, Aspergillus oryzae
MAESSSVAQPPLRIGTRRSKLAIVQAEGIRDSLQKTAPNRSYEIETLHTLGDKDKSTALYNFGAKSLWTSELEEKLTSGQLDVIVHCLKDMPTTLPESCDLAAITLRDDPRDALVIKAGLPYTSLQTLPEGAVVGTSSVRRSAQLLRLYPHLRFANLRGNVETRLAKVDNPESEYTCMIMSAAGLERIGLKHRINQYIGSKDGGILHAVGQGALGLETRKGDSSTQELLNKLVDEKSTLACLAERALLRTLEGGCSVPIGVETEWVDQSEYFLRMRAIVVSLDGTQSVQDTIDATVRTKDEATVFGKELATRLVTAGADAILKDINTNRPLKD

SEQ ID NO: 1911 - protein, 377 aa, Geobacillus kaustophilus HTA426
MLEFETTVDQLATIKVIGVGGGGNNAVNRMIEHGVQGVEFIAVNTDAQALNLSKAPIKLQIGAKLTRGLGAGANPEVGKKAAEESKEQIEEALRGADMVFVTAGMGGGTGTGAAPVIAQIARELGALTVGVVTRPFTFEGRKRATQAASGIAAMKEAVDTLIVIPNDRLLEIVDKNTPMLEAFREADNVLRQGVQGISDLIAVPGLINLDFADVKTIMSNKGSALMGIGIASGENRAAEAAKKAISSPLLETSIDGAQGVLMNITGGMNLSLYEVQEAADIVASAADQEVNMIFGSVINENLKDEIIVTVIATGFNENVASQPRPPRIGIGTVPKAAPAPKREKREEPIQDYAALRSGQAEDPLDIPAFLRNRNRRR

SEQ ID NO: 1912 - protein, 621 aa, Oryza sativa
MGLEEGGAMRALMRRKQVDSDRVRAAGGHQLAKELSVTQLVAIGVGSTIGAGVYVLVGTVAREHAGPALTLSFLIAGVAAALSAFCYAELASRCPSAGSAYHYSYICVGEGVAWLIGWALILEYTIGGSAVARGISPNLALFFGGQDSLPWFLARHELPWFDVVVDPCAAFLVLVVTALLCKGIKESSFVQGVVTVLNCFVMLFVIIAGSYIGFQTGWVGYKVAGGFFPYGANGMLAGSATVFFAYIGFDSVASTAEEVKNPQRDLPLGIGTALSVCCSLYMLVSVVIVGLVPYFAMDPDTPISSAFARHGMHWAMYLVTTGAVLALCSTLMGSILPQPRILMAMARDGLLPSFFSDVNQRTQVPVKSTIVTGICAACLAFFMDVSQLAGMVSVGTLLAFTIVAVSILILRYAPPDEVPLPSSLEASFRLSQEYDEEKVRGPPVDANHEQLSSVVESINDTLIEKKQDTSVEESKRRKAAVCSISSVCVGVVVLTTSASFTFLPFLLRCFFCVFGGLLLLAGLGVLCYIDQDDGRHSFGHSGGFICPFVPLLPVMCILVNTYLLVNLGGGTWMRVGVWLVMGVFVYIFYGRTHSSLTDVVYVPVAQAEEIYGSSSSSGFVA

SEQ ID NO: 1913 - protein, 363 aa, Blastopirellula marina DSM 3645
MPPADNDRFAARRNKLRKLVKKAAADAILVTNVHNVSYLTGFTGHDSYLLVTPDTEVLLSDPRYTQQLEEECPGLNLESRTPGKSILTSVQKMIQASGVTQLAFESTSLTVALRDQLAGKLAKIALIPAAGLVEELREIKDAEEIAAIRQAIYCAEEAFAVVRAGLHPDQTERQIAADLEYQVRRFGGKALSFPPIVGVGERAALPHGVPSEKKVGEDSFVLIDWGALAGGYVSDLTRVLATGKISPKIKRIYDIVLKAQLRAIAAIKPGALMCDVDKAAREEIASAGFGKRFGHGLGHGIGLEVHEAPRFNSSQTRPLQVGMVVTVEPGIYIPGFGGVRIEDDVLVTKHGHEVLTSVPKDFD

SEQ ID NO: 1914 - protein, 287 aa, Blastopirellula marina DSM 3645
MPQQSPWIVEVTPENFETEVLERSREAPVVVDFWGAWCQPCQMLMPILEKLAVEMAGKFYLAKADTEVVPQLAAQFNVQGVPAVFALRDGAVVDFFDGMRPEEFVRGWIERQLPNQAETLLAEVRNTLGAEPSAVEAKLQQAIELDPKLDVAKIMLAEHYYDQQRNDEATAMIATLEERGFLEPEAEKVKAALELRKLGDAAGGVEACRAEMAVSPDDAEKMLKLAESLAAAGQFEESLETALAVVRKDRAGHGETARQLMVDVFRQLADDEELVNNYRRKLATALY

SEQ ID NO: 1915 - protein, 414 aa, Rubrivivax gelatinosus PM1
MSRRRVVVTGLGLVTPLGNTVDESWSRLVAGQSGIATVTKFDATKLACHIAGEVKGFQIEDYIPAKEARHMDTFIHYGLAASLQAVKDAGLPTGDALNEEQAERIGCLVGSGIGGLPLIEETHAEYAARGARRISPFFVPASIINMISGHLSIQCGFTGPNLAIVTACTTGLHCIGQSARMIEAGDADAMIAGGAESTVSPLGIGGFAAARALSTRNDDPATASRPWDRDRDGFVLGEGAGVMVLEEYEHAKARGARIYAELAGFGMGADAFHMTAPNVDGPKRAMKAALRSAGIEAGQVQYLNAHGTSTPLGDLNESNAIKLAFGDHAKKLVVNSTKSMTGHLLGGAGGIESVFTVLAIRDQVSPPTINIFNQDPECDLDYCANTAREMKIEHAVKNNFGFGGTNGTLVFKRV

SEQ ID NO: 1916 - protein, 549 aa, Prochlorococcus marinus str. NATL2A
MFSTEFTQLTVKLNSPFTDQKPGTSGLRKSTLQFEETHYLESFIESILCSLPGVRGGVLVVGGDGRYGNKRAIDIIIRMAAAHGIQKVITTVDGILSTPAASNLIRINKAIGGIILSASHNPGGLEGDFGVKLNGSNGGPASESLTDEIYNYSKNLKEYKIIKCQSNNSFSLGKYKLASMIVEIIDGIDDYLDLMKRIFDFDLISSYINNDFPIVFDALNAVTGPYAKRLFVDHLGATAETVRNGIPLEDFGGLHPDPNLTYAKDLADLLLKGNLFSFGAACDGDGDRNMILGRGCFVNPSDSLAILAANYDCVPGYAKGLSGVARSMPTSSAVDVVAKHLGINCFETPTGWKFFGNLLDANQITLCGEESFGTGSDHVREKDGLWAVLFWLQILASKKKSVSEIMKNHWLFFGRHYYSRHDYESIPTEVANSLYSRLSNMLPTLIDESFAGRTIKNADDFSYTDPVDSSITLNQGLRILLDDGSRVLVRLSGTGTQGATLRVYFESFVPSDGDITQDPQLALDPLIKSIDSLAEISKRTGMSAPTVIT

SEQ ID NO: 1917 - protein, 422 aa, Medicago truncatula
MSILSSRTSSRSVTETVNGSHKFVIKGYSLAKGMGVGKHIASETFTVGGYQWAIYFYPDGKNPEDNSAYVSVFIALASEGTDVRALFELTLLDQSPNCKHKVHSHFDRSLESGPYTLKYRGSMWGYKRFFKRAQLEASSFLKDDCLKINCTVGVVVSSIDCSKLTTIHVPESDIGSHFGMLLENEEGSDVTFSVGGERFHAHKLVMAARSTAFETEFFNSMEEDDRDVVVTDMEPKVFKALLHFIYRDTLIEDEEFFMSSSSFLPSISETFAAKLLAAAEKYDLPRLKLMCESVLCKDISIDSVAYILALADRYHATELKAICLQFSAENLVAVMQSDGFEYLKENCPLLQSELLKTVAGGEEEFSGEGKCRSVWAQVSDGGETNDRSVRQQTWENGVERGQNLWVNLSDGVNNDRSPGQEA

SEQ ID NO: 1918 - protein, 636 aa, Medicago truncatula
MIVEVGNGEEGGGRFRGFGSLIRRKQVDSIHYRGHPQLARKLSVVDLVGIGVGATIGAGVYILIGTVAREQAGPALVISLFIAGIAAALSALCYAELACRCPSAGSAYHYTYICIGEGVAWLVGWSLILEYTIGASAVARGITPNLALFFGGQDNLPSFLARHTLPGLGIVVDPCAAVLIVLITLLLCLGIKESSTVQSIVTTINVSVMLFIIIVGGYLGFKAGWVGYELPSGYFPYGVNGMFAGSAIVFFSYIGFDSVTSTAEEVKNPQRDLPIGISTALAICCVLYMLVSAVIVGLVPYYELNPDTPISSAFSSYGMEWAVYIITTGAVTALFSSLLGSVLPQPRVFMAMARDGLLPTFFSDIHRRTQIPLKSTIVTGLFAAVLAFFMDVSQLAGMVSVGTLLAFTTVAVSVLIIRYVPPDEIPIPASLLTSVDPLLRHSGDDIEEDRTVSPVDLASYSDNSHLHDKSDVLLEHPLIIKEVTKEQHNEKTRRKLAAWTIALLCIGILIVSGSASAERCPRILRVTLFGAGVVIFLCSIIVLACIKQDDTRHTFGHSGGFACPFVPFLPAACILINTYLLIDLGVDTWLRVSVWLLIGVLIYLFYGRTHSSLLNAIYVPSARADEIHRSQANHLA

SEQ ID NO: 1919 - protein, 156 aa, Arabidopsis thaliana
MKPRMCLILFIALMRVMSIVSAQSSCTNVLISMAPCLSFITQNTSLPSQQCCNQLAHVVRYSSECLCQVLDGGGSQLGINVNETQALALPKACHVQTPPASRCHSGSSVNSHSEHGNGSKTIPREKSSSDGSIKFSFPLLAILFTASYITLIYAKY

SEQ ID NO: 1920 - protein, 520 aa, Tuber borchii
MGFIIKRPEGESGKALPAILIGLFVAFGGILFGYDTGTINGILAMDFFQSEFATDGRKELTSSQTSLIVPILSAGTFFGALCASPFGDILGRRMGLIASCLVFSIGVALQVAATAIPLMAAGRVIAGLGVGLVSALVPLYQSESAPKWIRGSIVGCYQLAITIGLLLAACANQGTHARNNHGSYRIPLAIQFVWAAILAGGMFILPETPRYYIKKDNMEAAAKSMSRLRSLPADHPAIIEELNEIKAIHDLEMQATGEATYLDCVKPDMIKRLLTGCGIQALQQLTGINFIFYYGTQFFKNAGIKNAFLIGLITNLVNVISTFPGLWMVEKMGRRNLLLFGAIGMCACQFIVAIVGITTVSAIANNVLIAFVCFYIFFFACSWGPCSWVVTGEIYPLKVRAKCLSISTATNWLLNWAIGFSTPYLVAEGPGKPNLGTKIFFVWGSCCFLCIAFVYLFIYETKGLSLENVDQLYMTVGHAWESKKFTPSVSYNSDKMLSNGHGADGKSSELAHIEGGHGEV

SEQ ID NO: 1921 - protein, 150 aa, Triticum aestivum
  misc_feature (80)..(80): Xaa can be any naturally occurring amino acid
  misc_feature (84)..(84): Xaa can be any naturally occurring amino acid
  misc_feature (90)..(90): Xaa can be any naturally occurring amino acid
  misc_feature (97)..(97): Xaa can be any naturally occurring amino acid
MARLNSKAVVAAVVLAAVVLMMAGREASAALSCGQVDSKLAPCVAYVTGRASSISKECCSGVQGLNGMARSSSDRKIACXCLKXLATSIXSINMGKXSGVPGMRLSVPFPINIPQLRHFNYSIYNLLRHAWTAVGLIHLMDAIHTDDYKK

SEQ ID NO: 1922 - protein, 195 aa, Rhodospirillum rubrum ATCC 11170
MEQASKGSGGGDWLIRGVFSLGLALASFGGPASAQAAGAHDYSFPAIDGGTLPLAAWAGHPVLVVNTASECGFTAQYEGLEALWKAYRAKGLIVLGVPSNDFGGQEPGSAAEIKDFCESTFAVDFPLTDKTAVSGARAHPFYAWAKASRPDLSAPRWNFHKYLIAPDGSLAASFSALTDPKDRDLTDAIDKLLEK

SEQ ID NO: 1923 - protein, 546 aa, Escherichia coli O157:H7 EDL933
  misc_feature (400)..(400): Xaa can be any naturally occurring amino acid
MAIHNRAGQPAQQSDLINVAQLTAQYYVLKPEAGNAEHAVKFGTSGHRGSAARHSFNEPHILAIAQAIAEERAKNGITGPCYVGKDTHALSEPAFISVLEVLAANGVDVIVQENNGFTPTPAVSNAILVHNKKGGPLADGIVITPSHNPPEDGGIKYNPPNGGPADTNVTKVVEDRANALMADGLKGVKRISLDEAMASGHVKEQDLVQPFVEGLADIVDMAAIQKAGLTLGVDPLGGSGIEYWKRIGEYYNLNLTIVNDQVDQTFRFMHLDKDGAIRMDCSSECAMAGLLALRDKFDLAFANDPDYDRHGIVTPAGLMNPNHYLAVAINYLFQHRPQWGKAVAVGKTLVSSAMIDRVVNDLGRKLVEVPVGFKWFVDGLFDGSFGFGGEESAGASFLRXDGTPWSTDKDGIIMCLLAAEITAVTGKNPQEHYNELAKRFGAPSYNRLQAAATSAQKAALSKLSPEMVSASTLAGDPITARLTAAPGNGASIGGLKVMTDNGWFAARPSGTEDAYKIYCESFLGEEHRKQIEKEAVEIVSEVLKNA

SEQ ID NO: 1924 - protein, 442 aa, Oryza sativa
GEEIGGVEKALIVGRRRRRRMVEGPKFAGMMGGVVGGAGGHDDIGGNFCDMAYYRKLGESSNMSIDSLNSLQTSTHGGGSVAMSVDNSSVGSSDSHTRMLNHPGLRGHVAANYSVGHSIFRPGRVSHALSEDALARALMDPRYPTETLKDYEEWTIDLGKLHMGMPFAQGAFGKLYKGTYNGEDVAIKLLERPEADPERAGLMEQQFVQEVMMLATLRHPNIVKFIGACRKPMVWCIVTEYAKGGSVRQFLMKRQNRSVPLKLAVKQALDVARGMAYVHALGFIHRDLKSDNLLISGDKSIKIADFGVARIEVKTEGMTPETGTYRWMAPEMIQHRPYDQKVDVYSFGIVLWELITGMLPFANMTAVQAAFAVVNKGVRPAIPQDCLPVLSEIMTRCWDPNPDVRPPFTEVVRMLEHAEVVILSTVRKARFRCCISQPMTTD

SEQ ID NO: 1925 - protein, 126 aa, Glycine max
MRAIKSVPTSSPVSGSGINIWKSPIPYLFGGLAVMLAIISMALVILVCSYRKRDSQSSSSSSEVDQEEIKSQAMSKNLETNSEPEVLVIMAGNHNPTYLAKPITSSSSIYCTCGAQTNPSSSSSTE

SEQ ID NO: 1926 - protein, 635 aa, Oryza sativa
  misc_feature (160)..(160): Xaa can be any naturally occurring amino acid
MDGSCDCIEPLWQADDLLVKYQYISDFFIALAYFSIPLELIYFVKKSAFFPYRWVLIQFGAFIVLCGATHLINLWTFAIYTKTIAVVLTVAKAATAVVSCITALMLVHIIPDLLNVKLRERFLKDKADELDREMGIIRTQEETGRHVHMLTHEVRSTLDXHTILRTTLVELGRTLALAECALWMPTRSGSALQLSHTIYNSAAIGSVVPINLPIVSKVFNSNRVVKIPHTSPLASITADKSRYVPPEVVAIRVPLLHLTNFQINDWPELSAKSFAVMVLMLPPDSAREWRPHERELVEVVADQVAVALSHAAILEESMRARDLLMEQNIALDAARREAEMAICARNDFLAVMNHEMRTPMRAIVSLSSLLLETNLSAEQRLMVETILKSSDLLATLTNDVLDVSKLENGSLELEIAPFNLHSTFTDVVNLIKPVAACKRLSVMVTLAPELPLHAIGDQKRLMQIILNVAGNSIKFTKEGHVSITASMARPDALRGPHEPDYHPVVSDGFFYLAVQVKDTGCGISPQDMPHTFRKFAHPENAGKWNSGSGLGLALSRRFVSLMEGNIWLESEGVGKGCTAMFFVKLGMPEKPNANLRRMAPHPLQPNQGAGGPDALSISIMDSNPRVPRVRYQSSV

SEQ ID NO: 1927 - protein, 1027 aa, Magnetococcus sp. MC-1
MKSLLSINHIFGLFTLAGMLLLSLFFGGLMLSGFNEVFDHHVERTMDARLTGFAQQLTDYVSLHDAMLHDLASNPLLVQGVMQQESGKANAVDFLERYRIMGAQRRLTLYGFDGHLLHDTAKQPRRPPLSENLVQILLRGHNKHIWRFQAQDKDQSSLWMAVPISWNAVPEGVLAMEIPSLEMPQLKRHYGQGEEDDIELFKDGERIFGVDGHLNGRQAQLYMPTLGITLRYTAHLGEIYSHRDRLLARIKMIGLAALLLAGSGVFWMGRVLFVRPLQRLKERTTHLANGEVRDLLNEVRRRVMVRELQELTDQFDVMALQVSSARTSLEEKVHERTAQLEWELEERHKTEHRLRQVLTLQTAILDSANSSIISTDRTGIVQTFNKGAERMLGYKAVAVVGQYTLDMFYNSNELRQHSLQLSATLDKRVDPGIESLFVLAREGKVDEREWMILHQDGHQVPVLMTVTPIYNSSGLLVGYLNMGTEISERKRLAAELKETNWRLQRALDSAQAGTFYYAVVHDHMQWNRRALEMFGLNDATFNGHLQDWLQRVVAVDRHRIDTLFAEVLATPNVETLDISYTILRQGDEAQRVIRTQGWIHRDPHGKATHLSGLFLDITEQMQAQQVLEEARQAAEEASQAKSDFLASMSHEIRTPMNAVIGLSDVLAETPLNPEQQHYVTTLQRASHTLLDLINAILDLSKIESGRFELIERPFDLSDMAHGVCSVLRVQAEQKGLSLALEMDETLPPFVVGDSPRLRQILINLIGNAIKFTEQGFVKVSVQARDQQRTLWFGIADSGVGIAPTQVEQIFEKFTQVDSSVVRRFAGSGLGLAISKQLVGLMGGHIGVESRLGEGSLFYFSLPLRPGETLFEAPLRAPIYQESPAESVPIRLLVVEDSVDNRMLVRTYFKKYHCELRFAVDGQEGVEMFQEGGCDLVFMDVQMPRMDGYTATRLIRNWERSHGMQPTPILALTAHALESDVKKSRQAGCNEHLTKPVSKRTLVDAVERQLNIKLMLRSLPAVSLPQTV

SEQ ID NO: 1928 - protein, 131 aa, Sulfolobus tokodaii str. 7
MNKQINIRKIQEKIKKIREKKIKFLRYDWDKFYRIGRQETWRKPKGIDNPVRLELKGYQPKVKIGFRSPREIRGLHPSGLIPFYVNNKKDLEKASQMKDKVIVVFSSTIGLKKKLELVEEAKKMGLKIANG

SEQ ID NO: 1929 - protein, 1289 aa, Yersinia pestis biovar Medievalis str. 91001
MHTPIIWCNSLRTTFLLRGRFSLRSWFSLRTVLYCLLLISGQLHASLMTGRQGCDTGQPLTIHSIANSYNDDLLLTPATDTRQSSRRTVKVGVVMDANTPFVVNRDDNAIEGIVADYLKIISDASQLSFQMIGYCDYGLVLNALENGQIDLMAGTPMLAQPGLIASHAFFTNRHVEVRSKNWDPTKRTHPETVAIVNNEPLSPEFLFNYHADRIVAYPNQLQGLLAVAYGNADVFVANATSANYLIDQLQLLTLQIRNFAPYHPAPYSFLARESNQKLIDYLNQILELLPTRATGDIQQRWFGSKHHYNIDAKLLLTEQELSWIQHHPVVTYIAPLDLAPLIFRDRRTGEMAGFSVDLIDIIARRTGIKFDPVYTKDTGEGVRSFKAGKVDLLPIVAVRNGQYGNNLYSSSIAQSLWGIMTREDRMDINNVGDLAGKRVGIQAGSASSSIISNPLLAQRITFVEAPDTMTLVRWLQQGKVDAVVKNMMTANYLSAQNFSPNIKTVAVAGEEPLMMAFAIRPDLPELKTIIDKVIESIPPEEFDNLTSEWSTFKPKPISFDESSLDNELLMIALKISSGLLLVFGLYLCYLVFNKRRQAKLLHARLLQQESIINALPFAVFIRTASGELAVYNSHFADVHSDKLYDMLNQTHEPAHWPMTSPLDREIDKYCRSVLLNRKPQLVDLSVEIKGDIRDIFLWIIPLNNAEQGVLGGWLDISQRKTVERQLEAARVEAESANRTKSTFLATISHELRTPMYAIMGLLELEIRSNRPVEKDTLVTVSKSAQSLMLLLDDIIDSAKIEAGQLSIHPTAVDFHQEMERMFTLYQPIANERGLRFSGWLDDHIPPLLMADMLRVRQVMGNLLGNALKFTEQGSVSVDITWEPSDEQHGVMNIDITDTGIGISPAAQATLFQPFSQANEGKSPRFGGSGLGLWICHQLIHKMGGKIALESQLGKGTSLLITLPLNIATADDLAQDAAITHVDDERLNQLRNLRILVVDDLPANRQLLQQQLAFIGIEQVVTAENGAKACQILQHNNFDVVITDCSMPVMDGYELAAHIRQDPALKDLIVIGCTADAREESAARCIDAGMNACMIKPVAIDTLQATLLRKDIVSQISNTNHSQSTEDNDRGGNQSNLSEKNTAQQENAPAIHSTTITSSVNRLAAAQNKLRTLSGGNPAVELQLLQSLLESNLQDAVTLTQLYRQLCVEDEDVVETVDTAETVDTADTVEDGETRGPGSTVGRHSTAGSDHIPHADIYKQMASLVHRIKGSVQLIDAQELVASCVKFESQ

SEQ ID NO: 1930 - protein, 211 aa, Glycine max
RRNSLLAAPSLVLLISYIVKLNNLHSKLKMPRTSTLECSGCPPLRALTFDALGLIKVVEARDKQRGAPQVVERWGDPESSKCVMAVSMIDRESHPLLAVARKNNQIEVLSPVNGDIQATITDANDLDVQSEVNNIVGLHLFAKQNSELASRDCTLLTCTTKGNASIRSIELADSSKGSSCIKTWNVCSGGNILCCKVDGNEKFALFGREMC

SEQ ID NO: 1931 - protein, 486 aa, Burkholderia xenovorans LB400
MTTLTLKDPSLLKTHAYIAGEWQGADDGSTFEVKNPATGEIIATVPRMGTAETRRAIDTANAAWPAWRATTAKQRAVILRKWHDLMMENADDLAKILTTEQGKPLAEAKGEIQYAASFLEWFAEEGKRVNGDTIPTPANDKRIVVTKEPIGVCAAITPWNFPAAMITRKVGPALAAGCPIIVKPAEATPLSALALAVLAERAGVPRGVFNVVTGEPKAIGAEMTGNPVVRKLSFTGSTPVGRLLMAQCAPTVKKVSLELGGNAPFIVFDDADLDAAVAGAIASKYRNSGQTCVCTNRFYVHDKVYDAFAEKLRVAVEQLKVGRGTEDGVTQGPLINEAAVLKVESHIEDALAKGARIVTGGKRHVLGHGFFEPTVLADVTPAMKVARDETFGPLAPLFRFSSDEEVIRLANDTEFGLASYFYSRDIGRVWRVAEALEYGMVGINTGLISNEVAPFGGVKQSGLGREGSHYGIDDYVVIKYLCVGGI

SEQ ID NO: 1932 - protein, 152 aa, Casuarina glauca
MALTEKQEALLKQSWEVLKQNIPAHSLRLFALILEAAPESKYVFSFLKDSNEIPENNPKLKAHAAVIFKTICESATELRQKGHAVWDNNTLKRLGSIHLKNKITDPHFEVMKGALLGTIKEAIKENWSDEMGCAWTEAYNQLVATIKAEMKE

SEQ ID NO: 1933 - protein, 538 aa, Candida albicans SC5314
MSPSLVHQILAITHPYVEYLEENITKWYILVPGILIVLNVLTTLHTKYLEYKFNAKPVTNFIQDYTFGVITPLILIYYKSQGTVMEFANNFWNFKFLIKNPDVGTGELRIFGMHLIETKDPENIKAVLATQFNDFSLGTRHGFLYSLLGDGIFTLDGAGWKHSRSMLRPQFAREQIAHVKILEPHMQVFFKHIRKNKGKTFDIQELFFRLTVDSSTEFLFGSSVESLRDETIGMSPSVKNLAGRDEFADAFNYSQTINAYRFLLQQFYWLCNGTKFRKSIAAVHKFSDFYVQKALSLSQDELDEQKGYVFLYELAKQTRDPKVLRDQLLNILVAGRDTTAGLLSFVFFELARNPEVYAKLKEEIYNKFGSGEDARIDEITFESLKQCEYLKAVINESLRLYPSVPHNFRTATRNTTLPRGGGPDGMSPIVVKKGQSVMYTVLVTHRDTKTYGADANEFRPERWFEPETRKLGWAYVPFNGGPRICLGQQFALTEASYVTVRLLQEFEHLTMDAETRYPPKLMNSLTLSLLDGANVEMY

SEQ ID NO: 1934 - protein, 145 aa, Casuarina glauca
EALLKQSWEVLKQNIPGHSLCLFALIIEAAPESKYVFSFLKDSNEIPENNPKLKAHAAVIFKTICESATELRQKGQAVWDNNTLKRLGSIHLKNKITDPHFEVMKGALLGTIKEAVKENWSDEMCCAWTEAYNQLVATIKAEMKE

SEQ ID NO: 1935 - protein, 522 aa, Candida albicans SC5314
MSVSDIVQEYITKWYVVIPTLFVVYQVVDFFYVRSLRSRLGAKAPTNNESDGYWGFHLPFLLVSKKAEGTIIDFAGERFKSIAHPEVPTFQFPIFTVKVISTVDPENIKAVLATQFNDFSLGTRHNQFAPLLGDGIFTLDGAGWKHSRSMLRPQFAREQVAHVKALEPHMQVLFKHIRKSGGRTFDLQELFFRFTVDSATEFLFGESVESLRDESIGMALEAVDFDGKKEFAEAFNFSQNYLASRAVMQQMYWLLNSSEFKSCNSKVHKFAEYYVNKALELSHEELEKQQGYVFLYELAKQTRDTKVLRDQLLNILVAGRDTTAGLLSFVFFELARNPRVFAKLREEVEEKFGVGEDARVEEISFESLKSCEYLKAVLNECLRLYPSVPQNFRVATKNTTLPRGGGSDGMSPILVRKGQTVMYSVYVTHRDTKVYGKDADEFRPERWFEPETRKLGWSFVPFNGGPRICLGQQFALTEASYVTVRLLQEFGHLTMDPNTDYPPKKMSHLTMSLYDGTNVEMY

SEQ ID NO: 1936 - protein, 1022 aa, Cryptococcus neoformans var. neoformans JEC21
MPSSANAHDGAARQATVTRKRTNGSSTRDEKQYIGQWRIGRTIGKGSSGRVKIAKHAVTGKYAAIKIVPKGLILNSRMSMSEAGAKADKVLLGIEREIVIMKLIDHPNVLNLYDVWETSSELYLIMEYVPGGELFDYLVKRGRLPVSEALHYFQQIIYAVDYCHRFNICHRDLKPENLLLDKDKNIKVADFGMAAWEAGERMLETSCGSPHYASPEIVAGKAYHGSSSDIWSCGIILFALLTGRLPFDDDNIRSLLQKVKIGIFEMPDEIKDPARDLLRRMLERDPERRITMPEILSHPFFISRPPRPIPGRSLVSPPSLDEVERPVNSVDEIDPDIMGNLKTLWSGVSDEEIIKALMCKDKTWEKTIYHLLIKYRNKHLENYNMEEEEYAEARERRQARKQLQSSSSPARRKGVPAQDQSARLAPLGENETVANTPVKRPQAPTPNKASRKAPPECPTPTKQVSQARSPAGPRPANSRGNSGASNSSQAPAIVLQGATPTKELPPPHTTSSHPRPEMITTPTSPAPLSVPRVEDANLQTFLNQIADQMNRFSVRSSVASQSSTSSSAVLGSDYQACLAFAAGVTPSANPSSSVTESVIEEQGQFEDAADDQTDTEVASIHSGFTASIAPQSPLAGLGLGAPSAAVRPGLHPVAGPNQQRWSYASSAGSSYQGSSVGSYAPVESPQYIHSPLEVQAPVLQAERSAPRPPPRATRPAPPPISRPLPFSPAQQTYSEPTESLLPRDTSYVIIDNSELPSDASLSSWGSKSSGFKAHRGLDGFGMLKKKKLNVEPVPYSYGNLGSSATSPLNSPKRSWFNNLFNFKPATCTLLSRDNVANTRERVRKILLSIGVRTAVTEIDGHKALKCRLDEVRDNGNVTTKGVRFRVEFTRASTSQTYSTLVTLTQEKGAESSFRACFAELKHFMDSQPSAPTTLSLNRPSVEQSRSVNSSNLLPAHSYQQQRYSSTSADTPAGAPTSPLLSAPPIRYTASAPTTPVIESSPRFTSPYLQLPVSPQSLQMPSY

SEQ ID NO: 1937 - protein, 1058 aa, Yarrowia lipolytica CLIB122
MTFKYLVLEYIEGGELFDYLIKKGRLEEYEAASYFLQIINGVDYCHRFNICHRDLKPENLLLDKNRNIKIADFGMAALETDRMLETSCGSPHYASPEIVAGKTYHGAPSDIWSCGIILFALLTGHLPFDDDNIRRLLLKVQTGKFNMPSELSPYAKDLIWRMLRTDPTTRITMDEIFQHPFVRKYSGGVTPTHIHAPSYEHVARPVASVQDIDIEILKNLQILWHGEDAEIIMQKLLSPDANPEKTFYCLLMKYRHDHAAAVAATAPPTLQQQQSQEMQPAMHKSHSHSSRKQHKRKTSHNSHRLGSRGSLVSVSSAHKRGVSFTHVKKRSQQSIRSMRGSASNSVVASPRKQTASAPVSAGTAPIPFNVNVPYTEAPATAPAAPTTAAATSTATRAPAQPLAPTQAVQSPPRQSQPVHQQPPTSRRAPISSAPSWLTRSPPASKDADFEAFLDSAFNKPVKTKKSYGSLLGSPVDARRHVTDPANTSIASRTAAGATAANTSKRAVTMAYNDEFEFERPMSLFDPREVGGDTGRAQQPSVSRAQTISHTHTHSRERVANAHSDTPNYLPMIFEEGDRFADAIEEEFHLNISDNTLSAPSTNHTTPMLGGDRKSSEWENLFDFTERGDQVVVGEDSLLDISFHRDNANEATPVAPAATHVGRESTELYKDLQFPEIPVVDRDETAVESMPRTQSKMKISGQMQTDNFMKRPSSINLNGHLSQSNLSRQTTSASQRRPLVSRDMNTHAASPREAAKPVRQLQAAAELHERRPVEVLQKQQPQQQQQHHHQQQQQTQHQLQPAPVFREKPVVSAPRRPAPAPPVQSVADTMVLPMHQQQQNNSQFTIPAPVQTQPPQSKSSRTKSFIRRFGFAPKREAPVAPTSKVTMIQSSDYGAAPGVNANAHMNAQKDPAAPAAHAAAHAAHTSGTAPATGDPWNVTQSWFMKMFSRPNVAPRQPPQTLYSTLTSQQLEDEIVALLASWRKYGISNLSVSHSSIKCQISSRNALKIKSAKLHIDIGPLKHTNSFAHFFHDRGSQGSFTQLYDQIKAHLVSQGLLINN

SEQ ID NO: 1938 - protein, 367 aa, Lentinula edodes
MDDRTTAFIVGSSYQPLDIIGEGAYGVVCSAVHIQSQRKVAIKRITPFDHSMFCLRTLREIKLLRHFQHENIIGILDILKPNLGPDGSLDGMTEVYLVQELMETDLHRVIKTQELSDDHCQYFIYQTLRALKALHSADVLHRDLKPSNLLLNANCDLKLCDFGLARSASPLPDHPVDASTFMTEYVATRWYRAPEVMLTFKQYTKAIDKWSLGCVLAEMLSGKPLFPGRDYHHQLSLILDVLGTPTLDDFYAISSSRSREYIRALPFRKKKVFGKPVHEGGVKGFEGKNPLAIDLMEKCLSFNPKRRIDVEGALAHPYLAPYHDPSDEPGAERIDSEFWSFDTFNNGKGLSKEELKVLIYEEVMRGA

SEQ ID NO: 1939 - protein, 324 aa, Candida glabrata CBS 138
MSGIGESRTELLNWLNDLLKLNYKKIEECGTGAAYCQIMDSIYGDVPMHRVRFNSTADYENQINYKVLQSNFTKHNIEKTVYVDKLIRCRFQDNLEFLQWLKKYWVNNKDGTPYDAEARRNYRPISSTNSGTPGTPSGLSSASNSSSTLNISKRRNMSDSTSLSRTQSLSTRYASGTSGNNINRRVTSEQIIALQTELSQSHNKIQEMEQEMGTFKEALTAMEAENNFYFSKLRDIEILVQTTQDFIKEGLYKGDVEELDKFTNKVQHILYATIESASNEETKDTNESNRITTNNTSSGNIASQTLEGESLRSSNNLIIDEETF

SEQ ID NO: 1940 - protein, 606 aa, Ustilago maydis 521
MAPPPAEKETRIAIVNSDKCKPKKCRQECKKSCPVVRMGRLCIEVTPSSKIAFISESLCIGCGICPKKCPFEAINIIKLPTNLENETTHRYSANSFKLHRLPTPRAGQVLGLVGTNGIGKSTALKILAGKQKPNLGRYDDPPDWQEILKYFRGSELQNFFTKVLEDNIKALIKPQYVDHIPRAIKGKASVTQLLDGKLEKNNKQEVIDMLDLKEVLERDVQNLSGGELQRFAIGMSCIQNANVYMFDEPSSYLDVKQRLNAARMIRSLLDSNTYVIAVEHDLSVLDYLSDFICCLYGVPSVYGVVTVPSPVRDGINIFLDGYIPAENMRFREESLSFKISETAEDEVLDRTPKYICPPMAKTLGNFSLKIEGGEFSDSEIIVFLGENGTGKTTFVKMLAGKLEPDPGAKKPPQLNVSFKPQTIAPKFQGTVRMLLLKQIKAAFMHPQFQTDVVKPMSLDAIIDNDVQTLSGGELQRVALVLALGKPADIYLIDEPSAYLDSEQRIIASRVIKRFIIHSRKTAMIIEHDIIMATYLADRVIVYEGQPSVKATAKRPESLLTGMNSFLATLEVSMRRDPTNYRPRVNKFNSIKDKEQKAAGQYFFLED

SEQ ID NO: 1941 - protein, 136 aa, Haloarcula marismortui ATCC 43049
MTDELAEIRQKKLEELRNGERGTAAENENSESAAEPVHVHGAGDLQDTVDDGVVLVDFYADWCGPCKQLEPVVERIAAGTAATVAKVDIDANQQLAAKYGVRSVPTLLLFVDGEPVERLVGMQQEPQLRSLIESYT

SEQ ID NO: 1942 - protein, 264 aa, Triticum aestivum
TRSVLSTIIDPKDGSMASTQALKQMALEHDVPIVSIADLIRYRRKREKLVELIAVSRLPTKWGLFRAYCYQSKLDGTEHIAVAKGDIGDGEDVLVRVHSECLTGDILGSARCDCGEQLDLAMQLIEKAGRGVLVYLRGHEGRGIGLGQKLRAYNLQDQGSDTVEANVELGLAIDSREYGIGAQILRDIGVRTMRLMTNNPAKFVGLKGYGLAVVGRVPVISPITKENQKYLETKRTKMGHLYGSDLPGGLLKEFLNPTEDNATN

SEQ ID NO: 1943 - protein, 575 aa, Neurospora crassa
MSGLDVEALLDSTASSKEQQMDVDPPTTNGGADQNGSKSERRDRDSDRDKERERDRDRGRDSSRDRGRRYRDRSSGRLRNSSSEAGRDTPRSDAGSHRSRRRSRSRDSGRHSRRHRDGDYYRGRRGRSRSRSPNRYYRPRGDRRDRGDSYRRRDDDRRSGRNTPRARDGTPQPLTEDERDRRTVFVQQLAARLRTRELKEFFEKVGPVAEAQIVKDRVSNRSKGVGYVEFKNEDSVQAALQLTGQKLLGIPVIVQLTEAEKNRQVRTTETSGHHPNSIPFHRLYVGNIHFSITEQDLQNVFEPFGELEFVQLQKDDNGRSRGYGFVQFRDAGQAREALEKMNGFDLAGRPIRVGLGNDKFTPESTANLLQRFQGQNHHQQFQGSAFSGAGGRGPATSNFDRAGARDNEKGTGASALDDTDVGGVNFNNYSRDALMRKLARTDEPPASVIPERQILKPKTETKPLPVNVNMASRCVVLHNMFDPAEEEGENWIKELEDDVREEAEAKYGHVVHISLDPNSAGDIYLKFDKVQGGENAIKGLNGRYFGGRMITAAPVVDAVYSKSRQPHEGATVTYL

SEQ ID NO: 1944 - protein, 292 aa, Rhodospirillum rubrum ATCC 11170
MSVLVSNDTKVICQGFTGSQGTFHSEQAIAYGTKMVGGVTPGKGGSTHLDLPVFDTVIQAREATGCNATVIYVPPPFAADAILEAINAEIELAVCITEGIPVLDMVKVKRALRGSKTRLIGPNCPGVITPGECKIGIMPGHIHTRGKIGVVSRSGTLTYEAVAQTTAAGLGQSTCIGIGGDPVNGTNFIDCLEMFLADPETQGIIMIGEIGGSAEEEAAEFLKHSKIKKPMCGFIAGVTAPPGKRMGHAGAIISGGKGTAGDKMDAMRSAGILVADSPSALGSTMVEAMKSA

SEQ ID NO: 1945 - protein, 569 aa, Desulfovibrio vulgaris subsp. vulgaris str. Hildenborough
MPKHVVVIGAVALGPKAACRFKRLDPEAHVTMIDQASRISYGGCGIPYYVSGEVSNIESLQATPYNVVRDPEFFRINKDVEALVETRAHAIDRAAHTVEIENLRTGERRTLKYDKLVLALGSKANRPPVEGMDLAGVTPVTNLDEAEFVQHAISAGEVSKAVIVGGGFIGLEMAVSLADMWGIDTTVVELADQIMPGFTSKSLSQMLRHDLEKNDVVVHTGEKVVRLEGENGKVARVITDKRTLDADLVILAAGVSPNTQLARDAGLELDPRGAIIVDTRMRTSDPDIFAGGDCVTIPNLVTGKPGFFPLGSMANRQGRVIGTNLADGDATFPGAVGSWAVKLFEGSASGAGLTVEGALREGYDAVNVHVEQFDRAHFYPEKTIMTLQLVVDRPTRRVLGIQGFSTLGDALTARINAVATMLASKPTVEDISNAEVVYSPPFASAMDIVNVAGNVADNVLAGRCRLVGTEEFVQLWEGRKDADICFVDTRLAANAVPLVEKYGDEWINIPEEELAARIDEIPRDKTVMLVCNTGLRSFESQLILDRLGLTNTKSVAGGMVAIHKIGGDI

SEQ ID NO: 1946 - protein, 335 aa, Pichia angusta
MTANVGINGFGRIGRLVLRIALSRDDINVIAINDPFIAPDYAAYMFKYDSTHGKFKGTVTHEGKYLVINGKKIEVFQERDPANIPWGKEGVDYVLDSTGVFTTIEGAQKHIDAGAKKVIITAPSKDAPMFVVGVNHEEYTPDIKILSNASCTTNCLAPLAKVINDIFGIEEGLMTTVHSITATQKTVDGPSHKDWRGGRTASGNIIPSSTGAAKAVGKVLPALAGKLTGMSMRVPTTDVSVVDLTVNLKKPTTYEDICATMKKAAEGPLAGILGYTDEAVVSSDFLTDSRSSVFDAKAGILLTPTFVKLVSWYDNEYGYSTRVVDLLQHVAKVSA

SEQ ID NO: 1947 - protein, 723 aa, Oryza sativa
MANSIAIFRRSTTYGPLQKAALTTICCMLAVAAGPNPQECLPFSCGDLGNISYPFRLQGDSRQCVSTPRPWYNLSCSRGKATIHINTRKYYVISINYTRENFLVVDATMQLDDDTNGTSCPLPRSDHLPYMIYWSDLSSIDSYGFKDLVTASDTWACFVNCSRAITNDSRYKPVTCLSGNNSFPYVYVYIYDDYGCCPVKRLQPSCRYLGMIPFDYVYQPGSYDDDIMSNVLQSASYRDIVGFIRKGFRVNFPLYNNDQRAPTIVERCLNNSMSYFKDQISGASIPHLTRALFWTEIHFVQCVSTNHDYTIKLFSVVITIVSAIDVTKLLFVLCRFVLAPLVVLTFLAHKYWKTRIAIDAVEKFLRMQEMLGPKRYAYTDAWAITSHFRDKLGQGGYGSVYKGVLLPGDIHVAIKMLDGKSDCNGEDFISEVATIGRIHHINVVRLVGFCSEEMRRALVYEYMPRGSLNRYIFSSERSFSWDKLNEIALGIARGINYLHQGCEMQILHFDIKPDNILLDDNFIPKVADFGLAKLYPREKSFVSDRALRGTFGYMAPEMACRSFGVISSKSDVYSFGMLLLEMAGGRKNADPNANSNSSRAYYPAWVYDQLIVDQQVDEISSAIDMHEKERKLWLVVFWCIQMKSYDRPTMSEVIEMLEGDVDALQVPPRPFFCDGDSTPPPPVPVMDSICLYSSELTAISEEEDVDGITQLDSSCLLGYERSI

SEQ ID NO: 1948 - protein, 285 aa, Magnetococcus sp. MC-1
MAASQWVINVDQSSFNQQVIEPSYRVPVLVDFWAPWCGPCRALGPILEKLANEMAGRFILAKVNSDENPQLSQQFGVQGIPACKLVIEGAIVDAFTGALPESGVRQFLDKAIPSAADNEAAQAALLAQRGDLLGALELYQKGLAEQPDHTGCLVGAASIALAQGKDAEASAFMERLTPKGLNSDAAKALQNKLAFRQTNQDVETLRQDVARHPDNLDHRITLGQALIAQEQIEAGLEQLLLAVKQDRHYKEDHARKLILKVFEMLGHAHPITSHYRGKLSQVLFT

SEQ ID NO: 1949 - protein, 479 aa, Synechococcus sp. PCC 7002
MSATVKTLVNQPYKYGFVTDIETEKIPRGLSEDVVRLISAKKNEPDFMLEFRLKAYHQWLKMAEPEWAHVKYPPIDYQDIVYYAAPKKETKKIESLDEIDPALLETFEKLGIPLSEQKRLSNVAVDAVFDSVSIATTFKKDLAKHGVIFCSISEALQEYPDLVKKYLGTVVPTSDNYFAALNSAVFSDGSFVFIPKGVKCPMELSTYFRINDGETGQFERTLIIAEEGASVSYLEGCTAPMFDTNQLHAAVVELVALDNADIKYSTVQNWFAGDEEGKGGIYNFVTKRGLCKGINSKISWTQVETGSAITWKYPSCVLLGDNSVGEFYSIALTNNHQQADTGTKMIHIGKNSRSTIISKGISAGKSKNSYRGLVKMHPKADGARNYSQCDSMLIGDTAEANTFPYIQVDNQNAKVEHEASTAKIGEEQLFYFAQRGIAEEDAISMLVSGFCKDVLSELPMEFAAEADKLLSLKLEGTVG

SEQ ID NO: 1950 - protein, 550 aa, Shewanella sp. MR-4
MAIHQRAGQTASQTDLVNIPKLMSHYYSIKPNVDAAEQRVTFGTSGHRGTAFQASFNQDHIWAITQAVVDYRQSVNIDGPLFLGIDTHALSYAAYVSAIEVLAANKVTVHIQQNDSFTPTPVVSHAIICANREAALSGAALSDGLIITPSHNPPQDGGIKYNPPHGGPAEGNITAWIESRANDYLRAGLKGVNKLAYADALTSGYVHAIDLITPYVADLVNVVDMHAIAKAKLKLGVDPLGGSGIHYWAPIAKHYGIDITLVNDKVDPSFSFMSLDKDGKIRMDCSSPYAMAGLLAHKESFDLCVGNDPDYDRHGIVCPGTGLMDPNHYLAVAIDYLLTHRPEWSEQLAIGKTLVSSALIDKICTFHGKKLLEVPVGFKWFVDGLAEATIAFGGEESAGAAFLRRDGTTWCTDKDGFILVLLAAEMLAVTGKTPGQRHQELVAQFGQSFYKRIDSPISLENKAKFAKLNAETLNATMLAGEKIDAVLTHAPGNNASIGGIKVTTANGWFAARPSGTEALFKIYGESFISEQHLADIIKDAQALIDKALSA

SEQ ID NO: 1951 - protein, 391 aa, Arabidopsis thaliana
MASASFVKPNTLSSPWIGQRSFAHTSASSSPPPRVSFAIRAGAYSDELVKTAKSIASPGRGILAIDESNATCGKRLASIGLDNTEDNRQAYRQLLLTTPGLGDYISGSILFEETLYQSTKDGKTFVDCLRDANIVPGIKVDKGLSPLAGSNEESWCQGLDGLASRSAEYYKQGARFAKWRTVVSVPCGPSALAVKEAAWGLARYAAISQDNGLVPIVEPEILLDGDHPIERTLEVAEKVWSEVFFYLAQNNVMFEGILLKPSMVTPGAEHKNKASPETVADFTLTMLKRRVPPAVPGIMFLSGGQSEAEATLNLNAMNQSPNPWHVSFSYARALQNSVLRTWQGKPEKIEASQKALLVRAKANSLAQLGKYSAEGENEDAKKGMFVKGYTY

SEQ ID NO: 1952 - protein, 653 aa, Magnetococcus sp. MC-1
MCGISGFYQPAASEQELAHNITRMTATLQRRGPDDGGFWLEPSCGLALGHRRLAIQDLSPLGHQPMADASGRYQIVFNGEIYNFLELKQNLERHYGPQPWRGHSDTEVLLALIGHSGLEAALAQCRGMFALALWDRQQRILTLARDRLGEKPLYYGRQGDSLLFASELKALRAHPHWQGGVDRHALTLFMRHSTVPAPYTIHPGIHKLQAGCYQRFQWHPEQGMQDLGMIHYWSMSQVVAHANAHPFDGDETAALQAVEQQLMAIIGRQMVADVPLGAFLSGGIDSSLITAMMQAQSSRPVQSFTIGFAEASHDESAYAQAIARHLGTQHTTLQVTPQDALALVPSLPLIYDEPFSDASQLPTTLLAGLTRQHVTVALSGDGGDELFGGYDRYGESMALWRLRGRVPSPLRRPLARAGRALPSGVWSALLRPVAACLPAKARDNPGDIVHKMMDLLVQPDFAHLYRHMLSHWSDPGNLVVGGHEPPTNLTRGWTQPWRQDPVAQMMYWDTLLYLPDDILVKVDRAAMWSSLECRIPLLDHRLVELVWSMPMHFKRRDGVPKWLLQRLLGKRVPEALFERPKMGFGVPLERWLRGPLKGWAQDLLAPALLQRQGYLNPEPIARIWRQHQQGSHNWHHLLWDLLMWQAWLAEHEG

SEQ ID NO: 1953 - protein, 156 aa, Sulfolobus tokodaii str. 7
MAGWTYPKLDIDENKLAKAVIKNVPASIRDLYNVCKAIRGMKLNDAKQFLNNVLEEKEALPFWKHSHGASHRSNISPKWKVKSGRYPKKAIKYVLKVLENAENNANSKGLDLENVKIVHIAAHKGIILKRYMPRAFGRSTRKYRYTSHIEVILGEV

SEQ ID NO: 1954 - protein, 531 aa, Shewanella sp. MR-4
MIKDFILPDIGEGVVECELVEWLVQEGDTIAEDQPIADVMTDKALVQIPAPFAGVVTKLYYAKGDIAKVHAPLYAVQIESDEAAPVAASQPEVQASTQTPASQSSAVGTSVEEFLLPDIGEGIVECELVEWLVQEGDTVVEDQPIADVMTDKALVQIPAIKAGKIVKLHYRKGQLAKVHAPLFAIEVEGGVSAPVSHAQEASAAAVNTAAPAACAAVSSEPARQGKALASPAVRRMARALDIDLSRVPGSGKHGRVYKEDITRFQAQGGAVPAAALVVAAPTVAQSTVSTAVASAARGDIVEPIRGVKAVMAKMMVESVSTIPHFTYCEEFDLTDLVALRESMKAKYSSDEVKLTMMPFFMKAMSLALTQFPVLNSQVNADCTEITYKARHNIGMAVDSKVGLLVPNVKDVQDKSILEVAAEITRLTNAARSGRVAPADLKEGTISISNIGALGGTVATPIINKPEVAIVALGKLQTLPRFNAKGEVEARQIMQVSWSGDHRVIDGGTIARFCNLWKQYLEQPQDMLLAMR

SEQ ID NO: 1955 - protein, 167 aa, Brassica napus
  misc_feature (57)..(57): Xaa can be any naturally occurring amino acid
IIIINVYLERIRGREKRSLKQVLCLSFTYYGTALSTLLNCLHFNHNALPLPPPPLPXLLIHRLLPSRSAVDSSVSYYEGTVWHDRLRPVRHSFRYTVRYALFDLDKSLETPPDHLSADEARLLARTTGPIFLLTIPPSVGYEQNPLSLYYCYNLGGPSKRFIEPVPP

SEQ ID NO: 1956 - protein, 411 aa, Xylella fastidiosa 9a5c
MAHFELIEKMAPNAVIKVVGVGGGGGNAVAHMVNSTVDGVEFIIANTDSQAIKNCGAKLQLQLGANVTKGLGAGANPEVGRQAALEDRERIIDALQGADMVFITAGMGGGTGTGAAPVVAQLAKEMGVLTVAVVTKPFPFEGRRRMQVALKGIEELNQHCDSLITIPNEKLITVLGRNATMIQAFRAANDVLQGAVQGIADLIVRPGLINVDFADVRTVMSEMGLAMMGTGSARGDDRAQAAAEAAVQNPLLDDVNLAGANGILVNITAGSDFTMAEFDEIGRTIDGFASEDATVVVGTVLDPEMQDEVRVTVVATGLSRTVSRAAQPRPEQQRASVKLVRNATTGQAEFGDLDNMGGAVSRAVGGSLGLGFGLRRSGTDAVSGSAPSAPVTAELPSDYLDIPAFLRRQAD

SEQ ID NO: 1957 - protein, 334 aa, Aspergillus oryzae
MSRYAEAHANPQGPGDARPTALQIVKDTEMEGKLAGKSAVITGVSSGIGLETVRAIAATGAFLYLTARDLNKAKTALDDIFKPEQMELIHMDQSSLESVRNAAKTILSKTDKVSLLINNAGIMALPELRLSMDGYELQFATNHLSHFLLFNLLKPAMLAASTPEFQSRVVNVSSDSHRHHGINASDNYNFQKGGYEPWTAYSQSKTAVIYMANELDRRYGSRGLHATSVHPGMIATNLGQYLTPEQIEQLLQNTRWNSLWKSFEQGAATTVWAAVGREWEGNGGKFLAGCAEAVRGPEGTEDYVGTFVNHTYKPEDEARLWKDSLEMVGLSDDK

SEQ ID NO: 1958 - protein, 324 aa, Mycobacterium sp. KMS
MRRSGERTGHGPAIVTLTMNPALDITTSAPQVRPTSKIRCVGARYDPGGGGINVARTAHVLGESVSAVFPVGGPTGDLVTELLGKADVPFRRIAIGDPTRESFTVNDDSSGQQYRFVLPGPCLTAQEQAKCLEELRFEARAAQFVVASGSLPPGVPSDFYQRVADICRDVGARLILDTSGDALQSVHSGVFLLKASVRELRERVGRDLLDRSDQLTAAQELIAAGVAEIIVVSLGSEGALLATSQGGHHFPPVPVEAVSGVGAGDAMVAAIAVGLTRGWSPTKSVQFGVATGAAMLLTPGTEVCARADVERLFEATPEPEEIVG

SEQ ID NO: 1959 - protein, 442 aa, Methanococcus maripaludis S2
MDVVIIGSGAGGLTTASNIKKHDKNAKVTVITSDKYIAYSPCAIPYVIGEEIADFDTIIMHTPKDYKAKGIDVIVEAEVLDVVSGENKVIYKKDGTETELKYDNLVLATGGTPFVPPIEGVTLDGVFKVRTIEDGQKITEWAKDTKNVVVAGAGAIGIEIAFGLKEIGLDVTVVEMVPQVFPRALDPDMAETVQKYLEEQGIKIILEKPVGKIIGNDKVEAVLVGEETIPAEMVIMSTGVRSNIELAKSAGCDIGRWAVLTNEKMQTSIPNIYAVGDCVEVIDAITMQNTLSPFGTTAVRQGKVAAKAIVKLEAEIKPVLNSMVSKIGKLEIGGTGMTETAAKMNGIEIVLGYSKALTRARYYPGGKPIYIKMVADKMTKKVIGCQIISEERVAERVDAMSVAISNGMTVEELANQEFCYAPPVSMVIDPIVFAAEDTLDKF

SEQ ID NO: 1960 - protein, 883 aa, Arabidopsis thaliana
MSYMPTSCLVLFFLLFLFHPLPWALSKEDLGWCEALFQCGNNTAGFPFWGGNRAKPCGHPLLELRCLNNITSLNISNHEYNVFHIDQTSNTLRLARTDLLGSFCSAEFNTPTFPREIFKLFPTYKSLTVLYNCDPKLSYRSSYTCPDLGLFSMSQSLDYQNSCQDSFKVNVPTSFVPEEKEMNLTHLESALRKGFEVKLVIDEIPCQECSSSRGICGFNSTTQICCNVTSLSGGVTCVPQHQPSADELRRRCSERFSCGNQRNLYYPFWIPGREYCGHPDFKLDCSGGFAELNIASVNFRILNMSYDSSNKRLARSDYLNDLCPPNPLNDEPLIETVLQFSADTELLTLYYDCQLNSSATSPFPSSYFGELGCDEGRSYYVTRNLSSPLLDRFRGVLNNLREMCKRKVSVPASGPALNTLQTNPNSNNLKMALEHGFELQDNSNCSMCVLSGGSCGYNQNSSLFVCYCKDGPQDNQCDINLDDIIGNRIVAIIIGIFVALCTIGGFIAFLVLLCPCCKVRIFRNRKTSDDRRQEKLKALIPLKHYTYAQVKRMTKSFAEVVGRGGFGIVYRGTLCDGRMVAVKVLKESKGNNSEDFINEVSSMSQTSHVNIVSLLGFCSEGSRRAIIYEFLENGSLDKFISEKTSVILDLTALYGIALGVARGLEYLHYGCKTRIVHFDIKPQNVLLDDNLSPKVSDFGLAKLCEKKESVMSLMDTRGTIGYIAPEMISRVYGSVSHKSDVYSYGMLVFEMIGARKKERFGQNSANGSSMYFPEWIYKDLEKADNGDLEHIEIGISSEEEEIAKKMTLVGLWCIQSSPSDRPPMNKVVEMMEGSLDALEVPPRPVLQQIHVGPLLESSWITEESSSISEIENRNLQVCEKILS

SEQ ID NO: 1961 - protein, 122 aa, Zea mays
MARLNSKAVVAAVVLAAVVLMMAGREASAALSCGQVDSKLAPCVAYVTGRASSISKECCSGVQGLNGMARSSSDRKIACRCLKSLATSIKSINMGKVSGVPGKCGVSVPFPISMSTNCDTVN

SEQ ID NO: 1962 - protein, 280 aa, Thiobacillus denitrificans ATCC 25259
MSEHALDVGLADFTQWVLEESKRRPVVVDFWAPWCGPCKSLKPVLEKLAAEYGGKFLLAKVNSDDNQELAARYGVRGIPSVKAFIDGQQVDEFSGALPEGEVRAFLDRLIPSPAEALREQAADARARGDSAAALERLAEASRLDPAHLGVRLDAAENMLDLGEADEASRLLASVPDDADPRVAQLKARLRFTGAAGEDENALRARLAANENDHGARLQLANLLVAAGQYEAGMDALLEIVRRDRSFEDDVGRKTLLSVFNLLGPGELVSRYRRLLASALN

SEQ ID NO: 1963 - protein, 662 aa, Frankia sp. EAN1pec
MRVVRGLSRVLFVLVAALDGAGSTSVHRAGFIGWYIGRDAVAWVHRGLLVFFVAFSAILRPVPPHSAPRRDPTGASDARLHHAGRRRQVFGRVGARTARHTTALLRGRASNAMANTESTALAAGTVVDRTPEWAALAAHHAEISGVTLRKLFADDPGRADSFTVEADGLRLDYSKNIVTARTVELLLALARRAGLGARIEAMFGGERINVTENRPVLHVALRTPLGTSIHVDGVDVVPEVHAVLDRMSAFCDRVRSGVWTGATGEHITTVVNIGIGGSDLGPAMAYQALRDYSDRSIAVRFVSNVDPTDIWEATHDLDPARTLFIVASKTFTTLETLANARAARAWLTAALGQDAVAHHFVAVSTNAEKVAEFGIDTANMFEFWDWVGGRYSMDSAIGLALMVAIGPHHFREMLAGFHAMDVHFRNTPFERNLPVLLGVLGLWYRDFFGAQSHAVLPYSQYLDRFPAYLQQLDMESNGKSVDLAGRPVPVPTGPVVWGTPGTNGQHAYFQLLHQGTTVVPADFIGFLAPNHPGVGDVDQHVLLMANFFAQTEALAFGRTAEEVAAEGVDAALVPHRTFAGNRPTNTLLAPKLTPFALGQLVALYEHKVFTQGVVWGVNSYDQWGVELGKVLAGRIIPELADPSAPPRHDSSTNALINLFRSV

SEQ ID NO: 1964 - protein, 431 aa, Rhodospirillum rubrum ATCC 11170
MATEIIVPQLGESVSEATVAKWFKKVGDAVAADEPLVELETDKVTVEVPAPAAGTLSEIIAAEGAEVAVGAVLALLAGAGEGAAPAKPAAAPAEKKAEPEKKPEAEKKAGPEKKAEPVAAAAPKAASAPLDYPLPPAVRKLVDDNALDPARIPATGKDGRLTRDDVVAFLKAGAPAGAPASAPAPASAPAAGPAREAGPREEKVKMTRLRRRIAERLKEAQNTAAILTTFNEVDMTNLMALRNQYKESFEKKHGVKLGFMSFFVKACVKALQEMPAVNSEISGDSLIYKNYYDIGVAVGGAQGLVVPVVRDCDAKSFATIEADIAGYGKKARDGSLTMEEMAGGTFTVSNGGVYGSLMSTPIINPPQSAILGMHKTMMRPMVMPDGSIAARPMMYLALSYDHRIVDGKEAVTFLVRVKECIEDPARLLLDA

SEQ ID NO: 1965 - protein, 528 aa, Glycine max
MDASTALMILSAIAAYLIWFTFVTRSLKGPRVWPLFGSLPGLIQHANRMHDWIADNLRACGGTYQTCICALPFLARKQCLVTVTCDPKNLEHILKLRFDNYPKGPTWQSAFHDLLGEGIFNSDGDTWLFQRKTAALEFTTRTLRQAMARWVNRAIKHRFCPILATAQKENKSVDLQDLLLRLTFDNICGLAFGQDPQTLAVGLPDNAFALSFDRATEATLQRFILPEILWKLKRWLRLGMEVSLSRSLKHIDNYLSHIIKNRKLELLNGTGSHHDDLLSRFMRKKESYSEEFLQHVALNFILAGRDTSSVALSWFFWLCIKNPHVEEKILHELCSVLKFTRGDDISTWLEEPLVFEEVDRLVYLKAALSETLRLYPSVPEDSKHVVKDDVLPNGTFVPAGSAVTYSIYSVGRMKFIWGEDCLEFKPERWLSPEGDKIQVQDSYKFVSFNAGPRLCLGKDLAYLQMKSIAAAVLLRHRLAVAPGHRVEQKMSLTLFMKYGLRVNVYPRDLKPVLEKLTTTEGAITVGQK

SEQ ID NO: 1966 - protein, 135 aa, Methanocaldococcus jannaschii
VIIMPGTKQVNVGSLKVGQYVMIDGVPCEIVDISVSKPGKHGGAKARVVGIGIFEKVKKEFVAPTSSKVEVPIIDRRKGQVLAIMGDMVQIMDLQTYETLELPIPEGIEGLEPGGEVEYIEAVGQYKITRVIGGK

SEQ ID NO: 1967 - protein, 241 aa, Brassica napus
STHASAASFRFNPRDADDIYAEIFGSEGGGSARGGGHRTFRDGSFRNGNFANGRSSELRKAPAVENPLPCSLEDLSKGAKKKMRLSRNVYDASGKMRVVEEILPIEIKPGWKKGTKLTFPEKGNEEPGIIPAPIIFVVEEKPHPVFKRDGNDLVFSQEITLLEALTGKTIDLITLDGRTLMIPLTDIINPDHEIVVPNEGMPISKEPGRKGNLRLKLNVRYPSKLTAEQKSELKRVLGGVL

SEQ ID NO: 1968 - protein, 721 aa, Photorhabdus luminescens subsp. laumondii TTO1
MNKKILILPGDGIGQEVCDAALPVFQALNLPVTLEIGDIGWTCWEREGNPVPANTWEKIASVDAVLLGAITSKGKEEAQQALPPHLRVKTRNYVSPVIQLRQRLGLYANIRPVRYVEGDRKPFRCCVIRENSEGLYAGFDFKGIPATATTWLQHPNIDKYGPEEAAWTVRLQTRFGLERLFITAFEYAKENNYSRVTFADKPNVMRESGHFAKGIFDTVAAGYPEIKADIHNVDAIALWMVKKPHEFGVIVSENMFGDILSDLAAGVMGGLGLAPSANIGSDIAYFEPVHGSAPGMAGKNKANPAAMFYTIALLLEHLGFADAAQQINCAVDNVIREGRTVTYDLGGSATTQQMAQAIISTLSKKCTSYSASVITVGDELLSGKYPNTNLQDISEYLTEQGYKVKQHQVCADDINQIATAVVRRLGQDTLIVVCGGLGPTLDDKTREAIAKVAGSPLEIRDNVWVEIQKQLEKLGVYCDHSNRFQAMFPSGAKVIPNVTGTAPGFSLNVDSSKIVVLPGPPSQMRLMLSEEHSIPPVAGMRERNYHWTLIGVSESKVGTMVNAFFDGVECDIHYLWKAPYVVVQVITPADAPLSVRQLVNFGAMFENKLVSDCQMTAMEKLSEQYRINWFTDDDELNTYLHTTYAVNNPSKSLSVNITAFPSISSFLSGEEMLGQMTLTTIDDEGRQHSVDFPCNKLLLQQSIPEYAAWSVLCARASKEEM

SEQ ID NO: 1969 - protein, 192 aa, Brassica napus
  misc_feature (185)..(185): Xaa can be any naturally occurring amino acid
MFGRSSCHWSSNRSVFIFTFQEEKKKQNPKPDSSCKIETLSESHFFFFLFNPQSVVRNSRKMVVSPKIAPSMLSSDFANLAAEAKRMVDLGADWLHMDIMDGHFVPNLTIGAPVIESLRKHTSAYLDCHLMVTNPMDYVEQMGKAGASGFTFHVEVAKENWQELVRKVKSAGMRPGVALKPGTPXVEEVYPL

SEQ ID NO: 1970 - protein, 460 aa, Methanococcus maripaludis S2
MEFSEWYSDILEKAGIYDLRYPIKGCGVYLPYGFKIRRYSFEILRKLLDETGHDETLFPMLIPENLLAKEGEHIKGFEDEVFWVTHGGKTPLEVKLALRPTSETTMYYMMKQWIKVHTDLPLKLYQVVNTFRYETKHTRPLIRLREIMSFKEAHTAHATKKECDAQIEEALTLYKAFFDEIGVPYVISKRPEWDKFPGADYTMAFDTIYPDGKTMQIGTVHNLGQNFAKTFELEFETPDGEKDFVYQTCYGISDRAIASLISVHGDEKGLVIPVDVAPIQIVLIPLLFKGKEEIVMDKIKELNNTLKSEFRVHLDDRDIRPGRKYNDWELKGVPLRIELGPRDIENGHALIVRRDTGEKITVEYSNILEEVEKIVSMYKENLKLKAEEKVKSFITVLDFENDVNSLSEKVKAKLLENKGIILIPFNESIYNEEFEELIDASVLGLTTYEGKEYISVARTY

SEQ ID NO: 1971 - protein, 406 aa, Xanthobacter autotrophicus Py2
MSEPLLIIGNGMAAAKLCEELSQRALGRYAVAVIGAEPHLAYNRVLLSEVLAGHMTAADAQMKPASWWRDRGVTLQYGTPAVAIDRTERAVVLADGRRLSYARLVLATGSHPIRLPLPGMDLNGVHTFRDLKDVEALLAAAAVPGTRAVVIGGGLLGLEAAVGLAGAGVKTSLVHLMDRLMERQLDPAAAGFLRRAVEGKDVEVLLQAASDAIEGDEQGRVTGLRLKDGRVVEADLVVVACGVIPNADLARAAGLEVKRGIVVDDTLATSDPAICAIGECAEHRGIAYGLVAPAYEQARVLAHRLAGEEARYDGSVMATNLKVSGVPVFSAGDVTGGEGTEDIVLTDRGLGVYRRLIVKDGLLVGAVLFGDTADGLFYLDLITQRTPITAMRADLAFGRDAIAAAA

SEQ ID NO: 1972 - protein, 357 aa, Magnaporthe grisea 70-15
MAEFVRAQIFGTTFEITSRYSDLQPVGMGAFGLVCSARDQLTNQNVAIKKIMKPFSTPVLAKRTYRELKLLKHLKHENVISLSDIFISPLEDIYFVTELLGTDLHRLLTSRPLEKQFIQYFLYQIMRGLKYVHSAGVVHRDLKPSNILVNENCDLKICDFGLARIQDPQMTGYVSTRYYRAPEIMLTWQKYDVEVDIWSAGCIFAEMLEGKPLFPGKDHVNQFSIITELLGTPPDDVINTIASENTLRFVKSLPKRERQPLKNKFKNADPSAIDLLERMLVFDPKKRITATEALAHEYLTPYHDPTDEPIAEEKFDWSFNDADLPVDTWKIMMYSEILDYHNAEAGMQQMDDQFTGQ

SEQ ID NO: 1973 - protein, 239 aa, Zea mays
MDSDLWISRLTAAKRQFALQRAQRQHAAPASHHDRFGYDDIEPEDDLHSDFPCPDCYEDHDVASLCAHLEDEHPFESKIVSCPVCSARISKDLVDHITLQHGYLFKLQKHQRVRRVTGNGNHNLSYAGRDLQLQETYLKVLLGNSSRSSSTNASSTVTDSLLPSLVVNLSSPEVEDASKFSAPAVVENNWFKRSLPSKTWKLRTVDSTLSHEERERRRRRAAVRSAFVQHLLVTTIFED

SEQ ID NO: 1974 - protein, 360 aa, Burkholderia xenovorans LB400
MSKKYRIAVIPGDGIGVEVMPEAIRVLEAVKARFGIELEYQHIEWASCEYYAKHGKMMPDDWKAQLLSADAILFGAVGWPDTVPDHISLWGSLLKFRREFDQYINLRPARLFAGVPSPLAGRKAGDIDFWIVRENTEGEYSSVGGVMFEGTEREFVLQESVFTRHGSERVLKFAFDLAQRRARKKITVATKSNGIAISMPWWDKVAAGIAAQYPDVTWDKQHIDILCARFVLNPDRFDVVVATNLFGDILSDLGPACTGTIGLAPSGNLNPDRKFPSLFEPVHGSAPDIAGKNIANPIAMIWSAAMMLDFLGNHAGKEREAHDAILAAIEATLIEGPHTGDLGGKANTTEVGQAIAKKLA

SEQ ID NO: 1975 - protein, 490 aa, Burkholderia xenovorans LB400
MTRTFELGELIRSDNFIDGAWTPAQDNLRFAVTNPASGEIIAEVADSSPADARAATDAAARALPAWRARLPKERAAVLHRWHALIMANLDALGALISLEQGKPLAEGKGEVAYGASYVAWFAEEATRIYGDLIPQQQRGKRMTAVKEPVGVVAAITPWNFPLAMIARKIAPALAAGCTVVAKPAEDTPLTASALVLLAHEAGVPPGVLNLITASRDHAVAAVAEWLHDARVRKITFTGSTPVGKYLARESAETLKKLSLELGGNAPFIVFDDADLEAAVAGLMAAKFRNGGQTCVCPNRVYVQAGVYERFGALLAERVGALKVAPATDPAAQIGPMINSRALDKIARHVDDAVAHGARVLTGGKRLAELGPHYYAPTVLADATAAMQLNSEETFGPIVPLFRFEDEAEAVNAANDTPFGLAAYFYSEGVKRIDRVARALEAGIVGINEGAVASEAAPFGGVKESGYGREGSKYGLDDYLSIKYLCQGNLE

SEQ ID NO: 1976 - protein, 337 aa, Sulfolobus tokodaii str. 7
MGFTVALIQGDGIGPEIVSKSKRILAKINELYSLPIEYIEVEAGDRALARYGEALPKDSLKIIDKADIILKGPVGESAADVVVKLRQIYDMYANIRPAKSIPGIDTKYGNVDILIVRENTEDLYKGFEHIVSDGVAVGMKIITRFASERIAKVGLNFALRRRKKVTCVHKANVMRITDGLFAEACRSVLKGKVEYSEMYVDAAAANLVRNPQMFDVIVTENVYGDILSDEASQIAGSLGIAPSANIGDKKALFEPVHGAAFDIAGKNIGNPTAFLLSVSMMYERMYELSNDDRYIKASRALENAIYLVYKERKALTPDVGGNATTDDLINEIYNKLG

SEQ ID NO: 1977 - protein, 257 aa, Dechloromonas aromatica RCB
MTQVVLTEVIGKVGLIRINRPEAMNALNNDVVDGIGAAIDIYEADENIGCIVITGNEKAFAAGADIGFMKDFDYMHAYKTDFITRNWERIKTTRKPVIAAVSGFALGGGCEMAMMCDMIFAADTAKFGQPEIRLGTMPGAGGTQRLPRAVGKAKAMDMCLTARMMDAAEAEKAGLVARIIPAEQLLDETLKAAQTIAGYSLPVVMMIKESVNRAYESSLNEGLLFERRVFHSAFALEDQKEGMAAFVEKRKPVFKNR

SEQ ID NO: 1978 - protein, 352 aa, Zea mays
MKLIFYSRLCCTCTSGAAAEMGADGGLNRPAEKPSDGEGGEARVFRCTDYSLPRTTLALALWLGGIHFNVLLVLASLFLLSGRAAAIVVAFQLLFMFAPVNDRDKWGRSVARFICRHAMGYFPITLHVEDYKSLDPSRAYVFGYEPHSVLPIGLSALADLVGFLPLTKIKVLASSAVFYTPFLRQIWTWLGLVPATRKNFYCYLGAGYSCIVVPGGVREMLHMNNDSEVAFLKSRKGFVKIAIQSGCPLVPVFCFGQSYAYKWWRPGGKLFIKIARAVKFTPIIFWGRFGTPFPFPKPMHVVVGKPIEVNKIPHPTIDEINEVHEQFIIAMRDLFEKYKAKAGYPGLHLRVL

SEQ ID NO: 1979 - protein, 293 aa, Zea mays
MTEQLNREYDIGDEIGRGRFGVVRRCVSRATGDAFAVKSVDRSLLGDDLDRALAELEPKLARLAGGEGDGNPGVLQVRAVYEGDAWTHTVMDLCTGPDLLDWIRLRRGAPVPEPDAARVVAQLAEALAGCHRRGVVHRDVKPDNVLLDVDPAGEAPPRVRLADFGSAAWLGEGARGRAEGLVGTPHDVAPEVVAGGEYGEKVDVWSAGVVMYALLSGGALPFGGETAADVFAAVLRGSLRFPPALFAGVSPAAKDLMRRMMCRDVSRRFSAEQVLRHPWIQSGGGGRELVRPT

SEQ ID NO: 1980 - protein, 277 aa, Zea mays
MSAVVCGKRSSSIFGDELVPSPSSPPSPSHHHHPAKRARCSPSRWREGLLHHLLTLFPDMDPQLLEKALEASGDDLDSAIKRLNELRLESAGAILSATVCESEKDISSAHNLLAEGTTSNGHLDIATENPPAIDNSQTSHHSSEWVDLFVKEMMSSSDIDDARARASRALEVFEKSIMDRVGPEAVQNLHRENVMLKEQLAIILRENAVLKRGVAIQHERQKEFDVRTQEVDSLKQLVLQYQEQIKTLEINNYALRVHLKQAQQGNSMHGRFPPDVF

SEQ ID NO: 1981 - protein, 108 aa, Francisella tularensis subsp. holarctica
MTLSNVIKTDEANFDKLIDNTNKAVLVDFYADWCGPCKTLAPILDQLSKDYTKAVIVKVNVDENQNLAARFAIRSIPTLIVFKNRKQLETLMGVHTASQLEQKLKAYE

SEQ ID NO: 1982 - protein, 332 aa, Anaplasma phagocytophilum HZ
MEVITVREALRLAMEEEMERDQSVFLMGEEVGEYQGAYKISQGLLERFGPQRVVDTPISEHGFTGLAVGAAFCGLKPIVEFMSFNFSMQAMDQIVNSAAKTNYMSGGQLGCPIVFRGPNGAAAGVAAQHSQCFASWYSHVPGIKVVAPYFAADCKGLLKSAIRDPNPVIFLENEIAYGHSHEVTEEQLSKDSLVELGKAAIVREGKDVTIITFSLQLKYALEAAEILLKDNISAEVIDLRTLRPLDTEAILKSVKKTNRVVTVEEGWPFCGVGAEITALIDECAFDDLDAPVTRVTAKDVPLPYAANLESLALPGVEDIVSAVHKVCNYSIA

SEQ ID NO: 1983 - protein, 64 aa, Zea mays
  misc_feature (26)..(26): Xaa can be any naturally occurring amino acid
MDGGGGGVGGGGVVAGVIGGRAESGXAGGVGGDVELVSKTLQFEHKLFYFDLKENPRGRYLKIS

SEQ ID NO: 1984 - protein, 384 aa, Mycobacterium avium subsp. paratuberculosis K-10
MSNTMSKTTSPITANLGDTKRPVVAGAERHPGWHALRKLAARITTPLLPDDYLHLANPLWSARELRGRVVDVRRETEDSATLVIKPGWGFNFDYQPGQYIGIGLLIDGRWRWRSYSLTSSPATSASARTVTITVKAMPEGFLSSHLVAGVEPGTVVRLAAPQGNFVLPDPAPASILFLTAGSGITPVMSMLRTLVRRNQIGDIVHLHSAPTEADVMFRGELAALANEHPGYRLQLRETRTRGRLDLSLLDREVPDWRERQTWACGPEGMLNAAERVWSAAGIGEQLHLERFAVSKAAPAGAGGMVTFARSGRSVDADAATSLMDAGEAAGVQMPFGCRMGICQSCVVGLVEGHVRDLRTGAEHEPGTRVQTCVSAASGDCVLDI

SEQ ID NO: 1985 - protein, 200 aa, Triticum aestivum
RVRARVREINIEKLQLVEAEKKKIRQEYERKEKQVDVRKKIEYSMQLNASRIKVLQAQDDLVNKMKEDAMKELLNISSNHHEYKNLLKELVVQGLLRLKEPAVLLRCRKEDHHNVESVLHSAKNEYASKADVHEPEILVDHSVYLPPSPSHGDEHGQICHGGVVLASRDGKIVFENTVDARLEVVFRKKLPEIRKLLVAA

SEQ ID NO: 1986 - protein, 401 aa, Rickettsia rickettsii
MALIIQKFGGTSVANIDRIKKIVPIIKTEIAKNNQVIVVVSAMAGVTNQLVTLCNEVSSLNNISQFAEYDVALSSGEIVTASLLALALQEEDIKARSFLAWQLPMLTDNNHSKALVESITTDLLEKYLQLNTIPIIAGFQGINKSHRLTTLGRGGSDTTAALIAAAMKADRCDIYTDVEGIFTADPRIIPNAKKIKEIDFLEMLELASSGAKVLHPRAGELVMRYKIDMRVLSTFSQDTEGTLITSKDKNMENGIINSITSNKNLLKISVKSMSLSFLQVANMITQNNNHIEFMQEIKNNEEYSFITNLTDKNNLQALLTNLKDDKQIQDFTFDTEIATISLIGYGIKNDCKLLETILSKLTNDNINVHMIQLSAVKITLFINDQDAEKTIFNLYNLFKIS

SEQ ID NO: 1987 - protein, 481 aa, Francisella tularensis subsp. holarctica
MSENLDKIIEQDYEHGFVTNIEAETIEAGLNEDVIRLISARKNEPEFLLEWRLKAYHKWLEMKSPKWADLNYPPIDFQAISYYSSPKSLKNHPKSLDEVDPEIIETYNKLGIPLHEQEMLVGVRNIAVDAVFDSVSVVTTFKEKLAEAGVIFCPISEAVQKYPELVQKYLGSVVPQGDNFFAALNSAVFSDGSFVYIPKGVTCPMELSTYFRINAMNTGQFERTLIIADEGSYVSYLEGCTAPMRDENQLHAAVVELVALDGAEIKYSTVQNWYPGDKDGKGGIYNFVTKRGVCHKNAKISWTQVETGSAITWKYPSVVLRGDNSIGEFYSVALTRHAQQADTGTKMIHLGKNTKSTIISKGISAGKASQAYRGLVRISPNAANARNFSQCDSLLIGHNCGAHTYPYIENKSNSSQIEHEATTSKISDDQLFYCKQRGLSEEDAIAMIVNGFCKEVFKKLPLEFAVEAHKLMEVSLEGAVG

SEQ ID NO: 1988 - protein, 205 aa, Pseudomonas aeruginosa UCBPP-PA14
MSVVFVAASKLPTPFGEFTMHGFLDEESGKEHVALSMGDIADGAPVLGRLHSECLTGDALFSLRCDCGFQLEGALAAIAEEGRGVLLYLRQEGRGIGLLNKIRAYELQDGGADTVEANLQLGFGADQRDYAMCQPMLAHLGVSSLRLMTNNPRKVKALESYAITVAERVPLQRGLNKHNRRYLATKAGKLGHMLGSLHQGEAETT

SEQ ID NO: 1989 - protein, 438 aa, Methanococcus maripaludis S2
MQFKSELPPVQVALDLVDLPRAINIAKEAVLGGATWVEAGTPLIKSEGMNAIRELRKNFPTLTIVADMKTMDAGSTEVEMAAKAGANVILILGVGPDSMIKDAVKAGKKYGVLVGTDLIATEDPVKRAVELEEMGVDIINIHVGLDQQVLNVDPVELVKRVSENCKKAKIAAAGGLNSETAVKAYEAGADIIIAGGTLYKSADPEQTARDIVKSLETGKPVKTDKFKKFNEDELGSAFDIVSTSNISDAMHRTGEMKGLKPVWNSERPLKFAGPAVTVRTYSGDWSKPVSAIDNCEAGNVLVIDNCSSEIACWGGLATLSCKTKGVVAVVIDGAVRDVEEILKIGIPVYARSITPTAGEPKGFGEINAVIECAGRTVEPGDWIVGDENGIIVVPKNEAMEIANRAIDVKEREDRVKEEITRGTTLAKTIRLKDWELKK

SEQ ID NO: 1990 - protein, 439 aa, Glycine max
FGSREIKVDQVPANNHPQNGVFTSLNDKFGDRESEKVLNQTKNGDNSSQSGSSNHLEKDANGSQSGEDSGVKSVSAYRSSSHPITAPSPLSGLPEFSHLGWGHWFTLRDLELATNRFAKDNVIGEGGYGIVYHGQLINGNPVAIKKLLNNLGQAEKEFRVEVEAIGHVRHKNLVRLLGYCIEGTHRLLVYEYVNNGNLEQWLHGAMRQHGFLTWDARIKILLGTAKALAYLHEAIEPKVVHRDIKSSNILIDEDFNAKISDFGLAKLLGAGKSHITTRVMGTFGYVAPEYANSGLLNEKSDVYSFGVLLLEAITGRDPVDYSRPAAEVNLVDWLKMMVGCRRSEEVLDPNIETRPSTSALKRALLTALRCVDPDAEKRPRMSQVVRMLESEEYPILREDRRRRRSQAGNMEVETQRENSDTDKSDNPDYKPSGRRNQRM

SEQ ID NO: 1991 - protein, 377 aa, Yersinia pestis KIM
MPAQNPLQHQRQHDGIYHIGYFVGGKWSQAQEQFDVYNPATGELVARVAKSGKQETEAAIKAASEAFPAWRKTPAKQRAEILQRWYLLIMEHQQSLAELMVSEQGKPLKEALVEVAYAASFIQWFSEQAKRANGEIIPSAKEGARILATREPIGVVAAITPWNFPLAMLTRKLGPALAAGCTGLIKPANNTPLSAFALLALAEQAGVPAGVLNGVVGDTHAISDAIMASSDVRKISFTGSTNVGKTLMRNAAATMKRISMELGGNAPYIVFDDADLEAAVAGAMACKFRNAGQVCVCVNRFYIQDAIYDEFVNRLAAEVKKLKVGNGMDKDVNMGPLINLAGLEKVEEHVKDALEKGGRLLAGGIAMRWAVISSSQR

SEQ ID NO: 1992 - protein, 321 aa, Gibberella zeae PH-1
MPPPSANQQKVLIAQFVSLTGQTERQATRYLKNAGFKLNEAVDAFKMGWKGVKNRIATRVPIWSASKKASTDGPASFYQEPAAKPPKNSTSRYFASSGDSKGPSPLETKLDALFDQLQDTNDEKDKLELESTMSYLTDKLNVSIENAELLVALELLQAPAVGIITRRGYVDGWKVTGAGTTHQEHATHLRKLIKSLSSDQALFKKVYRHAFVAGRETDQKALSLENAFVYWEILFTPPGMEWKTSNHDWLQLWKDFLKAKWTRSVNKDMWNMTLEFALKSLSDESLSFWNEDGAWPSVIDDFVEWCRENGIAKTDGMDVDN

SEQ ID NO: 1993 - protein, 108 aa, Brassica napus
  misc_feature (104)..(104): Xaa can be any naturally occurring amino acid
MVLVLALGDLHVPHRAADLPPKFKSMLVPGKIQHIICTGNLCIKEIHDYLKTICPDLHIVRGEFDEDARYPDTKTLTIGQFKLGLCHGHQVIPWGDLDSLAMLXRQLD

SEQ ID NO: 1994 - protein, 433 aa, Staphylococcus epidermidis
MAFEFRLPDIGEGIHEGEIVKWFIKAGDTIEEDDVLAEVQNDKSVVEIPSPVSGTVEEVLVDEGTVAVVGDVIVKIDAPDAEEMQFKGHGDDEDSKKEEKEQESPVQEEASSTQSQEKTEVDESKTVKAMPSVRKYARENGVNIKAVNGSGKNGRITKEDIDAYLNGGSSEEGSNTSAASESTSSDVVNASATQALPEGDFPETTEKIPAMRKAIAKAMVNSKHTAPHVTLMDEIDVQELWDHRKKFKEIAAEQGTKLTFLPYVVKALVSALKKYPALNTSFNEEAGEVVHKHYWNIGIAADTDKGLLVPVVKHADRKSIFEISDEINELAVKARDGKLTSEEMKGATCTISNIGSAGGQWFTPVINHPEVAILGIGRIAQKPIVKDGEIVAAPVLALSLSFDHRQIDGATGQNAMNHIKRLLNNPELLLMEG

SEQ ID NO: 1995 - protein, 540 aa, Synechococcus sp. RS9917
MAKDPGRVLIFDTTLRDGEQSPGASLNLEEKLAIAQQLARLGVDIIEAGFPFASAGDFEAVQRIAQQVGGAQGPIICGLARASRGDIKACADAVAPAPRRRIHTFIATSDIHLEHKLRKSRKEVLAIVPEMVAYARSLVDDVEFSCEDAGRSDPEFLYEVIEAAIAAGAGTINIPDTVGYTTPAEFGALIAGIDQHVPNIQEAVLSVHGHNDLGLAVANFLEAVKNGARQLECTINGIGERAGNAALEELVMALHVRRRYFNPFLGRDEESPTPLTAVRTEEITKTSRLVSNLTGMVVQPNKAIVGANAFAHESGIHQDGVLKNRLTYEIVDARTVGLSDNRISLGKLSGRSAVRARLEELGYDLSREDLDEAFARFKDLADRKREITDRDLEAIVSEQVQQPEARYQLKLVQVSCGSSLRPTATVTLADEEGREQTAAAIGTGPVDAVCRALNALAEEPNQLVEFSVKSVTEGIDAMGEVTIRLRRDGALYSGHSADTDVVVAAAQAFVNALNRLVAGASRSAIHPQRDHAVLETRPSL

SEQ ID NO: 1996 - protein, 613 aa, Xanthomonas axonopodis pv. citri str. 306
MCGIVALRSFVAEAPLQALAERALDALSRRGPDAQGLLCLEQPVPTALGHRRLAILDLSAAATQPMRCAETGNVLVFNGEIYNFLELRRELEGLGHQFRTDSDTEVILHGWRAWGEGLFPRCNGMWALVLLEQASGDLIYCRDRLGVKPLYLHHDGRQLVLASEIRAIAASLGGYPPPNPAAVFDFLVTGLSDHTSDTFYAGIRAVPPGWLYRVSPAGHSRRTPYHQWPLPGAVAPLDAQATMELLEDSTRLRLRSDAPTVSLLSGGLDSSILTTLSVQAGALPRTCFAGAFTYGYDDTEQAGFDETEAAASLMQTLGQSERHFVHRARAIPDEEELLALVAAQEEPFCTPSILASFRMYRAIRAAGYKVVLNGEGADELFGGYVRLYLALSARSALHQARLPTAIRLLSTGAVDPRLLLNRLAWDLPAGALGALLRRQRPSVACMSSALWHDQAARLQSLQVDRRVDIEARLRRDVLSTNLPMVLRMTDRNSMSAGIEVRAPFLDYRVVERALSTPALQRMGDYHGKAMLRHAFAERLPARVTTQRKSTGFGHAEQFLVDRMPLQQALATLPEGVNELLNVARLRREFASGRSHSTLWFAVSVALWYRSVYA

SEQ ID NO: 1997 - protein, 154 aa, Arabidopsis thaliana
MPVPLAPYPTPPAPALAPSYNTPPANGSTSGQSQLVCSGCRNLLMYPVGATSVCCAVCNAVTAVPPPGTEMAQLVCGGCHTLLMYIRGATSVQCSCCHTVNLALEANQVAHVNCGNCMMLLMYQYGARSVKCAVCNFVTSVGGSTSTTDSKFNN

SEQ ID NO: 1998 - protein, 823 aa, Pneumocystis carinii
MDYLKKVRLWSEEEVGEWLESNNFGDYMDIFKENNINGDILLECNAAVLKELGVKKLGDRIRLSVCIKGLREKCIESARKSKMSFLMIDNQIQGFSFTLQSPTDPLIPVKSSELASPTSNFQLDNSYSDACCFDSLNNFHSVLSNISCSTKSISRNSSISTQKVFEKSPIFLETNVMQSDSIKKNCLKFIGEKGQTRIVNISLCYTADAILSKALKKFNITENPSEWRVFITNEDGSFECISNDTLLTISRQLSRPERERLILKRKSDPLTQEEFKKSQTIAREQRDAIYHTAVMAKTSGNLRKLETFFGEKLAPTLTSSFTTPLPSPLPKDNKYGNITHIRNFFGQRPPSELINSNLAEYFPGHEKKVLEQTIKNSIKSNHLNSFKGSNFDTPSSTLTYDLSSIPAVGEERIQYEGRRLSGVSHTLSLSRFISTRFPTLLESSILRENSSHHTLSSSSKLNSEGNTQDSKPSFRKKLEEKASSDETFKSESPNMLMEPSILSDFYDASLETDRDLLDDNIFENNEAKDFNTEKEIENNNSGPTRWIKGALIGSGSFGSVFLGMNALSGELMAVKQVEIPSIDIQGCKRKRAMLDALQREISLLKELHHENIVQYLGSSMDETHLTFFLEYVPGGSVTALLNNYGAFEEPLIRNFVRQILKGLNYLHNKKIIHRDIKGANILVDNKGGIKISDFGISKKVEANLLSMTRNQRPSLQGSVYWMAPEVVKQTLYTRKADIWSLGCLIVEMFTGKHPFPKMNQLQAIFKIGQYVSPDIPEHCTSEARHFLEKIFEPDYHARPTAADLLKYSFLGPMVSSPLTDAKK

SEQ ID NO: 1999 - protein, 396 aa, Nicotiana benthamiana
MSCTVAISNLPAFWPVARVPLTKSLLCKSASFSSSSSPNSSKTLTKFPSFTSSSSSSSSPSLQFHILRFQKPLPVPAPAPINLIRNSTECSTSTPNSTSPTVLKRKRPAKLDIPIVSTTFGNFPALPAAAAADFVEVEGDGYYVCCKRGRRGPMEDRFSALVNLQGGSKEGIFGIFDGHGGAKAAKFAAENLNKNIMDEVVTRKDENVMEAVKNGYLKTDSEFLNQEFRGGSCCVTALIRNGDLVVSNAGDCRAVVSRDGIAEALTSDHKPSRKDEKDRIETLGGYVDYCNGVWRIQGYLAVSRGIGDRYLKQWIIAEPETMVLRLNPELEFLVLASDGLWDKVSNQEAVDAARPLCARISKPQLLSASKSLVDLAVSRGSVDDISVMIIQLQQFC

SEQ ID NO: 2000 - protein, 506 aa, Musa acuminata
MDVTGTTFLFASFLVLLLLLLRKHSYSRRGNARLPPGPFKLPLIGSLHHVLGPLPYRSLAALSEKFGAVMLLKLGEVPTLVVSSPEAAAEIMKTQDVSFASRPMISSVRIIAYGDKSPVFAPYGSYWREVRKMSILELLSVKRVLSFRSIREEEVLNFVRSMDLSSNSGSTVNLSSKFALMTNDIAARAIIGRKCKYQKQFLQVINRALEASGGFSLADLFPSSSLVSLLSGIPLKLPRLHREMDAILSSIIQEHRERNSTEQVEEDLVDVLLKVQREGSVPFAFTDVAVKAIILDLFGAGGETTATTLEWIMSELMRNPGAMKRVQQEVRETVGGKGRVREEDINEMKYLRMIIKETLRLHPPLPLLLPRECQEPREILGYQIPEKTRVLVNVWALGRDPRHWDDAAMFKPERFDRGSSTVDFKGNNFEFIPFGAGRRMCPGIAFGMASVELPLASLLYHFDWELPARDGVKPNELDMTENFSLTCRRRSELCLRAIHRNPCPMY

SEQ ID NO: 2001 - protein, 373 aa, Zea mays
MARRSTPLLRRLLAPSPSLSTPLADAVSRRTVTYMPRPGDGAPRGVTLIPGDGIGPLVTGAVRQVMEAMHAPVYFETYEVHGDMPTVPAEVIESIRRNKVCLKGGLATPVGGGVSSLNVQLRKELDLYAALVNCFNLPGLPTRHDNVDIVVIRENSEGEYSGLEHEVVPGVVESLKVITKFCSERIAKYAFEYAYLNNRKKVTAVHKANIMKLADGLFLESCREVAKKYPGIQYNEIIVDNCCMQLVAKPEQFDVMVTPNLYGNLVANVAAGIAGGTGVMPGGNVGQDHAIFEQGASAGNVGNEKIVEKKRANPVALLLSSAMMLRHLQFPSFADRLETAVKRVIAEGKYRTKDLGGTSTTQEVIDAVIAKLG

SEQ ID NO: 2002 - protein, 107 aa, Synechococcus sp. RS9917
MSSAAAVTDASFEQDVLQSDVPVLVDFWAPWCGPCRMVAPIVDEISKEFEGKIKVFKLNTDENPNVASQYGIRSIPTLMVFKGGQKVDTVVGAVPKATLSGTISKYI

SEQ ID NO: 2003 - protein, 335 aa, Sulfolobus tokodaii str. 7
MQQLNQHNEIYDVIIVGAGIAGLSAALYTSRQRMKTLVVSKDLGGQLTLTDLIENYPVVEPLSGLSLARKVESQAKRFGAKFIYGEEIYKIDKKGDIFELQGILGSYKAKTVILAFGKTPRELNVPGEKEFKGKGVSYCAICDAAFFKDKPAAVVGEGEPGVEAIELLSKYARPAYYISMSTQLVGGDEGTLKSILNNENIKMFLGYKVIRIIGNSKVEGIVIQNSKTKEDKILNVDGVIIEMGYVLRTEFLKDFIKLNEKGEIIVDELGRTNVEGIFAAGDVTNTPYKQAVVAAAEGVKAALSAYNYLRSKSGLPPVNVDWKAEKQKAVVSFRL

SEQ ID NO: 2004 - protein, 506 aa, Musa acuminata
MDVTGTTFLFASFLVLLLLLLRKHSYSRRGNARLPPGPFKLPLIGSLHHVLGPLPYRSLAALSEKFGAVMLLKLGEVPTLVVSSPEAAAEIMKTQDVSFASRPMISSVRIIAYGDKSPAFAPYGSYWREIRKMSILELLSVKRVLSFRSIREEEVLNFVRSTDLSSNSGSTVNLSSKFALMTNDIAARAIIGRKCKYQKQFLQVLNRGLEASGGFSLVDLFPSSSLVSLLSGMSLKLPRLHREMDAILSSIIQEHRERNSTEQVEEDLVDVLLKVQREGSLPFAFTDVAVKAIILDLFGAGGETTSTTLEWIMSELMRNPGAMKRVQQEVRETVGGKGRVREEDINEMNYLRMIIKETLRLHPPLPLLLPRECQEPREILGYQIPEKTRVLVNVWALGRDPRHWDDAAMFKPERFDRGSSTVDFKGNNFEFIPFGAGRRMCPGIAFGMASVELPLASLLYHFDWELPERDGVKPNELDMTENFSLTCHRRSELCLRAVLRNPCPMH

SEQ ID NO: 2005 - protein, 489 aa, Gloeobacter violaceus PCC 7421
MRNSSRCTRGTLDTAPRRWDNVLDLTELFVGRFLLGLMLAGTLSLGAAVRAESEAVPLPPVQFSERTLANGLRVLLVEDHTSPTVAIQVAYRVGGKDDPPGRSGFAHLFEHLMFKGTANTKPETLDRLTEDVGGFNNAFTSEDITNYFEVVPSNYLETLLWAEADRLGSLVVDETNFKTERQVVIGEYDQRVLASPYGMLFELLDSKSYTVHPYRRGVIGNPAELNAATLEDVQNFHRTYYQPDNTTLVVVGDFDPVQANRWIDQYFGAVPNNSRPIPRVSAVEPKQSAERRTTHYGANVPLPAVALVYHAPARSSPDRAALDVLENVLSQGQSARLYRTLVYEKQVASQVSASADLREQPGLFVVYAILNAGEKPEQARTLLDGEIGKLQQVPVPEAELAKAKTQLIAELVRGREQANSRATELVLATLVGGDPRQVNTALEEIEKVTAQDVQRVARQYLVPTNRTVIDYLPRAMQPAGPTKKERKSP

SEQ ID NO: 2006 - protein, 488 aa, Gloeobacter violaceus PCC 7421
MKTLCWALTAMLLAPGTAATAQTQTPPPPGPPPSVSYPTPVERTLANGLRVIAVQRPNVPLVAAQLIVKSGSETDPPARPGIASLAADLLDKGTKTRSALEIAQAIDALGAELEAGAGFDATRVEVSATTPQFGRAFAILSEVVRTPAFAPAEIARAKTQAISNLQLAYSNPSALAQLVAQRLIYGEAPYGQPAEGTPASLGAIARADLERFHRTYFRPDNAVLVLGGDIAPEAAFAEAERVFGNWAKPAAPLPAFPADKRDTASRVVVIDQPEAGRTAVAVGKAVLRRADPAYILGVVTNAVITGYSGRLNAEVRIKRGLSYGAGASLVGRREPGPFVAATLVDHAKAAEATQVVIDTLASLVGQPAGAEELKPRKAVITGGFARSLETIDGLVNQVGTLALYGLPLGQINTFIGEAEAVTPLKVQEFAAGYLQSNQSVVLVGNAKAFLPDLRKRFAERASRIEVIPFQRLDLGRASLVRPTGVAGK

SEQ ID NO: 2007 - protein, 468 aa, Bacteroides thetaiotaomicron VPI-5482
MKTTINLGYIIFLSVVAALGGFLFGYDTAVISGTIAQVTHLFQLDTLQQGWYVGCALIGSIVGVLFSGILSDSIGRKRTMILSAILFSTSAIGCAFCIDFNQLVVYRIIGGIGIGVVSIVSPLYISEVSVAQFRGRMVSLYQLAVTVGFLGAYLVNYQLLAYSESGNHLPIAWLEKIVVTEVWRGMLGMETLPAIIFFIIIFFIPESPRWLIVKGQERKATYILEKIYNSFKEADFQLNETKSVLVSETRSEWSILLKPGILKAVIIGVCIAILGQFMGVNAVLYYGPSIFENAGLSGGDSLFYQVLVGLVNTLTTILALLIIDKVGRKKLIYYGVSGMVVSLILIGSYFLFGNAWNISSLFLLAFFLCYVFCCAISICAVIFVLLSEMYPTKIRGLAMSIAGFALWIGTYLIGQLTPWMLQNLTPAGTFFLFAIMCVPYMLIVWKLVPETTGKSLEEIERYWTRSER

SEQ ID NO: 2008 - protein, 190 aa, Glycine max
MVLVLALGDLHIPHRAPDLPAKFKSMLVPGKIQHIICTGNLCIKEIHDYLKTLCPDLHITRGEYDEETKYPETKTLTIGQFKLGLCHGHQVIPWGDLDSLAMLQRQLDVDILVTGHTHQFTAYKHEGGVVINPGSATGAYSSITYDVNPSFVLMDIDGLRVVVYVYELIDGEVKVDKIDFKKTSTSHSAH

SEQ ID NO: 2009 - protein, 336 aa, Bacteroides thetaiotaomicron VPI-5482
MIKVGINGFGRIGRFVFRAAMKRNDIQIVGINDLCPVDYLAYMLKYDTMHGQFDGTIEADVENSKLIVNGQAIRITAERNPADLKWDAVGAEYVVESTGLFLSKDKAQAHIEAGAKYVVMSAPSKDDTPMFVCGVNEKTYVKGTQFVSNASCTTNCLAPIAKVLNDKFGILDGLMTTVHSTTATQKTVDGPSMKDWRGGRAASGNIIPSSTGAAKAVGKVIPALNGKLTGMSMRVPTLDVSVVDLTVNLAKPATYAEICAAMKEASEGELKGILGYTEDAVVSSDFLGDTRTSIFDAKAGIALTDTFVKVVSWYDNEIGYSNKVLDLIAHMASVNA

SEQ ID NO: 2010 - protein, 316 aa, Sorghum bicolor
MVVPVIDFSKLELDGAERAETLAQIANGCEEWGFFQLVNHGIPLELLERVKKVCSDCYRLREAGFKASEPVRTLEALLDAERRGEEVAPVDDLDWEDIFYIHDGSQWPSDPPAFKETMREYRAELRKLAERVMEAMDENLGLDRGTIKAAFSGDGRHEPFFGTKVSHYPPCPRPDLITGLRAHTDAGGVILLFQDDKVGGLEVLKDGQWTDVQPLAGAIVVNTGDQIEVLSNGRYRSAWHRVLPMRDGNRRSIASFYNPASEATISPAAVATSGGEAYPKYMFGDYMDVYVKQKFQAKEPRFEAVKAAAPKSSPAA

SEQ ID NO: 2011 - protein, 966 aa, Zea mays
MARNAVDKATSIDAQLRLLAPQKLSDDDKLVEYDALLLDRFLDILQDLHGEDIRETVQECYELAAEYENKLDPKMLDEIGNVLTSLDPGDSIVITKSFSHMLILANLAEEVQIAYRRRIKLKKGDFVDENSATTESDIEETLKRLMHQLKKSPLEVFDALKNQTVDLVLTAHPTQSVRRSLLQKHGRIRNCLTQLYAKDITPDEKQELDEALQREIQAAFRTDEIRRAPPTPQDEMRAGMSYFHETIWKGVPKFLRRVDTALKNIGINERLPYNAPIIQFSSWMGGDRDGNPRVTPEVTRDVCLLARMMAANLYNAQIEDLMFELSMWRCSDELRVKVDQLYHSSKKDTTKHYIEFWKQVPPSEPYRVILSDVRDKLYNTRERARHLLASGFSEIPEEATFTDVEQFLEPLELCYRSLCACGDRSVADGSLLDFLRQVSTFGLSLVRLDIRQESDRHTDVMDAITEYLGIGSYRKWPEEKRQEWLLSELNGKRPLFGPDLPKSDEIADVLDTFHVLAELPSDSFGAYVISMATAPSDVLAVELLQRECHVKKPLRVVPLFEKLADLESAPAALARLFSVEWYRNRISGKQEVMIGYSDSGKDAGRFSAAWQLYKAQEELINVAKLYGVKLTMFHGRGGTVGRGGGPTHLAILSQPPETIHGSLRVTVQGEVIEQSFGEEHLCFRTLQRFTAATLEHGMHPPISPKPEWRALMDEMAIVATKEYRSIVFEEPRFVEYFRLATPEMEYGRMNIGSRPSKRKPSAGIESLRAIPWIFAWTQTRFHLPVWLGFGAAFKHVLDKDIRNLQTLQEMYNQWPFFRVTIDLVEMVFAKGDPGIAALYDKLLVSEDLWPLGARLRANYEETKQLLLQVAGHKDLLEGDPYLKQRLRIRDSYTTALNVCQAYTLKRIRDPGFQVKPRPHLSKDIMDMGKPASELVKLNTTSEYAPGLEDTLILTMKGIAAGMQNTG

SEQ ID NO: 2012 - protein, 278 aa, Yersinia pestis biovar Medievalis str. 91001
MIRLIERSQRTCSLKYDGHIPNLIGVNVMAVTKLVLVRHGESQWNNENRFTGWYDVDLSEKGRSEAKAAGKLLKDEGFTFDFAYTSVLKRAIHTLWNILDELDQAWLPTEKTWKLNERHYGALQGLNKSETAEKYGDEQVKQWRRGFAITPPALEKSDERFPGHDPRYAKLTDAELPTTESLALTIERVIPYWNDVIKPRIASGERVIIAAHGNSLRALVKYLDDLGEDEILELNIPTGVPLVYEFDENFKPIKHYYLGNADEIAAKAAAVANQGKAK

SEQ ID NO: 2013 - protein, 647 aa, Cryptococcus neoformans var. neoformans JEC21
MAMSSSKLADLRQLMKEQGVDAYVVPSEDAHASEYLAPCDARRAYITGFTGSAGCAVITHDKALCWTDGRYWLQAEKQLGEGWALMKSGLPEVPTWAQWLSTEVSPNSLIGIDPTVIPYSEALSLLSSLPSLSPAPSAASPSRLIATPNLIDSLWVPPSRPLRPSQPIFHLADRYTGEPVSSKLRRLRDKLIRIGSPGTVVASLDEIAWVFNLRGADIPYNPVFFAYTIITPDDCTLFVSPSSLTIEVRSYLHSNGIAVLDYSHVWTSLEAWKKRVKFDQENKSREQRDGVKRARLEEEAKKEEEGERLKKTDKILIGNKTSWAVAKAVGEDNVEVRRSLIEEMKAKKNATEIEGFRQCHIRDGAALVRYLAWLEEALENGESWTEYDAATKLEDFRKENKLFMGLSFETISSTGANAAVIHYSPPAEGSKVIEKKQMYLCDSGAQYLDGTTDVTRTLHFGTPNEDQKRAFTRVLQGHISLDTIVFPQGTTGYILDVLARRALWSEGLDYRHSTSHGIGSFLNVHEGPQGIGQRPAYNEVPLQEGMVISNEPGYYKDGEWGIRIEGVDVIERRETRENFGGKGWLGFERITMCPIQTKLVDSSLLTIEEKDWLNEYHAEVLAKLAPVLKEMGDERAGKWLERECQPL

SEQ ID NO: 2014 - protein, 260 aa, Leptospira interrogans serovar Copenhageni str. Fiocruz L1-130
MNEFSTVLYSTEKEIAVLLLNRPEKRNAISKELLSTLHKNILKAKKEKSIRSLVLSGVGPSFCAGADLKERVTMSPKEVKRFLEDLKNCFLELENFPYPTVAALDGDAFGGGLELALCCDLILLKNDIRIGLTETRLGIIPGGGGTQRLSRRIGISKAKEMIFTGKTIDAQTALDFGIANSIWHDSSLPAAKMLAEEIASQCAPIALQLAKKAITEGYGQDIRKALITESKYYNNTLNTEDRLEALKAFQEKRKPIFKGK

SEQ ID NO: 2015 - protein, 316 aa, Tulipa gesneriana
MASFPVINLEQLEGGERSTVMEALHDACANWGFFELLNHGISHELLDKVERLTKDHYKKCMEERFREFASKTLRDGSMVDVDNLDWESTFYLRHLPTSNMSEIPDLSDEYRETMKEFALRLEELAEQLLDLLCENLGLEKGYLKKAFSGSKGPTFGTKVSNYPPCPKPKLIKGLRAHTDAGGLILLFQDDKVSGLQLLKDGEWVDVPPMHHSIVINLGDQIEVITNGKYKSVMHRVLAQPDGTRMSIASFYNPGSDAVIYPAATLLEEAEKQSEVYPKFVFEDYMKLYAVQKFQAKEPRFETMKTMKIADAQSIAT

SEQ ID NO: 2016 - protein, 120 aa, Arabidopsis thaliana
  misc_feature (27)..(27): Xaa can be any naturally occurring amino acid
  misc_feature (93)..(93): Xaa can be any naturally occurring amino acid
MAGVMKLACMVLACMIVAGPITANALXMSCGTVNGNLAGCIAYLTRGAPLTQGCCNGVTNLKNMASTTPDRQQACRCLQSAAKAVGPGLNTAXRAAGLPSACKVNIPYKISASTNCNTVR

SEQ ID NO: 2017 - protein, 560 aa, Treponema denticola ATCC 35405
MNESTMQRLRYNYEPKIPKVFAEPLSLIKPEIGEATHAQSNQAELKEIFPHTYGMPIIRFVKGKSEVEHKPLKFGVILSGGQAPGGHNVISGLFDALKKGNANSKLYGFLRGPEGLVKGRYVEIKKALIDKYRNTGGFDIIGSGRTKIETEEQIESSIQNVKKLKLDALIIIGGDDSNTNAAFLAKYFIQAKLDTKVIGVPKTIDGDLKNQYIETSFGFDTATKLYSELIGNICRDVNSARKYWHFIKLMGRSASHIALECALKTQPNVCLIGEELAEKKVTLQQVTDYIVDIIVKRSQKGENFGVVLVPEGIIEFIPEMDELIEEINDIMAEKTSAFSKLKTFAGKKSWLQKHLSKKAFALFDNLPENISLQLLMDRDPHGNVQVSRIETEKLLIDLVTRKITEMKKEGTYNGKFSTYAHFFGYEGRSAFPSNFDSDYCYTLGFTAFLLALNGFSGYIASVKNLTDEVEHWLPCGVPLSMMMNMERRKGKMTPVIKKSVVDLNGKPFKTYEKNRDKWAVETLYRFPGAIQYFGDLEVCDIPTKTLLLEKGNLKEKRKKK

SEQ ID NO: 2018 - protein, 316 aa, Tulipa gesneriana
MASFPVINLEQLEGGERSKVMEVLHDACANWGFFELLNHGISNELLDKVERLTKDHYKKCMEERFREFASKTLQDGSKVDVDNLDWESTFFLRHLPTSNMSEIPDLSDEYRETMKDFVLRLEKLAEQLLDLLCENLGLEKGYLKKAFSGSKGPTFGTKVSNYPPCPKPELIKGLRAHTDAGGLILLFQDDKVSGLQLLKDGEWVDVPPLHHSIVINLGDQIEVITNGKYKSVMHGVVAQPNGTRMSIASFYNPGSDAVIYPAAALLKETEKQSDMYPKFVFEDYMKLYAVQKFQPKEPRFETMKTTETEGVQPIAT

SEQ ID NO: 2019 - protein, 397 aa, Oryza sativa
MTAAAAAGEIPAEDAPPPGALYSFGTPWPEFNEGISYIDTFRCADAGATTTLIEFYSTSYKSSAPLPGWIKRIRDGQITVDGEVATDPDMILREGSKLVYHRLPWQEPFAPHLLDVLYEDDDMIALNKPSGLQVLPKGLFQQRTVLAQLQLKDWKMPSSFCSKRKDAQSHPVPVHRLGRGTSGLLLCAKTKLAKAQLAAYFAEGATNAGKSRDETDICKARKISKFYRALVTGILENDEVMITQPIGLVRYPGVAEGLYAACSSGKPAMSKVRVLERLKIHNHTLIQVEIHSGRPHQIRIHLAYIGHPLVDDPLYGIGGQPKFDEPEPTSTADSFAYDGGYERPLQPVPGDCGYHLHAHWLVLCHPTTNEMIKITAPLPHILQTREEQQDTAKLLGG

SEQ ID NO: 2020 - protein, 403 aa, Oceanobacter sp. RED65
MNRVAVVGVGLVSSLGNDWKTVAQSLHLSKSGIRINESFIEKGLRSHVSGFIDCPEVENIDRKLRRFMGTNGEWCYVAMKNAVEQAGLTQTELSDESTALIVGAGGVASDDLVDAINVLEKSGIKKVGPYRVTREMGSAPSANLATAFKIRGPSYSVSSACATSAHCIGQGYQLIKTGLQKRVVAGGVDQAHWSHAMQFDAMGALTTKRNDEPSKASRPYDLDRDGFAISGGAGIVVLEDWGTAQERGANIIGEVIGFGQSSDGDNMVAPSGEGAERAMKHALNDAGLETVDYINTHGTSTPRGDLTELQAIKNVFENNIPYISSTKSLSGHGLGAAGVHEFIFSLIMMREGFLAASANLENPEDIAQDMPLLRQRLDQSFSTALSNSFGFGGTNACLIMKQA

SEQ ID NO: 2021 - protein, 278 aa, Skeletonema costatum
WDDMEKIWHHTFYNELRVAPEAHPVLLTEAPQNPKANRERMTQIMFETFNVPAMYVNIQAVLSLYASGRTTGCVLDSGDGVTHTVPIYEGYALPHAVVRLDLAGRDLTDYLMKILTERGYSLTTTAEREIVRDIKESLCFVAVDFEEEMKKAAESSALEKSFELPDGNIIVIGNERFRCPEVLFQPNLTGLEMDGIADSTFQTIMKCDVDIRKDLYANIVLSGGTTMFPGISERMSKEITALAPASIKVKIVAPPERKYSVWIGGSILASLSTFQQMW

SEQ ID NO: 2022 - protein, 311 aa, Tulipa gesneriana
MASFPVINLEKLEGGERSKVMEVLHDACANWGFFELLNHGISHELLDKVEKLTKGHYKKCMEERFREFASKTLQDVSKVDVDNLDWESTFYLRHIPTSNMSEIPDLSDEYRETMKEFVLSLEELAEQLLDLLCENLGLEKGYLKKAFSGSKGPTFGTKVSNYPPCPKPELIKGLRAHTDAGGLILLFQDDMVSGLQLLKDGEWVDVPPIHHSIVINLGDQIEVITNGKYKSVLHRVVAQPEGTRMSIASFYNPGSDAVIYPATTLLEEAKKKSEVYPKFVFEDYMKLYAIQKFQAKEPRFETMKNMESAVI

SEQ ID NO: 2023 - protein, 483 aa, Nicotiana tabacum
MDFIIYLFLSFSISLITFLLLRAAAAAHFRRRKTRLPPGTLGLPFIGETLQLISAYKTENPEPFIDDRVSKYGNIFTTHIFGEPTVFSTDAETNRFILQNEGRPFESSYPSSLQNLLGKHSLLLMRGSLHKRMHSLTMSFANSSILKDHLLADIDRLVRLNLDSWTGRVFLMEEAKKITFNLTVKQLMSLDPCEWTEKLMKEYMLVIEGFFTIPLPFFSSTYRKAIQARRKVAEALGLVVKERRKERGGGERLKNDMLEALFEGDGVEGFSDEVIVDFMLALLVAGYETTSTIMTLAVKFLTETPHALSLLKEEHEEIRLRKGDVESLLWEDYKSMPFTQCVVNETLRVGNIISGVFRRTMTDINIKGYTIPKGWKVFACFRAVHLDHEHFKDARTFDPWRWQSNAGSTSSPNVFTPFGGGPRRCPGYELARVELSVFLHHLVTRHSWVPAEPDKLVFFPTTRMQKRYPIIVQRRSLFDPCKE

SEQ ID NO: 2024 - protein, 459 aa, Leuconostoc mesenteroides subsp. mesenteroides ATCC 8293
MENGSTKRIASSFIYFFGAFGGILFGYDIGVMTGALPFLQKDWHLTDAGTIGWITSTLMLGAILGGALAGQLSDRLGRRRMILASSFIFAVGAIMAGVSPNNGVVWLLIARFLLGLAVGAASALVPSYMSEMAPAKNRGRLSGLNQLMIVSGMLLSYIVDYLLQGLPHTIAWRLMLGLAAVPAIILFVGVLRLPESPRFLVKTHKLAEARQVLTYIRTASEVDPELEDIQNTVAIESGAQKNITLSTLFSSKYRYLVTAGIGVAAFQQFMGANAIFYYIPLIVEKASGQAASSALLWPIVQGVILVLGALLYMVIADKFKRRTLLMVGGTVMALSFLMPSALNALVGADKFPPMLIVVFLSIFVAFYSFTWAPLTWVLVGEVFPLAIRGRASGLASSFNWLGSFAVGLLFPIMTAAMPQATVFAIFGVISIIAVLFIKFAVPETHGRTLEEIEAQGTNH

SEQ ID NO: 2025 - protein, 510 aa, Rhodobacter sphaeroides 2.4.1
MMGTEVRVPTLGESVSEATVATWFKKPGDRVAADEMLCELETDKVTVEVHAPVAGRLVEIVAPEGTTVAVSALLAQIGAAEAGEDPAPEKTHAGAEAKAGAGESKMIDVMVPALGESVSEATVSTWFKKPGDTVAQDEMLCELETDKVSVEVPAPAAGVLAEILVTEGTTVAAGSKLALISSDGQGVAAAPKAETPKKTEAAPAQEPAPKKDVEDAPSARKAMAEAGLSPDAVQGTGRDGRIMKDDVARAVSGASQAAAPTPAPQPALPRQPVPADDAAREERVKMTRLRQTIARRLKEAQNTAAMLTTYNEVDMSGVMGLRNEYKDAFEKKHGTKMGFMSFFVKACCHALKEVPEVNAEIDGTDIVYKNYVHMGVAVGTPSGLVVPVVRDADQMGFAQIEKKIAELGLRARDGKLSMAEMQGGSFTISNGGVYGSLMSSPILNPPQSGILGMHKIQERPVVEKGQIVIRPMMYLALSYDHRIVDGKGAVTFLVRVKEALEDPRRLLLDL

SEQ ID NO: 2026 - protein, 506 aa, Oryza sativa
MEFFTEYGEASQYQIQEVIGKGSYGVVAAAVDTRTGERVAIKKINDVFEHVSDATRILREIKLLRLLRHPDIVEIKHIMLPPSRREFQDIYVVFELMESDLHQVIRANDDLTPEHYQFFLYQLLRALKYIHAANVFHRDLKPKNILANSDCKLKICDFGLARASFNDAPSAIFWTDYVATRWYRAPELCGSFFSKYTPAIDIWSIGCIFAELLTGRPLFPGKNVVHQLDIITDLLGTPSSETLSRIRNEKARRYLSTMRKKHAVPFSQKFRNTDPLALRLLERLLAFDPKDRPSAEEALADPYFASLANVEREPSRHPISKLEFEFERRKLTKDDVRELIYREILEYHPQMLQEYMKGGEQISFLYPSGVDRFKRQFAHLEENYSKGERGSPLQRKHASLPRERVGVSKDGYNQQNTNDQERSADSVARTTVSPPMSQDAQQHGSAGQNGVTSTDLSSRSYLKSASISASKCVAVKDNKEPEDDYISEEMEGSVDGLSEQVSRMHS

SEQ ID NO: 2027 - protein, 419 aa, Sulfolobus solfataricus
MEEVLSSSLYTQQVKKLYKVGELLGLDNETLETLSQPERIIQVKIQIRGSDGKLKTFMGWRSQHNSALGPYKGGVRYHPNVTQDEVEALSMIMTWKNSLLLLPYGGGKGGVRVDPKKLTREELEQLSRKYIQAIYKYLGSELDIPAPDVNTDSQTMAWFLDEYIKITGKVDFAVFTGKPVELGGIGVRLYSTGLGVATIAKEAANKFIGGVEEARVIIQGFGNVGYYAGKFLSEMGAKIVGVSDSKGGVINEKGIDVGKAIEIKEKTGSVINYPEGRKVTNEELLISDCDILIPAALENVINKFNAPKVKAKLIVEGANGPLTADADEIMRQRGIAVVPDILANAGGVVGSYVEWANNKMGEIISDEEAKKLIVDRMNNAFNTLYDYHQKKLEDHDLRTAAMALAVDRVVRAMKARGIL

SEQ ID NO: 2028 - protein, 140 aa, Brassica napus
MAASVMLSSVTLKPAGFTVEKMSVRGLPSLTRAPSSFKIVASGVKKIKTDKPFGVNGSMDLRDGLDASGRKGKGYGVYKFVDKYGANVDGYSPIYNEDEWSASGDVYKGGVTGLAIWAVTLAGILAGGALLVYNTSALAQ

SEQ ID NO: 2029 - protein, 294 aa, Rhodobacter sphaeroides 2.4.1
MAVLVNENTKVICQGITGSQGTFHTEQAIAYGTKMVGGVTPGKGGSEHLGLPVFNSVYEAREVTGANASVIYVPPPFAADSILEAIDAEMELIVCITEGIPVLDMMKVKRALQGSSSRLIGPNCPGVITPGACKIGIMPGHIHKRGSVGVVSRSGTLTYEAVKQTSDLGLGQSSAVGIGGDPIKGTEHIDVLEMFLADPETQSIIMIGEIGGSAEEEAAQFLADEKKRGRWKPTAGFIAGRTAPPGRRMGHAGAIVSGGKGDAESKIEAMKSAGIVVADSPAHLGEAVMQALGK

SEQ ID NO: 2030 - protein, 170 aa, Zea mays
MATRLKSMTTLPKLIQTMRKEAPKHCNPVLPSLRRAFSLYDQINLIDNVPEDQLRFQEFNETSFTVNGVKYEGSLLCVGNLLMSWSPRQFSDITPDSLSIFQTVRPIPELLIVGCGRNIHPVTPELRQFVKSIGMKLETVDSRNAASTYNILNEEGRVVAAALLPYGVTS

SEQ ID NO: 2031 - protein, 115 aa, Triticum aestivum
MAHSAVAQVVLVAVVAAMLLAATEAVVSCGQVSSALSPCISYARGNGANPSAACCSGVRSLASSARSTADKQAACKCIKSAAAGLNAGKAAGIPTKCGVSVPYAISSSVDCSKIR

SEQ ID NO: 2032 - protein, 449 aa, Clostridium symbiosum
SKYVDRVIAEVEKKYADEPEFVQTVEEVLSSLGPVVDAHPEYEEVALLERMVIPERVIEFRVPWEDDNGKVHVNTGYRVQFNGAIGPYKGGLRFAPSVNLSIMKFLGFEQAFKDSLTTLPMGGAKGGSDFDPNGKSDREVMRFCQAFMTELYRHIGPDIDVPAGDLGVGAREIGYMYGQYRKIVGGFYNGVLTGKARSFGGSLVRPEATGYGSVYYVEAVMKHENDTLVGKTVALAGFGNVAWGAAKKLAELGAKAVTLSGPDGYIYDPEGITTEEKINYMLEMRASGRNKVQDYADKFGVQFFPGEKPWGQKVDIIMPCATQNDVDLEQAKKIVANNVKYYIEVANMPTTNEALRFLMQQPNMVVAPSKAVNAGGVLVSGFEMSQNSERLSWTAEEVDSKLHQVMTDIHDGSAAAAERYGLGYNLVAGANIVGFQKIADAMMAQGIAW

SEQ ID NO: 2033 - protein, 362 aa, Synechococcus sp. RS9917
MSSTRKRRVFPFTAVIGQEEMKLALLLNVIDPRIGGVMIMGDRGTGKSTTIRALADLLPGIEVVAGDPYNSSATDPDLQSSEVRQRLEHGESLATETRQVPMVDLPLGATEDRLCGTIDIEKALSEGVRAFEPGLLAKANRGLLYVDEVNLLDDHLVDVLLDSAASGWNTVEREGVSVRHPARFVLIGSGNPEEGELRPQLLDRFGMSVEVRTVRDPELRVQVVDQRTAFDSDPEGFSAAVEANQQALQQRVVEAQGRLSQVQIDADLRLRISAICGELDVDGLRGDIVTNRAARALAAFEGRTEVTEEDVARVASCCLRHRLRKDPLEQVDSGDRVVKVFCKVFERGESNDRGAFELALAA

SEQ ID NO: 2034 - protein, 402 aa, Roseovarius nubinhibens ISM
MSKIVVIGAGQAGSSLVAKLRTLGHDGSITLIGAESAPPYQRPPLSKKYLLGEMELERLYLRPESFYADQGIDLRLGATVTGIDRDAREVILGDERLPYDQLALTTGSAPRRLPAAIGGDLAGVFTVRDLADVDAMEPMVRAGAHVLIVGGGYIGLEAAAVAASRGLKVTLVEMSDRILQRVAAPETSDFFRKLHGNHGVDIREGVGLDRLLGDGKVSGARLSDGSELAVDFVIVGVGITPETALAEAAGLALDNGIAADAQGRTSDPAIWTAGDCASFPHGAGRLRLESVPNAIDMAECVAENMLGAGKDYVPQPWFWSDQYDVKLQIAGLSTGFDRIVTRHDDGDAVSFWYFKGDQLLAVDAMNAPRAYMVGKRLIDNGKTADPAAIADPATELKTLLKP

SEQ ID NO: 2035 - protein, 254 aa, Oryza sativa
LVDASTLKKEVAEGVDIMVVRELTGGIYFGQPRGFGKNDKGEDTGFNTEVYSASEIDRITRVAFEVARKRRGKLCSVDKANVLEASMLWRKRVTSLASEFPDIELSHMYVDNAAMQLIRNPKQFDTIVTNNIFGDILSDEASMLTGSIGMLPSASVGESGPGLFEPIHGSAPDIAGQDKANPLATILSAAMLLRYGLGEENAAKRVEAAVTETLNNGFRTGDIYSPGTTLVGCKRMGEEVLKTVESQSAVALNS

SEQ ID NO: 2036 - protein, 430 aa, Gluconobacter oxydans 621H
MLTPILVICLLIFLNAVFAMGEMALISAKRPRLDVLAKQGVWGATTAIRLAEDPHSFLPTVQVGMTLVSILEGTFGGSQMESTVTAWIANIPSLRPIASEVSIVLVVAMITFTMLVFGELIPKQIALQQPEAIASRLAWLLVGVARIAQPIVWLLSGTSSLVLRLLRVGPLTRAAVTEEELKAVLAEGARAGVLETDEQAMIERLLRLADRPVRAIMTPRNELFWIDRHADQETLVRKLRQSSYARIVVCEGDVDHPVGVILAKDIMDRLLLKLPVSVDAVLREPPVIPDSLSAQDMIERMRGVNLGITFVLDEYGSFEGIVTPSDVFEAIVGEEKTESSSSELQAAEGEDEYIFDGFMPADELRSRLDLPELPGAGGYHTLGGVMLALLRRVPARGDKVAFGGWLFEVLEMDRRRVGRVKVSHQVLAED

SEQ ID NO: 2037 - protein, 532 aa, Hordeum brevisubulatum
MGQCCSRATSPDSVQGGANGYGYSHQPKQAQAPPSYNNAQPPPRAEVRYTPPAMNPPVVPPVVAPSKPMPDTILGKQYEDVRSVYSLGKELGRGQFGVTYLCTEISTGRQYACKSISKRKLVSKADKEDIRREIQIMQHLSGQPNIVEFCGAYEDKGSVHVVMELCAGGELFDRIIAKGHYSERAAATICRGVVNVVNVCHFMGVMHRDLKPENFLLATKDENAVLKATDFGLSVFIEEGKMYRDIVGSGLLCCSEVLRRNYGKEIDVWSAGVILYILLSGVPPFWAETEKGIFDAILQGEIDFESQPWPSISESAKDLVRKMLAQDPKKRISSAQVLRHPWLREGEASDKPIDSAVLSRMKQFRAMNKLKKMALKVIASNLNEEEIKGLKQMFMNMDTDNSGTFTYEELKAGLAKLGSKLSEAEVKQLMDAADVDGNGSIDYVEFITATMHRHKLERDEHLFKAFQYFDKDNSGFITRDELETALIEHEMGDADTIKDIISEVDTDNDGRINYEEFCAMMRGGIQQPIKLK

SEQ ID NO: 2038 - protein, 220 aa, Hordeum brevisubulatum
MDTVAVWQQFDGQEYMTGCPEEQEYRTVWSEPPKRRAGRIKLQETRHPVYRGVRRRGKVGQWVCELRVPVSRGYSRLWLGTFANPEMAARAHDSAALALSGHDACLNFADSAWRMMPVHATGSFRFAPAQEIKDAVAVALEVFKGQHPADACTAEESAPSITSSDLSGLDDEHWISGMDAGSYYASLAQGMLMEPPAAGAWREDREHDAGVDTSTSLWSY

SEQ ID NO: 2039 - protein, 1005 aa, Cryptococcus neoformans var. neoformans JEC21
MTSFNPAPAQIQAAQDHTYGSMPTPTYMGMVDTGAQWDYVGRRGSSRSREPSASPQRAATESGIPRTSTHAASASASSSYAPVAGASGQASSAPHEPTIREEATAVVDRSMRAHQQTTGPSNGNGNSQPKKSKVRMVGDWQLNKTLGAGSMGKVKLATNIVTKEKCAVKIIPRYTDANRKEETTRTPEEVEKQRLKDESKEIRTIREAHISLLLHHPYICGMREFISHQNHHYMVFEFIDGGQMLDYIISHGRLRERAARKFARQIGSALNYCHQNSIVHRDLKIENILISKNGNIKLIDFGLSNLYSPSRHLSTFCGSLYFAAPELLNARPYTGPEVDVWSFGIVIYVLVCGKVPFDDQSMPALHAKIKRGVVEYPSWLSAEVKSLLSRMLVTNPAERATLAEVLSHPFMTKGYDGPPDSFLIRRELLRAEEIDMNVVEAMEGFTFGDANTIYRNLHSILTSEDYLHCVATFEAHREKLRTSSPGVSTNDPSDSPKKKRFSGFDLKKRLFKEDKKVEEAPFKEKVRDPTKGYDPLISIYFLAREKIERERVFGPGFFASSQLSLDTFNTSQGYGMAVPNLPPPASTHVMGHDSSRGPDFASEPRPRSDDVPNPVMAHPSADREQSKLADIPSAVHRRQPSLSQPPLPSSMPAAVERSADEGLTKKFSMLGRGPRPPSAGPAGPSRSASTKRESMTASPSMPIQEHRRATTVVHSDKSKQERRVSVGSFTNSVSKASGLARRASQRDRPPATPPDSRWLNAPAEAEEYHQVETSVRPSSTPREPEPDTANEPQSYDDVKPSYLKGIFSVSTTSTKPANVLIRDIAMVLDRIGIKHRPIKGGFECVHMPSIDLASVVNGDEASTSLSNVPSHASGARRKQSLRRKGSKVNMNGISSNGAGSRATSPGPHRVLTGNSSGTVSGGDVAHLSVPSGKNRHHVGTVEEDEVDAWALAQSGGAGSSLIVRFEIFVVKVPVLPLHGIQFRRVGGDGWQYQMLAKAILREMRL

SEQ ID NO: 2040 - protein, 326 aa, Ralstonia solanacearum
MADVNLVEAVNLALAHALEHDPSVVLLGEDIGVNGGVFRATVGLQARFGAERVIDTPLAETALAGAAIGMAAMGLRPVVEIQFSGFIYPAIDHVLNHAARLRHRTRGRLSCPLVIRSPCGAGIHAPEHHSESPEALFAHMPGLRVVIPSSPARAYGLLLAAIRDPDPVIVFEPTRLYRVFRQPVEDNGEALPLDTCFTLRDGTDVTLVSWGGALQAAQAAADQLAQDGVLAEVIDVATLKPLDMETILASVAKTGRCVIVHEAPRTSGFGAEIAANLAEHGLYSLLAPVQRVTGYDVVMPLPRLENQYLPGVERILAAVRKTLEAA

SEQ ID NO: 2041 - protein, 436 aa, Francisella tularensis subsp. tularensis SCHU S4
MISYNNIVYIAIAFGFVLLNAFFVIAEFSLVKLRSSQVELLRNKKALQGKVLYKVHNNIDIYLSACQFGITLASLGLGWIGEPAFSKLLEPLFIFLGVTANLSKFIAFATGFALISFLHIVIGELMPKSMAIRQTERLSLLTCIPLYIFYWVMFPFIWILNATANKLLELFKLDVVGEAEYGYTTDEIKVILKSSYLKKPLTEEHRDILLRMVEFAHLHAIDAMRPPIKEMVSIDYDLTNREKLAVIKEFLYTRYPVYQKDKNNIIGVVHTKDILCALDTELMKQDLRPILKVSYHDRLIDVLNKFQQGRPHFALVYKKNQLIGFITLDNLLTILIGRISDEFHLVKKPWITLANNKFLIKADAPVYAIERLADIDLSEYPADTVLDLLQTVLAEKISTNTMWEHDKFILKAYRVDEDGLKDVILELKSLDQIKFN

SEQ ID NO: 2042 - protein, 372 aa, Ralstonia solanacearum
MIVFKLPDLGEGLQEAEIVQWHVQAGDTVEADQPLVSVETAKAIVEIPSPQAGRIARLFGQPGDIVHLGAPLVAFEGAGGGEADAGTVVGQMQVGQQVVREAPAVLAAAPGAAAGGIKATPAVRALARKLDVDLSMATPSGPDGVITAADVERVAKVFSELGPPEVLRGVRRAMAQNMARAQSEVAAATVIDDADIHAWPPGTDVTIRLIRALVAGCRAEPGLNAWFDGHAGRRHVLEKIDLGIAVDLPDGLFVPVLRNVAHRDAADLRAGLDRMRADIRARKIPPEELRGNTITLSNFGMIAGKYAAPVVVPPTVAILGAGRIHEQVVAAAGAPAVHRVLPLSLTFDHRVVTGGEAARFLAATIADLEAAH

SEQ ID NO: 2043 - protein, 108 aa, Gluconobacter oxydans 621H
MSANTVAVSDSSFEADVLKSEGPVLVDFWAEWCGPCKMIAPALEEIGAEYQGRLKVAKVNIDSNPEAPTKYGVRSIPTLIVFKDGKPVAQQMGALPKSQLKAWIDQSL

SEQ ID NO: 2044 - protein, 428 aa, Rickettsia rickettsii
MSNQRVNKRVVITGLGLVTPVGLNVNSSWKNIVDGVSGIKTITEFDTSKLACKIAGLIDNSEKDGFKLENFTQADDINRLSKMDKFIHYGVAAATEAVEDSGWLPDDEKSRDRTGLILGSGIGGLKMIEDTSIKLYQENNGKVSPFFIPASLINLLSGLVSIKYGFSGPNQTAVTACSTGAHAIGDAMRMIKHGYADVMIAGGAEAPVTPVGVAGFVAARALCTKYNDNPKKASRPWDKDRSGFVMGEGAGVVVLEEYEHALNRGAKVYGEVIGYGSTGDAYHMTAPHPEGRGAYRAMRDAMLDATITPDMIDYINAHGTSTTLGDGIELAAVQKLFLEANPKVLMSSTKSSIGHLLGAAGSVEFIFSALAIRDQIAPPTLNLDTPMDEVNIDLVALKAKKTKIDYVLSNSFGFGGTNASLVIKSILV

SEQ ID NO: 2045 - protein, 641 aa, Rhodococcus erythropolis
MCGLLGLLTSGGTSEDAVSRVDQAMHCLRHRGPDEHGTWNDDHLVFGFNRLAIIDIAHSHQPLRWGPPENPERYALTFNGEIYNYLEIRAELVKDHDAKFFTEGDSEAIVAAFHYWGEDAVRRLRGMFAFAIWDTDTRELFIARDPFGIKPLFIATGAGGTAFGSEKKSLLELTDLIGIGTELDPRAIEHYTVLQYVPEPETLHKEIRRLESGSFARVRPGEEPTFTRYFTPKFPAKPFAPGTEKARYQEIAEALEDSVAKHMRADVTVGSFLSGGIDSTAIAALAMRHNPNLITFTTGFEREGYSEVDVAAESAAAIGAKHVVKVVSPAEFAAAIPEIVWYLDDPVADPALIPLWFIAKEARKHVKVVLSGEGADELFGGYTIYREPLSLKPFEYLPKGLRRAAGKLSERIPDGTRGKSLLNRGSLTLEERYYGNARSFNDAQLRAVLRDFRPEWTHQDVTAPIYAQSRDWDPVARMQHLDLFTWLRGDILVKADKMTMANSLELRVPFLDPEVFDVASRVPLDQKITKDTTKYALRQALEGIVPHHVLHRAKLGFPVPLRHWLRGTELFDWAHLQIEESGTDHIFDKQAVVKMLNDHREGVSDHSRRLWTVLTFMVWHGIFVEKRIVPQIQEPVYPVNI

SEQ ID NO: 2046 - protein, 505 aa, Mycobacterium avium subsp. paratuberculosis K-10
MASRWRTKSVEQSIADTDEPDTRLRKDLTWWDLVVFGVAVVIGAGIFTVTASTTGDITGPAIWVSFVIAAGTCALAALCYAEFASTLPVAGSAYTFSYATFGEFLAWIIGWNLLLELAIGAAVVAKGWSSYLGTVFGFSGGTVKFGAAQLDWGALVIVGGVATLIALGTKLSSRFSAVITGIKVSVVVFVVVVGVFYIKRANYSPFIPKPEAGGQAKGIDQSVLSLLTGAHTSHYGWYGVLAGASIVFFAFIGFDIVATMAEETKHPQRDVPRGILASLGIVTLLYVAVAVVLSGMVSYTQLKTMPGRGQANLATAFTANGIHWASKIISIGALAGLTTVVMVLMLGQCRVLFAMARDGLLPRALAKTGSRGTPVRITVLVALVVAVTASVFPITKLEEMVNVGTLFAFVLVSAGVMVLRRTRPDLERGFKAPWVPVLPIASIGACVWLMLNLTALTWVRFGIWLVVGTAIYAGYGYWHSVQGRRDAGEPDRSDALAADPNSPVP

SEQ ID NO: 2047 - protein, 272 aa, Aspergillus oryzae
MASPLILLPGDEVPSEYLPSNNSAPLRLGAGLRLLSQPSSNPPSHVITATQPGLLSTDNKRNAVSILSTPNRRYLPTPGDLVIAQIHHSSPDYFHCMITPQAPQALLGQLSFEGATKKTRPMLKQGDLVYARVLSTGLGAGAEVELTCVNPATGRADGGLGPLTGGMVFDVSTGLAARLIKASSSSAEQQDGVAGLVVLDELGKKLEKAGGFEIAVGRNGKVWVDCANGGDYAVKATVAIGRCLSTIDEHELSSTDQRKLVTRILREMKIES

SEQ ID NO: 2048 - protein, 495 aa, Pseudomonas aeruginosa UCBPP-PA14
MSIAIDPSVSAFLRSPHGLLIEGESGPARSGADMPLYDPATGAELARVARAGAEDVDRAVAAARRAFEGNWAGQRPADRERLLLRLAERIEAHGEQLAQLETLNNGKSINLSRALEVGASVEFIRYMAGWATKIEGRSLDLSIAAVPGARYRAYTVPEPVGVVGAIVPWNFPLLMAIWKIVPALACGCTVVLKPADETPLTALRLGQLCLEAGIPPGVVNIVTGTGAEAGAALAAHPGIDKLAFTGSTPVGKLIGHAAVENMTRFSLELGGKSPVIILDDTSLDMAAAGSAGAIFFNQGQVCTAGSRLYVQRKRFDQVLERLAAIAGDLSIGPGLDPTTQINPLVSARQQERVLGMIESGVAEGASVVCGGARQGETGFYVQPTILADVTPGMQVVREEIFGPVLVATPFDDLDEAVRLANDSIYGLGASIWSNDLRQVMDLVPRIKAGTVWVNAHNLLDPSMPFGGFKQSGIGREMGHAAIEAYTENKSVCIAY

SEQ ID NO: 2049 - protein, 120 aa, Gossypium hirsutum
MARSMSLKLACVVVLCLLVDAPLAQGAISYDQVKSSLLPCVGYVRGNNARPAPPNYCKGIRSLKSAARIRLDRQAACKCIKSLAADISDINYGVAAGLPGQCNVHIPYKISPSIDCKRVK

SEQ ID NO: 2050 - protein, 364 aa, Mycobacterium sp. JLS
MSFTPVFDHGRPLDPNDKYLILWATMSEPVADFSPLRVKRVVRETSDAVSLVLDVPRHCSGRFRYQVGQFLTLRVNLDGQELRRCYSMSSAPVEEELRITVKRDPGGLVSNWLNDTVSEGAEIHAAPPEGRFLLRDTDSEIVAFAGGSGITPIMSLIRTALATSARSIRLFYANRNRGSVIFADDLARLVEHNADRLVLTHHYDDDSGVVTPAAIESFVAGAGDADFYICGPGPFMDTVEGALATRGAPRDRVHLERFQVAQVPAGADASEAQATEEIVIELDRKTTTVPYRSGNTLLQTARTAGLRAPSSCETGSCGTCMAQVVSGSARMLNNDALDDDEVADGWVLTCQSLPTSRSVHVVYE

SEQ ID NO: 2051 - protein, 138 aa, Glycine max
  misc_feature (19)..(19): Xaa can be any naturally occurring amino acid
MASSVMASVALKPAPFTVXSSGRGLPSLSRNSSSFRVVASGGKKIKTDKPYGINGGMALREGVDASGRKGKGKGVYQFVDKYGANVDGYSPIYDTKDWSPTGDVYAGGTTGLAIWAVTLLGLLAGGALLVYNTSAQAQ

SEQ ID NO: 2052 - protein, 489 aa, Frankia sp. CcI3
MSRAPHVRSVAAPPSTAKTSDIKTSDRVPGSGEGPVEAIRRLRADPLTRLNELARAHGPVVRLASWPVSAFLVTDPDAIADALVSGHRAYAKGAVRRGAGSRRTVVQPLALLLGQGLLTSAGDTHRQQRRLLQPLFHKQRIAGYADAFAAIADKTADGWRDGQRLDVHTEMTEMTLAIVARTLFDVDLDSHVVDVIRAALDQNMPAARRAQLPGFTTLERLPLPAPRRRRDARNALDRVVHDLIADRRATGATGNDLLSLLLTARDADTGASMDDSQVRDEALTLLLAGHETTANALTWTFHLLGRDPEVLATLQAELDRVLGERRPTIDDLPQLPYTNAVISEAMRLYPPVWAMGRHLVEDRDVAGYRLPAGSTLVFSQWVVHRDERWWPRPELFDPIRWTGPDTADEPADAGPKMRPRFAYFPFGAGPRQCIGNTFAITEGVLALAAIARRWSFTPVPGLPVTPQPLVTLRPKDGLPMIAHGRYPNR

SEQ ID NO: 2053 - protein, 298 aa, Zea perennis
SSEVQVCVTGGAGFIGSYLVKKLLEKGYTVHATLRNTKDEEKTGLLQRLVPGAAERLRLFEADLFDAATFAPAIAGCQFVFLVATPYGLEAAGSKYKSTAEAAVAAMRVILRQCEESKTVKRVIHTASISTASPLKDKEAEGSGDGFKDFISESCWTPLNVDYHLRSAHFDKYILAKLRSEQELLSYNGGESPAFEVVTLPLGLVAGDTVLGHAPETLEHAVSPVSREELSFKFLRLLQSLLGSEPLVHVDDACEALLFCMERPSIAGRFFCAAAYPSIRDITDHYASKFPHLDVLRA

SEQ ID NO: 2054 - protein, 365 aa, Ashbya gossypii ATCC 10895
MPRTITFDIPSHYKLVDLIGEGAYGIVCSAIHKPTGTKVAIKKIQPFTRPMFVTRTLRELKLLKFFHSHENIISVLDIVRPTSYQDFEAVYLVQELMETDLQRIISQPNSFLSDDHIQYFTYQILRALKSLHSAQVIHRDLKPSNLLLNSSCDLKLCDFGLSRCLASSDRSRENMVGFMTEYVATRWYRAPEIMLSFQEYTTAMDIWSCGCILAEMISGKPLFPGRDYHHQLWIILEILGTPSFEDFEQIKSKRAKAYIANLPMRPKIPWNVALSTNDINPLAMDLLDKMLTFNPDKRISAADALKHPYLETYHDAEDEPDYELLNLQDNFWKVDNEARQKTEEEELSMDTLKAMLYEEVMKPLQ

SEQ ID NO: 2055 - protein, 957 aa, Candida glabrata CBS 138
MVKNSMVHGVTRVDLTAYSAESFENAIQFYLAFLVLDELDQNEDGGVVLANSHVYIKISYKEDGEMERKVNDRLMNLIEKTTSGDWRAVSSNVLVYTVDDIGLVKETLKRIGLPHQAYPTELTPAQIYTLDPLGNVVGFTGNKLAIATEIPFVLPTEEDDESELSSKESSYTNLTSLMRTTSGYPSLPFGHSRTHRNIAILTSGGDAPGMNSVIRAVVRTALFKGCRVYIVREGLEGLVKGYIEEFFWEDVGGWNSQGGTNIGTAKSNAFLQRRGRLLAARNLIIHDIDSLIVCGGDGSLAAADIFKHEWHSLISELLSSHLIKIEQLHSHKHLTICGISASIDNDIPVTDASIGAYSALDRICKALDYIQVTAESTSRAYVVEIMGGNCGWLTLLAGIATAADYIFLPECPQQKEDWRTHLQRIVKRNRRNGRRNTLVLLCEGAVAADSTPITSRDVHQVLSEELDIDTRITVLGHVQRGGAPVAYDRILATLQGVEAVSVILESTPDTPSYLIAVKENKILRKDLQDAVRQTFKISTSLKDREFEKAFRAKEAEFIEHYHNFLAINAADQDKKLVKSASLLNIAIINIGAPAGGMNSAVYAMASYCMWKGHRPIAIYNGWSGLARHESIRSLKWSEIVGWQSRGGSEIGTNRETPNEADVGMIAYYFQKYKIDGLIIVGGFEGFESLRQLEKARELFPAFRIPMVLIPATLSNNVPGTEYSLGSDTALNSLTEFCDNIGISSAATKDKAYVVEVQGGNSGYLATLTSIAIGACATYVPEEGISLVQLSEDIETISKSFDCVQTGDHAGKIILKSQNASKAMSAEKLANIITEEAAGKFEAKSVIPGHLQQGGTPSPIDRTRATKLAIRAVDFILEKSKVLKSQDDVIYEHTKELTESAVVLGVKGSNILFTSVKQLYLFETNVRDRMPKVIHWDGIRTLSDHMAGRRRIYEDEDN

SEQ ID NO: 2056 - protein, 498 aa, Bacillus halodurans C-125
MQKISTNDSKLNPRLVAFLNGGPKKLFINGEWVDSFSGQSFETMNPATGETLALVAEAGSEDIDFAVKAARKAFDEGPWSKMSAAERSRLIYKLADLIEDHKEALAQLETLDNGKPIRETANADIPLVIEHFRYFAGWATKIVGQTIPVQGHYFNYTRHEAIGVVGQIIPWNFPLLMAAWKLGAALATGCTVVLKPAEQTPLSALYLGELINEAGFPKGVVNIVPGFGHSAGTPLVNHPAVDKVAFTGSTDVGKLIMKQASESLKRVTLELGGKSPNIILPDADLSKAVPGSLMGIMFNQGQVCCAGSRLYVQKKQYDHVVADLVSLTNEIQQGDGLLEQTTMGPLISNQQQSRVKNYIDRGVEEGAELLTGGNIPYDQGYFVAPTIFADVDHSMTIAKEEIFGPVVAAMPFDSIDDLIDKANDSDYGLAAGVWTQDIKKAHYIAHRIKAGTIWVNCYNVFDAASPFGGYKQSGIGREMGSYALENYTEVKSVWVNMD

SEQ ID NO: 2057 - protein, 445 aa, Arabidopsis thaliana
MEIDSEKIHERKQSDYNSLDERFEIQKEMYRGQQYSQIYFARLHLMRTLLYSLAPTWKSHLPVCKVLGLEKGKECIIVGTLFKHMKLKPCVLDEYSKERSVTPLVKPHNFMHPDDNLILEDESGRVKLAGSALSPAIYVTGVVVALHGKETNAGEFFVEDVLEAGLPPQIERPIDLQEDKYVVLLSGLCIGSKSANPLQFQLLVDHITGHLGDEEEQGLAAQIVHVVIAGNSFEFPRKLINGQVLITFNLASKDQSTLYEPIKELDIMLSQIAAGVSVDIMPGTNDPANFALPQQPLNRCLFPGSSPYNTFRSCTNPHSFDVDNIRFLGTSGQNIDDLGKYSEAKSKLDFVERTLRWRHLAPTAPNTLGCYPFTDRDPFLIETCPHVYFVGNQDKYDNRLIKGSEGQLVRLICIPKFCETGIAVAVNLRNLECHTLSFSTQINQS

SEQ ID NO: 2058 - protein, 298 aa, Zea perennis
SSEVQVCVTGGAGFIGSYLVKKLLEKGYTVHATLRNTEDEEKTGLLRRLVPGAAERLRLFEADLFDAATFAPAIAGCQFVFLVATPYGLEAAGSKYKSTAEAAVAAMRVILRQCEESKTVKRVIHTASISTASPLKDKEAEGSGDGFKDFISESCWTPLNVDYHLRSAHFDKYILAKLRSEQELLSYNGGESPAFEVVTLPLGLVAGDTVLGHAPETLEHAVSPVSREELSFKFLRLLQSLLGSEPLVHVDDACEALLFCMERPSIAGRFFCAAAYPSIHDITDHYASKLPHLDVLRA

SEQ ID NO: 2059 - protein, 669 aa, Oryza sativa
MEAAALSTVLCVLALVVADADHHVVHVQGRRHRQCQPFSCGHLSNITHPFRRRGDPRRCGVSSYELDCSSDDGKATIRINTGKYYVSSIDYTASIFWVVDANLQDDANSSCPLPRSDQLPYVGLGIPGSHDSWDLGLDDMITWVGFVNCSQELITNSSSKYQPMNCLTTTSSYVYYMLPSFGAPSIQDIEPSCGYLAMTPIGGGSNGNSINLSEYEDVVKSMRGGFAVKFPTYGGPWTTWYGLIKDCLNESVSLADSHDNPLPRVGIKDRIIDILSIDLRFWGCMIGISRRFVFAPLVVMIFLTRKYWKTRIAIDAVEKFLRMQDMLGPKRYAYTDIIAITSHFRDKLGQGGYGSVYKGVFLPGDVHVAIKMLDGNSNCNGEDFISEVATIGRIHHINVVRLVGFCSEEMRRALVYEYMPRGSLNKYIFSSERSFSWDKLNEIALGIARGINYLHQGCEMQILHFDIKPDNILLDDNFVPKVADFGLAKLYPREKSFVSDRALRGTVGYMAPEMVSRSFGVISDKSDVYSFGMLLLEMAGGRRNADPNANSNASRAYYPAWVYDQLIADQQVDEISNVADMHELERKLCLVGLWCIQMKSHDRLTMSEAIEMLEGGVDALQVPPRPFFCDGDGIGNGMPPPQVMDSYFHSSELTAISEEDDGISELASS

SEQ ID NO: 2060 - protein, 174 aa, Medicago truncatula
MAAYREPMNVSERAPISSQVPHSPWHSPVPYLFGGLAAMLGLIAFALLILACSYWKLSGYLEGNGESERDLEAGERNNDTDQKPYEEKILVIMAGQDKPTFLATPSMSSSTSTSTSRSSSFGDNTSTCTCEHDKDQKSIENMNDEESTVKQGGGGGENHVRRTESVETPTTDTS

SEQ ID NO: 2061 - protein, 298 aa, Zea perennis
SSEVQVCVTGGAGFIGSYLVKKLLEKGYTVHATLRNTEDEEKTGLLRRLVPGAAERLRLFEADLFDAATFAPAIAGCQFVFLVATPYGLEAAGSKYKSTAEATVAAVRVILRQCEESKTVKRVIHTASISTASPLKDKEAEGSGDGYKDFISESCWTPVNVDYHLRSAHFDKYILAKLRSEQELLSYNGGESPAFEVVTLPLGLVAGDTVLGHAPETLEHAVSPVSREELSFKFLRLLQSLLGSEPLVHVDDACEALLFCMERPSIAGRFFCAAAYPSIRDITDHYASKFPHLDVLRA

SEQ ID NO: 2062 - protein, 368 aa, Zea mays
MDRELLETFDAAKKAADAAAGDGNSPEAGRCLDALRRLRDIRVNTDILVSTQVGKRLRPLTKHPHSGIQAVAADLFGYWKKVVLEESGKKNGGSENERSSDSSGKVEKARPVKIEKNSASASMKLEKRDVDVTGQKPNNAKVEKTTSNGSKAQSVKVERISKEVIRTPDAKRPASVPNGHPKLTSLVKCNDPTRDKIRELLAEAFVRVSRETSDDDRDEVRNILDEVEACDPYRVAVTVESALFERLGPSTGTHRAKYRSIMFNLRAENNTDFRRRVLIGLVAPERLPGIPPDEMASDARKQENMQIKEKALFDCERGAAPKATTDQFKCARCGQRKTTYYQLQTRSADEPMTTFVTCVNCNNHWKFC

SEQ ID NO: 2063 - protein, 75 aa, Gloeobacter violaceus PCC 7421
MTTNYDKLIQQEKAEAKEICSINGDGSAQCAAAWDAVEEVQAAASHAGDKDKKMNSLQSYCADNPDAAECRIYED

SEQ ID NO: 2064 - protein, 194 aa, Triticum aestivum
  misc_feature (169)..(169): Xaa can be any naturally occurring amino acid
MATMVALNSFAVVGRSAARSPVAAPRRRTLVVRAQTEPGMDSTKETTSASTSSSPSTSPTPTPIPAAPKPMAKKANPSVWDALAFSGPAPERINGRLAMVGFMAALSVEAARGGGLLDQAGSGAGLGWFLVTAGVFSVASLVPLLAGPKAWKSKSSGFWSADAELWNGXRFAMLGPRRASRPRSSLPGAPFVNI

SEQ ID NO: 2065 - protein, 342 aa, Colletotrichum destructivum
SGMCKAGFAGDDAPRAVFPSIVGRPRHHGIMIGMGQKDSYVGDEAQSKRGILTLRYPIEHGVVTNWDDMEKIWHHTFYNELRVAPEEHPVLLTEAPINPKSNREKMTQIVFETFNAPAFYVSIQAVLSLYASGRTTGIVLDSGDGVTHVVPIYEGFALPQAIARVDMAGRDLTDYLMKILAERGYSFSTTAEREIVRDIKEKLCYVALDFEQELQTASQSSSLEKSYELPDGQVITIGNERFRAPEALFAPSVLGLESGGIHVTVFNSIMKSDVDVRKDLYGNIVMSGGTTMYPGLSDRMQKEITSLAPSSMKVKIIAPPERKYSVWIGGSILASLSTFQQM

SEQ ID NO: 2066 - protein, 108 aa, Leuconostoc mesenteroides subsp. mesenteroides ATCC 8293
MSATIKEITDSTFENETQEGVTLTDFRADWCPPCKMMDPILQHLSEENQLGGKIKFTSVNIDENKQVASQLGIQGIPTLIIKKNGQVIDKIVGFHPKDEIENTLKKYI

SEQ ID NO: 2067 - protein, 112 aa, Roseovarius nubinhibens ISM
MKKIEAIIKPFKLDEVKEALQDVGVQGLSVIEVKGFGRQKGHTELYRGAEYVVDFLPKVKIDVVLDDDQVDAAIEAIVDAAKTDKIGDGKIFVSPVEQAIRIRTGETGSDAL

SEQ ID NO: 2068 - protein, 115 aa, Triticum aestivum
MARGAATQLVLVALVAAMLLVACDAAISCGQVTSALSPCISYARGNGANPPAACCSGVRSLAGAARSTADKQAACKCIKSAAGGLNAGKAAGIPSKCGVSVPYAISSSVDCSKIR

SEQ ID NO: 2069 - protein, 157 aa, Brassica rapa subsp. pekinensis
SNADKLLTEFIEKQLIDYAKNSKKVVGNSTSLLSPYLHFGEISVRRVFQCARMKQIIWARDKNGQGEESAVLFLRGIGLRDYSRYICFNFPFTHEQSLLSHLRFFPWDADVEKFKAWRQGRTGYPLVDAGMRELWATGWMHNRIRVIVSSFAVKFLL

SEQ ID NO: 2070 - protein, 395 aa, Rickettsia akari str. Hartford
MAKAKFERTKPHVNIGTIGHVDHGKTSLTAAITTVLAKTGGAKATAYDQIDAAPEEKERGITISTAHVEYETKNRHYAHVDCPGHADYIKNMITGAAQMDGAILVVSAADGPMLQTREHILLAKQVGVPAMVVFLNKVDVVDDPALLELVEMEVRDLLLQYGFPAYEVPIIKGSALQALAGKPEGEKAINELMDAVDNYIPHPVRATDKPFLMPIEDVFSISGRGTVVTGRVESGIIKVGEEVEIVGLKETQKTTCTGVEMFRKLLDEGQAGDNVGILLRGTKREEVERGQVLAKPGSIKPHDQFEAEVYVLSKEEGGRHTPFTNDYRPQFYFRTTDVTGTIKLPADKQMVMPGDNATTFTVELIKPIAMQQGSKFSIREGGKTVGAGVVTKINN

SEQ ID NO: 2071 - protein, 394 aa, Bordetella bronchiseptica RB50
MMNFEMLENNAKGTVIKVVGVGGAGGNAVAHMIRSGVSGVDFICANTDAQALAATNAPVQIRLGRTGLGAGAKPEQGRASAETAREEIRAALNGAHMVFITAGMGGGTGTGAGPVVAEVAKELGILTVGVVTKPFTFEGNKRLRMAEDGIGELGKHVHSLIVVLNENLYELMDDDATQEDCFKAADDILHNACAGIAEIINVEGNVNVDFEDVKTIMGEQGQAMMGTAAASGADRARVAAEKAIACPLLEGVDLNGARGVLVNITASRTLKMRETREIMETIRSYASDDATVIFGTAYDEQMGEELRVTVVATGLGREAVRPQLVQHTSEALRTGTDNMPVGNMLAGQQGDYRGLDMPSVMRNPRSQASAQVRALESSGMDHFDIPAFLRKQAD

SEQ ID NO: 2072 - protein, 290 aa, Yersinia pestis biovar Medievalis str. 91001
MSILIDKNTKVICQGFTGSQGTFHSEQAIAYGTKMVGGVTPGKGGTQHLGLPVFNTVREAVETTGATASVIYVPAPFCKDSILEAIDAGIKLIICITEGIPTLDMLVVKVRLEQSDARMIGPNCPGVITPGECKIGIMPGHIHLPGKVGIVSRSGTLTYEAVKQTTDIGFGQSSCVGIGGDPIPGSNFIDILKLFQEDPQTEVIVMIGEIGGNAEEEAAAYIKEHVTKPVVGYIAGVTAPKGKRMGHAGAIIAGGKGTADDKFAALEAAGVKTVRSLAEIGNAVKAVLPQ

SEQ ID NO: 2073 - protein, 107 aa, Lolium perenne
MAEEYRCFVGGLAWATNDQSLEQAFSQFGEITDCKIINDRETGRSRGFGFVTFSSSESMKNAIEGMNGQDLDGRNITVNEAQSRSGGGGGGYSRGGGGGDSGGNWRN

SEQ ID NO: 2074 - protein, 384 aa, Mycobacterium sp. KMS
MTVQEFLVPDLGEGLQDATITSWAVDVGDEVELNQTLCTVETNKAEVEIPSPYAGRVVERGGDEGQTLDVGSLLVRIATSADEPVPQRKSVLVGYGADEAMDTSRRRSARPRAKPPVRKLAAELDVDLNAVSASGPDGVVTREDVQRAAEGWAPAAEQVAVRGVQAEMARRMSLSRREIPDAHASVTVDGSALLRLRDRLLGTDPPVTPFVLTLRLLTLALRHQPALNATWIETAEGPQIHRHTAVHLGFGVAAPRGLLVPVIADAQDMTTRGLAAAVGRLVAEARAGRVRPAELSGSTFTVSNFGALGLDEGVPVINHPEAAILGMGSLKPRAVVVDGEVVARPTMTLTCAFDHRIADGATVAAFLGELRELVEAPELALLDL

SEQ ID NO: 2075 - protein, 173 aa, Oryza sativa (japonica cultivar-group)
MASSALAVSVAKPAASPPVAVAAVTPQRRLLPQCRGVRAAPVVRLRSGRARGVSVVCAAQGQETSFQVPDVTKSTWQSLVVESELPVLVEFWASWCGPCKMIDPVIGKLSKEYEGKLNCYKLNTDENPDIATQFGIRSIPTMMIFKNGEKKDAVIGAVPESTLVSSIDKYIGR

SEQ ID NO: 2076 - protein, 407 aa, Yersinia pestis biovar Medievalis str. 91001
MSSVDINVPDLPESVADGSVATWHKKPGDSVKRDEVLVEIETDKVILEVPASQDGILDAILEDEGATVTSRQVLGRIRPSDSSGKPTEEKSQSTESTPAQRQTASLEEESNETLSPAIRRLIAEHDLDATAIKGSGVGGRITREDVDSHLASRKSASAVVADAKAVAAAAPVLAGRSEKRVPMSRLRKRVAERLLEAKNSTAMLTTFNEINMQPIMDLRKQYGEAFEKRHGVRLGFMSFYIKAVVEALKRYPEVNASIDGEDVVYHNYFDVSIAVSTPRGLVTPVLRDVDTLSMADIEKKIKELAVKGRDGKLKVEELTGGNFTITNGGVFGSLMSTPIINPPQSAILGMHAIKDRPMAVNGQVVILPMMYLALSYDHRLIDGRESVGYLVTVKEMLEDPARLLLDV

SEQ ID NO: 2077 - protein, 456 aa, Rickettsia akari str. Hartford
MVLNIKAPENIVLKPTITVFGVGGAGSNAVNNMISANLQGANFVVANTDAQSLEHSLCTNKIQLGVSTTRGLGAGASPEVGALAAQESESEIRSYLENSNMVFITAGMGGGTGTGSAPVIARIAKELGILTVGVVTKPFHFEGGHRMKTADKGLIDLQQFVDTLIVIPNQNLFRIANEQTTFADAFKMADDVLHAGVRGVTDLMIMPGLINLDFADIKAVMSEMGKAMMGTGEASGEDRAIKAAESAISNPLLDHSSMCGARGVLINITGGSDMTLFEVDNAANRIREEVDNLDANIIFGSTFNPELKGIIRVSVVATGIEADKVPTYKPAIAETTNIVPEKIHNEAIVQPTQIEEIPDFNSYSTENIEITDSTTNQNFIGNEKALGLHVNTFNQSEDDAPKPSFLGKIWGSLRASNNQTLERKNIVVNTIDQDNKESDIHDIPAFLRKKRDEIRK

SEQ ID NO: 2078 - protein, 514 aa, Burkholderia vietnamiensis G4
MTDKLIIFDTTLRDGEQSPGASMTKEEKIRIAKHLERMKVDVIEAGFAASSNGDFDAIHTIAGLVKDSTICSLARANDKDIQRAADALKPASSARIHTFIATSPLHMEKKLRMTPDQVFEQARLAVRFARKFTDNVEFSPEDGSRSDLDFLCRVLEAVIAEGATTINIADTVGYGVPELYGNLVKTLRERIPNSDKAIFSVHCHNDLGMAVANSLAGVKIGGARQVECTINGLGERAGNTSLEEIVMAVKTRKDYFGLDVGIDTTQIVPTSKLVSQITGFVVQPNKAVVGANAFAHASGIHQDGVLKARDTYEIMRAEDVGWTANKIVLGKLSGRNAFKQRLQELGVSLDSEAELNAAFMRFKDLADRKAEIFDEDIIAIVSEESALAQEQEHVKFVSLSQHSETGEQPQAKVVFAVEGSEVTGEARGNGPVDATFNAIEGEVGSGSELLLYSVNAITTGTQAQGEVTVRLSKNGRIVNGVGTDPDIVAASAKAYIAALNKLHSKDDKLNPQRA

SEQ ID NO: 2079 - protein, 425 aa, Haloarcula marismortui ATCC 43049
MKGLCSSDTRQYLPGHQLWEAPVQIRRYSAVIHHATKCQWGVIPSRTINVSLHQTRRMRVAAVGIGGAGGRIVERLWQDNERRETTYLGAACAVDTDTEALDELDALPADRRYAFGLSETNGTGTNGDRTSGTAAIEDERLEVRRAIDELVTSDIDAVVLVAGLAGGTGSGATAHIADALREVYSIPVYCLSVLPAGRDDDAAANTMQALRALESTVDGQILFDNEAWLGSGQTVESASETLNETIVARLGALFAAGEATAPDAVGQSVVDASEIINTLSDAGFTTLGYASQDLQTGAGSGDGTVIDQLKNRFLGDNADDVDEIEAYNAVETTLRRAVRGKLTAQCELDSADRALAVFAGPPAWLIRDAVTDGRRWLTEELQSPEVRSGDMPTPDRNTLSVLVVVSGVTELPRLVELKTLAEQSS

SEQ ID NO: 2080 - protein, 459 aa, Brassica oleracea var. alboglabra
MTSINVKLLYHYVITNLFNLCFFPLTAIVAGKAYRLTIDDLHHLYYSYLQHNLITIAPLFAFTVFGSVLYIATRPKPVYLVEYSCYLPPTHCRSSISKVMDIFYQVRKADPSRNGTCDDSSWLDFLRKIQERSGLGDETHGPEGLLQVPPRKTFAAAREETEQVIIGALGNLFKNTNVSPKDIGILVVNSSMFNPIPSLSAMVVNTFKLRSNVRSFNLGGMGCSAGVIAIDLAKDLLHVHKNTYALVVSTENITYNIYAGDNRSMMVSNCLFRVGGAAILLSIKPGDRRRSKYELVHTVRTHTGADDFSFRCVQQGDDENGKTGVSLSKDITDVAGRTVKKNIATWGPLILPLSEKLLFFVTFMGKKLFKDKIKHYYVPDFKLAIDHFCIHAGGRAVIDVLEKNLALAPIDVEASRSTLHRFGNTSSSSIWYELAYIEAKGRMKKGNKVWQIALGSGFK

SEQ ID NO: 2081 - protein, 503 aa, Arabidopsis thaliana
MASLLLTSSSMITTSCRSMVLRSGLPIGSSFPSLRLTRPYDKATLFVSCCSAESKKVATSATDLKPIMERRPEYIPNKLPHKNYVRVLDTTLRDGEQSPGAALTPPQKLEIARQLAKLRVDIMEVGFPVSSEEEFEAIKTIAKTVGNEVDEETGYVPVISGIARCKKRDIEATWEALKYAKRPRVMLFTSTSEIHMKYKLKKTKEEVIEMAVNSVKYAKSLGFKDIQFGCEDGGRTEKDFICKILGESIKAGATTVGFADTVGINMPQEFGELVAYVIENTPGADDIVFAIHCHNDLGVATANTISGICAGARQVEVTINGIGERSGNAPLEEVVMALKCRGESLMDGVYTKIDSRQIMATSKMVQEHTGMYVQPHKPIVGDNCFVHESGIHQDGILKNRSTYEILSPEDVGIVKSENSGIVLGKLSGRHAVKDRLKELGYEISDEKFNDIFSRYRELTKDKKRITDADLKALVVNGAEISSEKLNSKGINDLMSSPQISAVV

SEQ ID NO: 2082 - protein, 556 aa, Cryptococcus neoformans var. neoformans B-3501A
MDGKPATQYQAWKKLQSLHASKADKLVLKDLFKADPKRFSNLSKTFSSSSPNVSLLLDYSKNLVDDEVLSTLFDLAREAKVETFRDEMFAGKHINTSEDRSVLHIALRNPPADKGGFKISEAGVDEVHAVLAHMKEFSDSVRSGAWKGYTGKAIDTIVNIGIGGSDLGPVMVCEALKHYSKRDLKTHFVSNIDGTDMAEVLKACNRETTLFIVASKTFTTQETITNAESAKEWFLEQAKEKAHVAKHFVALSTNTKGVTEFGIAESNMFQFWDWVGGRYSLWSAIGLSICLSIGFDNFQELLNGAHEMDKHFKTAKLEDNLPVILALVGIWYNDFYGAQTQALLPYDQYLKKFADYFQQGDMESNGKSVTKDGSRVDYETGPIIWGQSGTNGQHAFYQLIHQGTKLIPCDFLAPVETLNPISGGKHHEILLSNFFAQPEALAFGKTEEEVIKELGPEQSKNSALVKSKIFEGNKPTNSIMFQKLTPGTLGALIALYEHKIHVQGAIWGINSYDQMGVELGKVLAKAILKQLGSENDVQGHDSSTTGLIHFYQKNRK

SEQ ID NO: 2083 - protein, 477 aa, Glycine max
MSMLLRKVWERVLWRSDSSTSASASASSSSSSSPPEVACSDMGELELLPSDILMHILRLLGPKEAAKLSVVCKALRSLVSDNRLWIHFLQTHQAEPSGDSVFFAETTLSYGYPLPPFAGHWPQLSFKHIYGQRALVPGSIIIDGGSGYCKFGWSKYAYPSGRSATFLEFGNIESPMYTRLRHFFATIYNRMQVKPNKQPVIVSVPICHYDDTESAKASRQQLKEAIYASLFDMNVPAVCAVNQATLALYAAKRTSGIVVNIGFQVTSIVPILNGKVMRKVGVEVVGLGALKLTGFLREKMQLNNLSFQSLYTVRTLKENLCYVALDYEAELLKDTKASFEAAGEGWFTLSKGRFQTAEILFQPHLAGVQAMGLHQAIALCVEHCHSADLACDSDWYKTIVLSGGTACLPGLAERIEKELHALLPPYVSNGIRVIPPPYGADTPWFGAKIVGNLSTFPGHWCVTKKQFRQKPRLNLIW

SEQ ID NO: 2084 - protein, 422 aa, Ehrlichia ruminantium
MSLNIYLPDQSLLRPRITVFGVGGAGGNAVNNMIQSNLHGVNFVVANTDAQALENSLSEKKIQLGIGLTKGLGAGSLPEIGKGAAEESINEIIEEIVDSNMLFITAGMGGGTGTGAAPVIAKAAKENKILTVGVVTKPFHFEGAHRMRTAEYGLEELQRYVDTLIVIPNQNLFRIANEKTTFADAFKLADTVLHTGVRGITDLMIMPGLINLDFADIRAIMSEMGKAMMGTGEAEGENRAILAAEAAISNPLLDNVSMKGAKGILINITGGLDMTLFEVDAAANRIREEVDSHANIIFGSTFDKESEGKMRVSVLATGIDNEEVVIQNKSMNKDREDHSINFSEVSNKNFNHSDNEIAYYKPNDPGEDNLNSMNHNKRHSHYKTDNQKSNTIPNSEHKKVYPNRNDYWDEDSFNIPTFLRKK

SEQ ID NO: 2085 - protein, 115 aa, Zea mays
MARSAVAQVVLVAVVAAMLLAVTEAAVSCGQVSSALSPCISYARGNGASPSAACCSGVRSLASSARSTADKQAACKCIKSAAAGLNSGKAAGIPTKCGVSVPYAISSSVDCSKIR

SEQ ID NO: 2086 - protein, 420 aa, Mycobacterium sp. KMS
MARLTRLSTGNGFPNVVVTGVAMTTALATDAETTWQRLLDGQSGIRTLEDPFVEEYDLPVRIGGHLLEDFDSELTRVELRRLSYLQKMSTVLGRRVWANAGSPEVDPRRLMVSIGTGMGSTEELVFSYDGMRAKGLKAVSPLAVQMYMPNAAAAAVGLERKARAGVITPVSACASGSEGIAQAWRNIVLGEADIAICGGVETRIEAVPIAGFAQMRIVLSTTNDDPAGACRPFDKDRNGFVFGEGGALLVIETEEHAKARGANILARIMGASVTSDGYHIVAPDPNGEQAGWAMTRAIQLAGLQPTDIDHVNAHATGTSVGDVAEGKAINNAMGGHKPAVYAPKGALGHSVGAVGAVESILTVLALKNGVIPPTLNLKNLDPEIDLDVVAGSPRPGNYQYAINNSFGFGGHNVALAFGKY

SEQ ID NO: 2087 - protein, 444 aa, Desulfovibrio vulgaris subsp. vulgaris str. Hildenborough
MPGTRFEKDGLVIDTTIPHLGPAKIPSPLVYCHHTNDTGVPLYLDSEFIEELAGESTALNFEAAGPRRNLYFDPSKAKCAIVTCGGLCPGINDVIRAIVMEARHAYDVPAVLGIRYGLEGFIPKYRHDVVELTPDVVSDIHQFGGTILGSSRGPQSPEEIVDALERMNISALFMIGGDGTLKAASNIVQEVMRRNLKISVIGVPKTIDNDINFISQSFGFETAVYKATEAIQCAHTEAIGAMNGIGLVKLMGRESGFIAAHATLSLKEVNFVLIPEAPFTLHGEGGLLPTLERRLRARAHAVIVVAEGAGQNLLADTGKKDASGNPILGDIAQLLRAEIKAYCDERGLPHTLKYIDPSYIIRSVPANANDRVYCGFLGQHAVHAAMAGRTGMVVAKLMDRYVHLPLELVTLRRRKLNIRSDYWRAVLESTGQAELAGMVPGLDE

SEQ ID NO: 2088 - protein, 416 aa, Mycobacterium sp. KMS
MTRPSTANGGFPSVVVTAVEATTSLAADIESTWKGLLAGESGIRVLEDDFVTKWDLPVRIGGHLVDNVDDHMTRIDMRRMSYVQRMSKLVSGRLWETAGRPEVDPDRFAVIIGTGLGGGEKIVETYDAMNEGGPRKVSPLAVQMIMPNGAAAVAGLELGARAGVITPVSACSSGSEAIAHGWRQIVMGDADFAVVGGVEGGIEALPIAAFSMMRAMSTRNDDPAGASRPFDKNRDGFVFGEAGAMMIIETEEHALARGAKPLARLMGAGITSDAFHMVAPAADGLRAGHAMKRAMETAGIDPKDVNHVNAHATATPIGDTAEANAIRVAGVEHAAVYAPKSALGHSIGAVGALESILTVLALRDGVIPPTLNYETPDPEIDLDVVAGEPRYGDYQYAINNSFGFGGHNVALAFGRY

SEQ ID NO: 2089 - protein, 405 aa, Buchnera aphidicola str. APS (Acyrthosiphon pisum)
MKTVDIEVKMPDIGLEEVEIIEILVSINEKIAPEQGLITVEGDKTSMEIPSPISGIVKHIFIKIGEKIKTDALIMRCEVENIDFHVKKKEEICLDNNVLNKVEKNFKKDIFFHATPLIRRLARNLNINLYDVVGTGPKNRILKEDLDLYQSNIKENLIEEKNKINFGDSKKSKTKELELSDIQKNIGNNLHRNWMNIPHVTQFDEVDITILEKFRQKYNNEKRNQKKTNENITILVFIIKVVAYALEKFPIFNSSLNINNKKIILKKYINIGFAIDVNNDLFVPVLKDVNKKNIKQLSSELILLSEKARTRKLNIEDMTGGCFTISNLGGIGGSWFSPIINSPEVAILGISKSQIKPSWNGKEFIPSLMLPLSLSYDHRVINGAYAARFITFISRVLSDMHFLIM

SEQ ID NO: 2090 - protein, 108 aa, Populus alba x Populus tremula
DWINDPNGPLYYKGLYHLFYQYNPKGAVWGNIVWAHSVSKDLINWESPEPAIYPSKWFDNYGCWSGSATILPNGEPVIFYTGIVDGNNRQIQNYAVPANSSDPYLREW

SEQ ID NO: 2091 - protein, 118 aa, Triticum aestivum
  misc_feature (63)..(63): Xaa can be any naturally occurring amino acid
MARVALLAVFAVLAALAVAEMASGAVTCGDVTSAVAPCMSYATGQTSAPSAGCCSGVRTLRRXASTSADRQAACRCLKKLAGSGISMGNAANIPGKCGVSVSFPINTKVDCNTYILHP

SEQ ID NO: 2092 - protein, 416 aa, Zea mays
  misc_feature (330)..(330): Xaa can be any naturally occurring amino acid
MMAEGPNFAGMIGGHDNGGDFCDMAYYRKLGEGSNMSVDNLNSMQTSTHGGSIAMSVDNSSVGSCDSHTRMLNHPGLKGPVVGNYSVGGHSIFRHGRVSHALSDDALAQALMDPRYPTETLKDYEEWTIDLAKLHMGMPFAQGAFGKLYRGTYNGEDVAIKLLERPEADPERAGLMEQQFVQEVMMLATLRHQNIVKFIGACRKPVVWCIVTEYAKGGSVRQFLAKRQNRSVPLKLAVKQALDVARGMAYVHGLGFIHRDLKSDNLLISGDKSIKIADFGVARIEVKTEGMTPETGTYRWMAPEMIQHRPYDQKVDVYSFGIVLWELITXGMLPFANMTAVQAAFAVVNKGVRPAIPQDCLPTLAEIMTRCWDPNPDVRPPFTEVVRMLEHAEMEILSTVRKARFRCCMSQPMTTD

SEQ ID NO: 2093 - protein, 298 aa, Zea perennis
SSEVQVCVTGGAGFIGSYLVKKLLEKGYTVHATLRNTKDEEKTGLLQRLVPGAAERLRLFEADLFDAATFAPAIAGCQFVFLVATPYGLEAAGSKYKSTAEAAVAAMRVILRQCEESKTVKRVIHTASISTASPLKDKEAEGSGDGFKDFISESCWTPLNVDYHLRSAHFDKYILAKLRSEQELLSYNGGESPAFEVVTLPLGLVAGDTVLGHAPETLEHAVSPVSREELSFKFLRLLQSLLGSEPLVHVDDACEALLFCMERPSIAGRFFCAAAYPSIHDITDHYASKLPHLDVLRA

SEQ ID NO: 2094 - protein, 298 aa, Zea perennis
SSEVQVCVTGGAGFIGSYLVKKLLEKGYTVHATLRNTKDEEKTGLLRRLVPGAAERLRLFEADLFDAATFAPAIAGCQFVFLVATPYGLEAAGSKYKSTAEAAVAAVRVILRQCEESKTVKRVIHTASISTASPLKDKEAEGSGDGFKDFISESCWTPLNVDYHLRSAHFDKYILAKLRSEQELLSYNGGESPAFEVVTLPLGLVAGDTVLGHAPETLEHAVSPVSREELPFKFLRLLQSLLGSEPLVHVDDACEALLFCMERPSIAGRFFCAAAYPSIHDITDHYASKFPHLDVLRA

SEQ ID NO: 2095 - protein, 247 aa, Candida glabrata CBS 138
MPEPITLRVNAALFDVDGTIIISQPALAAFWRDFGKDKPYFDAEHVIHVSHGWRTYDAIAKFAPDFADEETVTKLEGEIPDKYGKEAIEVAGAVKLCNSFNELPKEKWAVATSGTREMASKWFAVLGIKKPTYFITANDVKKGKPNPEPYLKGREGLGYPINTHYPEKSKVVVFEDAPAGIAAGKAAGCKIIGIATTFSASSLREKGCDIVIKDHRSVRVAGYDKETDEVILVFDDYLYVRDDIQKW

SEQ ID NO: 2096 - protein, 469 aa, Synechococcus sp. RS9917
MAPSLQRREADQRIQFILRLAIAAALGGFLFGYDTAVINGAVSSIQATFNASAMGLGLAVSSALLGSAAGALGAGWLADRIGRRRSMWLAAVLFIASAVGSALAPTLRDLVIWRVIGGVAVGFASVLAPAYIAEISPANLRGRTGSLQQLAIVVGIFIALLFDYVIVLATVDQEPLSSVGPLPAWRWMLMSELIPALLYGGMVLRIPESPRYLVQIGCIEHAREVILKTLGEPTQEVIDRIQASLGHRNGGQIQDLFSKRSLLLPVVWTGVLLAIFQQFVGINVIFYYSSSLWKAVGFSTTDSLSITVVTSITNVVTTFLAIATIDRLGRRPLLLAGSVVITISLGLMSWTFAGAPIVNGEPQLTGAASLVALISANVFVFAFGFSWGPVMWVLLGEMFSNRIRALALGLSATVNWLANFLISTTFPVLLQSSGPALAYGLYATAAAISFFFVLFMVRETKGRELEDMA

SEQ ID NO: 2097 - protein, 1462 aa, Cryptococcus neoformans var. neoformans B-3501A
MAASTLSNYQLGDLLGRGASGNVYRALNFLTGETVAIKSISLLSLPPSSLPDIMSEIDLLKNLNHANIVKYKGFARDKENLWIILEYCENGSLQTILKKFGKFPESLVAVYISQVLEGLIYLHEQGVIHRDIKGANILTNKDGSVKLADFGVSSRAPTAVLDQSGKSNDGEAEVVGSPYWMAPEVIEQSGASTASDIWSVGCVVVELLEGKPPYGDLAPMQALWRIVQDESMRIPEGASPIVKDFLYHCFQKDPNLRISAKKLLRHPWMLSVKKSASNRPPITPSLVDTTFDHSIDPKANSDGITPQAQRDGNKSRPEREGENEKQSRQGTVKPRKKIMTVYDEAVQRVQEWNEALKASPKNLSKPSPSPSPSTSSASASTSASKALLLPVPSTNPLISKARQRGESNPPLSLFSLLPTSNSKPLSSSLSQEQPLSLPLQLRNQVGQGGGLLSKNYMVSDVLERAKEEGEERWDDDFAEGISFSKLGRTEIYKHPQAHHHTHLTSSASSASTAREEAEEANQKTLRQNRALALPTPSSKPGRKSNLSRPVGEVEDYSDMEQAFGENEGSLEKKMRILKLKAIGRKGLMHPDDIHKYPLSPVKRKPSSRVDVRGNSSTSTTATTCASASASNPGAPPITVPLSSSIPIPNSSFPRRRAPSNPIPSSFSTLTIPSLSETGTGMSTETKNRNRDNSFLSQDAPTRSSPSSRSSSLRNKAKVGEEVEEQIKKYTENEEENYEDIFGGANKTFSSSQEVPLKLVLLPSHPLSSSSALRNGGGGGRGSSEGGISFTDPHSHINFDYPESDEEDMLDPFAEIEDEFDTAEDLEKKLMRDKKVMMQGKVSKLVDELMIGGVGGGGLRGVCDDLFGILENSSPEMGLEAHFVAQHGLIAVLEVLESRLSRDVVVRLLKLVNLIVTSNVELLESFCLIGGIPVIIPYTSKKHSLETRLEASRFIRQLTRSALTLQMFISCRGLRILVELLDEDYALNKTLILSSLEGINSVFELQSPTPRNDFVRMFVREGVIDPLSTALLAILKDKYEDRSANDDGNGNGNGEMEDGQGQERGQFMMEQASRSVGVLLFFCQVAQADARVREAFATRTIMIRLLKACDLLPRKLLVTAIKAIKHLSTSPQLIEVLQNSNAMEILVDLLGKNIKGSHSNEICSHIFQTIYSMTRLSKSRQEEAASSGIIPLLKRVIQNKSPLKQFALPILCDMANAGKGSRRLLWHYDGLGLYLDLLEDPYWRVSALDAILAWMQDETARVEDVLLEKSASDSLVRCFVQASGVSFEGILDPLFKVLRLSTSLTSSLSHPPFFSRLSESLERSSKAVIKLNLLRLTKVVCECHPDKATLVERFGLAQIVERLSKQDGAVLVRELAKEILPGLLFGGDAPDPAASFRYTSSGTVGEERGGRTMKSQGRMEGRRSSQLRRTLSENVATDLLHPAPPVAPFPSTVSRCKYTKERG

SEQ ID NO: 2098 - protein, 179 aa, Brassica napus
MHKLSRSNRDKVQQFVAITGASEKNALQTLKASDWQLEAAFDVFYSQPQPRSNADVRRLEELYNRYKDQYSDMILADGVSVLCSDLQVEPQDIVTLVLSWHMNAATACEFSREEFVGGLQALGVDSIKKLQEKLSFMRSELKDEQKFHEIYNFAFGWAKEKGQKSLALDTAIGMWQLLF

SEQ ID NO: 2099 - protein, 489 aa, Magnaporthe grisea 70-15
MCVTYPYYQPERDIPSLRGKVVLITGGTIGLGKEAAAQLSQNGRPAQVWIAGRNAERAGAAIAEIRRRLRKKPGPMPTPHRAAPSSMAESESPFRSSNTSIASSVESTGSQPSTSSTTTGDQSGLQGSSSTGILDASSLRRNRSYIDVGSRSLRPDKVGRSLPDSASGSTTRSHLGVDDGGGKLPDETEVYFLYMDLANLDSVRDAASRFLACVDRLDILILNAAEVSVPSGVTAQGYERHFGTNHLGHALLIKLLMRLLVRTATCDSVGSDVRVICVSSFAHRFTPPEGIDFDSLKPDPSSFHDSASATGSTTNITQSDTNQPGQQGRDGGGGGRPATSGSSQRPTLRRRRSSHTGSGPSSRLLYGQSKLANILYARELAERCPLFTTVSIHPGIAKSEGNWRRGGSRVVGSGAVVERFEQWIVPVFGASIDEGAKNHLWAATGRGISNGQYYEPVGVPARPSGVGDDRVLSWKLWEWTQRELAGYSL

SEQ ID NO: 2100 - protein, 542 aa, Crocosphaera watsonii WH 8501
MGTDKRIWLYDTTLRDGAQREGISLSLEDKLKIARQLDKMGIPFIEGGWPGANPKDVQFFWKLQEEPLTQAEVVAFCSTRRPNKLAAEDPLLKAILAAGTRWVTIFGKSWDLHVTEGLKTSLEENLNMIADTIEYLRSQGRRVIYDAEHWFDGYLNNPEYALKTLKTAKEAGAEWLVLCDTNGGTLPQDVTRIIQDVVTALDIQPDNGSPQLGIHTHNDSGTAVANGLAGVVEGVRMVQGTINGYGERCGNANLCTLVPNLQLKMGYHCLADRELTQLTKTSRLISEMVNLAPDHHAPFVGRSAFAHKGGIHVSAVQKNPLTYEHIKPENIGNERRIVISEMAGLSNVLSKAKTFGIELNKEDAACREILTRIKELEHKGYQFEVAEASFELLMRQALGQTKSFFQLQGFQVHCDMLYGEGMPYSNALATIKLTVNGEDRLEAAEGNGPVSALDSALRKALVNFYPEIAQFHLTDYKVRILDGGAGTSANTRVLIESSNGHKRWTTVGVSANILEASYQAVVEGIEYGLLLQSTIKKPAKSL

SEQ ID NO: 2101 - protein, 119 aa, Triticum aestivum
  misc_feature (98)..(98): Xaa can be any naturally occurring amino acid
  misc_feature (106)..(107): Xaa can be any naturally occurring amino acid
  misc_feature (109)..(109): Xaa can be any naturally occurring amino acid
  misc_feature (112)..(113): Xaa can be any naturally occurring amino acid
  misc_feature (115)..(115): Xaa can be any naturally occurring amino acid
MSSAAGGVEETVRASHILIKHEGSRRKASWKDPDGRIISATTRGDAAARLLDLRNQILSGQANFADLAARHSDCSSARRGGDLGTFGRRQMQKPFEDXTYALRVGXXKXIVXXEXGVTP

SEQ ID NO: 2102 - protein, 230 aa, Oryza sativa (japonica cultivar-group)
MNDGDVARQLKQMTDFIRQEAVEKAAEIEAAAAEEFQIEKLQLVEAEKKRIRLEFERNEKQGDIKKKIEYSKQLNASRLEVLQAQDDLAMSMLEAAGKELLYITRDHHVYKNLLRIFIVQSLLRLKEPAVILRCRKEDRELVESVLESAKNEYADKANIYPPEIMVDRNVYLPPAPSHYEAHGPSCSGGVVLASRDGKIVCENTLDARLEVVFRKKLPEIRRSLLGQVAA

SEQ ID NO: 2103 - protein, 391 aa, Zea mays
  misc_feature (16)..(16): Xaa can be any naturally occurring amino acid
TPVTIDWYMDRINGPXEVMIGYSDSGKDAGRLSAAWQMYKAQEELIKVAKHYGVKLTMFHGRGGTVGRGGGPTHLAILSQPPDTIHGSLRVTVQGEVIEHSFGEELLCFRTLQRYTAATLEHGMHPPISPKPEWRALMDEMAVVATKEYRSIVFQEPRFVEYFRSATPETEYGRMNIGSRPSKRKPSGGIESLRAIPWIFAWTQTRFHLPVWLGFGAAIKHIMQKDIRNIHILREMYNEWPFFRVTLDLLEMVFAKGDPGIAAVYDKLLVADDLQSFGEQLRKNYEETKELLLQVAGHKDVLEGDPYLKQRLRLRESYITTLNVCQAYTLKRIRDPSFQVSPQPPLSKEFTDESQPAELVQLNQQSEYAPGLEDTLILTMKGIAAGMQNTG

SEQ ID NO: 2104 - protein, 522 aa, Triticum aestivum
  misc_feature (177)..(177): Xaa can be any naturally occurring amino acid
  misc_feature (195)..(195): Xaa can be any naturally occurring amino acid
  misc_feature (235)..(235): Xaa can be any naturally occurring amino acid
MSMEDSAQPAGAASAGERASSPSPSRRLPDFLQSVRLKYVKLGYHYLITHGMYLLLTPLIVLIAVHLSTLSPGDVADLWTHLRFNLLSVIACSTLLVFLSTVYFLTRPRSVYLVDFGCYKPGPERRCSRETFMRCSKLTGNFTEANLDFQRKILERSGLGEDTYIPPALVTVPPTPXMELARQEAQVCLFGAFNXMLAKTGVKPKNWSFLLELTLVKPKPSCARGVVPHSRAAGXIVRYHLGGMGCSAGLLSIDLAKDLLQVHPNSYAMVVSTENITLNWYFGNNRSMLVSNCLFRMGCAAILLSNKRSDRRRSKYELVHTVRTHKGADDKCFSCVTQEEDDSGKVGVALSKDLMAVAGDALKTNITTLGPLVLPFSEQLLFMVTLVGKKLFKMKIKPYIPDFKLAFEHFCIHAGGRAVLDEIEKNMDLTDWHMEPSRMTLFRFGNTSSSSLWYELAYSEAKGRIRRRDRIWQIAFGSGFKCNSAVWKALRSVNPAKEQNNPWMDEIDTFPVDVPKVSKVAE

SEQ ID NO: 2105 - protein, 336 aa, Buchnera aphidicola str. APS (Acyrthosiphon pisum)
MVKNMTIKVGINGFGRIGRVLFRLAQKRSDIEIIAINDLLAPEYIAYMLKYDSTHGVFKKHITFDKDNIIINGKNIRVTSIKDPEKLMWHDLSIDVVIESTGLFLKREQAYKHILAGSKKVVVTGPSKDDIPMFVRGANFHKYQGESIVSNASCTTNCLAPLSKVIDDNFGIIEGLMTTVHASTATQKIVDGASDKDWRGGRGALQNIIPSSTGAAIAVGKVLPNLNGKLTGMAFRVPVSNVSVVDLTVRYKKSATYSEICQKIQQASQKEMKGIMGYTEDEVVSTDFNGEELTSIFDAKAGLSLNKNFVKLIAWYDNETGYSSKVLDLVSLVSKK

SEQ ID NO: 2106 - protein, 378 aa, Burkholderia xenovorans LB400
MSNPIINDTTLRDGEQTAGVAFTIAEKCAIAEALARAGVPELEIGIPAMGDEEIDCIQTIVALNLDADLMVWGRLTDADLASALRCNPDIVHLSIPVSDIHLQHKLRQPRSWVLAQINRVIGAAVRSGRKVSLGAEDASRADPAFLADVARRAQQCGAQRIRFADTLGVLDPFSTYEAIARLRDAVDLEIEIHAHNDLGLATANTLAALRAGATHANTTVNGLGERAGNAALEEIVMGVRHIMGRDTAVDTTALLGISRLVERASGRPVALNKSIVGGGVFTHESGIHTDGLAKNASTYESFDPAELGRERSVVLGKHSGSQSVRQAYDALGLPVSDTLVALLLTRIRHHATHHKQAPSAADLYRFLIEARDTVGELS

SEQ ID NO: 2107 - protein, 483 aa, Buchnera aphidicola str. APS (Acyrthosiphon pisum)
MQKNLIWFRNDLRVYDNTALHQACQNDTDKVISLFISTPKQWHNQSVSKKKISFMYYHLISLQKELLKLNIILYYHESTDFLNSIEYLIFFCKKHKVNNLFYNYEYAINERYRDYLVKKKLSQKGFLVKGFHDNLLFSNRQIRNQKNETYKVFTFFKKKVIQNLHNNIPQCFPVPSKRKSDRDIFLTSISLKNVNLNFNKNFFPVGEKEAINRLKNFCIYKFNDYFLKRDYPFLDATSMLSPYLSAGIISSRYCLKVLLKTKNSLPLNVLLTSPWFDQILWREFYYHLLIGFPKISRSESLVTWEKEIHWINNIKHFNAWKEGNTGFPIIDAGMRQLNELGWMHNRLRMITSSFLVKNLLINWREGEEHFISNLIDGDLALNNGGWQWSASVGCDSVPYIRIFNPLHQSKTFDESGNFIKKFIPELKNVPNHHIHQPHEWSKQKNFKIDYPNPIINYSESRKTSLSLFKQARLKLHKNGLKNS

SEQ ID NO: 2108 - protein, 231 aa, Buchnera aphidicola str. APS (Acyrthosiphon pisum)
MKINQVVLIRHGQSEWNTLNKFTGWHDAELDKKGKDEAKFAAILLKKEKFFFDCAHTSLLKRAIHTLQYILDELNQTWLSVKKSWRLNERHYGALEGLNKDEVIEKYGQKQVLLWRRSFDISPPQINIKDKRFPGNDPRYSHLNIHDIPLGESLEKTAKRVIPYWNKIVYPELKNNKKILIVAHGNSLRALIQHLYKIDNKAILDLNIPTAQPIILDFDNEKNPIKWHYLT

SEQ ID NO: 2109 - protein, 593 aa, Candida glabrata CBS 138
MLHKHTDKQRLPVNIVDHHHIDPCLQDFKLLSKELQDIASNSEKLKALGSKENKESHLLSMKYVIPKEGVPADQAYDMIHNELTLDGNTHLNLASFVNTSTTHEVRKLISENLTKNLADNDEYPQLIELTQRCISMLSGLWNANPEEEPIGCATTGSSEAIMLGGLAMKKMWEKKMKAAGRTDTSKPNIIMSSACQVALEKFARYFDVECRLVPVSRKSHHMLDPNLLWDFVDENTIGCFVIMGTTYTGHLENVAEVGDVLTAIEKQHPEWANKDIPIHVDGASGGFIVPFAFSREQLKAYGVPNWGFDHPRVVSINTSGHKFGLTTPGLGWVLWRDESHLAPELRFRLKYLGGVEETFGLNFSRPGFQVVHQYYNFMNLGYDGYRDTFKRSLFVARVFAHQILRSPIFNDYFEVVSSIHESIDGDKVPDAANDYWENPEKYKPGVPLIAFKFSDKFQKEYPEVPQALLSHMLRTRGWIIPNYPLPHSTDGSDKCEVLRVVFRNEMSLDLAQLLLSDIQAVLRKLQGSYSGLKTISHESDSDKRRDYVYKMLLALASPDADIGEDEDEETKEKKASKKEEIKQRLKRNYRGTC

SEQ ID NO: 2110 - protein, 438 aa, Magnaporthe grisea 70-15
MVAMRHPARQLCQTFSQTGSSRFAANGLRTLPSSALQTRAFATPVPPVTQDATGSKGPTAMVFLNMGGPSTTEEVHDFLLRLFSDADLIPFGPLQKYLAQWISKRRTPKIQGQYAAIGGGSPIRKWSEHQNAEMCKLLDKISPETAPHKPYVAFRYANPLTEEMYNRLLADGFGNGKGGRAVAFTQYPQYSCSTTGSSLNELWKWRQRLEGKSAEADGGSSAALSKVNDGTIQWSVIDRWPVHAGLVEAFAQNIEAKLAEYPEERRNKAVLMFSAHSLPMTVVNRGDPYPAEVAATVYGVMQRLGFSNPYRLCWQSQVGPQPWLGPQTSTSVEEYVSKGQKDIVLIPIAFTSDHIETLFELDQEVIGDSGHPDTVKRVESLNGSKVFIKALADIAKEHLHSGLACSTQMGLRCPGCKSERCLESKKFFASQQARFSSA

SEQ ID NO: 2111 - protein, 320 aa, Buchnera aphidicola str. APS (Acyrthosiphon pisum)
MIKKIGVLTSGGDAPGMNAAIRGVVRTALSERLEVFGIYDGYLGLYENRMVQLDRYSVSDMINRGGTFLGSARFASFYQDKIRSIAVQNIKKRKIDALVVIGGDGSYIGAQKLTEMGIPCISIPGTIDNDVSGTDYTIGYFTALQTVVEAIDRLRDTSSSHQRISIVEVMGRHCGDLTLAAAIAGGCEFIVLPEIDYKKEDLVIEIQAGIAKGKKHAIVAITEYICDVEELAQYIEKKTNRETRATILGHIQRGGAPVVYDRILASRMGAYSVELLIKGYQGKCVGIQNEKMVFNDIKNALKNMKRTFKKDWLITAKKLY

SEQ ID NO: 2112 - protein, 406 aa, Candida glabrata CBS 138
MTVTIQELTNHSYIDHELSATLDSTEAFEGPEKLLEIWFFPHRHCIPKDENGDMKTLRSIAVEKWVAILKLVKCEVLSIKSTEKMDAFLLSESSLFVCDHKITLKTCGTTTTLFCLEELFRIVEEELGWDMRAKKEENVGKYHPHKVFYSRRCFMFPLKQRSIHKRWSDEIEYLNKFFCYGSSYLVGRSDQSNHWNLYVTETNKNMNITDDCGEDDEDETLEILMTELDQTCAQQFSCKREVKTVEQSQQDENTSEDEGHLSGYKMTNATRLDRVYNNEKNVSFHHDAFAFTPCGYSSNIIMDEEYYYTLHVTPEKGWSYASFESNVPVRHVSNNKQDNISVINHVLSVFQPRDLCITFFCKSMDNESFKKLMKTSGEIPNYTKKDRIIYDLDDYHLLYIRFERNC

SEQ ID NO: 2113 - protein, 509 aa, Zea mays
MDGSSKGSGHSEALRNYNLGRTLGIGTFGKVKIAEHKLTGHRVAIKIINCRQMRNMEMEEKAKREFKILKLFIHPHIIRLYEVIYTPTDIYVVMEYCKYGELFDYIVEKGRLQEDEARRIFQQIISGVEYCHRNMVVHRDLKPENLLLDSKYNVKLADFGLSNVMHDGHFLKTSCGSPNYAAPEVISGKLYAGPEVDVWSCGVILYALLCGTLPFDDENIPNLFKKIKGGIYTLPSHLSALARDLIPRMLVVEPMKRITIREIREHQWFQIRLPRYLAVPPPDTTQQAKMIDEDTLRDVVNMGFNKNHVCESLCSRLQNEATVAYYLLLDNRFRATSGYLGADYQESMDRNLNQLASSESSSSGTRNYVPGSSDPHSSGLRPYYPVERKWALGLQSRAHPREIMVEVLKALQELNVRWKKNGHYNVKCRWCPGFPEVNDTLDASNSFLGDSTIMDNDDANGRLPTVIKFEFQLYKTKDDKYLLDMQRVTGPQLLFLDFCAAFLTKLRVL

SEQ ID NO: 2114 - protein, 161 aa, Shewanella sp. MR-7
MEYNTSELCDMYLDVVDVVEPMFSNYGGCSSFGGSISTIKCFEDNGLITEVLQEDGQGKVLLVDGGGSLRRALIDASIAEIAVNNNWEGIIVYGSVRDVDALEELDIGIQALASIPVGADGNSVGEVEIPVNFGGVTFLPGDHIYADNTGIILSPEPLDIE

SEQ ID NO: 2115 - protein, 122 aa, Desulfovibrio vulgaris subsp. vulgaris str. Hildenborough
MSKHILIVDDSKTVRNLVAFIMKKEGFKVTTAEDGLDGLEKLYSSEGVDLIISDVNMPRMDGFTFIKTVREQDTYRNLPIVVLSTEGQEKDIQMGMSLGANLYMVKPAQPEKMVKNIKMLLG

SEQ ID NO: 2116 - protein, 937 aa, Yarrowia lipolytica CLIB122
MASIIDGNSIAKNIRERLHTEIADVQQTNPRFQPSLVIIQVGDRPDSSTYVRMKLKAADEAAIKCELKKLDENVSQHELLREITHLNEDPSVDGVLVQLPLPKHIDETTITNAVAADKDVDGFGPLNIGELAKRGGNPSFVACTPKGVMELLKVAGIDVAGKTAVVLGRSDIVGAPVSYLLRNADATVTVVHSKTANIPEIVKTADIVVAAIGQPGFVKGEWLKPGAVVIDVGTNYIPDDTKKSGQRLVGDVDFESAKNVASHITPVPGGVGPMTVAMLLDNVVLSAKRQAEKLTARSITPLPLKKENPVPSDFAISRAQEPKHITEVAAEIGVLPSELEPYGAYKAKVQLPILDRLAHRKNGKYVLVTGITPTPLGEGKSTTTIGLVQALGAHLGKMAFANVRQPSMGPTFGIKGGAAGGGYAQVIPMDEFNMHLTGDIHAISAANNLLAAAIDTRMFHESTQKDAALYKRLVPAKKGVRTFTRGMQTRLKKLGIDKTNPDDLTEEEIAKFVRLDIDPETITWRRVVDCNDRHLRGITVGQAPTEKGRTRETGFDISVASECMAILALANDLEDMRERLGNMVIGSSKNGDPVTCDDIGAGGALTALMKDAIKPNLMQTLEGTPVFVHAGPFANISIGANSVLADKMALKLAGTEPNESDDKAGFVVTEAGFDFTMGGERFFNIKCRSSGLAPDVVVIVATVRALKSHGGGPEVKAGAPLPKEYTEENVELLREGCKNLGKHIENARQYGLPVVVAINEFVSDTAAEHDVIREEALKYGAEDAVVAKHWAEGGAGAVDLAQAVVDASNKIDKDFKLLYEADTTAEEKLNTIAQKMYGAKDVELSELARKKIDAYTKQGFGNLPICVAKTQYSLSHDPTLKGVPTGFTVPIRDVRASVGAGYLYALAAEIQTIPGLPTHCGFMNVEVNDKGEIEGLF

SEQ ID NO: 2117 - protein, 616 aa, Yarrowia lipolytica CLIB122
MPPKNKNEVKDGDKNTRIAIVNVDKCKPKKCRQECKKSCPVVRTGKLCIEVTPDSKIAFISETLCIGCGICPKKCPFGALQIINLPTNLDSEVTHRYSANSFKLHRLPTPRPGQVLGLVGTNGIGKSTALKILAGKQKPNLGRYEDPPTWQEILTHFRGSELQNYFTRVLEDNLKAIIKPQYVDNLPRAIKGPLQKVGELLKAKLERKDDFENIVNTLELKGVWKREVSLLSGGELQRFAIGMSCVQLAQVYMFDEPSSYLDVKQRLHAAAMIRSLIDSTGYIIVVEHDLSVLDYLSDFVCILYGVPSVYGVVTLPSSVREGINIFLDGHIPTENLRFRTESLQFRLADATEIIPLDQSRSFKYPTMSRTQGDFKLNVESGEFTDSEIIVMMGENGTGKTTLCRLLAGAVAPDEGQKAPKLNVSMKPQKIAPKFTGTVRQLFLKKIRSSMHHPQFQTDVYKPLRIDDIIDQEVQNLSGGELQRVAIVLALGQPADIYLIDEPSAYLDSEQRIICAKVIRRFILHSKKTAFIVEHDFIMATYLADRVIVFDGQPSVEAFARRPESLLTGCNRFLKSLNVTFRRDPTSFRPRINKKDSQMDKEQKAHGNYFFLDTAEA

SEQ ID NO: 2118 - protein, 298 aa, Zea diploperennis
SSEVQVCVTGGAGFIGSYLVKKLLEKGYTVHATLRNTEDEEKTGLLRRLVPGAAERLRLFEADLFDAATFAPAIAGCQFVFLVATPYGLEAAGSKYKSTAEAAVAAVRVILRQCEESKTVKRVIHTASISTASPLKDKEAEGSGDGFKDFISESCWTPLNVDYHLRSAHFDKYILAKLRSEQELLSYNGGESPAFEVVTLPLGLVAGDTVLGHAPETLEHAVSPVSREELSFKFLRLLQSLLGSEPLVHVDDACEALLFCMECPSIAGRFFCAAAYPSIHDITDHYASKFPHLDVPRA

SEQ ID NO: 2119 - protein, 84 aa, Zea mays
IRPYGRGLLFCRENSVLKRAVAIQHERQKEFDERSHEVQNLKHLVVQSQHQGRPLEMNNYALTMHFKQAQQNSSIPGRFNPEVF

SEQ ID NO: 2120 - protein, 598 aa, Haemophilus influenzae R2866
MKNFKYFAQSYVDWVIRLGRLRFSLLGVMILAVLALCTQILFSLFIVHQISWVDIFRSVTFGLLTAPFVIYFFTLLVEKLEHSRLDLSSSVNRLENEVAERIAAQKKLSQALEKLEKNSRDKSTLLATISHEFRTPLNGIVGLSQILLDDELDDLQRNYLKTINISAVSLGYIFSDIIDLEKIDASRIELNRQPTDFPALLNDIYNFASFLAKEKNLIFSLELEPNLPNWLNLDRVRLSQILWNLISNAVKFTDQGNIILKIMRNQDCYHFIVKDTGMGISPEEQKHIFEMYYQVKESRQQSAGSGIGLAISKNLAQLMEGDLTVESERGKGATFHLTLHAQEISEKESVKKNIPFLNILLVEDVDLNIMVAKTILEKLGHHVDVATNGKQAITLFEKNVYDILLLDIKLPDMSGFEIAQYLRENYENGIYDFLPPMIAFTANVMQSEQEYLEMGMDGVLRKPISIKDLHHCLQQFFADESESIIEMNDDNEFSEQFDLALIETLGKKQILENLSLFKQTMPNYLAQLSKDNMKETEDTAHKIKGAAASLGLNHLRQLADTLESAAKNSDVFNCGELIDKIGNLWLEDVEDLLKFCKF

SEQ ID NO: 2121 - protein, 185 aa, Arabidopsis thaliana
MTMMSLPKMKLSCLQPHLHFTSSRSIAAALAFPSSSIRNRTSCLVRCGSARRRLTTKSSRNSKLERAQPPPLGLERHWRYAVVGGVSVGLMMVLLLGMDAEKAMALGPEGPLMEEFWDNVRRYGLYALTVSTGALSAVFEPIFELLKNPISAILILLILGGSFYIVSQVVSAMIGVNEFAYQYSY

SEQ ID NO: 2122 - protein, 442 aa, Arabidopsis thaliana
  misc_feature (229)..(229): Xaa can be any naturally occurring amino acid
  misc_feature (242)..(242): Xaa can be any naturally occurring amino acid
MNALAATNRNFRHASRILGLDSKIERSLMIPFREIKVECTIPKDDGTLVSYIGFRVQHDNARGPMKGGIRYHPEVDPDEVNALAQLMTWKTAVADIPYGGAKGGIGCSPRDLSLSELERLTRVFTQKIHDLIGIHTDVPAPDMGTNAQTMAWILDEYSKFHGHSPAVVTGKPIDLGGSLGREAATGRGVVFATEALLAEYGKSIQGLTFVIQVKPLSANLRSQALLCIXYKTEMLRDLDDMXQGFGNVGTWAAKLIHEKGGKVVAVSDITGAIRNPEGIDINALIKHKDATGSLNDFNGGDAMNSDELLIHECDVLIPCALGGVLNKENAGDVKAKFIVEAANHPTDPDADEILSKKGVIILPDIYANAGGVTVSYFEWVQNIQGFMWEEEKVNLELQKYMTRAFHNIKTMCHTHSCNLRMGAFTLGVNRVARATQLRGWEA

SEQ ID NO: 2123 - protein, 375 aa, Coccidioides immitis RS
MEEEVAALVIDNGSGMCKAGFAGDDAPRAVFPSIVGRPRHHGIMIGMGQKDSYVGDEAQSKRGILTLRYPIEHGVVTNWDDMEKIWHHTFYNELRVAPEEHPVLLTEAPINPKSNREKMTQIVFETFNAPAFYVSIQAVLSLYASGRTTGIVLDSGDGVTHVVPIYEGFALPHAISRIDMAGRDLTDYLMKILAERGYSFSTTAEREIVRDIKEKLCYVALDFQQEIQTASQSSSLERSYELPDGQVITIGNERFRAPEALFQPSVLGLESGGIHATTYNAIMKCDVDVRRDLYGNIVMSGGTTMYPGIADRMQKEITALAPSSMKVKIIAPPERKYSVWIGGSILASLSTFQQMWISKQEYDESGPSIVHRKCF

SEQ ID NO: 2124 - protein, 458 aa, Gloeobacter violaceus PCC 7421
MSLPAGPASPPPLQLLQWIGRPTDYLERTARRYGDPFTMRLGLHSPVTGVFFSSPEAFQQLFNTEPGLFDSGGANASSTFNLLFGTNSLILLDGERHQQQRRLLTPPFHGERMRSYGELIRTLAEQVTARWNLGTPFQARRSMQRISLGVILKAVFGLHDGTRYLRVCRLLGNLIDASASPLLFGLRLIFPQDAGPMSPMGQLKAQIDAIDELLYAEIRERRERPDPRADDILSLLMAARDEAGQGMGDVELRDELMTLLVAGHETTATAMAWALYWIHRLPQVRERLLAELDSLGSDPDPEAIARLPYLGAVCSETLRIYPVAMVAFARVPRRPVRILDREYPAGTFLIPNIYLAHRRPEAYPDPERFRPERFLERTFSPYEFVPFGGGSRRCIGVAFALYEMKLVLATVLSRVELRLADPRPRLPVRRGLTLAPPEDLHLIPTALRSGHRDLLPAC

SEQ ID NO: 2125 - protein, 411 aa, Geobacillus kaustophilus HTA426
MTTTTKLHPKTIEIVKSTVPVLETHGEQITKRFYELMFSNHPELLHIFNHANQKQGRQQRALAAAVYAAARYIDQLDAILPVVRQIGHKHRSLGIKPEQYPIVGKHLLLAIKDVLGDAATDEVITAWAEAYEAIASVFIQVEKELYDEAAAKHGGWRDFRRFVVVKKVKESGVITSFYLEPEDGKAISDYLPGQYVSVKLSIPGETYTHIRQYSLSDAPGKGYYRISVKREAATADKPAGIVSNYLHDHVQEGDVLELSAPAGDFTLDLSKTTPVVFISGGVGITPLLSMAHTLAIRQPTRPAAFLHAALNGRVHAFDKELRMLAERPSFSYRICYESPSDEDRRHPHFGKEGRIDLAWMQSVIPTKDADFYFCGPMPFMKTVYRALKQWSVPEEHIHYEFFGPAGDLTKD

SEQ ID NO: 2126 - protein, 426 aa, Triticum aestivum
IRHELQREWGVGHPLRVVPLFEKLADLEAAPAAVARLFSIDWYMDRIGGKQEVMIGYSDSGKDAGRLSAAWQLYKAQEELVKVAKQYGVKLTMFHGRGGTVGRGGGPTHLAILSQPPETVNGSLRVTVQGEVIEHSFGEEHLCFRTLQRFTAATLEHGMHPPVSPKPEWRALMDEMAVVATEEYRAMVFKEPRFVEYFRSATPETEYGRMNIGSRPSKRKPSGGIETLRAIPWIFAWTQTRFHLPVWLGFGPAFNHIMHKDIRNVQALREMYNEWPFFRVTLDLLEMVFAKGDPGIAALYDELLVADELKPLGEQLRSNYEDTKKLLVQVAGHRDVLEDDPYLKQRLRLRDPYITTLNVCQAYTLKRIRDPSFQVTAQPPLSKEFTDENQPASLVKLNAASEYAPGLEDTLILTMKGIAAGMQNTG

SEQ ID NO: 2127 - protein, 839 aa, Arabidopsis thaliana
MAAYTCTSRPPISIRSEMRIASSPTGSFSTRQMFSVLPESSGLRTRVSLSSLSKNSRVSRLRRGVICEAQDTATGIPVVNDSTWDSLVLKADEPVFVDFWAPWCGPCKMIDPIVNELAQKYAGQFKFYKLNTDESPATPGQYGVRSIPTIMIFVNGDFKVKVALNKSMKCDSKSETVSSSSTSGSLSDPDQWTIFKDKDESEIMNPAILCAVRAGDKVSLLKRINDDVKVTQRLVDNQGNSILHIAAALGHVHIVEFIISTFPNLLQNVNLMGETTLHVAARAGSLNIVEILVRFITESSSYDAFIAAKSKNGDTALHAALKGKHVEVAFCLVSVKHDVSFDKNNDEASPLYMAVEAGYHELVLKMLESSSSPSILASMFSGKSVIHAAMKANRRDILGIVLRQDPGLIELRNEEGRTCLSYGASMGCYEGIRYILAEFDKAASSLCYVADDDGFTPIHMAAKEGHVRIIKEFLKHCPDSRELLNNQCQNIFHVAAIAGKSKVVKYLLKLDEGKRMMNEQDINGNTPLHLATKHRYPIVVNMLTWNDGINLRALNNEGFTALDIAETMKDNNAYVLYKRLIWMALVSAGAPHGPNLIPLTVSQSSKQSPERYKDSVNTLMVTATLVATVTFAAGLTLPGGYMSSAPHLGMAALVNKLNFKVFLLLNNIAMCTSVVTVMALIWAQLGDALLTKKAFRLALPLLLTAVVSMMMASVAGLTLVVSDLPWLSHLVLAIDSAFLVFLMLLIIPYAFSSTRHGFLRHIFYFPYFLMLLVVSEGSNNMDVFVSHEFVIVVLLSNHKNWYRDKYDRWLLQRAHMHDPDFAPLAFKAKFSVSKIRNLK

SEQ ID NO: 2128 - protein, 321 aa, Xanthomonas campestris pv. vesicatoria str. 85-10
MVRMNTTPDTALLVVNLGTPESPTAPAVRRYLAEFLSDRRVVAIPPLFWKPLLYGVILPIRGPKSAEKYAKVWLPEGSPLAVYTRRLADGLQAVMPDWHVEWAMRYGEPALRKTLDGLRARGIRRIVVLPLYPQYSTTTTASIQDVVEAWRTSAPEIAVEVIQDYCEDAGWVAAIAESIRAHWQVHGRSEKLMFSFHGLPQRVANAGDPYPQQCERSAQAIVAALGLGADEWQMGYQSRFGAERWLQPYAEPTLWALAEGGVRSFDLVCPGFATDCLETLEEVALGFAETLAERGATLSYIPCLNASDAHAQALAAVARRA

SEQ ID NO: 2129 - protein, 246 aa, Aspergillus nidulans FGSC A4
MGESRQELLAWLNNLLQLNMTKIEQCGTGAALCQIFDSIFMDVPMSRVKFNVNTEYAYLQNFKILQNVFARHQIDKPIPVESLSKCRMQDNLEFLQWTKKYWDQHYPGGDYDALARRKASGAPPGSAGTSRAGATSASSARRGTTPTVGRARPAAGGASSATVAALQAELNSTKEAISGLEKERDFYFAKLRDIELLLQNAIEADPELEKDDDSLVKHIQGILYSTEEGFEIPAEGEVAGDELETF

SEQ ID NO: 2130 - protein, 472 aa, Gluconobacter oxydans 621H
MSDTVLNPSPVPSAAVAKAPMVGRMMFAVALAAIAGLMFGLDVGVISGALGFIRDEFHASEFEQSWIVSSMMFGAAVGAVGAGRMSYAFGRRRSLIFSAFLFVAGGLVCALASSVSELIIGRTMLGLAIGIGSFVAPLYISEVSDISRRGSLVSMYQLMITLGILLAFVSNAILSYSGSWRWMLGIMAIPGTFFLIGSFFLPDSPRWLMLRGRHEEALSIMKELRHNPELAHQEIRDIQGQIHDRQRGLAMFLENRNFRRAVLLGIVLQVMQQLTGINVVMYYAPRIFQEVGFGSSGQMWGTAIVGVVNWLATFIAIAFADSWGRRPMLITGFAIMSAGLAVLATIMSGAVGNTDLSHYLAISVLLCFIAGFAFSAGPLVWVLCSEVMPLQGRDFGITCSTVTNWVTNMVVGATFLGLLTTLGASHTFWLYAGLNALFIFMVLFFVPETKGVSLESIETKLNQGVTLRNIGR

SEQ ID NO: 2131 - protein, 523 aa, Gluconobacter oxydans 621H
MLQDDLKTQMRAYMEYLRDAVVLEATLGTDDRSNEVRGLLEDIASLSPKVTFSDKGHGTRIPSFVIRRPGTDVQVCFAGLPMGHEFTSLVLALLQVSGHPPKIEADVVAQIRALDGDYHFETYFSQSCQNCPDVVQALNAMSVLNPKIHHTAIDGADFQDEVERLGIRSVPQVYLNGEPFASGRMEVADILAKLDTASVARSAEKLNDMAPFDVLVLGAGPAGDAAAIYAARKGLRTGLVAERFGGQVMDTAGIENFISVPETDGPKLSAALEAHVRQYDVQIIASQLAAKLIPAAETGGLHQIVLESGAVLRSKTVIIATGARWRHLGVPGEDEYRTKGVAYCPHCDGPFYKGRPVVVTGGGNSGVEAAIDLAGIVSHVTLLQRGAHLKADKVLQDRLLSLPNVTVLTNALTTKIEGDGKEVTGLTYSDGDGGLHQIKTDGVFVQIGLLPNTEWLKGTLKLSPYGEIVIDDHCGTSVPGVFAAGDATTVPYKQIVIAMGEGAKASLSAFDYLIRLPVAAKAN

SEQ ID NO: 2132 - protein, 436 aa, Burkholderia xenovorans LB400
MKKPSQFDAIVVGAGPSGNAAAYTMARAGLKVLQIERGEYPGSKNVQGAILYAKALEEIIPDFRDDAPLERHIIEQRIWMLDDTSFVGTHMRSEEYNKPPYNRYTIIRAQFDKWFSSKVREAGALLICETTVKQLIMDGDQVVGVQCDREHGDVYADVVVLADGVNSTLARKAGFHGEIEAGNVALAVKEILFMPEETIRQRFNIGEDDGVVIEMVGRITDGMTGTGFLYTNKESLTIGVGCMLGDFKKNPNRTSPYVLLEKMKQHPSIAPLIAGGEMKEYCAHLIPEGGFHAIPRVYGNGWMIVGDSGGFVNAAHREGSNLAMTTGRLAAETVIHAKAAGLGYRAATLKAYKAALDQSFVMKDLHKYRDMPAVLHQNPQFFTTYPDLVARAARTMLTVDGKDKKSKEREIFSSFRKARSLAGMVGDAYKLLRAFR

SEQ ID NO: 2133 - protein, 606 aa, Delphinium 'MagicFountains dark blue'
MDSCACIDTQWPADELLVKYQYISDFFIALAYFSIPLELIYFVQKSAFFPYRWVLMQFGAFIVLCGATHLINLWTFSMHSKTVAMVMTIAKISTAVVSCATALMLVHIIPDLLSVKTRELFLKNKAEELDREMGLIRTQEETGRHVRMLTHEIRSTLDRHTILKTTLVELGRTLGLEECALWMPSRTGMNLQLSHTLRHQIPVGSTVSTNLPIVTQVFNSNQAIKIPHTCPLARIGPTAGRYVPPEVVAVRVPLLHLSNFQINDWPELSAKSYAVMVLMLPTDSARKWHDHELDLIEVVADQVAVALSHAAILEESMRARDMLMEQNIALDMARREAEMAIRARNDFLAVMNHEMRTPMKAVIALSSLLLEIELTPEQRVMIETVLKNSNLLAALINDVLELSRLEDGSLELDIRTFSLHGIFREVLNMIKPITAVKKLSLTLMLSPDLPVVAVGDEKRLVQIMLNVVGNAVKFTKEGYVSVIASVAKAESLRDWQAPEIFMVSSDSHFHLCVQVKDSGCGISPQEIPHLFTKFTQLRSGQNRSNDGAGLGLALCKRFLNLMEGHIWVNSDGTDKGCTVTIIVKLGICEGQPEPSNLQVVSRPRLS

SEQ ID NO: 2134 - protein, 327 aa, Xanthomonas oryzae pv. oryzae KACC10331
MPGSARMVRMNTTPDTALLVVNLGTPESPTAPAVRRYLAEFLSDRRVVAIPPLFWKPLLYGVILPIRGPKSAEKYAKVWLPDGSPLAVYTRRLAEGLKTVMPDWHVEWAMRYGEPALRRTLDGLRARGIRRIVVLPLYPQYSTTTTASIQDVVDAWRPSAPEIAVEVIQDYYEDAGWVAAIAESIRTHWQVHGRSEKLMFSFHGLPQRVANAGDPYPQQCERSAQAIVAALGLGADEWQMGYQSRFGAERWLQPYAEPTLWKLAEGGVRSFDLVCPGFATDCLETLEEVALGFAETLAERGATLSYIPCLNASDAHAHALADVARRA

SEQ ID NO: 2135 - protein, 340 aa, Gluconobacter oxydans 621H
MTKTIPATLIAGDGIGPEIMQSVTTVMDALGAPFLWDHQSAGVGAFDQHGTALPEATLDSIRRTGLVLKGPLTTPVGKGFRSINVTLRQAFDLYANVRPTQTIVPGGRYENVDLVVIRENIEGLYAAMEYYMAVDGDPEAVAYGAGFNTRTECNRIVRFAFEYAVKNNRKKVTLVHKANILKILSGLFLHEGRKVAAEYEGRVALEERIVDACAMELVIRPENYDVIVTTNLFGDILSDLTAGLVGGLGMAPGANIGEKMGIFEAVHGSAPDIAGQGIANPLALMMAGSMMLAHVGRQDLSQRLDGAMKQILQVEGLRTRDLGGKATTQDVTQALLRAIQ

SEQ ID NO: 2136 - protein, 288 aa, Arabidopsis thaliana
FTFVLCKYCSRYCHESIVSCLELNSSGGKSLTQEANEPPVPISVSSPCGKRTRDPEDEVYLDNLRSQKRYLSEIMACSLNGLTVGDSLPVNMLESPARSESFLYHRDDLSLQYSPMSEDSDEARFCEDPTATASTSSSQPESRPTSPVSPYRYQRPLTSTNSPQPSPTILHHSHTCPASMISNAATTTTPQSRQRGSDTEGRFPSSPSDICHSGDLRRTALLRSVQMRTQPCGYSSSSGPSNIDGEERMCSKSMEEDRGYNKGEDIPYAEVSSKSKSCKALDMRLCEK

SEQ ID NO: 2137 - protein, 480 aa, Frankia sp. CcI3
MSEPTPFWLAGKPATGSATTTVRHPFDGAEVAVVAQPDPDQVETAVAAAAAVAPAFAALPAHVRAGALAGVSKEIARRGDELARLITAESGKPLTWSRAEVARASSTFRWGAEEARRFAGELTRLDTDPPGEGRLALTRRFPRGPVLGITPFNFPLNLVAHKVAPALAVGAPIIVKPAPRTPLSALFLGDLLADAGLPEGSWSVLPIPNDRLGPLVADPRLPVVSFTGSGPVGWSIRDTVPRKHVVLELGGNAAVLVAADYATPADLARAAGRIALFANYQAGQSCIAVQRVYADRTIVDELLAEIVAAVRALHDGDPADPATDVGPLIDVAAAERVEAWITEAVEAGATLVCGGTRHGTSLSPAVLTGVPPTAKVVSEEVFGPVIVVAAVDGVDEGFARINDSAYGLQAGVFTHDLATAFRAHRELQVGGVVIGDVPSYRADQMPYGGTKGSGIGREGVRSAMTDLTEDRVLVLTGLDL

SEQ ID NO: 2138 - protein, 530 aa, Cryptococcus neoformans var. neoformans B-3501A
MSSVCRISNCLSPRALSTAIRPKVTFRATPPSCRRRTFLSRRRTSFWAPSYPESKPLASTLQVPFTPPPPTDNGDDHLSEETRPEVIVAEPRDKKNRYLNSLMEKAGELSLKCSILDAEGNWGAEGQKYTKLELCREYDLDPRDLRKLDSLSPSLVPVILTRKTCILISMLHFRALIKPDSVIVFDSSHAHKDVTRRFKYHLERNIKAGLGIKVGGADEEKCDEIVLSYEHRALESILVVTANALEEEMAFSRHIVQQLLADLEDHIDRENLKKLLHYSKKIAAFQSRARYVKSAIDELLDSDEDLSAMYLTSRAQGRPRALHDHEQLELLLESFVKQVEEIVSEVDTTVVNMQSTQEIAELMLDSGRNALLALDIKISIATLGIGSGALLAGLFGMNLTTQLEETPYAFAVISSTAFLVTVLITAYGLRTLRRVRRVALSGRNPAVLSSVLGSASWDSSVAQFSQGFDPALVDMRTEMAKRAIWERLWWGSKRKEVEEGEKWRKAYTYASAKKEQEKRKWARLPGGQTR

SEQ ID NO: 2139 - protein, 348 aa, Mycobacterium leprae
MQDEGMRIGILTGGGDCPGLNAVIRAIVRTCDARYGSSVVGFQDGWRGLLENRRMQLCNDDRNDRLLAKGGTMLGTAHVHPDKLRAGLHQIKQTLDDNGIDVLIPIGGEGTLTAAHWLSQEDVPVVGVPKTIDNDIDCTDVTFGHDTALTVATEAIDRLHSTAESHQRVMLVEVMGRHAGWIALSSGLASGAHMTLIPEQPFDVEEVCCLVKRRFQRGDSHFICVVAEGAKPVPGSITLRQGGMDEFGHERFTGVAAQLGAEVEKRINKDVRVTVLGHVQRGGTPTAFDRVLATRFGVNAADASHAGEYGQMVSLRGQDIGRVPLEDAVRQLKLVPESRYDDAAAFFG

SEQ ID NO: 2140 - protein, 324 aa, Burkholderia vietnamiensis G4
MGAVAAEPDRLGIRRAEKHVRASLKQFPARHDDITSAAAAAGPHARRAAHRRRAIRWRHTRMSAELLASRPPESESTLVLTLSNPGARNALHPDMYAAGVEALATAERDPEIRAVVLTGADRFFCAGGNLNRLLDNRSKDPSCQADSIDQLAAWVTAIRASTKPVIAAVEGAAAGAGFSLALACDMVVAAHDAKFVMSYARVGLTPDGGGSWFLARALPRALAAEILLEGKPIAAERLHALGIVNRLAVPGAALRDALAWADSLAGVSPNALARIKQLLDDATAQPLDAHLVTERDHFVAALHHADAFEGITAFLEKRQPHYKR

SEQ ID NO: 2141 - protein, 303 aa, Glycine max
MGNANGRDDVNGTPSGTEGEEEEEEEEEEEEEEDDGEEGGSDSVTDCMSSNPSHHAPSELMGHSPPASPRATQSPFMFTPQVPVVPLQKPDEMHAPSPSWMQTTSVYEDMYCELGIPTMITWSYDGKEVAVEGSWDNWKTRMPLQRSGKDFTIMKVLPSGVYQFRFIVDGQWRYAPDLPWAQDDSGNAYNVLDLQDYVPEDIGSISSFEPPQSPDSSYNNLQLSSEDYAKEPPLVPPYLQMTLLNVPSTNMEVQPLTSRPQHVVLNHLYMQKGKGSPSVVALGTTQRFVAKYVTVVLYKSLQR

SEQ ID NO: 2142 - protein, 398 aa, Frankia sp. CcI3
MPGPRFPSSSAPTVEPAAPVRFCDTTLRDGEQAPGVAFTAAEKLAIAAALDAIGVHQIEAGIPAMGPAERDVLREILATQPQAGVVAWCRADRRDIDAAVSCGIVTAHLTIPVSDLHLKSKLGRDRGWARRRIRDCVFDAADRGLRFSVGLEDASRADDNFVIELAGELREWGATRIRWADTVGLLDPVSAYTRLGRLVQAVPGEWEIHAHDDFGLATANTLAAVQAGFTWVSTTVLGLGERAGNAPLEEVAMALRHLLKVPVDLDTTSFRRLARMVARAACRPLPVGKAVVGESVFAHESGIHVHGVLRHPSTYEPFDPAEVGGQRRLAFGKHSGRASVRYALAQYGITADDSEIEPLLERVRTTATQTKRGLHGRDFQELLGRAEVPAPRVEAPPS

SEQ ID NO: 2143 - protein, 161 aa, Zea mays
  misc_feature (40)..(40): Xaa can be any naturally occurring amino acid
MAMETCFRAWALHAPAGSKDRLLVGNLVLPSKRALAPLSXGPRHVCQSKNAVDEVVVADEKNWDGLVMACETPVLVEFWAPWCGPCRMIAPVIDELAKDYAGKITCCKVNTDDSPNVASTYGIRSIPTVLIFKGGEKKESVIGAVPKSTLTTLIDKYIGSS

SEQ ID NO: 2144 - protein, 107 aa, Synechococcus elongatus PCC 7942
MSVAAAVTDATFKQEVLESSIPVLVDFWAPWCGPCRMVAPVVDEIAQQYSDQVKVVKVNTDENPSVASQYGIRSIPTLMIFKDGQRVDTVVGAVPKTTLANTLDKHL

SEQ ID NO: 2145 - protein, 164 aa, Ralstonia metallidurans CH34
MSNVYQFEANSLSGQPQPLADYRGKVLLIVNTASECGFTPQYAGLQTLQASYQARGFDVLGFPCNQFGKQEPGDAEQIGAFCESRFHVTFPMFEKIDVNGADAHPLYKWLTSEKRGFLGTQAIKWNFTKFLLRRDGTVFKRYASTTKPEEIRADIESLLAEQPA

SEQ ID NO: 2146 - protein, 625 aa, Mycobacterium leprae
MSAPTKPHARPQGAGNSVPNTVKPATQFPSKPAVAKLERVSPEQLTGAQSVIRSLEELDVEVIFGIPGGAVLLVYDPLFYSKKLRHVLVRHEQGAGHAASGYAHVTGKVGVCMATSGPGATNLVTPLADAQMDSVPVVAITGQVGRSLIGTDAFQEADISGITMPITKHNFLVRAGDDIPRVLAEAFHIASSGRPGAVLVDIPKDVLQGQCKFSWPPKMDLPGYKPNTKPHNRQIRAAAKLIADARKPVLYVGGGVIRGEATEQLRDLAELTGIPVVSTLMARGAFPDSHHQNLGMPGMHGTVAAVAALQRSDLLIALGTRFDDRVTGKLDSFAPDAKVIHADIDPAEIGKNRHADVPIVGDVKAVIVELIAMLRHYEVPGNIEMTDWWSYLDGVRKTYPLSYSPQSDGTLSPEYVIEKLGEIVGPEAVYVAGVGQHQMWAAQFISYEKPRTWLNSGGLGTMGFAIPAAMGAKIARPEAEVWAIDGDGCFQMTNQELATCAIEGAPIKVALINNGNLGMVRQWQALFYQERYSQTDLATHSHRIPDFVKLAEALGCVGLRCECEEDVVDVINQARAINNRPVVIDFIVGADAQVWPMVAAGASNDEIQAARGIRPLFDDESEGHV

SEQ ID NO: 2147 - protein, 312 aa, Mycobacterium avium subsp. paratuberculosis K-10
MAPHDKQHRDWSEADVGDQSGRVVVITGANTGIGYETAAVLAHRGAHVVLAVRDLEKGNAALSRIVAASPNADVTLQQLDLASLASVRSAAEALRAAYPRIDLLINNAGVMWTPKQVTEDGFELQFGTNHLGHFALTGLLLDHLLGVRDSRVVTVSSLGHRLRAAIHFDDLHWERRYDRVAAYGQSKLANLLFTYELQRRLAAAPDAKTIAVAAHPGGSNTELARHLPGIFRPVQAVLGPVLFQSPAMGALPTLRAATDPAVQGGQYYGPDGFLEQRGRPKLVESSAQSHDEQLQRRLWAVSEELTGVHFPV

SEQ ID NO: 2148 - protein, 319 aa, Buchnera aphidicola str. APS (Acyrthosiphon pisum)
MDKVKHSKIIILGSGPAGYTAAIYAARANLDPFLITGTNKGGQLMNTNEIENWPGDYNKISGSELMNRMYKHAIELKTKVICDTVISVNFKKNPFFLIGENNKYTADSVIIATGANPRYLGLQSESLFKGKGVSTCAVCDGFFYKNKEVAVVGGGNTAIEETLYLSNFVKKVHLIHRGINFRAEKILLDRLEKKIKSQKIIIYLNSIVKNILGNSSGVTALLIEQKNSKEKTESKIQVSGLFVAIGYTPNTNIFVNKLKMKDGYIQVTRQEHGNYTQTSIPGIFAAGDVIDHVYRQAITSSASGCMAALDSERYINSLV

SEQ ID NO: 2149 - protein, 525 aa, Mycoplasma gallisepticum R
MVHLTNRNKVHSLHFIFLFIYLNYINNFNSMSNSECIKKKVCNASSYDFKDKYHHLKGLINNQEVGSSKLIEIKSPIDHELSGSFYGMTAEEIDDAYEKADIAFKSWSKAGYEYRKAKILKFAQLLDAHKEEFANLLTDNIAKAYNESLAEVTRSIQYIHDTISVYEEMITHPLVMDEKIHRVKEKVGKFVREPLGVALNISPWNYPLNTPLSKMIPTLIAGNTVVYKVATQAAIIGIRLAHLFKQAGFDPGVVQCVVGLGREIGDKLNTNKHIKSISFTGSTPVGLSLLKQSAVGNISLELGGKDAALVLSDYDKQKTIKEIVKGAYSYSGQRCTAIKRVFVKNEDADEFVQLLKKEVEKLHLGNPFNNPSLVPVIDQHAANFIKELFDDAVTKKAIVLTGGDFEKNCVEAILLDHVTTDMRVAWEEPFGPILPIIRVKNEAEMVKLHNQSEYGLQASIFTSDQTKFDELANQLEAGTINWNRSSSRGPDFFPFMGVKDSGVGVQGIRDTILSVTRYKGFVYNR

SEQ ID NO: 2150 - protein, 449 aa, Pseudomonas aeruginosa PAO1
MAIEQFGYRQQLRRSLSLSDLIIYGMIFMIPIAPFGVYGWVHADAHGMVPMAYLVGMLAMLFTALSYGAMAKAFPIAGSVYSYAQRGIHPHVGFIAGWVLLLDYLLIPPLLYVFSALALNHLFPAIPKLAWMLLFLVSATLVNLRGITFAARANLLFLIGELVVLAIFLVVGYQALEGGLGNGRLTLEPLYRPEAFDLGLVMKAASIAVLSFLGFDAISTLAEEVKGDPARQIGRAALIALFIMGGIFIAQTWLATDLAAGMNFKSADTAFYEIAEAAGGQWLSMLTAVATALAWGVTVSITSQAAVSRLLYSMARDGRLPRALARVHPRYQTPHVSLYLVAVLSLGIGWAFLDAPDVLTSLVNFGALTGFCLLHLSVINHYYRRQRSGQWLRHLLFPLVGLAIIAYVLYSMSLDAQLLGLAWIAVGLVYLALLQRGGRQAPTELAKDL

SEQ ID NO: 2151 - protein, 493 aa, Frankia sp. EAN1pec
MKTIGHWINGKSAPSASGRVGRVFDPARAVQTGQVTLASTAEVDDVVRVARDAAVSWGASSLSNRSTLLFRLRELLDASRDELAAAVAAEHGKVHSDALGEVARGIECVEFACGIPHLLKGSHSSEVSRGVDVHTELHPVGVVAGITPFNFPVMVPLWMLANAVATGNTFILKPSEKDPSASLILADLVTRAGFPDGVFNVLQGDAEAVRALLTHPGVDAVSFVGSTPVARSIYETGTAAGKRVQALGGAKNHMVVLPDADIESAANAAISAGYGSAGERCMAISVVVAVGAVADPLVDAIAARIPDVVVGPASDESSQMGPLITAEHRDRVRSYVQGATDEGARVVVDGSAGRDEGYFVGCSLLDGVKPGMRVYDDEIFGPVLSVVRVDSYDEAIELINSNQYGNGVALFTQDGGAARRFTRQVDVGMIGINVPIPVPVAWHSFGGWKASIFGDAPIYGPEGIRFYTRPKVVTSRWPESTPTAVDLVFPANR

SEQ ID NO: 2152 - protein, 152 aa, Brassica napus
  misc_feature (100)..(100): Xaa can be any naturally occurring amino acid
MESSSPAAAKPARGAGGRKGGDRKKSVSKSAKAGLQFPVGRISRYLKKGRYAIRYGAGAPVYLAAVLEYLAAEVLELAGNAARDNKKNRINPRHLCLAIXRNDEELGKLLHGVTISSGGVLPNINPVLLPKRAAGSEKAEKPEKAAKSPKKA

SEQ ID NO: 2153 - protein, 228 aa, Triticum aestivum
  misc_feature (41)..(41): Xaa can be any naturally occurring amino acid
ASRAVGAVRPELTARPTDEGNRSQVEHREAHGQEGGATSGXLRGTPRRGPLSGATVSNPGWGTGSLSIRLASRGASVLASDISAAMVSEAQRQAQAAASSSPGFRMPRFEVRDLESLEGRYDVVVCLDVLIHYPREEAQKMIRHLASLAGKRLVISFAPKTLYFDVLKRVGELFPGPSKATRAYLHSEKHIEEALRAAGWRVKNKGFISTQFYFAKLYEAVPVAAGSS

SEQ ID NO: 2154 - protein, 1000 aa, Desulfovibrio vulgaris subsp. vulgaris str. Hildenborough
MAHPVAILSGKKRNMGLGIALFAVTACIMAWLSGSWYLTLQQYAPLSQDMRLAWSDLYRGQMEAERLLAGESGGRPGAQTAYFRQAAERIQDAVRILRTRSALFSLDTGLIQTKDDALAFVDAINEVSTATYARIRDASTPNTMRIISQRNDFDALHVNYEKLQRSFDKAFDSRAQRLMQSGIGLMSLWIVVVMFLGFQLHGLAERFRSAAEQLRESEERWNFALEGAGDGVWDWNLAKGTLFLSRKWKEMLGFNDDELVNDFETWRSLAHPEDIDTALATINRCLSGGTDQYEHVYRMLRKDGTACWILDRGRVVARDAEGNPVRFIGTHTDITAQKLSEESARASGENLAVTLSSIGDAVIATDRDGRVTLMNPVAEKLTGWTQSSAIGKPVSAVFVIISATTKQSLPSPVEEVLRTGRTVSLSNDTTLVSRSGREFQIADSAAPIHDASGEMSGVVMVFTDVTQQYRFKRKLAESEHRFRTALDEAPFPVLLHDARGDVLMLNRQWSLLTGYEPSQVPTIHRWKDLSDPEIDPESRFSGQARSTDGEQNIRCSDGTLRTWNVSMIELGAMPDGRHITMLAAVDVTVQSETMRALQRSKKAAESANAAKTEFLANMSHEIRTPLNGIMGMMQLLVSTPLDDEQKQYVSNAISSSGRLSQLLSDVLDLSRIEAGGLVLRDECVTPSELLDAIKDLFTLGTRSSQVELALEISPGLPQHILLDGGRLRQILFNLVGNALKFTEKGHIHVRLDELAIHGGMRQLLLISVEDTGIGIPQGAMRDIFNPFYQVDGSHVRRQGGVGLGLSIVRRLVIAMGGALCIDSAEGEGTRIHLSLPFRTCAPDSGDKPETSGETPEAGLPMALGDPAALHGLNLLLVEDDPVNQLATAGLLRKSGARVTIAANGQEGLAAALSDSFDCIIMDVQMPIMDGIEATQRLRSDGRYTARAATPVVAMTAHALEGDREMCLASGMDTYVTKPATLESLAQAIASSIRLRTRRGP

SEQ ID NO: 2155 - protein, 300 aa, Geobacillus kaustophilus HTA426
MSVFVNKDTKVIVQGITGSQGLFHTKQMIEYGTNIVGGVTPGKGGTEVEGVPVFDTVSEAVERTGANASVIYVPPAFAADAIMEAVDAGLDLVVCITEGIPVLDMVKVKRYMEGKKTRLIGPNCPGVITPEECKIGIMPGYIHKKGHVGIVSRSGTLTYEAVHQLTQAGIGQSTAVGIGGDPVNGTNFIDVLKAFNEDEETYAVIMIGEIGGTAEEEAAEWVKANMTKPVVGFIGGQTAPPGKRMGHAGAIISGGKGTAAEKIKKMTECGIKVAETPAVIGETLISVLKERGLYEKCKTH

SEQ ID NO: 2156 - protein, 335 aa, Thermoanaerobacter tengcongensis MB4
MGVRVGINGFGRIGRNVFRAALKKNADLEFVAVNDLTDAKTLAHLLKYDSVLGKFEGEVSYTDDSLIVNGKEIKIFKETDPGKLPWGDLGVDIVIESTGRFTNKEDAIKHIHGGAKKVIITAPAKNEDVTIVMGVNEHMYDPANHHVISNASCTTNCLAPIAKVLNDKFRIKKGMMTTVHSYTNDQRILDLPHSDLRRARAAAVSIIPTTTGAAKAIHLVIPELKGKMNGFAMRVPTPNVSVVDLVAEVEIPTTVEEVNAAMKEASETYMKGILGYSEDPLVSVDYKGDDRSSIVDAPLTMVVEGTLVKVVSWYDNEWGYSNRVVDLALYIAERM

SEQ ID NO: 2157 - protein, 236 aa, Rhodospirillum rubrum ATCC 11170
MPTMSYHTRRGQLETYFDRTAADAWKRLTSDAPVGKIRATVRAGRDSMRETLLSWLPDDLSGTRLLDAGCGTGSFAVEAARRGASVVAIDISPTLIDLARERAAEVTGPGRIEFRVGDMLDPALGEFDHVVAMDSLIHYQAADTVQVLERLAARTSKTMVFTFAPRTPMLSVMHAVGKLFPRGDRAPAIQPLGEKSFRWKIVGEAGLADWSLGRTQRVKCGFYISQALELVRACAD

SEQ ID NO: 2158 - protein, 378 aa, Arabidopsis thaliana
MSTMSDLFPDLVEEILSRVPITSLKAVKLTCKQWNDLSKDSSFTKNHYGKEAKEIQVIMICDLKACLMSVNLHNHKDLADPSIKQIGKLNQVEIDSVFHCDGLLLLLLCNPKDNSKLMVWNPYLGQTRWIQPRNNSHKHRPAGRFNHRPAGRFYMGYDSNNNHKILWFSSMYREYEIYDFKSDAWTVIDVNTDQDHIIDNQRVSLKGNVYFIAHDILKEEAFLLSFDFTCERFGPSLPLPFHCCHEDTVLLSTVREEQLAVLFQKSDAYEMGIWITTKIELNIVLWSKFLKVDMTLPNSYWFEDLSFFLVDEKKKVAMVSELDIETCKNYKTYILGENGYYREVDLRKSKGCVYLCVLMFQVWCKSSKVPVLARCERK

SEQ ID NO: 2159 - protein, 828 aa, Escherichia coli K12; identical to SEQ ID NO: 709

SEQ ID NO: 2160 - protein, 1016 aa, Musa acuminata
MLTSEMMGVAALRVIASKLEKKWDFSVDPCSQTNGWVVPGRSDMPVFTDNVTCDCNRTSNICHVTSIKLKGQNLTGTLPPEFSKLPFLTDIDLTWNYLNGTIPAAWASLPLVHLSLLGNQVSGPIPEEFAKMITLEELVLEGNQLQGPIPAALGKLANLKRLLANGNYLSGELPESLGNLKNLIMFLIDGNQISGKIPNFIGNWTQLQRLDMQGTAMEGPFPPSFSALKSLKELRVSDLKGGIGSFPQLQNMRNMTKLVLRNLSISGELPDYIGEMKALNSLDVSFNNLSGPIPGSYAALTSSLNFMYLSNNNLNGKIPDWILNSAQKFDISYNSFTGSPAPAICQRGRCWCNLTAPFYRTLSCLRRNLPCSGESRNYNLFINCGGPKMRIDDIEYEGDILDLGTSEFYDPESGKWAYSSTGDFVDNQNPKFITANTTALDITKPELYMTARLSPLSLKYYGLCLYKGNYTVNLHFAEIMFTDDETYSSNGRRLFDVSIQGQKVLKDFNIAKEANGTGKEIIKSFTIMVDGTLEIHFYWAGKGTNSVPLRGVYGPLISAISVTPNFKIDTGENKLTIGTILAIVAAACIIVLLILCLIFLYIRRKNSKNNDVQQASYLVDCLKKLTPKPVVELYSMVNSICLLYPYVLMVMIYSPQSSSKLRGLELQTGQFSLRHIKAATKNFHPANKIGEGGFGPVYKGVLPDGSEIAVKQLSSKSKQGNREFVNEIGVISALQHPNLVKLYGCCIEGNQLLLIYEYMENNSLARGLHGPEGYQLRLDWQTRWKICLGIARGLAYLHEESRLKIVHRDIKATNILLDKDLNAKISDFGLAKLNEEENTHISTRIAGTLGYMAPEYAMRGYLTDKADVYSFGVVTLEIVSGMSNTKYRPEEDCVYLLDWAYVCHEKGNLLELVDPALGSSFSTEEALQMLKLALLCTNISPTLRPNMSAVVSMLEGKTPIELLSVQSSITKGDDLRFKAFEKLSRDSQTEINSTDWPWPDSSVSAQSTKGDTSLLH

SEQ ID NO: 2161 - protein, 413 aa, Triticum aestivum
  misc_feature (231)..(231): Xaa can be any naturally occurring amino acid
  misc_feature (268)..(268): Xaa can be any naturally occurring amino acid
AYLGDTTEQVCTKKQAGTGPEFPGYRRPTRPLPTCWAVLLRLLLAPLAVWIFLAYKYWKTRIIIDAVEKFLRIQQMIGPTRYAYTDIVVITSHFRDKLGQGGYGTVYKGVLLPGGVHVAVKMLEGNSNCNGEDFISEVSTIGRIHHVNVVRLVGFCSEEMRTALVYEYMPHGSLDQYIFSAEKSFSWDKLNEIALGIARGINYLHQGCDMQILHFDIKPHNILLDSNFVPXVADFGLAKLYPRGDSFVPLSAMRGTVGYIAPEMISRXSFGVISSKSDVYSFGMLLLEMAGGRRNADPNMGSSSQAYYPSWVYDRLTREEAGEISVVAADMHELEKKLCIVGLWCIQMRSRDRPTMSEVIEILEAGADGLQMPSRPFFCDEGHIHVEDSYQFASELSAVSEEELSVVSEEDDV

SEQ ID NO: 2162 - protein, 604 aa, Francisella tularensis subsp. tularensis SCHU S4
MERREKRIRKLRNKSGKVFAIETNLTGRQLLNNRVLNKDVAFSQEERVAFDLIGYLPEKVESLEEQAIRVRRQLDLKPNSLEKYVFLNRLHDLNTTLFYHFVRENLEEIMPIIYTPTVGEAVQKYSSSFRKQSGLFISISHKKHIARILERYEYNSIDLVLVTDGEAVLGIGDQGIGGMNISIGKIMVYVAASGIDPARVLPVQLDMGTNNDALLNAPGYLGVRLPRVSGETYDEFIEEFVTQVKARFPNVFLHWEDLGRDNATRILEKYKDKLCTFNDDIEGTGIVATANCIAGVKTASTIRINAGEITVEEALSGICDIKVVIFGAGSAGCGIARQLADVIADRAGVSIEKARSSIYLVDRYGLVCDRLRAKRITPEQKLFVKTREEIDKWKVEDFNYITLEETVKNTKCDILIGTSGQPGSFTKEIIKTMAKNNNYPIIMPLSNPTSLCEALPEDIIKWTNGKALIAAGSPFPDVTYNGRDYRISQGNNAFIFPGLGLGSVAVHARVLTKGMIRAASYRLSELSPMVINEDITQPLLARITDLVDVTKEITKAVAKQAILEGVHGVDIDLEDLTETELDEEIERLINLSSWTPTYAPYMPI

SEQ ID NO: 2163 - protein, 471 aa, Candidatus Protochlamydia amoebophila UWE25
MTNPSIVWFRQDFRLEDNPALNAATQKGGPVIPVFNWVFNPEKEWQLGGASQWWLYYSLISLKNDLSELGLSLIIRKEDPLKSLLEIAHETGADTVYWNRRYEPMLIQDDAKIKTELQKQGIKAHSFNGNLLFEPWTIANKQGKPFQVFTPFWNQCLKLNDPEVPLPVPHSLKKFVGQLQTESIDSLNLLPKIKWDKGLKEVWSPGAKSAKALLKKGLTGVIDQYLDIRDLPDHDGTSLLSPYLHFGEISPRMIWQAVKENSTSKGAEGYLRQIGWREFAHHLLYHFPETPQKPLRSQFNSFSWKNDKQNLKAWQKGQTGYPIIDAGMRQLWKIGWMHNRVRLIVGSFLVKDLMIHWIEGAKWFWDTLVDADLANNTMGWQWIAGCGADAAPYFRIFNPITQGEKFDPEGNYVKKWVPELINLPKEWLHQPWEAPEEILRQSGIELGINYPKPIVNHAKAREEALQAYSRL

SEQ ID NO: 2164 - protein, 193 aa, Zea mays
MAAAPAGAQNRCVFVGNIPYDATEEQLVQICEEVGPVVSFRLVIDKETGKPKGYGFCEYKDEETALSARRNLQGYEINGRQLRVDFAESGRNTDRNREKVDNPQNYCIRAFPTTLEFSVNMRSCIVFVPVNNNSCAFSDHPVSPVSISYKGVCVCTPVWLYIHTPAVRFNSFIELYIKKKLGRGGKDRPPGFI

SEQ ID NO: 2165 - protein, 172 aa, Triticum aestivum
MATVMAMSSFACAAVLPRGSDSRFGARSLPAPGRRALVVRAQTEGPSAPPPNKPKASTSIWDALAFSGPAPERINGRLAMVGFVTALAVEAGRGDGLLSQLGSGTGQAWFAYTVAVLSVASLVPLLQGESAEGRAGAIMNANAELWNGRFAMLGLVALAATEIITGTPFINV

SEQ ID NO: 2166 - protein, 310 aa, Carica papaya
MENFPVINMEGLTGEERAATMKKSEFACENWGFFELVNHGIPIELLDTVERLKKGHYRKCMEQRFKEIMASKGLDGIQPEVTDMDWKSTFFIRHLPEPNIAEIPDLDDEYRKVMKEFALKLEKIAEELLDLLCENLGLEKGYLKKAFYGSRGPTFGTKVSNYPPCPKPNLIKGLRAHTDAGGIILLFQDDKVSGLQLLKDGKWVDVPPMRHSIVVNLGDQLEVITNGKYKSVEHRVVAQTDGTRMSIASFYNPGSDAVIYPAPILVEKETEEKKTAYPKFVFEDYMKLYAGLKFQAKEPRLNAMKAAAKA

SEQ ID NO: 2167 - protein, 509 aa, Vitis vinifera
MNPLALIFCTALFCILLYHFLTRRSVRLPPGPKPWPIVGNLPHLGPVPHHSIAALAKTYGPLMHLRMGFVDVVVAASASVAAQFLKTHDANFSNRPPNSGAKHIAYNYQDLVFAPYGPRWRMLRKICSVHLFSGQALDDFRHIRQEEVLALMRALAREGQTPVKLGQLLNVCTTNALGRVMLGRRVFGDGSGGEDPKADEFKEMVVELMVLAGVFNIGDFVPALEWLDLQGVASKMKKLHARFDAFLGAIVEEHKISGSAGSERHVDLLSTLISLKDNADGEGGKLTDVEIKALLLNLFTAGTDTSSSTVEWAIAELIRHPEMMAQAQQELDAVVGRGRLVTDLDLPKLTYLQAIVKETFRLHPSTPLSLPRMAAESCEINGYHIPKNATLLVNVWAIARDPEVWEEPLEFRPNRFLPGGERPNADVRGNDFEVIPFGAGRRICAGMSLGLRMVHLLTATLVHAFNWELPEGQVAEKLNMDEAYGLTLQRAAPLMVHPRPRLSPQVFGK

SEQ ID NO: 2168 - protein, 467 aa, Synechococcus sp. RS9917
MAAETGLTPGTTAPDTENLVIIGSGPAGYTAAIYAARANLSPLLITGFQRGGIPGGQLMTTTHVENFPGFPDGVLGPDLMDLMKAQAERWGTRLLEADADAIDLSRRPFRIEADGCSIQAQAVILATGASANRLGLPQEERFWSKGISACAICDGATPQFRNEELAVVGGGDSACEEAVYLTKYGSHVHLLVRSGQLRASAAMADRVQANPQISVHWHTEVADAEGDDWLASLRLRNRQSGEERQLPVRGLFYAIGHTPNTELVQGQLSCDAKGYLVTQPGRPETSLEGVYAAGDVADAEWRQGITAAGSGCQAALAAERWLSHHNLASLVSRDSVEPAQAATPQTSETTTEASYDPDALWQKGSYALRKLYHDSSKPLLVVYTSPSCGPCHVLKPQLKRVLDELGGRAQGLEIDIEADQEIAQQAGVNGTPTVQLFFGKELKQQWRGVKQRSEFRSAIEALLGAPV

SEQ ID NO: 2169 - protein, 546 aa, Dechloromonas aromatica RCB
MSQIIEVTVPDIGDFDSVPVIDLFVKVGDTIKVDDAIVTLESDKATMDVPSTVAGVVKEVLVSLGSKVGEGALLIKVETGGAAAEPAAAPAPAAQAAAPAPAPAAAPVAAAPAAGGGVVEVKVPDIGDFAEVPVIELYVKVGDAIKVDDAIATLESDKATMDVPSTVAGTVKEVLVQIGSKVGEGTVLIKVESGASAPAAAPQAAAPAPAAAAPAPVAAPVAAPAAASPAALAPALAAGSKVHASPSVRAYARELGVDLNKVPATGPKNRIVKEDLTKYVKGVMSGAVAGPTAGGGASLGGGLDLLPWPKVDFAKFGEIEVKPLSRIKKISGQNLSRNWVMIPAVTYHEDADITDIEAFRVLLNKENEKGGGAKLTMLAFLMKACVKGLQKFPEFNSSLDGDNLVLKKYFNIGFAADTPNGLVVPVVKNVDKKSVFELAQESGDLAKQARDGKLKPADMSGACFTISSLGGIGGTYFAPIVNAPEVAILGVNKSAMKPVWDGKQFVPRLVLPLSLTADHRVIDGALATRFNVYIAQLLADFRRVAL

SEQ ID NO: 2170 - protein, 403 aa, Francisella tularensis subsp. tularensis SCHU S4
MFEQIKNNVENAIEALKQGKPVVVLDDYDRENEGDLILPGQKATEENIAFMLEHTSGIICLAMDSKKARELNLTPMVAADQNNSTFTTPFTVTIEAKEGVTTGVSAKDRAHTIQVASKADSKAEELARPGHIFPLIANDKGVLGRNGHTEATVDLMKLSGFNSAGVLCELMNKDGTMMKAAELEAFAKKHDLPLLTIAELYQYRLATENFVTKMASSTIPFKKIGELEMSVYKDNFSGDEVVVLSKPYSGNNPLVRMHSSCITGDIFGSLRCDCQDQLHKGIEMISEEGGFFIYLDQEGRGIGLTNKLKAYNLQMNENMDTLEANLALGLPADARKYDLAIQVLKYNNVNRCRLISNNPEKLAALRNVDIETQPVYCEAFVNSHNRNYLITKKIKAKHTIKGI

SEQ ID NO: 2171 - protein, 683 aa, Chlamydomonas reinhardtii
MKALRSGTAVARGQAGCVSPAPRPVPMSSQTMIPSTSSPATRAPARSGRRALAVSAKLADGSRRMQSEEVRRAKEVAQAALAKDSPADWVDRYGSEPRKGADILVQALEREGVDSVFAYPGGASMEIHQALTRSDRITNVLCRHEQGEIFAAEGYAKAAGRVGVCIATSGPGATNLVTGLADAMMDSIPLVAITGQVPRRMIGTDAFQETPIVEVTRAITKHNYLVLDIKDLPRVIKEAFYLARTGRPGPVLVDVPTDIQQQLAVPDWEAPMSITGYISRLPPPVEESQVLPVVRALQGAAKPVIYYGGGCLDAQAELREFAARTGIPLASTFMGLGVVPSTDPNHLQMLGMHGTVFANYAVDQADLLVALGVRFDDRVTGKLDAFAARARIVHIDIDAAEISKNKTAHVPVCGDVKQALSHLNRLLAAEPLPADKWAGWRAELAAKRAEFPMRYPQRDDAIVPQHAIQVLGEETQGEAIITTGVGQHQMWAAQWYPYKETRRWISSGGLGSMGFGLPAALGAAVAFDGKNGRPKKTVVDIDGDGSFLMNVQELATIFIEKLDVKVMLLNNQHLGMVVQWEDRFYKANRAHTYLGKRESEWHATQDEEDIYPNFVNMAQAFGVPSRRVIVKEQLRGAIRTMLDTPGPYLLEVMVPHIEHVLPMIPGGASFKDIITEGDGTVKY

SEQ ID NO: 2172 - protein, 167 aa, Glycine max
MDTIRSTTTISVQQRTPTKKTKPKKKNTPHPVKVVYISNPMKIKTSASEFRALVQELTGQDAESPPDPTRFHGLIHPDSSSSVDHIKEEEDNVHSVNCVVPPAVADENMSLAGCYEEEQQQQPSSMESINNFEPLDDDDVFTPQMIENISALLPASVFYESPHLNHW

SEQ ID NO: 2173 - protein, 337 aa, Nostoc punctiforme PCC 73102
MAATDFKDYYAILGVSKTATQDEIKQAFRKLARKYHPDVNPNNKQAEARFKEVSEAYEVVSDVDKRKKYDQFGQYWKQAGEGFPGGGVGADMGGFDFSQYGNFDEFINELLGRFGGAAPRGGGGRQSYSQSYSYRPPTGAPSGFGGFNDYGFQDPGAGTSQDSEAIITLTFAEAFNGVQKRFSLGNETIDVRIPSGAKPGTRLRVRGKGQINPMTQQRGDLYLKVELQPHSFFQMEGDNLVCEVAITPDEATLGASIDVPTPDGSVNVKLPAGVRSGQSLRLRGKGWPLAKGGRGDQLVKVAIAPPKDLSQQEREYYEKIRAIRTYNPRSHLQQVKL

SEQ ID NO: 2174 - protein, 432 aa, Desulfitobacterium hafniense Y51
MAADKYEVIIIGGGPAGLAAAYKLAEAGIETVVVERGEYSGSKNLSGGILYSRVLEQLIPNYWEEAPVERCITNYLTTLMTQDDYFNLEYKGKALGNLPYNAVSVLRAKFDRWLAEKAEEAGAMIVTGIKVEKVIKEGTRIVGIRTGDEEMLADVVIAADGINSFIAQEAGLRGAIEPKHLAVGAKALIELPREVIEERFRLSGNEGAAYAILGEATYGVAGGAFLYTNLESLSIGVVMRLDDLVKEKVKPGDALDDLLEHPMVAPLVKGGKMVEYGAHLTGEGGLHMVPPQLYADGMLIIGDAAGFTINSGLVIRGMDLAIGSGMAAAAAVLEAKSKGDFSAGSLSAYQRNLDQSFVMKDLQLYVKAPDFMESDLLFKKYSHMVNNLFGKVYTHDLTPKEHLLKMAFKAIKESEIPLIGLAKDGLKGVRAL

SEQ ID NO: 2175 - protein, 419 aa, Bacillus cereus E33L
MIEIKVPELAESITEGTISQWLINVGDKVEKGGSVVELETDKVNVEIIAEDSGIVSKLLGEPGDTVEVGATIAILDANGAPVAVSTPAPAAEQPKQETAEAPKAAAPSAEQTATLQGLPNTNRPIASPAARKMARELGIDLNDVRSTDPLGRVRPHDVQAHAAAPKEAPAAPKSPAPAPVAKTEFEKPVERVKMSRRRQTIAKRLVEVQQTSAMLTTFNEVDMTAIMELRKERKDAFEKKHDVRLGFMSFFTKAVVAALKQFPLLNAEIQGDELIIKKFYDIGIAVAAPDGLVVPVVRDANQLNFAEIESEIRELGKKARDNKLSLKELQGGTFTITNGGVFGSLMSTPILNSPQVGILGMHKIQVRPVAIDAERMENRPMMYIALSYDHRIVDGKEAVSFLVAVKDMLEDPKSLLLEG

SEQ ID NO: 2176 - protein, 248 aa, Zea mays
  misc_feature (27)..(27): Xaa can be any naturally occurring amino acid
LHPLRCARFPRAVRNLTWPCRRWWSTXVVFPPVARPPGSAGSHFLGGAGVRGVEIGGNFIKFTAIGVYLEDAAVPALAKKWGGKTADELASDAAFFRDVVTGDFEKFTRVTMILPLTGEQYAEKVTENCVAFWKAAGLYTDAEGVAVEKFREVFKPETFAPGASILFTHSPAGVLTVAFSKDSSVPAAGGVAIENKRLCEAVLESIIGERGVSPAAKLSLAARVSELLAKETAAAADAPQAEPVSITA

SEQ ID NO: 2177 - protein, 284 aa, Dechloromonas aromatica RCB
MTAQIIDGKALAEELRQGFKARVEALTAKGHKPGLVVILVGADPASEVYVRNKVNGCLAIGMHSEKITYDATIDQATVLNKIAELNADPNIHGILVQLPLPKHFDEEAVLEAISAEKDVDGFHAENVGALAQGNPRFIPCTPYGVMKMFEKGNVDLTGKEAVVIGRSNIVGKPMALLLINAGATVTVCNSRTKDLKFHTSRADILVAAVGKPKFVTGDMVKPGAVVIDVGINRLPDGKLCGDVDFASCLEVAGQITPVPGGVGPMTITMLLANTIEAAERKAGL

SEQ ID NO: 2178 - protein, 335 aa, Clostridium tetani E88
MVKVAINGFGRIGRNVFKVLIEKYSSELEIVGINDLTDAKTLAHLLKYDSLYGKFNGTVEAKENAIAINGKEIKIFAERDPKNLPWKEEGVDIVLECTGLFTDATKAKAHIEAGAKKVIISAPAKNEDVTIVLGVNEEKYNSEEHNIISNASCTTNCLAPFAKVLDQEFGIVEGLMTTIHSYTNDQKILDAPHKDLRRARAAAESMIPTTTGAAKAVALVLPQLKGKLNGMAVRVPTPTVSMTDLVCTISKEATAEEINAAFKKASETDMKGILGYSEEPLVSVDYRGDARSSIVDGLSTMVMGNRLVKVVSWYDNEWGYSTRLADLAKYVADRL

SEQ ID NO: 2179 - protein, 477 aa, Burkholderia xenovorans LB400
MSQYRSFINGEWLGTTSTLPNLNPSDLSDVVGEALLADDALVADAIAAARHAFRSWSLTTPQQRADILDAAGTRILQRKEELGTLLAREEGKRLPEAIGEVGRAGNIFKFFAGEALRIGGEVVSSVRPGMTVEVTREPLGVIGMITPWNFPIAIPAWKIAPALAYGNTVVIKPAEAVPACATELVKILEESGLPAGVVNLLLGPGRVVGEALVASPDIDAISFTGSESTGRAIAVKCVTSGKKVQLEMGGKNPLVVIDDADLDVAVEAALDGSFFSTGQRCTASSRLIVTSAIHGQFVAALQRKASELVVGHALDKATQIGPVLDDRQLQQNLKYLKIAAEEGGQVLGGERVERPTRGYFMRPALVIGTDNTMRINREEVFGPVASVIKVADYEEALAVSNDTPYGLAAGICTTSLKYASHFRRHAEAGMVMVNAPTAGVDYHVPFGGRKRSSYGPREQGTYAREFYTVVKTAYVKA

SEQ ID NO: 2180 - protein, 336 aa, Mycobacterium leprae
MKLAIIGGDGIGPEVVAQAVKILDVVLPGVQKTTYDLGARRYHTTGELLPESVLAELREHDAILLGAVGDPSVPSGVLERGLLLRLRFELDHHINLRPARLYPGVNSLLAGKPDIDFVVVREGTEGPYTGTGGAIRVGTPNEVATEVSVNTAFGVRRVVQDAFERARQRRKHLTLVHKNNVLTYAGTLWCRIVQEVGEKYPDVEVVYQHIDAATIYLVTEPSRFDVIVTDNLFGDIITDLAAAVCGGIALAASGNIDATRTNPSMFEPVHGSAPDIAGQGIADPTAAIMSLALLLAHLGEDEPAARLDQAVASYLATRGNGRFSTGEVGERIAAAL

SEQ ID NO: 2181 - protein, 225 aa, Lactobacillus plantarum WCFS1
MTELVLVRHGESTANRDNTYTGWSDVPLTAVGIAQAHQAGKRLRATGLQFGAVHTSVLKRAIVTANIMLSEIDQLWLPEYKTWRLNERHYGALRGQNKDVTRQEYGKAQVQQWRRSFYTVPPLLTPAELDHDRRYTKYGAAVEPRGESLKMAYDRIMPYWIDEIAPRLLDGQNQLVVAHGSTLRAMIKYLEHISDTGIDGVEVANGVPICYHLDRQLHVIGKEEY

SEQ ID NO: 2182 - protein, 128 aa, Chlamydomonas sp. HS-5
MALPARVRKSLKPVASGGGKVDITKAGLEGIDDPTVQQNLKGRSRYMKDKNWVDPQGRKGKGYGVYRFEDKYGANVDGYSPIYTADQWTESGASYKLGTKGLIAWAGLVLVLLGVGVNLVISTSQLGN

SEQ ID NO: 2183 - protein, 488 aa, Oryza sativa (japonica cultivar-group); identical to SEQ ID NO: 531

SEQ ID NO: 2184 - protein, 115 aa, Triticum aestivum
MARVALVAVFAVLAALAVAEMASGAVTCGDVTSAVAPCMSYARGQASAPSGACCSGVRTLNAKASTPADRKAACNCLKNLAGSGISMGNAANIPGKCGVSVSFPINTKTNCNNLH

SEQ ID NO: 2185 - protein, 514 aa, Oryza sativa (japonica cultivar-group)
MLLSLCLRLLPLLLVLVAASHGDASGDTYDTSMCLQKPTTCGNVSISYPFYFATKTKDINGSSNSYCGYPGLAIDCDDGKPILQLNGTEKYKVNYINYGSITNVSLADLEVVDDSSGCPRVDHNVTIPQISWLFFSGISVDYLVFFLRCSFTTFAPKPANFNPIACGSFINLTRPSFVFPDELVPPGNWSQLCEETFEVPVLKYQLMEMDSNGNAWNNSGYAQVLRQGFQLSVNESRRPPNCSQCEESQGRCGYSQAGEFIGCLCPNGRVRSLRGNLSDGRQVAVKMLKDSKGDGEEFINEVASISRTSHVNVVTLLGFCLHGSKRVLIYEYMPNGSLERYAFRNNSEGEHSLTWEKLFDVVVGIARGLEYLHRGCNTRIVHFDIKPHNILLDQEFCPKISDFGMAKLCSNKESIISIAGARGTIGYIAPEVYSKQFGAISSKSDVYSYGMMILEMVGARERNIDANSESSSHYFPQWIYEHLDEYCINSSEIDVLYNCKYYLAVTKCKTRFGI

SEQ ID NO: 2186 - protein, 476 aa, Escherichia coli
MKQRLSLAQSALEKLSARRGNTWYPIFHLAPPAGWMNDPNGLIYFNGRYHAFFQHHPASAYQGPMHWGHATSTDMLHWQHELVALAPGDKYDRDGCFSGSAVDDDGVLSLIYTGHICLEDRGNDSIIREVQCLATSHDGIRFEKQGCVLTPPEGIMHFRDPKVWHEDGSWWMVIGARDASDNGQVLLYRGTSLRDWHLEHVLAHSAAGESYMWECPDFFRCGNFHWLMFSPQGMNPSGYRFRNLFQSGVLAGNWKPGSVFALKGVFEELDYGHDFYAPQSMLAEDGRRIIMAWMNMWDSPVPTRSEAWAGCLTLPREVFERDGRLCQRPVREVESLRRKCQPLSPVRLHGVQLLTENVQAAELLVTWHTVDSHAEHYGIRLGEGLRFYVDNQAGRLILWRYYPEEGLDGYRSVELPDTEYLTLRIFLDRSSVEVFVNDGEATLSSRIYPQADSRQLSLYAAHGDAILTDGTLWMLT

SEQ ID NO: 2187 - protein, 413 aa, Rhodospirillum rubrum ATCC 11170
MDAVVATQTPAEVFDVVVVGGGPAGATAATDLARAGRRVALLDPEGRPKPCGGAIPPRLMSEFAIPDDLPCAQVSGARALAPSGRVVDMPITGAVVSMVDRAVFDPWLRARAHQAGACRLHGRFEGFDRQEDGALVVLWRPEGAAVANRIVARYVVGADGARSKVAALAVAGAAPPCVAAYHEIIRAPAAPAASAPTPATAAGPAYDPARCDVIYRGDISPDFYGWIFPHGETLSIGSGTAVKGFSLREAVALLRREAGLDGLEVVRREGAPIPLRPRKRWDNGRDVVLIGDAAGVVAPASGEGIYYAMASGKMAAEALGEALAGAGPAALAQVRRRFLKAHGKTFWSLGLLQRFWYRSDRWRESFVAICADRDVQRLVWQSYLTKDLARGNMGAYMRIFFKDVAHLIGIAKS

SEQ ID NO: 2188 - protein, 473 aa, Schizosaccharomyces pombe
MSSSPTESEILPKESHNSIDEQSQQPANTDTLVKDNSFNEQDDQEVDNDYKSNDEPVQSQDPISPNMASNESGNSENTSNYGSSRDENVYQKTTLWMGELEPWVTEAFIQQVWNTLGKAVKVKLIRNRYTGMNAGYCFVEFASPHEASSAMSMNNKPIPGTNHLFKLNWASGGGLREKSISKASEYSIFVGDLSPNVNEFDVYSLFASRYNSCKSAKIMTDPQTNVSRGYGFVRFTDENDQKSALAEMQGQICGDRPIRVGLATPKSKAHVFSPVNVVPVSMPPVGFYSAAQPVPQFADTANSTVFVGGLSKFVSEEELKYLFQNFGEIVYVKIPPGKGCGFVQFVNRQSAEIAINQLQGYPLGNSRIRLSWGRNQNPIAAPALNYQSQVSQTTIPATSLFPAMSLPPQAQFSPYPAVAPSPLALQTRGAPIGMEISIGSPALVPDQMHIPENGNSDTMPVPNTQGKHLSAEE

SEQ ID NO: 2189 - protein, 453 aa, Bacillus halodurans C-125
MPTNTMPTGPKGNPVLGNTIEFGKDPLQFITRCSQEYGEIVRLRFERERDTFLLNDPKHIQYVFMNKGGEFSKGYQQDPIMGLVFGNGLLTSEGSFWLRQRRLSQPAFHPKRIADYADTMVGYCERMLNTWMDNDTRDINDEMMQLTMAIATKTLFDLDLHKGDTQEASRSLDTVMTAFNEQMTNVFRHVLHLIGLGKLVPPVSRELREAVESLDKMIYSIIEERRKHPGDRGDLLSMLISTYDEDDGSYMTDRQLRDEIITLFLAGHETTANTLSWAFYLLSQHPHVEEKLYQEVSQVLGNRPATLEDMPKLSYAEHVIKETLRVQPTVWLISRRAEKDVTLGDYHISAGSEIMISQWGMHRNPRYFNDPLTFLPERWDNNDNKPSKYVYFPFGGGPRVCIGERFALMEATLIMATIVREFRMELVDELPIKMEPSITLRPKHGVTMKLRKR

SEQ ID NO: 2190 - protein, 607 aa, Streptomyces avermitilis MA-4680
MPVSVTLPALGESVTEGTVTRWLKAEGERVEADEPLLEVSTDKVDTEIPSPAAGVLASIKVAEDETVEVGAELAVIDDGTGAPAAAPAPAAEQAAEQVAPPAPEPAPQATPSTEQAAPAPAPTAEAAAGAGSAEGTDVVLPALGESVTEGTVTRWLKEVGEEVSEDEPLLEVSTDKVDTEIPAPASGTLLLEIVVGEDETAEVGAKLAVIGAPGAAPAAAPAQAAPAPAAAPAAPAPAPAAPAPAAPAPAPAAPAPAQAAPAAPAAPAQAAPAPAAPQAPAAPAPAPVTPAAAPAATSGDDGAYVTPLVRKLAAENGVDLATVKGTGVGGRIRKQDVTAAAEAAKAAAPAPAAAPAAAKKAPALEVSPLRGQTVKMPRIRKVIGDNMVKALHEQAQLSSVVEVDITRLMKLRAQAKDSFAAREGVKLSPMPFFVKAAAQALKAHPAVNARINVDEGTITYFDTENIGIAVDSEKGLMTPVIKHAGDLNIAGIAKATADLAGKVRANKITPDELSGATFTISNTGSRGALFDTIIVPPNQVAILGIGATVKRPAVIETEEGTVIGVRDMTYLTLSYDHRLVDGADAARYLTAVKAILEAGEFEVELGL

SEQ ID NO: 2191 - protein, 191 aa, Arabidopsis thaliana
MSDEEHHFESSDAGASKTYPQQAGTIRKNGYIVIKNRPCKVSFSNISPLSSSDLIRSVHYLDSSDSFFCHLHDVVEVSTSKTGKHGHAKCHFVAIDIFTSKKLEDIVPSSHNCDVPHVNRTDYQLIDISEDGYVSLLTDNGSTKDDLKLPNDDTLLQQIKSGFDDGKDLVVSVMSAMGEEQINALKDIGPK

SEQ ID NO: 2192 - protein, 616 aa, Magnetococcus sp. MC-1
MAAADYYGYSCDTLRQMNIAQINILTRDEIEQEMLRAEQENRNHFQFRHRLSSGEVRDVEIHSGPVEIQGRALLYSIVHDITERRRIEAALSHNRHQLEASHGRLITILDSLQSIVYVADPQTGEILYHNRYLFDIAGNLKGEREELLYPNKKRLSQGTPASRSRGRNHAQSWEYCSPINHRWYSAHSQPITWVDGRTVRLEVATDINSLKQSEQALLQAKELAESANRAKSDFLATMSHDIRTPMNAVLGMVELLGESSLDPEQSHYLKIIRRAGSTLLSLINDILDLSKIEAGQLKLELDDFTLAETVEHVMDILRHKASEKGLQLQTHLHIPPQQRVRGDAQRLRQILLNLLGNAVKFTQQGSVSLTLQQQPDGQYSFQVADTGPGIAPHRQKIIFEPFVQEESGTHRHFGGSGLGLSICHKLVTAMRGTLWLKSQLGHGSIFYFTLPLATAMEPAPDEVSPQSVLHAPVSLTQLVNKRLLVVDDAEDNRNLIQAFLKSCQMQIQMAEDGEQAVRLCQEQRFDLILMDIQMPIMNGLEATRLIRQHEQMQHKSRTPIIALSAHAMLDVNNDALAAGCDLHLSKPIAKKRLLEALCHQLCPVVPTHNDDAPPLP

SEQ ID NO: 2193 - protein, 318 aa, Carica papaya
MENFPVIDLSKLNGEERALTMELIHDACENWGFFELVNHGISHDLMDTVERLTKEHYMKCMEQRFKEMVESNGLEAVQSEINDMDWESTFFLRHLPASNMHEIPDLEDDYRKAMKEFAVGLQKLAEQMLDLLCENLGLEKGYLKKVFYGSKGPNFGTKVSNYPPCPKPDLIKGLRAHTDAGGIILLFQDDKVSGLQLLKDDQWVDVPPMKHSIVINLGDQLEVITNGKYKSVMHRVIAQTDGNRMSLASFYNPGDDAVIYPAPSLVEKEAEKNQIYPKFVFDDYMKLYVGLKFQAKEPRFEAMKAMESTVTPGAIATV

SEQ ID NO: 2194 - protein, 310 aa, Carica papaya
MENFPVINMEGLTGEERAATMKKSEFACENWGFFEVVNHGIPIELLDTVERLKKGHYRKCMEQRFKEIMASKGLDGIQPEVTDMDWKSTFFIRHLPEPNIAEIPDLDDEYRKVMKEFALKLEKIAEELLDLLCENLGLEKGYLKKAFYGSRGPTFGTKVSNYPPCPKPNLIKGLRAHTDAGGIILLFQDDKVSGLQLLKDGKWVDAPPMRHSIVVNLGDQLEVITNGKYKSVEHRVVAQTDGTRMSIASFYNPGSDAVIYPAPILVEKETEEKKTAYPKFVFEDYMKLYAGLKFQAKEPRFDAMKAAAKA

SEQ ID NO: 2195 - protein, 359 aa, Gloeobacter violaceus PCC 7421
MSPYRVTLIRGDGIGPEVTQAARIVLDATGIDFEWVVVDAGAEVMEKSGTPLPAPVIEAVRASDAAIKGPITTPAGSGIRSVNVALRRALDLYANLRPARTLPGVHSRYDNIDLVVVRENTEDLYSGIEFEKNSPQALEVIEMLMRLGGKKIFPRSGLAVKPISSEASERIARFAFEYARRHARRKVTAVHKANILKHTDGLFLEAARQVASEYPDVEFEDRIVDNLCMQLVQRPESYDVLVLPNLYGDIVSDLTAGLVGGLGVAPGANIGDRSAVFEAIHGSAPRYAGQNKVNPSALILSGALLLRHLGEQEAAVRVEQAVAAVIAEGRSVTYDLAPAGATPAGTRQMAEAIAQKVAG

SEQ ID NO: 2196 - protein, 420 aa, Thermus thermophilus HB27
MEVKLPELGDNVTQATVVGVLVKEGDRVEPGQPLLELETDKAVVEVPAEAGGVVKRVLVKVGDEVRPGQPFLELAEAEGGAEAPPLKAEERPEAPAPKAEEAPRPAPKEAPPAPQEAPSERRLIPAAPSIRRLARELGVDLTRLRGTGLAGRITEEDVRRAAGLGEAAPAALPAAPAPRLPDFTKWGPVRREPMSGVRKATVRSMSQAWAQVPMVTHFDEADVTELEALRKQYAKKAEEKGFRLTLTAFLLKALALTLKAFPKFNASLDVEAQEIVYKDYIHIGVAVDTPHGLLVPVIRDVDRKGVLRLAEELQEISQRARERKLSPEEMQGATFSLSNLGGIGGTGFTPIVNWPEVAILGVSRSQMKPLWDPGKEAFVPRLVMPFSLTYDHRLIDGADAARFCRHLAGILEDPLGLALA

SEQ ID NO: 2197 - protein, 412 aa, Rickettsia akari str. Hartford
MKENFNVSKLKNGLTILTYNMPYVNSVAINLIAKVGARYENAEEEGISHFLEHMAFKGTKTRTAKQIAEEFDSIGGHFNAYTGHENTVYYVRVLSENCDKAVNILADIIQNSIFADEEIAKEYQVIMQEIAHHQDNPDDLVYEKFYNKVYRDQPLGKLILGTTKTIAAFTQEHFLTFIGKHYNAENLYLSIAGNIDHDKIVIIAEQLFSSLKQGVKSSFIPAKYIGGNGFIHKELEQTSLVLGFEGTSYINLEKLYQTHLLSIIFGGGMSSRLFQTIREKLGLAYAVGSYNSAYFDSGVFTIYASTAHDKLELLYREIKNEIIKMTETVSAEEIIRAKTQLRSNLQMAQEKNAYKSEEIGKNYSVFGKYISPEEIMEIITNIKTDDIINTANKIFSGTTTSAIIGPNGLREV

SEQ ID NO: 2198 - protein, 251 aa, Magnaporthe grisea 70-15
MAPQAIIAPSILSADFGNLGEECSKTIGQGADWLHVDIMDGHFVPNITFGPPVVAKIRGHVDRPEAAHGKGTFDCHMMIAEPKKWVKEFKAAGCDLYCFHYEAAFSSAAEEPSATSDAKTSPRELIRYIHDQGLLAGIAIKPATPADVLYELLDSSDAAERPDMVLVMTVEPGFGGQKFMASELPKVQALRQRYPELNIEVDGGLGPGTIDQAADAGANVIVAGSAVFGAKDPAEVIKVLRESVQKRAGKI

SEQ ID NO: 2199 - protein, 444 aa, Bacillus cereus E33L
MNYVIIGGDAAGMSAAMQIVRNDENANVVTLEKGEIYSYAQCGLPYVISGAIASTEKLIARNVKTFRDKYGIDAKVRHEVTKVDTEKKIVYAEHTKTKDVFEFQYDRLLIATGVRPVMPEWEGRDLQGVHLLKTIPDAERILKTLETNKVEDVTIIGGGAIGLEMAETFVELGKKVRMIERNDHIGTIYDADMAEYIHKEADKHNIEILTNENVKAFKGNERVEAVETDKDTYKADLVLVSVGVKPNTDFLEGTNIRTNHKGAIEVNAYMQTNVQDVYAAGDCATHYHVIKEIHDHIPLGTTANKQGRLAGLNMLDKRRAFKGTLGTGIIKFMDLTLARTGLNEKEAKGLHIPYKTVKVDSTNMAGYYPNAKPLYLKLLYRSDTKQLLGGQVIGEEGVDKRIDVIAMALFNKMSIHDLEDVDLSYAPPYNSVWDPIQQAARRAE

SEQ ID NO: 2200 - protein, 618 aa, Chromobacterium violaceum ATCC 12472
MCGIAGFFSRRPVNPAVPQAMLDELHRRGPDDASRLLLDSELNPADGGAIHNAMLHARLAIVDPRPVANQPMASDDGQVWICYNGEVYDWEIGKAELEAGGAVFRTHSDTEFILRGYQAWGIEGLLERLRGMFAFAILDKRCEKVHLARDRMGEKPLLYSLQDGDFAYGSLVRAVLPFLPADKRAFSPAAIDAYLAHRYIPSPATVFSHINRLENGYRLEFDLNTRQLTKQRYWQPKAESGDWLPELDRAVAMRTVADRPLGVLLSGGIDSTVIASRLAIQQLTQFSSFTAAFPGSTLDESGDAADSARRMGLPNVRVDMPENLAADFERIVADLDQPFADPSSFPTWYLAREVTKHVKVVLVGDGGDELLAGYKRMGKHLRTRWRQNIRLPLPIKPQLDSKRGKLATELAMDWKSAYSLRFSGFTPGQRSFLQGGRKLEKLCHWRAPDDIGPEPGDGSPGLHQLLELDFANYLPDYILQKSDLCTMAHGLEGRAPLLDHGFYQRLLSTSAAERYTRPAKLIFRRAIHPALPTDFFQRKKRGFNPPLSGWLKTSLAPRFDGLGSRLAEASGGQLDAGAVDAFARAYRDGAGHLAEQMLQLLILDESLTQLRRLCRELG

SEQ ID NO: 2201 - protein, 112 aa, Arabidopsis thaliana
  misc_feature (2)..(2): Xaa can be any naturally occurring amino acid
  misc_feature (27)..(28): Xaa can be any naturally occurring amino acid
  misc_feature (31)..(31): Xaa can be any naturally occurring amino acid
  misc_feature (39)..(39): Xaa can be any naturally occurring amino acid
  misc_feature (43)..(44): Xaa can be any naturally occurring amino acid
  misc_feature (47)..(49): Xaa can be any naturally occurring amino acid
  misc_feature (55)..(55): Xaa can be any naturally occurring amino acid
  misc_feature (57)..(58): Xaa can be any naturally occurring amino acid
  misc_feature (63)..(63): Xaa can be any naturally occurring amino acid
  misc_feature (66)..(66): Xaa can be any naturally occurring amino acid
  misc_feature (69)..(69): Xaa can be any naturally occurring amino acid
  misc_feature (76)..(77): Xaa can be any naturally occurring amino acid
  misc_feature (81)..(81): Xaa can be any naturally occurring amino acid
  misc_feature (84)..(84): Xaa can be any naturally occurring amino acid
  misc_feature (86)..(87): Xaa can be any naturally occurring amino acid
  misc_feature (92)..(94): Xaa can be any naturally occurring amino acid
  misc_feature (96)..(99): Xaa can be any naturally occurring amino acid
MXSSMLSSATMVASPAQAIMVAPFNGXXSSXAFPATRKXNNDXXSFXXXGGRVNXLXXWPPIXKEXFLXFFFYFFXXTDSXWGXGXXYFIRXXXFXXXXFSCCFFGGFLLFG

SEQ ID NO: 2202 - protein, 554 aa, Yersinia pestis biovar Medievalis str. 91001
MCSIFGVLELKTDPIELRKKALEMSRLMRHRGPDWSGVWANDKAILAHERLSIVDVNTGAQPLYNAAHTHILAVNGEIYNHQALRQQYSDRYAFQTGSDCEVILALYQEKGPAFLDDLQGMFAFVLYDTEKDAYLIGRDHLGIIPLYMGHDEHGNMFVASEMKALVPVCRTIKEFPAGSYLWSQDGEIREYYHRDWFDYDHVKDNVTDKIQLANALEDAVKSHLMSDVPYGVLLSGGLDSSVISAITKKFAARRVEDNERSEAWWPQLHSFAVGLIGSPDLRAAQEVANHLGTVHHEIHFTVQEGLDAIRDVIYHIETYDVTTIRASTPMYLMSRKIKAMGIKMVLSGEGSDEVFGGYLYFHKAPNAKELHEETVRKLLALHMYDCARANKAMSAWGVEARVPFLDKNFLDVAMRINPQDKMCGNGKMEKHILRECFESYLPHSVAWRQKEQFSDGVGYSWIDTLKEKAAEQVTDQQMETAHFRFPYNTPGSKEGYLYREIFEELFPLPSAAECVPGGPSVACSSAKAIEWDESFKNMDDPSGRAVGVHQDAYK

SEQ ID NO: 2203 - protein, 319 aa, Saccharomyces cerevisiae
MVHNKVTIIGSGPAAHTVAIYLARAEIKPILYEGMMANGIAAGGQLTTTTEIENFPGFPDGLTGSELMDRMREQSTKFGTEIITETVSKVDLSSKPFKLWAEFNEDAEPVATDAIILATGASAKRMHLPGEETYWQKGISACAVCDGAVPIFRNKPLAVIGGGDSACEEAQFLTKYGSKCLCLSEKTICVLLPLCKKRAEKNEKIEILYNTVALEAKGDGKLLNALRIKNTKKNEETDLPVSGLFYAIGHTPATKIVAGQVDTDEAGYIKTVPGSSLTSVPGFFAAGDVQDSKYRQAITSAGSGCMAALDAEKYLTSLE

SEQ ID NO: 2204 - protein, 365 aa, Prochlorococcus marinus str. NATL2A
MGNKSSFNMDEGILPSQSARIEVIGVGGGGSNAVNRMINSDLDGVTYRVLNTDAQALIQSSATHRVQLGQSLTRGLGAGGNPSIGQKAAEESRADLQQALEGVDLVFIAAGMGGGTGTGAAPVVAQVAKESGALTVGIVTKPFSFEGKRRLRQADEGIARLAENVDTLIVIPNDRLKDVISGAPLQEAFRSADDVLMKGVQGISDIITCPGLVNVDFADVRSVMTEAGTALLGIGLGSGRSRALEAAQAAINSPLLEAARIDGAKGCVINITGGKDMTLEDMTSASEVISDVVDPEANIIVGTVVDEKLEGEIQVTVIATGFDSNQIYSNERNRARLSPKSLYEQPEEREAGASIPEFLRLRQNR

SEQ ID NO: 2205 - protein, 259 aa, Oryza sativa (japonica cultivar-group)
MTKSFAEKLGHGGFGAVYRGNLSDGRQVAVKMLKDSKGDGEEFINEVASISRTSHVNVVTLLGFCLHRSKRALIYEYMPNGSLERYAFRNNSKGELSLTWEKLFDVAVGIARGLEYLHRGCSTRIVHFDIKPHNILLDQEFCPKISDFGMAKLCANKESIVSIAGARGTIGYIAPEVYSKQFGAISSKSDVYSYGMMILEMVGARERNIEANSESSSHYFPQWIYEHLDEYCISSSEIDVLYNCKYYLAVTKCKKRFGM

SEQ ID NO: 2206 - protein, 330 aa, Salmonella typhimurium
MSQNTLKVHDLNEDAEFDENGVEAFDEKALSEEEPSDNDLAEEELLSQGATQRVLDATQLYLGEIGYSPLLTAEEEVYFARRDLRGDVASRRRMIESNLRLVVKIARRYGNRGLALLDLIEEGNLGLIRAVEKFDPERGFRFSTYATWWIRQTIERAIMNQTRTIRLPIHIVKELNVYLRTARELSHKLDHEPSAEEIAEQLDKPVDDVSRMLRLNERITSVDTPLGGDSEKALLDILADEKENGPEDTTQDDDMKQSIVKWLFELNAKQREVLARRFGLLGYEAATLEDVGREIGLTRERVRQIQVEGLRRLREILQTQGLNIEALFRE

SEQ ID NO: 2207 - protein, 300 aa, Persea americana
MVPSSPILFSSKPPCPFLPIPSKPIKLIHLSTSSSSWVSFKKSPSPSSRSLTTLVAQTSDWAQQEEDSNVAEATLSDWEGEGEGEGEEQTESGAEDGEESGGDGFVEGGEEDSYPLPPEEAKLFVGNLPYDVDHQALAELFDQAGTVEVAEVIYNRETDQSRGFGFVTMSTVEEAEKAVEMFNRYDINGRLLTVNKAAPRGARVDRPPRAFEPAFRMYVGNLPWQVDDARLEQVFSEHGKVVEARVVYDRETGRSRGFGFVTMSTQTELDDAIAALDGQSLDGRAIRVNVAEDRPRRASF

SEQ ID NO: 2208 - protein, 686 aa, Oryza sativa (japonica cultivar-group)
MSGKLCFLASVLLSMSTVVDLAMAASGGVNIAVYWGQNGSEGTLGETCGTGLYAYVNLAFLSTFGAGRAPVLNLADHCDAPSGTCASLAADIASCQAAGVKVLLSIGGGALGYNLSSPSDARDLAAYLWDNFLGGGATGASRPLGDAVLDGVDFDIESPSRFYDDLARNLASLYTRAPRPPRGGKTYLLTAAPQCPYPDASLAAALATGLFDHVWVQFYNNPPCQYAAPGDASALRSAWAQWTAGLPAATVFLGLPASLDAADSGFVDADTLASQVLPVVEGAANYGGIMLWSRSYDKDSSFSVKLQAALQNRNKPTGAGASSHTKRRIYIIAGVFAGVLLLFLLLITYFLCHKKHHGQQPPVQELTTPPKAEPSQKKQRAQHLKRYSYSEVERMTKTFAHKIGQGNYGDVYKGNLRDGRQIVVKLLKNCRGNDKEFLNEVASIGTISHVNVIPLLGFCLQGTARALIYEYMPNGSLESYAFSNDDSIEENYSLWIYWEKLYEIAIGVARGLEFLHGSGNANIMHLKIKPRNILLDQELCPKISDFGVANLCLWKESKKSAQNARGRDSYDAPEVVSTKFGAVSSKSDVYSYGVMVLEMIRAKRRINVGADTTTKYFAQWLYDHLDQFCNSISDISDETRESVRRIIIVGLWCIQAAPANRPSMSRVVKMLESSSTKMDLPRKSIE

SEQ ID NO: 2209 - protein, 491 aa, Listeria monocytogenes str. 4b H7858
MVFLSIKETALPKVQTKLFINGKWTDGDNKETKDIVNPANGEVIAKIAQAGPNETKKAIKAAKEAFPDWAKMELADRVKLLHKIADLMEEKADTLAKIMTLEQGKPLKESKGEVLTGAENFRFAAEEARRLYGETIPAPNNHAFIVKKQPIGVVAAITPWNFPGGMVTRKLAPALATGNTIVLKPSGDTPLSALAIFEIFEEAGLPKGVANIVMGSSKEIGETLTDSDDVRKLTFTGSTKVGQTLFKQSAETLKKISLELGGHAPFIVFDDANLDAAVNDLVAAKFRNNGQVCVSPNRIFVAKEIKEKFTKALVAKVKQLKVGNGLDDVNVGPLIREDAIDKIDKQLKNATDKGAKVLTGGGRLTGSDYDKGNFYKPTVLDNVTREMDIFYEETFGPVIPLITFETEDEAIEMANDSEFGLASYFYTKDLARVEKVGAALEYGMVGANEIVISNPETPFGGVKHSGFGRENGHYGMEEYIQVKFINLKYRD

SEQ ID NO: 2210 - protein, 932 aa, Brucella melitensis biovar Abortus
MTEFLPFVARHIGPRHEDERAMLAALGLPSMETLITQAVPASIRLNRALNLPAALSEADALAELGTIMGRNVVKKSFIGAGYHGVHTPPVIQRNLFENPAWYTAYTPYQSEISQGRLELLFHFQTLVAELTGLPVACASLLDEATAVAEAIGVACRHHRDKRSRILLAGELHPQTVDVVNTRAEPLGWEIATGSDVDDNTAAIVVPWPDTRGVYGDFAKVIADAKAKGALVIAVADPLALTIMEAPARWGADMAVGSMQRYGVPMGFGGPHAAYLAVSEALTRIIPGRIVGQSVDAHGRAAYRLALQTREQHIRRDKATSNICTAQALLANMAAAFAIWHGPAGLQAIATRVAALAARFAAALKAAGVEIAGESLFDTVTAKVPGKAAAIAAEADKGGRLIRIIDADTVGVTFDETSTEEDLTALASLFGAKLVGGDTVLVPGKERGEGFLTQEVFHSHRSETEMMRFLRRLADKDLALDRAMIPLGSCTMKLNAAAEMMPVSWNTVANLHPFAPAEQVQGYAKMTSDLEAWLCEITGFAGVSLQPNAGSQGEYAGLMAIRHYHQARGQGHRNICLIPSSAHGTNPASASMAGMSVVVVNCRPDGDIDIDDLKAKAEKHRDNLAAFMITYPSTYGVFEEGIKAFCEIVHDNGGQVYFDGANLNALVGLARPADIGADVCHMNLHKTFCIPHGGGGPGVGPIGVAKHLVPYLPGHVEAGSEHAVAAAQFGSASILVITWMYIRMMGGAGLKKATEAAILNANYIAHRLKGVYPILYTGAHDRVAHECIVDTRVLKDSAGITVEDVAKRLIDYGFHAPTMSWPVAGTLMIEPTESEPKLEIDRLCDAMIAIAGEAKKVADGVWPADDNPLANAPHTASDTLATEWKHPYTREEAVFPGGAFDPTAKYWPPVSRVDNVGGDRNLICSCPPVAAYG

SEQ ID NO: 2211 - protein, 545 aa, delta proteobacterium MLMS-1
MQEQLTIYDTTLRDGTQAENFNLSVEDKLRITLKLDELGIDFVEGGWPGASPASTRYFDEIKNYELKHTVVTAFGSTRNFSKPPAEDPNLNALLAAKTRAITIFGKSWDIHVRDALRIELADNLQIIEDSLAYLRPQVEFLFYDAEHFFDGYKANPEYALATLDKAVAGGAQCLVLCDTNGGALPAEIAAIINEVKRHLAGGSEPEQATLPVELGIHAHNDAECAVANSLVAVSLGISHIQGTINGIGERCGNANLTSIMPGLALKMKRYFKAAEHLEKLTETSRFVSELGNMAHHKYQPYVGQAAFAHKGGIHVSAVKRNPLTYEHIAPERVGNVRRILISDQAGRSNILHKAKKFGIDLDSQDPLVSSILKKLKGLENRGFQYEGAEASFELLMRQALGTRKEYFNLKGFRVLSQMVPGTGGDELEQAMEEATILLEVGGETVHAAALGNGPVNALDNALRKALTGFYPKLQAVELEDYKVRVLASEHGTGARVRVLIESRDEDASWGTVGVSHDIIEASWQALVDSITYKLMKDEQRDRGQS

SEQ ID NO: 2212 - protein, 396 aa, Ralstonia solanacearum
MAKEKFERTKPHVNVGTIGHVDHGKTTLTAAIATVLSSKFGGEAKKYDEIDAAPEEKARGITINTAHIEYETANRHYAHVDCPGHADYVKNMITGAAQMDGAILVCSAADGPMPQTREHILLARQVGVPYIIVFLNKCDMVDDAELLELVEMEVRELLSKYDFPGDDTPIIKGSAKLALEGDKGELGEVAIMNLADALDSYIPTPERAVDGTFLMPVEDVFSISGRGTVVTGRIERGIIKVGEEIEIVGIKATQKTTCTGVEMFRKLLDQGQAGDNVGILLRGTKREDVERGQVLCKPGSIKPHTHFTGEVYILSKDEGGRHTPFFNNYRPQFYFRTTDVTGSIELPKDKEMVMPGDNVSITVKLIAPIAMEEGLRFAIREGGRTVGAGVVAKIIE

SEQ ID NO: 2213 - protein, 525 aa, Pinus taeda
MSFDKLLQALPPPLPLPAILIATFIFFFSCWILHQSQRNERLPPGPYPWPIIGNFHQVRLPLHRTLKNLAEKYGPILFLRFGSVPTVVVSSSEKAKHFLKTHDLIFASRPPTSVGKYFFYNFKDIAFSPYGDHWRKMRKICVLELLTSKRIESFKHVRQEELSAMIHSIWEESESGRIAVNVSKAISTSLANILWRILARKKFSDNDLGADGKGFADLVVEVSIAVGSLNIGDFIPYLDCLDLQGIKRALKKANARFDAFAEKMIDEHINASTIRNGEADAGCHVKDIIDVLLEMAKNDNTGAKVTREIIKAITYELFSAGMETSANVLEWAMSELLRHPHAMKKLQQEIESVVGQQGTVKESDLASIVYLHCVVKETLRLYPSLPLALPHESLEAVTVGGYYIPKKTMVIMNLWAIGRDPSVWGADASEFKPERFMQMEENGIDLSGGQSDFRMLPFGAGRRTCPGSAMAILTVEFTLAQLLHTFDWRVEGDPSELDMKEACATKMPRQTPLLAYPRLRLPRCP

SEQ ID NO: 2214 - protein, 315 aa, Persea americana
MANTSISPLSTLFCPKTLIPFLSIPSKAKLLHLSHSTSSVPSWVSLKSKLSSSGGSFIALVARTSDWARQDGDNEIGEAGFDWEGEGTEAQVSDWEGEVEEDGEVLGESGAEDEEESGEVGFADEEDSYSAPPEEVKIFVGNLPFDLESADLADLFNKAGVVESAEVIYNRETDQSRGFGFVSMSTVEEVVKAIEMFDRYDINGRTLTVNKAAPRGSRAERPPRDFEPAFRVYVGNIPWQVDNLRLEQLFSEYGKVEEARIVFDRETGRSRGFGFVTMSSQIEMEDAIAALDGSDLDGRAIKVSMAQERPRRGHF

SEQ ID NO: 2215 - protein, 406 aa, delta proteobacterium MLMS-1
MALIVQKFGGTSVADPERIRAVARRVLKEQQAGNRMVVVLSAMAGETNRFVDLAQQMQSLPDPREMDVLLATGEQVTVALFAMAIKELGHDAVSLLGDQVKIHTDGMHTRARILSIDHELINSHLDQGRVVVVAGFQGVTADGELTTLGRGGSDTTAVALAAALQADQCEIFTDVDGVYTTDPNICASACKIDRIAYEEMLELASLGAKVLDIRSVSIAKQHRVPVQVRSTFTDTEGTWVVEEDKQMESNPVSGVTYNRNEARITVSKLPDIPGVASRLFTPVAEEGVVVDMIIQNTRDGNLTDLTFTVPKSDYQRALKVIEKTAAEIGAEGVSGSENISKVSIVGVGMRNHFGIATTMFEVLSREGINIQMISTSEIKISCVIEEKYTELAVRALHEAFGLSGQE

SEQ ID NO: 2216 - protein, 814 aa, Xanthobacter autotrophicus Py2
MQKLVVIGAGMASGRVLEHLFETDPDAYQVTLFNAEPRGNYNRIMLSPVLSGEKSYEEIVIHDDAWYVRHNVICRFGERVLEVDRARKVVVGPKGEIAYDKLLIATGSVPFIVPVDGHKLPGVISYRDLDDTNAMVEAAGVPGARAVVIGGGLLGLEAAAGLRLRGMEVTVVHLAGHLMERQLDEAAGYLLSKDLERRGIAVITRASTKAIVGTERVEGVQLEDGTLLPADLVVMAVGIRPAADLAKQSGLDVGRAVRVNAQMQTSDPDIYAVGECVEFEGTLFGLVAPLYDQAKVVAKSLLGEADAFAVKELSTKLKVTGCDLFSAGSFADGAGREDIVLRDPARGIYKRLVIEDDRLVGAVMYGDTSDSNWFFGLIRDGVKIADMRDTLIFGPSFQGGTPLDPMAAVAALPDEAEICGCNGVCKGTITAAIAAKGLTSLDDVRAHTKASASCGSCTGLVEQIMQISLGDSYTAAAVQPICSCTTLGHDDVRRLIKAKSLKTIPQVMQELEWKTSCGCAKCRPALNYYLVCDWPDEYADDYQSRFVNERIHANIQKDGTYSVVPRMWGGVTSSSELRAIADVVDKFAIPAVKVTGGQRIDMLGIKKEDLPAVWADLGKAGFVSGQAYAKGLRTVKTCVGTDWCRFGTQDSTGLGIRIEKFMWGSWTPAKLKMAVSGCPRNCAEATCKDIGVICVDSGYEIHFAGAAGLDIKGTEVLGLVKSEDEALEHIVALTQMYREQGRYLERIYKWAKRIGLAEIRQQIMEDHDKRRAYYDRFVFSQKFAQVDPWSERVSGKDKHEFRPMAELDITQAAE

SEQ ID NO: 2217 - protein, 566 aa, Arabidopsis thaliana
  misc_feature (120)..(120): Xaa can be any naturally occurring amino acid
MGSGTNHLKSNTFIKREANMLGKNPWPEKDSGGSSVSRDTGTGKDVQDMTLEDTNTSDHGFNGGHVDVVENFSTGDPMLCDTSAATNDGVYNYSLNSIPDAENDLSFFDNGDKEKNDLFXGWGDIGNFEDVDNMLRSCDSTFGLDSLNNEGDLGWFSSAQPNEETAGAMTDDLKPDKMLENQRTAMLQVEDFLNNSEPNHAVEDEYGYTIEDDSAQGKSSQNVFDTSLQKKDILMLDVEANLEKKQTDHLHHLDGKSDGFSENSFTLQHSGISREIMDTNQYYPPSAFQQRDVPYSHFNCEQPSVQVSACESKSGIKSENKPSPSSASNESYTSNHAQSIESLQGPTVDDRFRKVFETRANLLPGQDMPPSFAANTKKSSKTDSMVFPDAAPIQKIGLENDHRKAATELETSNMQGSSCVSSVVDDISLEATSFRQLQQVIEQLDVRTKLCIRDSLYRLAKSAEQRHHGGNRPEKGAGSHLVTGEADKYAGFMDIETDTNPIDRSIAHLLFHRPSDSSLSSDNNVLSYKSHPMIPQPNSSPSLRIEKQEETTELRPEAEVVTSDNN

SEQ ID NO: 2218 - protein, 1104 aa, Aspergillus nidulans FGSC A4
MPLLDGPRNGETVTASAHNGIPIIDGVDPSTLRGDIDQDPNRRQKIVVVGLGMVAVAFIEKLVKLDSERRKYDIVVIGEEPHIAYNRVGLSSYFEHRKIEDLYLNPKEWYGSFKDRSFDYYLNTRVTDVFPQHKTVKTSTGDIVSYDILVLATGSDAVLPTSTPGHDAKGIFVYRTISDLERLMEFAANHKGQTGVTVGGGLLGLEAAKAMTDLEDFGSVKLIDRNKWVLARQLDGDAGSLVTKKIRDLGLEVLHEKRVAKIHTDDDNNVTGILFEDGQELDCCCICFAIGIRPRDELGGSTGIQCAKRGGFVIDESLRTSVNDIYAIGECASWENQTFGIIAPGIEMADVLSFNLTNPDKEPKRFNRPDLSTKLKLLGVDVASFGDFFADRDGPKFLPGQRPSAESIGAADPNREEEPQVKALTYRDPFGGVYKKYLFTMDGKYLLGGMMIGDTKDYVKLNQMVKSQKPLEVPPSEFILGAQSGGEENADDLDDSTQICSCHNVTKGDVVESVKSGTCKTIADVKSCTKAGTGCGGCMPLVQSIFNKTMLDMGQEVSNNLCVHIPYSRADLYNVIAIRQLRTFDDVMKSAGKCPDSLGCEICKPAIASILSSLFNPHLMDKEYHELQETNDRFLANIQRNGTFSVVPRVPGGEITADKLIAIGQVAKKYNLYCKITGGQRIDMFGARKQDLLDIWTELVDAGMESGHAYAKSLRTVKSCVGTTWCRFGVGDSVGMAIRLEQRYKSIRAPHKFKGAVSGCVRECAEAQNKDFGLIATEKGFNIFVGGNGGAKPRHSELLAKDVPPEEVIPILDRYVIFYIRTADKLQRTARWLESLPGGIEYLKDVVLNDKLGIAAEMERQMQELVDSYFCEWTETVRNPKRRKYFQQFANTDETVENVEIVKEREQVRPTYWPKDGANEDFKGHQWSSLSWQPVIKADYFSDGPPAISSANIKRGDTQLAIFKVKGKYYATQQMCPHKRTFVLSDGLIGDDDNGKYWVSCPYHKRNFELNGEQAGRCQNDEAMNIATFPVEEREDGWIYMKLPPVEELDSVLGTEKWKVKKGEAVDPFEAYDKKYSGMKGKRAGAKGIEGSKPTRSPSNTIDW

SEQ ID NO: 2219 - protein, 517 aa, Coccidioides immitis RS
MVHLAAVRKNSEVLPLRMVKRVDTIPLEEPQEHDFFSSVYGSRFAAEDLPTHEMPEKEMPREVAYRMIKDELSLDGNPMLNLASFVTTYMEEEAERLMAESFSKNFIDYEEYPQSAEIQNRCVNMIARLFNAPASDESDHAMGTSCVGSSEAIMLGTLAMKKRWQNKRKAEGKDYSRPNIIMSSAVQVCWEKAARYFDVEEKFVYCTSERYVIDPEEAISMVDENTIGICAILGTTYTGQYEDIKALNDIMIEKGIDCPIHVDAASGGFVAPFVNPNLEWDFRLEKVVSINVSGHKYGLVYPGVGWVVWRSPEYLPKELVFNINYLGANQASFTLNFSKGASQVIGQYYQMIRLGKRGYRSIMVNLTRTADYLASALRQLGFIIMSDGKGHGLPLVAFRLNPDDENVMYDEFALAHQLRERGWVVPAYTMAPHSEKLKLMRIVVREDFSKSRCDNLVNDIKLALQQLSDMDKRTLEKFQQHIRRHVTNSGSATHNHPQYQDEDHSLQGKTGKTHAIC

SEQ ID NO: 2220 - protein, 517 aa, Alkalilimnicola ehrlichei MLHE-1
MSEKERLIIFDTTLRDGEQSPGASMTREEKVRIGRALERLKVDVIEAGFPAASEGDFESVRAVARAVRGSRICGLARAREDDIRRAGEALQEAEAGRIHTFLATSPIHMEKKLRMTPDEVVDAAVRAVKLARSLCDDVEFSPEDAGRSDPEFLCRVIEAVIDAGAGTVNIPDTVGYNLPEQFGGLIGRLRERVPNSDKAVFSVHCHNDLGVAVANSLAAVMNGARQVECTINGLGERAGNAALEEVVMAVRTRQDFFPCDTGIDAHEIVPASRLVANITGFQPQPNKAIVGANAFAHESGIHQDGVLKHRETYEIMRAEDVGWHTNRMVLGKHSGRNAFRARLKDLGIEFESEEQLNEAFQRFKGLADKKHEIFDEDLQALVTEANLELENERYRLLALRVCSETGETPEAIVTLAVDGHERRAVCPGSGPVDAAFKAIEELVGAADTELLLYSVSNITTGTDSQGEVTVRLERGGRIVNGQGSDTDIVIASAKAYLNALNKIDQGELRRHPQAADV

SEQ ID NO: 2221 - protein, 407 aa, Methanosarcina acetivorans C2A
MQTDEMSLKKRAESAAEKKAAYGEDFELEKFEEGSKVSKPIEDLQTLDEESKKTLLQVGIIPSEEGRSGSFIVLDNAVSHSSLKDENVELMSTHKALEKYEWLKDYSWKLVQVDADKYTAKTYLEDADGYFIRAPPGKKSSMPVQTCLMLGSKKAAQTVHNIIVVEEEASLDIITGCTTKKGVEEGLHLGISEMYVKKGATLNFTMIHNWAEQIGVRPRTVVHVEEGGTYISNYICLKPVHSVQTYPTVRLEGKGAVTRLNTIAIGHPGSELDLGSRAVFNAPDTRAELISRTITIGGRLVARGEMIGNAKGAKGHLECKGLVLTDKGSQLAIPILEANVDDIELTHEAAVGKIAKDQVEYLMARGLTEDEAVGMIIRGFLDVGIRGIPEELKKEIEETITQTALGM

SEQ ID NO: 2222 - protein, 113 aa, Synechococcus sp. WH 5701
MTIYVGNLSFDAEQEDLRDLFSQYGEVRQCSLPLDRETGRKRGFAFVELANDAEEQKAIDDLQNVEWMNRMIRVNKAEPRGGGGGGGGGNRGGGGGYGGGGGGYGGGGGRSRY

SEQ ID NO: 2223 - protein, 400 aa, Rubrobacter xylanophilus DSM 9941
MAKGVFERTKPHINVGTIGHVDHGKTTLTAAITKVLAKHVPDDPANKEVAFEQIDNAPEERQRGITIATSHQEYATKNRHYAHVDCPGHADYVKNMITGAAQMDGAILVVSAADGPMPQTREHILLARQVGVPYIVVYLNKADMVDDPELLELVEMEVRELLSEYEFPGDEVPVVVGSALKALEGDEGELGEQSILKLLEALDEYIPEPKRDIDKPFLLAVEDVFSIQGRGTVATGRVEQGKLRLNEEVEIVGIRPTRKTVVTGIEMFNKSMQEAQAGDNIGVLLRGIKRDEIERGQVLAAPGSITPHTRFKAEVYVLSKEEGGRHTPFFSHYRPQFYFRTTDVTGEIFLEEGVEMVMPGDNTVMEVQLISPIAMDEGLNFAIREGGRTVGAGVVTQIIE

SEQ ID NO: 2224 - protein, 226 aa, Zea mays
SSQLRRPPPPAREGDVPVRVKNSYNRRAPGTLITKARDMSKTVLTSIVLKSNITMLDIVSTRMLGQYGFLAKVFSIFEDLGISVDCVATSEVSISLTLDPSKLWSCELVQHKNELDDVIEELEKIAVVHLLQNRSIISLIGNVQRSSLILEKAFNVLRRNGVNVQMISQGASKVNISLVVHDSEAKQCVQALHSAFFENGFLLEADELDVLHDGFTSHSNGTIHSH

SEQ ID NO: 2225 - protein, 929 aa, Salmonella enterica subsp. enterica serovar Paratyphi A str.
MLNAVGAESLNALTGQIVPKDIQLATPPQVGEAATEYAALAELKAIAGRNKRFTSYIGMGYTAVQLPPVIPRNMLENPGWYTAYTPYQPEVSQGRLEALLNFQQVTLDLTGLDMASASLLDEATAAAEAMAMAKRVSKLKNANRFFVAADVHPQTLDVVRTRAKTFGFDVIVDDADKVLDHQDVFGVLLQQVGTTGEIHDYGALISELKARKVIVSVAADFMALVLLTAPGKQGADIVFGSAQRFGVPMGYGGPHAAFFAAKDEFKRSMPGRIIGVSKDAAGNTALRMAMQTREQHIRREKANSNICTSQVLLANIASLYAVYHGPVGLKRIANRIHRLTDILAAGLQQKGLKLRHAHYFDTLCVEVADKAAVLARAEAAEINLRSDIHNAVGITLDETTTRENVAQLFNVLLGDSHGLNIETLDKDVALDSRSIQQSMLRDDAILTHPVFNRYHSETEMMRYMHSLERKDLALNQAMIPLGSCTMKLNAAAEMIPITWPEFAELHPFCPPEQAEGYHQMISQLSDWLVKLTGYDAVCMQPNSGAQGEYAGLLAIRHYHESRNEGHRDICLIPASAHGTNPASAHMAGMQVVVVACDKNGNIDLTDLRAKAEQAGDNLSCIMVTYPSTHGVYEETIREVCEVVHQFGGQVYLDGANMNAQVGITSPGFIGADVSHLNLHKTFCIPHGGGGPGMGPIGVKAHLAPFVPGHSVVQIEGMLTRQGAVSAAPFGSASILPISWMYIRMMGAEGLKQASQVAILNANYIASCLKDAYPVLYTGRDGRVAHECILDIRPLKEETGISELDIAKRLIDYGFHAPTMSFPVAGTLMVEPTESEGKAELDRFIDAMLAIRAEIDQVKAGVWPLEDNPLVNAPHIQSELVAEWAHPYSREVAVFPAGVADKYWPTVKRLDDVYGDRNLFCSCVPISDYQ

SEQ ID NO: 2226 - protein, 303 aa, Zea mays
MASSVAVSLRALAAAPLPKSSPATSCPFFVLLAPALPRRLLRLRSARRLPLAPLAASDSAFESSVGVNYAEPDDSEKDKEVELFGSGDDEGAGELVDDHSVEVSAAVEDEVEEEVGEYVEPPEEAKVYVGNLPYDVDSERLAQLFDQAGVVEVAEVIYNRETDQSRGFGFVTMSTVEEAEKAVEMFHRYDVNGRLLTVNKAAPRGSRVDRPPRQSGPSLRIYVGNLPWQVDDSRLVELFSEHGKVVDARVVYDRETGRSRGFGFVTMASQDELDDAIAALDGQSLDGRALRVNVAEERPRRGF

SEQ ID NO: 2227 - protein, 952 aa, Zea mays
MTCGNPDCLYLHDVGSQEDSFTKDEIISAYTRTRVPQMASGVSQRRTGTVLPPPGDDFSYSAVVSAKHTFKNGTLNTTSQPRLSPPNSSSGRSTLPSAASWGQRDLNARTTATGATSSQSHTKPKSESQSNPFSSSSVFSCTKTPSSWNDDTSTAAKISEGQQLSEKESRTLQPYKPGISKETQALSSLESSLDIDFSTIPSAWNDDDIVVPDVMPKGSDENQVANKNGELTHPASKSLVLSKKDIKMNITSKTPSDFVSSPAISKSDVSTSDGDHSLTNITPKCLASNAVECQSSHTAVEKMLEDIGSKDTDMEKLSAQISSVTLGGNDEIQSMAGNQQPDVMPCTSVDVLMDQNFGRDLAHPNPDELLLPSENKDSIVSCQYSSDKRLDWSLEMQNCSVTPLNDRMDSALLTDKIHSRQLDGSEQSSYSSFVEFPSTVDTSLWNDTENNAALTIDNITSSQMQPGFSSTDNTYALLNGGQDGLGTVYTHDNVSVYTHGNVSGHPGMGSHHHRAMGSLRNNSIGSFDKTISVNKYERRIISDTLSEFNPWDDSYSTANNFARMLRESKNNDVHCIAPSWKSGTGIKESRFSFARQDNQGNLFDSSLRNCGTGTEQNFSLLPQNSRGNIYQNGLAFQSLENEFSNNNSPGVLDMATTGTSMSKISAPPGFSAPTRVPPPGFSTAFPSQDSLNPTPVFPSGILCHGGSIPPPRFSSFSSGISTQEVSKPPTRPPSPFSSRFSSQDGLDPSSRFPFSSGFSSHDGSNQSYGSTNPENLLRGTVQGGNSNHYQSQFGRHSSDMEFDDPAILAMGKGLMPGIGDSGLEMKNTPAFQAQLQPASSDPRFQLHVQPNVQSRQNMRFTDPMQDGLNHMNDNYLASRFLAQNQGPLSPYVQIPQQPRNSQVINGHWDGWSDLRQGNNAPMSDMSRILYPSEVNKLHMLGSNDVHNRAFGM

SEQ ID NO: 2228 - protein, 361 aa, Crocosphaera watsonii WH 8501
MTRQYRITLLPGDGIGPEILAVTVDILKVVGKQLEIDFQFQEALIGGVAIDETGKPLPEATLKMCRSSDAVLLAAIGGYKWDNLPREKRPETGLLAIRAGLNLFANLRPATILPQLINASSLKPEIVQGVDIMVVRELTGGIYFGKPKGIFETETKEKRGVNTMAYTESEVDRIAKVAFETAQKRGGKLCSVDKANVLDVSQLWRDRVTLMAEKYPDVELSHLYVDNAAMQLVREPKQFDTIITGNLFGDILSDAAAMLTGSIGMLPSASLGLEKPGLFEPVHGSAPDIAGEDKANPLAQVLSAAMMLRYGLNEPKAATKLEKAVLEALAQGYRTGDIMSDGMKAVGCKGMGEVLLRILES

SEQ ID NO: 2229 - protein, 283 aa, Sulfitobacter sp. EE-36
MAVVRTDLTDGVMTLTLDRPEKLNAFTIEMMQELIDAFDVADADDAVRAVVVTGAGRAFCAGADISGGTKGFVDVEKRKVGDGIVRDGGGLLTLRIFDSLKPVIAAVNGAAVGVGATMQLPMDMRLASEDAKFGFVFSRRGIVPEACSSWFLPRVVGISKAMEWSTTGRIFDAQEALSAGLVRSVHKPADLLGAAQELAEEIGANNAPVSVALTRQMMWRMLGADHPMQAHRVDSLAIELRSASADAAEGVRSFTEKRPAVFPDKVSTDLPDIFPDWTAPKWQ

SEQ ID NO: 2230 - protein, 547 aa, Chromobacterium violaceum ATCC 12472
MSELTELPAWQALWDHFAEAKHLHMRDLFAADPGRAERYSLEVGGLFLDYSKNRITDATLLGLMELAREAGLPARIKAMFKGEKINRTENRAVLHVALRNRTNSPIRVDGEDVMPKVNSVLERMGKFAHAVRSGDWLGFTNQPITDIVNIGIGGSDLGPLMVCSALKPFGHPRLNMHFVSNVDGAQLKETLKKVHPETTLFVVESKTFTTQETLTNALTAREWFLSHARDEGAVAKHFVAVSTNQKAVAEFGIDPANMFEFWNWVGGRYSLWSAIGLPIMLYLGEENFTELLNGAHIMDQHFMNAPFEQNMPVLLAMIGVWYINYYGGGSHVIAPYDQYLHRLPAFIQQLDMESNGKQVTLSGQPVDFETAPIIWGETGINGQHAFFQLLHQGTHISPIDLIASLGNRASLPGHHEILLANVFAQAEAFMRGKTADEVRAELAEQGLSGEEMEALVPHKVFGGNRPTNTLLMSRLDPRNLGSLIALYEHKIFVQGVIWHINSFDQWGVELGKQLAKTIHAELTGKLEQAEHDSSTRRLIQLYRKANG

SEQ ID NO: 2231 - protein, 318 aa, Xanthomonas campestris
MSLQAITVTLNPATDQTIQLDRLQPGAVHRASSVRNDAGGKGINVAACLADWGSQVAALGVLGVGNAGVFEALFRERGIGNHCHRVAGDTRTNLKLVEAQVNETTDINLPGLQLGQAHLQGVADHLAPLLRAGLPVVLSGSLPAGLPEDSWAQLQAQASAAGSTRPARHQRCAAVAALAAAPVAMPYAVKPNRHELEAWTGHPLGDHAALTAAAHALIARGIQLVVISMGTEGALFVQRDQQLIARPPRLAQGSSVGAGDAMVAGLAAALLDDATELEQCARLATAFSMCRLESGDARRITPEGVRDAAAAVVIGAVP

SEQ ID NO: 2232 - protein, 168 aa, Xanthobacter autotrophicus Py2
MSTSLAFLVNALIVIATVAAMEGVAWAAHKYVMHGFGWGWHKSHHEPREGVFERNDLYALLFAGIAIALIYAFRNGGALLWVGVGMTVYGFLYFFVHDGITHQRWPFRYVPRNGYLKRLVQAHRLHHAVDGKEGCVSFGFIYAPPPADLKAKLKKLHGGSLKQNEAAE

SEQ ID NO: 2233 - protein, 1037 aa, Nostoc punctiforme PCC 73102
MGSLLYSSSQTADIYPVSELFLRHRLQVVEELWESVLRQECGQNMVDLLRQLRDLCSPEGQATNDQASSAVKLIEQLNINEAIRAARAFALYFQLINIIEQEYEQRQQLSRYEAETEPTDSERASNVNYSSNQREDDAPVSKGIAAELLAKNYLEKAQVKPKGTFAALFPYLFKQNVPPQQIQRLIAHLDVRLVFTAHPTEIVRHTIRDKQRQVVQLLQKLDTLENHAGGTGGGYAWEAADVREQLLEEIRLWWRTDELHQFKPTVLDEVDYALHYFQEVLFDGIPQLYKRFKHTLSNTFPWLEPPSKNFCSFGSWVGSDRDGNPSVTPEVTWQTACYQRKMVLGRYIQSVKNLIELLSVSMHWSDVLPDLLESLELDQSQLSEVYDALALRYRQEPYRLKLAYVLKRLENTRDRNLALYNRETPKNQDSPLYRSGDDFLAELRMIQRNLTETGLSCRDLENLICQVEIFGFNLTQLDIRQESSRHADALNEILQYLQILPQPYNELSEEQKVAWLTGELQTRRPLIPAELPFSEKTNDVIETFRVVRSLQQEFGLNICQTYIISMCRDVSDVLEVLLLAKEARLFDPAIAVGTIQVVPLFETVEDLQRSRSVMRKLFELPLYRALLAGGYEQTKTESVVVDENSSSLASPAPPASPASPAPSPSPLTPNLQEVMLGYSDSNKDSGFLSSNWEIHKAQKSLQQIAEGYDINLRIFHGRGGSVGRGGGPAYEAILAQPGHSINGRIKITEQGEVLASKYSLLDLALYHMETITTAVIQASLLRTGFDDIEPWNEIMEELAARSRQHYRALIYEQPDFVDFFHQVTPIEEISQLQISSRPARRPSGKKDLSSLRAIPWVFSWTQTRFLLPSWYGVGTALQEFLNAEPEEHLKLMRYFYVKWPFFKMVISKAEMTLAKVDMQMAHHYVQELSQSEDQLRFAKVFDQIASEFYLTRDLVLKITDHNQLLDGDPVLQRSVQLRNGTIVPLGFIQVSLLKRLRQSMNTNATSGVIHSRYSKGELLRGALLTINGIAAGMRNTG

SEQ ID NO: 2234 - protein, 313 aa, Avena sativa
VVVITGASSGLGLAAAKALAETGKWHVVMACRDFLKASKAAKAAGMADGSYTVMHLDLASLDSVRQFVDAFRRAEMPLDVLVCNAAIYRPTARKPTFTAEGVEMSVGVNHLGHFLLARLLLEDLQKSDYPSRRLVIVGSITGNDNTLAGNVPPKANLGDLRGLAGGLTGASGSAMIDGDESFDGAKAYKDSKVCNMLTMQEFHRRYHEDTGITFSSLYPGCIATTGLFREHIPLFRTLFPPFQKFVTKGFVSEAESGKRLAQVVGEPSLTKSGVYWSWNKDSASFENQLSQEASDPEKARKVWELSEKLVGLA

SEQ ID NO: 2235 - protein, 613 aa, Haemophilus influenzae 86-028NP
MHRFFYNDNNVLGDLMKNFKYFAQSYVDWVIRLGRLRFSLLGVMILAVLALCTQILFSLFIVHQISWVDIFRSVTFGLLTAPFVIYFFTLLVEKLEHSRLDLSSSVNRLENEVAERIAAQKKLSQALEKLEKNSRDKSTLLATISHEFRTPLNGIVGLSQILLDDELDDLQRNYLKTINISAVSLGYIFSDIIDLEKIDASRIELNRQPTDFPALLNDIYNFASFLAKEKNLIFSLELEPNLPNWLNLDRVRLSQILWNLISNAVKFTDQGNIILKIMRNQDCYHFIVKDTGMGISPEEQKHIFEMYYQVKESRQQSAGSGIGLAISKNLAQLMEGDLTVESERGKGATFHLTLHAQEISEKESVKKNIPSLNILLVEDVDLNIMVAKTILEKLGHHVDVATNGKQAITLFEKNVYDILLLDIKLPDMSGFEIAQYLRENYENGIYDFLPPMIAFTANVMQSEQEYLEMGMDGVLRKPISIKDLHHCLQQFFADESESIIEMNDDNELSEQFDLALIETLGKKQILENLSLFKQTMPNYLAQLSKDNMKETEDTAHKIKGAAASVGLNHLRQLADTLESAAKNSDVFNCGELIDEIGNLWLEDVEDLLKFCKF

SEQ ID NO: 2236 - protein, 105 aa, Helicobacter hepaticus ATCC 51449
MAKYKELTNDNFDTEALSGVALVDFWAPWCNPCKMLSPVIDKLADEYEGKAKICKVNVDEQGELSKRFGIRNIPTILFMKDGEIKDQVTGAMPEQVIRQKLDSIL

SEQ ID NO: 2237 - protein, 422 aa, Medicago truncatula
MGGKKTSKTKSLLSFRRRSNKLPSPPPRSPPPTLEITGSPSENRLVPKPKKKTGGARLWMRFDRFGKSELVEWEKNTIIRHAAIPARDLRILGPVFSHSSNILAREKAMVVNLEFIKAIVTAEEILLLDPLRQEVLPFVEQLRQQLPHKTQPKLLGGAGGGDESVPEGAEELPLPFEFQVLEIALEVVCTYLDKNVAELEKGAYPVLDALAKNVSTKNLEHVRSLKSNLTRLLARVQKVRDEIEHLLDDNEDMAQLYLTRKWLQNQQLDAHLGATASNNLLNTSHSVRRINSTRSGSLVTSSDDNDVEDLEMMLEAYFMQLDGTRNKILSVREYIDDTEDYVNIQLDNHRNELIQLQLTLTIASFAIAFETLVAGAFGMNIPCTLYTQNGIFWPIVGGMTAVSILLFLVVLAYAKWKKLLGS

SEQ ID NO: 2238 - protein, 374 aa, Triticum aestivum
  misc_feature (188)..(188): Xaa can be any naturally occurring amino acid
  misc_feature (225)..(225): Xaa can be any naturally occurring amino acid
  misc_feature (255)..(255): Xaa can be any naturally occurring amino acid
  misc_feature (267)..(267): Xaa can be any naturally occurring amino acid
  misc_feature (284)..(284): Xaa can be any naturally occurring amino acid
MADEAKAKGNAAFSAGRFEEAAGHFSDAIALAPANHVLYSNRSAALASIHRYSDALADAEKTVELKPDWAKGYSRLGAAHLGLGDAASAAAAYEKGLALDPSNEGLKAGLADAKKAAGAPPRRAPSGGADAIGQMFQGPELWTKIASDPATRAYLDQPDFMQMLREVQRNPSGLNTYLSDPRMMHDPXSTTSLPIPKARDMDPEPQSLSCEVSDEENDPEGERKXAVRKDKDAGKESNKNKVCETDTLDFPNALXMNEEEISYHPTXRGVSIEMGRTITCCGTXNQAEVTERKPRSVFQIVARPITRKGNGSWPIVRTHFRQQTAFAPLPCVLRHPPLTAPKRYRGLGAINASLSSASPTLLSGPGHKCAPFSD

SEQ ID NO: 2239 - protein, 580 aa, Nicotiana tabacum
MEFLRNSSLWSLQILLLGVFVFVSNNGGVDASHKVYMHLQSTSSNVKNVHRTGYHFQPPKNWINDPNGPMYYNGVYHLFYQYNPKGAVWGNIVWAHSVSTDLINWIPLEPAIYPSKIFDKFGTWSGSATILPGNKPIILYTGIIDANRTQVQNYAIPANLSDPYLRKWIKPDNNPLIVADMSINKTQFRDPTTAWMGRDGHWRILVGSVKNHRGKVILYRSKDFMKWTKAKHPLHTATNTGNWECPDFFPVSLKHTNGLDTSYRGEYTKHVLKVSLDVTRFEYYTVGTYDTRKDRYIPDNTSVDGWKGLRLDYGNYYASKSFFDPSKNRRIMLGWANESDTVDDDVRKGWAGVHPIPRKLWLDPSGKQLVQWPVEELETLRKKKVQLSNHKLYKGEMIEVKGITVAQADVEVTFSFASLDKAEPFDPSWADLYAQDVCAIKGSTVQGGRGPFGLITLASKNLEEYTLVFFRVFKAQDKYKVLMCSDASRSTLKNETTMYKPSFGGYVDVDLADKKLSLRSLIDNSVVESFGAGGKTCITSRVYPTLAIFDKAHLFAFNNGTEAITIETLNAWSMADAKLH

SEQ ID NO: 2240 - protein, 528 aa, Nostoc punctiforme PCC 73102
MDARALWQRYQNWLYFHEGLGLYLDISRMRFDDAFVESLQPKFDKAFADMAELEKGAIANPDENRMVGHYWLRNPDLAPTPELTQEIVQTLEQIEAFAEKVQTGAIHPPRASRFTDIISIGIGGSALGPQFVAEALAPDFPPLKIHFIDNNDPAGIDRVLNHLRNSLASTLVLVISKSGGTPEPRNGMIEVKKAYAGHNLEFAQYAVAITSVDSNLDKLAKDEGWLARFPMYDWVGGRTSEMSAVGLVPAALQGIDVRAMLDGAKEMDDATRVPDVKNNPAALLALSWYFAGNGKGEKDMVVLPYKDSLFLFSRYLQQLVMESLGKEKDLDGNVVHQGIAVYGNKGSTDQHAYVQQLREGVANFFATFVEVLEDRQGPSTEIDPGVTSGDYLSGFLQGTRQALYENHRDSITVTIPQVNPRTVGALIALYERAVGLYASLVNVNAYHQPGVEAGKKAAASILDLQTRVVAVLQKEKTPISLDELAKKAGASDQIEAIYKILRHIHANQRGVVLQGDLHKPGSLTVSAS

SEQ ID NO: 2241 - protein, 145 aa, Brassica napus
DEERPYLPKHILYRQKEQFSDGVGYSWIDGLKAHAAENVNDKMMSNAAFIFPHNTPLTKEAYYYRMIFERFFPQNSARLTVPGGATVACSTAKAVEWDASWSNNMDPSGRAAIGVHLSAYDGSKVALPLPPHKAIDDIPMMMGQE

SEQ ID NO: 2242 - protein, 518 aa, Pinus taeda
MDVNILTMFVTVSALALACSLWIASYLRNWRKKGVYPPVVGTMLNHAINFERLHDYHTDQAQRYKTFRVVYPTCSYVFTTDPVNVEHILKTNFANYDKGTFNYDIMKDLLGDGIFNVDGDKWRQQRKLASSEFASKVLKDFSSGVFCNNAAKLANILAQAAKLNLSVEMQDLFMRSSLDSICKVVFGIDINSLSSSKAESGPEASFAKAFDVANAMVFHRHMVGSFWKVQRFFNVGSEAILRDNIKMVDDFLYKVIHFRRQEMFSAEKENVRPDILSRYIIISDKETDGKVSDKYLRDVILNFMVAARDTTAIALSWFIYMLCKHQHVQEKLLEEIISSTSVHEDQYSTECNDIASFAQSLTDEALGKMHYLHASLSETLRLYPALPVDGKYVVNEDTLPDGFKVKKGDSVNFLPYAMGRMSYLWGDDAKEFKPERWIQDGIFHPKSPFKFPAFQAGPRTCLGKDFAYLQMKIVAAVLVRFFKFEAVKTKEVRYRTMLTLHMNEDGLNVQVTPRLNSD

SEQ ID NO: 2243 - protein, 560 aa, Arabidopsis halleri subsp. gemmifera
MASSPALISDTEAWKDLKGHVEDIKKTHLRDLMTDANRCQSMMMEFDGLLLDYSRQRATVETVDKLLNLAKAAQLTEKISRMFNGEHINSTENRSVLHVALRAPKDAVIKADGKNVVPEVWNVLDKIKEFSEKIRSGSWVGATGKPLKDVIAIGIGGSFLGPLFVHTALQTDPEALESAKGRQLRFLANIDPVDVARNINGLNPETTLVVVVSKTFTTAETMLNARTLREWITAALGASAVAKHMVAVSTNLALVEKFGIDPNNAFAFWDWVGGRYSVCSAVGVLPLSLQYGFSVVEKFLKGASSIDQHFQSTPIEKNIPVLLGLLSVWNVSFLGYPARAILPYSQALEKFAPHIQQVSMESNGKGVSIDGLPLPFETGEIDFGEPGTNGQHSFYQLIHQGRVIPCDFIGIVKSQQPVYLKGEVVSNHDELMSNFFAQPDALAYGKTPEQLQKENVSENLIPHKTFSGNRPSLSLLLPELTAYNVGQLLAIYEHRVAVQGFVWGINSFDQWGVELGKVLATHVRKQLHSSRTQGTTLEGFNYSTTTLLKRYLETSSEPQM

SEQ ID NO: 2244 - protein, 560 aa, Arabidopsis halleri subsp. gemmifera
MASSTASISDPEAWKDLKGHVEDIKKTHLRDLMTDANRCQSMMMEFDGLLLDYSRQRATVETVDKLLNLAKAAQLTEKISRMFNGEHINSTENRSVLHVALRAPKDAVIKADGKNVVPEVWNVLDKIKEFSEKIRSGSWVGATGKPLKDVIAIGIGGSFLGPLFVHTALQTDPEALESAKGRQLRFLANIDPVDVARNINGLNPETTLVVVVSKTFTTAETMLNARTLREWITAALGASAVAKHMVAVSTNLALVEKFGIDPNNAFAFWDWVGGRYSVCSAVGVLPLSLQYGFSVVEKFLKGASSIDQHFQSTPIEKNIPVLLGLLSVWNVSFLGYPARAILPHSQALEKFAPHIQQVSMESNGKGVSIDGLPLPFETGEIDFGEPGTNGQHSFYQLIHQGRVIPCDFIGIVKSQQPVYLKGEVVSNHDELMSNFFAQPDALAYGKTPEQLQKENVSENLIPHKTFSGNRPSLSLLLPELTAYNVGQLLAIYEHRVAVQGFVWGINSFDQWGVELGKVLATHVRKQLHSSRTQGTTLEGFNYSTTTLLKRYLETSSEPQM

SEQ ID NO: 2245 - protein, 359 aa, Ashbya gossypii ATCC 10895
MSSRFSLVSNLTRSLSSVGRMQQMRFASSKSMTVRDALNSAMAEEMDRDDDVFIIGEEVAQYNGAYKVTKGLLDRFGERRVVDTPITEMGFAGLAVGAALKGLKPIVEFMSFNFSMQAIDHVVNSAAKTYYMSGGVQTCQIVFRGPNGAAVGVAAQHSQDYTAWYGSIPGLKVLCPYSAEDARGLLKAAIRDPNPVVFLENELLYGESFEVSEEVLSPDFTLPYTSKVEREGTDISIITYSRNVQFSLAAAEILDKQYGVSAEVINMRSIRPLDIDAIIKTVKKTNHLITVEATFPAFGVGSEIIAQIMESEAFDHLDAPVQRVTGADVPTPYAKELEDFAFPDPDTIVRAAKQVLSIE

SEQ ID NO: 2246 - protein, 150 aa, Robiginitalea biformata HTCC2501
MTVLIWIAIFLATFCFMEFMAWFTHKYIMHGFLWSLHKDHHKKDHDSWFERNDAFFLFYAIVSMSFIGAAVNTGFWQGWPIGLGILAYGIAYFIVHDIFIHQRFKLFRNANNWYARGIRRAHKIHHKHLGKEEGECFGMLFVPFKYFRKT

SEQ ID NO: 2247 - protein, 560 aa, Arabidopsis halleri subsp. gemmifera
MASSTALISDTEAWKDLKGHVEDIKKTHLRDLMTDANRCQSMMMEFDGLLLDYSRQRATVETVDKLLNLAKAAQLTEKISRMFNGEHINSTENRSVLHVALRAPKDAVIKADGKNVVPEVWNVLDKIKEFSEKIRSGSWVGATGKPLKDVIAIGIGGSFLGPLFVHTALQTDPEALESAKGRQLRFLANIDPVDVARNINGLNPETTLVVVVSKTFTTAETMLNARTLREWITAALGASAVAKHMVAVSTNLALVEKFGIDPNNAFAFWDWVGGRYSVCSAVGVLPLSLQYGFSVVEKFLKGASSIDQHFQSTPIEKNIPVLLGLLSVWNVSFLGYPARAILPYSQALEKFAPHIQQVSMESNGKGVSIDGLPLPFETGEIDFGEPGTNGQHSFYQLIHQGRVIPCDFIGIVKSQQPVYLKGEVVSNHDELMSNFFAQPDALAYGKTPEQLQKENVSENLIPHKTFSGNRPSLSLLLPELTAYNVGQLLAIYEHRVAVQGFVWGINSFDQWGVELGKVLATHVRKQLHSSRTQGTTLEGFNYSTTTLLKRYLETSSEPQM

SEQ ID NO: 2248 - protein, 320 aa, Diospyros kaki
MEAFPVINMEILNGEGREAAMEKLRNACENWGFFEVVNHGISHELMDSVERLTKEHYKKFMEQRFKEMVASKGLEVVQSEINDLDWESTFFLRHLPSSNLSELPDLEDDYKKAMKEFAEDLEKLAEQLLDYLCENLGLEKGYLKKAFYGSKGPTFGTKVSNYPPCPRPELIKGLRAHTDAGGIILLFQDDKVSGLQLLKDGQWIDVPPLKHSIVINIGDQLEVITNGKYKSVMHRVIAQTDGNRMSIASFYNPGSDAVIYPAPALVEKEADHEQKQVYPKFVFEDYMKLYAGLKFQAKEPRFEAMKAMETPLNLGPIATV

SEQ ID NO: 2249 - protein, 102 aa, Arabidopsis thaliana
  misc_feature (42)..(42): Xaa can be any naturally occurring amino acid
  misc_feature (53)..(53): Xaa can be any naturally occurring amino acid
  misc_feature (72)..(72): Xaa can be any naturally occurring amino acid
  misc_feature (82)..(82): Xaa can be any naturally occurring amino acid
FTRDHCSPPETTKAATGTLKSFTALLQSLTEQTILVSNVPLXTLYPLTTDLFXVTATKAQSKFSNRKLRGAXIGGEPTGGAXAETLAQGGIETILIQLLDGQ

SEQ ID NO: 2250 - protein, 151 aa, Thermoplasma acidophilum
MIIMKGYSMEIEGNHAKARIREADISLKDSVNIAHHLRGMPLSRAKEIIDAVINKTYAIPYFRYLDSVSHRPGVGPGRYPVKAAKAFKQLLENVENNAEFKGLNTDNLVIKHIAANKGRMIKKYTPKAYGRAGANFKDLINLEIIVTEGSE

SEQ ID NO: 2251 - protein, 560 aa, Arabidopsis halleri subsp. gemmifera
MASSTASISDPEAWKDLKGHVEDIKKTHLRDLMTDANRCQSMMMEFDGLLLDYSRQRATVETVDKLLNLAKAAQLTEKISRMFNGEHINSTENRSVLHVALRAPKDAVIKADGKNVVPEVWNVLDKIKEFSEKIRSGSWVGATGKPLKDVIAIGIGGSFLGPLFVHTALQTDPEALESAKGRQLRFLANIDPVDVARNINGLNPETTLVVVVSKTFTTAETMLNARTLREWITAALGASAVAKHMVAVSTNLALVEKFGIDPNNAFAFWDWVGGRYSVCSAVGVLPLSLQYGFSVVEKFLKGASSIDQHFQSTPIEKNIPVLLGLLSVWNVSFLGYPARAILPYSQALEKFAPHIQQVSMESNGKGVSIDGLPLPFETGEIDFGEPGTNGQHSFYQLIHQGRVIPCDFIGIVKSQQPVYLKGEVVSNHDELMSNFFAQPDALAYGKTPEQLQKENVSENLIPHKTFSGNRPSLSLLLLELTAYNVGQLLAIYEHRVAVQGFVWGINSFDQWGVELGKVLATHVRKQLHSSRTQGTTLEGFNYSTTTLLKRYLETSSEPQM

SEQ ID NO: 2252 - protein, 391 aa, Glycine max
MISSMKCTASSLTCSAFSNRKIPIARPQLVTLPTINNVEQNTGLSQLCSQKPLYLSSTENLALVKRRRETECQAYEADRSRPLEINIELPGEEAAQRFKIGLYFATWWALNVVFNIYNKKVLNAFPYPWLTSTLSLAAGSLMMLVSWATRVAEVPKVNLDFWKALFPVAVAHTIGHVAATVSMSKVAVSFTHIIKSGEPAFSVLVSRFLLGEAFPMPVYLSLLPIIGGCALAAVTELNFNMIGFMGAMISNLAFVFRNIFSKKGMKGMSVSGMNYYACLSIMSLLILTPFAIAVEGPKVWIAGWQTAVSQIGPNFVWWVAAQSVFYHLYNQVSYMSLDQISPLTFSIGNTMKRISVIVSSILIFHTPVQPINALGAAIAILGTFLYSQAKQ

SEQ ID NO: 2253 - protein, 399 aa, Fusobacterium nucleatum subsp. nucleatum ATCC 25586
MIYKIEDVLEDIKNGIPLIIVDDENRENEGDLFVAAEKATYESINLMATFARGLTCTPMTSEYAIRLGLDPMTARNTDAKCTAFTVSVDAKEGTTTGISIADRLTTIKKLANKNSVPSDFTKPGHIFPLIAKDKGVLEREGHTEATVDLCKICGLTPVSVICEILKDDGTMARMDDLEIFAKEHNLKIITIADLIKYRKKTEQLMKIDVVANMPTDSGTFKIVGFDNLIDGKEHIALVKGDVAGKENVTVRIHSECFTGDILGSLRCDCGSQLKTAMRRIDKLGEGIILYLRQEGRGIGLLNKLRAYNLQEEGMDTLDANLHLGFGADMRDYAVAAQMLKALGVKSIKLLTNNPLKINGLEEYGIPVVKREEIEIEANKINKVYLKTKKERMGHLLKIK

SEQ ID NO: 2254 - protein, 147 aa, Candida albicans
MSLKRINKELSDLGRDPPSSCSAGPVGDDLYHWQASIMGPPDSPYAGGVFFLSIHFPTDYPLKPPKIALTTKIYHPNINSNGNICLDILKDQWSPALTISKVLLSICSLLTDANPDDPLVPEIAHIYKQDRKKYEATAKEWTKKYAV

SEQ ID NO: 2255 - protein, 398 aa, Candida albicans SC5314
MTVEYETKQLTPAQVKIILDTVPILEEAGETLTQKFYQRMIGNYDEVKPFFNTTDQKLLRQPKILAFALLNYAKNIEDLTPLTDFVKQIVVKHIGLQVLPEHYPIVGTCLIQTMVELLPPEIANKDFLEAWTIAYGNLAKLLIDLEAAEYAKQPWRWFKDFKVTRIVQECKDVKSVYFTPVDKDLLPLPKPERGQYLCFRWKLPGEEFEISREYSVSEFPKENEYRISVRHVPGGKISGYIHNNLKVGDILKVAPPAGNFVYDPATDKELIFVAGGIGITPLLSMIERALEEGKNVKLLYSNRSAETRAFGNLFKEYKSKFGDKFQAIEYFSEDNNTDDKIVIDKAFNRKLTTDDLDFIAPEHDVYLVGPREFMKDIKEHLGKKNVPVKLEYFGPYDP

SEQ ID NO: 2256 - protein, 336 aa, Coxiella burnetii
MQIDPSVLCYGLGINDSARIFGTTTGLVEEFGEDRVFDMPTAENAMTGVGIGLAINGFRPVLSHCRLDFALLSLDQIINGAAKWYSLFAGTMPVPLTIRAIVGRGWGQGPTHCQSLQACFAHIPGLKVVMPSLAEDAYGLLLSSIFDDNPVIFIEHRWLHNIHVNEAEDSYRYLPLGQARKVIEGTDITVVAMSYMTIEALHAVKFLKTQGIHCELIDLRTIKPLDWETIYVSIRKTGRLLVLDTGFEFCSVASEIIAKASIDCFSSLLAPPKRLATPDYPVLTSPTLATPMYTYSDGIVRAVAEVLKLPVNVESLQKERDAKPRDVPGDWFGGPF

SEQ ID NO: 2257 - protein, 291 aa, Musa acuminata
MTDHVKWTSVESKTSTNAAPISSSSSSRSPSMASSSGAGTAVEHKRARDIRKHPVYRGVRMRAWGKWVSEIREPRKKSRIWLGTFATPEMAARAHDAAVLSVKGAPAAAAVLNFPELAGSLPRPASLSPRDVREAAARAAAMDMPRANAAALVVEDDELEEIVELPRLGQDLFGSAHLAGEFVFHDSISTASGALSFGASSKCPSCLLLHVLLLPSTAQLTRKERRNSVLLLARNRCKSISCLSPKRLSSRRNSWCSSRGTNSREQTAAIIPRLAFCSSLEDPTIIADAFH

SEQ ID NO: 2258 - protein, 267 aa, Amycolatopsis orientalis
MSYTRVRYEKKDHVACVTMDRPDVLNAMDRRMHTELAEIWDDVEADDDIRAVVLTGAGNRAFTVGQDLKERAQRNDAGEEESTFGSRGQAGHPRLTDRFTLSKPVVARVHGYALGGGFELVLACDIVIASEEAIFGLPEVQLGLIPGAGGVFRLPRQLPQKVAMGYLLTGRRMDAATALRYGLVNEVVPLDELDQCVAGWTDSLVRAAPLSVRAIKQAALRSLDLPLEEAFTASYPWEERRRRSEDAIEGVRAFTEKRDPVWTGHYM

SEQ ID NO: 2259 - protein, 317 aa, Cucumis sativus
MAVFPIINLENINGDGRAKILEQIEDACQNWGFFELVNHGIPHEFLDMVEKMTRDHDKKCMEERFKETVLSKGLEAAQAEVNDMDWESTFFLRHLPESNISQMSDLDEEYKKIMKEFAKKLENLAEELLDLLCENLGLEKGYLKNAFYGSKGPTFGTKVSKYPPCPKPDLIKGLRAHTDAGGIILLFQDDKVGGLQLLKDGDWIDVPPMRHAIVVNLGDQLEVITNGRYKSVMHRVLITQTSGTGRMSIASFYNPGSDAVIYPAPALVEKDEEKKEVYPKFVFEDYMKLYLGVKFQAKEPRFEAMKANANLGPMATA

SEQ ID NO: 2260 - protein, 410 aa, Porphyra yezoensis
MAFVGSTVTGVAGARAPTSKICSSRASFAQFSGMRSVNGARMLQPVQGADANDAFFAAVSTAAVPSASTAPTMKLKVAISGFGRIGRNFLRAWAAKSDTPLEVVCINDTSGVKTACHLLKYDSILGTFAGTVEAGEDSITINGKKVRVVSNRDPLQLPWAEMGVDIVIESTGVFVDKKGASKHLTAGAKKVLITAPGKGEGIQTYVVGVNDQDYTHATDDIVSNASCTTMCMAPFVKVLEDEFGIVKGTMTTTHSYTGDQRLLDAGHRDLRRARSAALNIVPTTTGAAQAVALVIPSMKGKLNGYALRVPTPNVSVCDVVVEVKRPTFKEEVNGAFLKAAQGPMKGILKYSDEPLVSSDFKGMVESTAVDVSMTTVVGDTMVKVLAWYDNEWSYSLRVLDLAEIMANKWE

SEQ ID NO: 2261 - protein, 150 aa, Brassica napus
VNPRYIPSLKATFTFPQSLGVLGGKPGASTYIVGVQEDNGFYLDPHDVQQVVTVNKETLDVVDTSSYHCNVLRYVPLESLDPSLALGFYCRDKADFDDLCHRASTLAEESKGAPLFTVTQTHSLVNHHSSCEFVEDREEEHGEEDDWQLL

SEQ ID NO: 2262 - protein, 400 aa, Candida albicans SC5314
MTVASASIINNYFESKPLTPEHIQIIIDSVPILEHLDVQLTEKFYKRLLKQNPEFKPFFNETHQKLLRQPRIMIHFLIQYAKNIQDLTPMIDFIKKIASKHVGLQVKPEHYPKLGQVLINVIINLFPKQLVHDEFIEAWTLAYQNLANLLIKLESEQYVEKPWYGFKQFKVTRLQRECSDVKSLYITPVDGSPIPKPKRGQYLCMRWLLPGEKHEITREYSISEYPKNNEYRITVRYIPGGKVSNYIHNNINVGDIVYSGPPCGDCVYESSSKNLVFLAGGNGVTALLPMIEAGLTEGRQVKLLYSNRSTDSRSFGKLFQSYKLQYGDRFQVVEFLSRGRTIDPIDKFYRRSLTLEDLDFIVPEDDVYLIGPRTYMKMIEDYLKDRNITVKLDYFGPREI

SEQ ID NO: 2263 - protein, 314 aa, Cucumis sativus
MEFPIINLEKLNGEERSSILAKIKDACENWGFFEVLNHGIDTEFLDKVEKLTKEHYKKCMEERFKEHIASKGLNDVVTEVNDVDWESTFFLRHLPVSNIADLPELSDDYKSVMKQFASKLQVLAELLLDLLCENLNLPKSYLKNAFHGSNGPTFGTKVSNYPPCPNPDLIKGLRAHTDAGGIILLFQDDKVSGLQLLKEGEWVDVPPVRHSIVVNIGDRLEVITNGKYKSVLHRAIAHREGEGRMSLASFYNPGSDAVIFPAPSLVAEEKNEIYPKFVFEDYMKLYAGLKFEAKEPRFEAMKGNNVKLDPIATV

SEQ ID NO: 2264 - protein, 441 aa, Cryptococcus neoformans var. neoformans
MDNTPRHLFQTPNNVYILQQPWQFVKELGQGAYGCVSSARNSSTGETCAVKKVTNVFQKKILTKRCLRELRLLHHFRGHKNITCLYDMDIVFDPPGSGQFREVYLYEELMEADLHAIIRSGQPLSDAHFQSFLYQTLCGLKYIHSANVLHRDLKPGNLLVNADCELKICDFGLARGFQPGAVQTDQGQAGFMTEYVATRWYRAPEIMLSFANYTSSIDMWSVGCILAELLGGKPIFKGEDYVDQLNKILNLLGTPTEDTLRRVGSPRAQDYIRSLPIKPRVKFGTLYPNASPLALDLLSKLLTFDPAKRYGCEEALEHPYLAVWHDPADEPLCEVPFDFSFEEEDSVSGMRDLILEEVRSFRYLVRQQTMPPVRKDSHELPPAPPAPQHPGAGVGPAFHEKRTAKAIWRNILGLHWRNSWRGRNYHRIIFVESVTVIGKHR

SEQ ID NO: 2265 - protein, 949 aa, Roseovarius nubinhibens ISM
MAFEPTDYLPYDFANRRHIGPSPEEMQEMLQVVGAGDLDDLIDQTVPKSIRQEVPLNFGKPKSERELMHFMRLTASKNKVMVNMIGQGYYGTVTPPAIQRNILENPAWYTAYTPYQPEISQGRLEALLNFQTMISDLTGLEVANASLLDEATACAEAMTMAQRVSKSKAKAFFVDRDCHPQNIAVIQTRAEPLGIEVIVGNPDKMEASEVFGAIFQYPGTYGHVRDFTDYIAALHEHKAIAVMSADPLALTLLKEPGEMGADIAVGSTQRFGVPMGYGGPHAAYMACKDAYKRSMPGRIIGVSIDAHGNRAYRLSLQTREQHIRREKAMSNVCTAQALLAVMASMYAVFHGPKGLKAIAQRIHRKTVRLAKGLEEAGFKVDPQVFFDTITVDVGPLQAAVLKSAVDEGINLRRVGESRVGISLDEATRPKNIEAVWRAFGITRADEDFTPEYRVPENMHRTSAYLTHPIFHMNRAETEMMRYMRRLADRDLALDRAMIPLGSCTMKLNSAAEMMPVSWREFSRLHPYCPVDQAEGYKVMIDDLSAKLCEITGYDAISMQPNSGAQGEYAGLLTIAAYHRAQGEGHRNVCLIPMSAHGTNPASAQMVGWKVVPVKSAETGDIDLADFRAKAEQYAETLAGTMITYPSTHGVFEEHVKEITAITHEHGGQVYIDGANMNAMVGLARPGDIGGDVSHLNLHKTFCIPHGGGGPGMGPIGVKAHLAPYLPGHPSTGGGEGPVSAAPFGSPSILPISWAYTLLMGGEGLTQATRVAILNANYIAKRLEGAYEVLYRGRNDRVAHECIIDTRPFEESAGVTVDDIAKRLIDNGFHAPTMSFPVPGTLMVEPTESETKAELDRFCDAMLAIREEIRDIEEGRIDAANNPLKHAPHTVEDLVGEWDRPYSREQACFPAGAFRVDKYWPPVNRVDNVYGDRNLVCTCPPMEEYAEAAE

SEQ ID NO: 2266 - protein, 274 aa, Sulfitobacter sp. EE-36
MTDVKTKDTKDIWARDFDYISVKRDGHVLEITIDRADRYNALHGGAHQELHDIFDGYEQDPDLWVAIITGAGDKAFCSGNDLKATSEGQNIEPASSGFGGLTDRWGREKPVIAAVNGVAMGGGCEIVLASDIAVADAHAKFALPEVKVGLFAAAGGVQRLTRQIGRKAAMELILTGRAITADRACELGIINRVASEGETAMDIAREIAKEITMVSPTAVRASKRVLNALEEDIERLPEAFAGNTAEFDVVLKSNDGKEGVKAFVEKRAPNWTNS

SEQ ID NO: 2267 - protein, 154 aa, Beta vulgaris
MESNGKGVSIDGVVLPFEAGEIDFGEPGTNGQHSFYQLIHQGRVIPCDFIGIAKSQQPVYLKGEVVSNHDELMSNFFAQPDALAYGKTQEELQKENVSPDLVPHKTFSGNRPSISLLLPSLTAYNVGQLLAIYEHRIAVEGFIWGINSFDQWGV

SEQ ID NO: 2268 - protein, 989 aa, Prochlorococcus marinus subsp. pastoris str. CCMP1986
MESMKQFKNNNVDLISNNDPLDKNRALIEDLWESVLREECPDDQANRLIQLKELSYSNKVEEYSPKNFKTEIVDIVNSMDLAESISAARAFSLYFQLVNILEQRVEEDRYIQSFTNQNVKKSHDNLDPFAPALARQNAPVTFKELFFRLRRLNVPPGKLEELLQEMDIRLVFTAHPTEIVRHTIRHKQTRVANLLQKIQVEKFLTIEDIKSLKIQLKEEIRLWWRTDELHQFKPSVIDEVDYALHYFQQVLFDAMPQLRGRISSALTENYPDVQMPTESFCTFGSWVGSDRDGNPSVTPEITWRTACYQRQLMLERYIKATSNLRDQLSVSMQWSQVSSSLLESLETDRVKFPEIYEARATRYRSEPYRLKLSYILEKLRLTHERNNLLSEGGWKLSLERESDNKNLELVEKLHYKSVDEFTYDLELIKNSLNSTDLTCEAVNKLLTQVHIFGFSLASLDIRQESTRHSDAIQELTNYLELPKQYDQMSEKDRIQWLNEELNTKRPLIPSEVNWNKSTEETFSVFKMVKRLQEEFGSRICHSYVISMSHSASDLLEVLLLAKEMGLIDQGSQKSTLLVVPLFETVEDLQRAPDVMEQLFQLDFYKSLLPKVGESFKPLQELMLGYSDSNKDSGFLSSNWEIHRAQIALQNLSSRNNILLRLFHGRGGSVGRGGGPAYQAILAQPSGTLKGRIKITEQGEVLASKYSLPELALYNLETVTTAVIQNSLVNNRLDATPEWNDLMTRLAETSRIQYRKLVHENPNLLTFFQEVTPIEEISKLQISSRPARRKKGAKDLSSLRAIPWVFGWTQSRFLLPSWFGVGTALSVELKSDPEQIELLRVLHQRWPFFRMLISKVEMTLSKVDLEVAKYYVDTLGSKENSKSFEEIFDVISKEYNLTKSLVLEITGKNKLLESDRDLRSSVNLRNKTIIPLGFLQVSLLRRLRDQTRQPPISEFIEDRIESKRAYSRSELLRGALLTINGIAAGMRNTG

SEQ ID NO: 2269 - protein, 69 aa, Beta vulgaris
MAAANGVKRVWVGQNGLLSTPAVSAVIRERVGNAGSKASGAFILTASHNPGGPNEDFGIKYNMENGGPA

SEQ ID NO: 2270 - protein, 1717 aa, Magnaporthe grisea 70-15
MAPAPPPLPTRFPCWCRAVYSWGGESKRDLGFIEGDLIECLNAGDGSWWTGRLRRDRRMVGVFPSNFVELLPDNFRPMSRSTSPLPQNNTPSPKDTPQKSRTFRKPFEAYAKAPHYTTAKQPETYKESPTHSRDASATSVAARAPSPAPPRAHHQSSHHQSSHRAVSPAPTHRYDDMRRAASPAPSHRYDDIRRAASPAPTQRYNDMRRAASPAPSHRYDDMRRAASPAPLQRYEGMRRAASPAPLQRYEEMRRAVSPGGFDAFGSRAPSPAPSDIAYKPYRPSVGSFDSAQQLNLQDGPESPPPPAPPPHRHVPRHNSNMSYDSQNGAGLERHVSNLSYDNRQAGLSRHGSNVQYDHQQPEIEGSRHGSNVPYGLRTTGYHTPRAPSPCPPSPGLGRGGMTPSPLREAMDGVMEQLGALGLPPQDPSPEPTTFDPWSPESFDMVHQQSRRRNNKKEQLRPQTSMGIARADSGYETYSGGSSQGGSQENTLNNVGHDPDELGLPQLSNYVERMETRLRNMHNQSSSRVDDEMAPPPPPKSQAYERPKSSMGGSIHGSSGHSGSQPKLRHRKSAYDVGRQVLGRTFTTKTNSTSTSSGNQSTTTQSTSHSLMSGASAGGISATSAGSLARKNQHRRAQSAMSMREPELDRPETPFTGVTYHSSHASDAQVTRPKSQVAYHNDDPMANIGGLGGLTTPKTKKSNFFKKILESAKTGVASTRGSIATAGAGSMNSPRGRSTPNGFIGIAGGLAGPGAGRDTAREMGLGAGVDWVQIRRDVNRSNTLSRNEGSERRERCQMMDYPALDPVDELYGSIDGDEGADGMAVAEPMNYAAINLSQVDKNSRFISGLPPTTTSITLATTYVCRPYRSDVQRLRAIFTWVAEKICWEEDFEGQIDTRRSIASKRGCAEEYAVLVYEMCAAVGIHCEVVRGYLKSPGEVPEMGLMPRSNHWWNAVLVDNEWRMIDACLASPSNPQRGLYSSAGSGVADAFWFLTRPTEICWTHIPEHHGQQHICPPVAHEILLNLPCASPPYFRNGLHLVDYNTSLTRIEDLEMVHVKFTVPEDVEVAAEVEVRAFSRDADGDIFESGDVVKKRALAQADWVGGEKRYTVKALLPGDEGTGVLKVYAGKRGLMHSIKDIPHPVAFAVPIMHTGENPPYEFVTRHPTPHAQRHDIYVVQPQCQRLALNNTFVFAIRQHPSSLGTGSAMTPSSNPGGASPIPFARPGSAMSMTSSSAAGSMPSSASTNGSGVVSGKKPAKLAIQTPGGKILRLMRKEERRNGAVGVGGRTAGSDEDASDGGTWETIIKCSEKGVWRGLVLADRTARWCVFAEWAGDGRLRPATIMTSEQQPPSPPTASQKRHAFSWFTDANYLSINQLKTLPEPKSDFTGKTVIVTGGNSGLGREAARYFARLGAAKVILACRDTAKGEVARADIEVSTRSSRPPSAAGVRLAVEVWQVDMSSGSSVHDFCARVERELPRLDSLVLNAGVAIGAFVECEGGWESSVAINVIGTFLMAVLCLPIMRRTAAQHNVAPTIAVVASEAHVFASFAERKRQGLIFDAFKSAADMNEDRYNVTKLLDVLLARELAARLGPDSPVVVNALNPGLCQSELFRHCPFPLSALLRLGLMILGRKTEVGSRTLVAAAAAGRETHGKYMDSCELANESAFVRSDEGRASGVRVFDELMGIMEGLAPGARGNLNASTTTSMATAPASTAQASS

SEQ ID NO: 2271 - protein, 307 aa, Robiginitalea biformata HTCC2501
MEFIDYYKVLGVDKKASESEIKKAYRKLARKYHPDLNPDDAGSEIKFKQVNEAHEVLSDPEKRKKYDKYGKDWQHAEEFEKARKARGSRSGPQSGEPFGGDPFGGYTYSGGDPNDFSDFFESMFGGFRGEGPSAGRGFRGPDLRAGLELDLRDVYETHQRTLTVGGKNIRITIPAGIEDGQTIRIRGYGGKGRNGGPDGDLYITFALRNSTPFRREGANLYRTVEIPLTTAVLGGTITVDTFDGKAKMNVKPLTRNDTRVKLKGKGFPVYKKEGRFGDLVLTYQVSLPEKLTDRQRQLFEELKKTNL

SEQ ID NO: 2272 - protein, 560 aa, Arabidopsis halleri subsp. gemmifera
MASSTALISDTEAWKDLKGHVEDIKKIHLRDLMTDANRCQSMMMEFDGLLLDYSRQRATLETVDKLLNLAKAAQLTEKISRMFNGEHINSTENRSVLHVALRAPKDAVIKADGKNVVPEVWNVLDKIKEFSEKIRSGSWVGTTGKPLKDVIAIGIGGSFLGPLFVHTALQTDPEALESAKGRQLRFLANIDPVDVARNINGLNPETTLVVVVSKTFTTAETMLNARTLREWITAALGASAVAKHMVAVSTNLALVEKFGIDPNNAFAFWDWVGGRYSVCSAVGVLPLSLQYGFSVVEKFLKGASSIDQHFQSTPIEKNIPVLLGLLSVWNVSFLGYPARAILPYSQALEKFAPHIQQVSMESNGKGVSIDGLPLPFETGEIDFGEPGTNGQHSFYQLIHQGRVIPCDFIGIVKSQQPVYLKGEVVSNHDELMSNFFAQPDALAYGKTPEQLQKENVSENLIPHKTFSGNRPSLSLLLPELTAYNVGQLLAIYEHRVAVQGFVWGINSFDQWGVELGKVLATHVRKQLHSSRTQGTTLEGFNYSTTTLLKRYLETSSEPQM

SEQ ID NO: 2273 - protein, 411 aa, Helicobacter hepaticus ATCC 51449
MRRVVVTGLGMINSLGLNKSDSFKAIINGQCGIKRISCFDVENFPVKIAGEITDFNVEEVLDPREVKKADRFIQLGLKAAKEAMSECGLLEGNVVNMSLSERFGVSSGAGIGGLGNIEKNSVVCEQKGPRRINPFFIPSALVNMLGGFISIEYALKGPNLASVTACAAGTHAISEAAKTIMLNGADAMLVIGSESSICPVGIGGFAAMKALSDRNDEPLKASRPFDKERNGFVMGEGAGALVLEEYESAKKRGAKIYAELIGFGESGDANHITTPAPQGEGALRAIKAALKMANKPVGYVNAHGTSTAYNDLYETMALKAAFGSKESVPPVSSTKGQIGHCLGAAGAIEAVISIMAMQEGILPPTINQENPDPECDLDYIPNTAREAKVDVVMSNSFGFGGTNGVVIFSKI

SEQ ID NO: 2274 - protein, 171 aa, Citrus maxima
HNLLFILGFNAFGGFSIFLPKLINAIASDTTGLQAKLRSEVKEKCGTSALTFESVKSLELVQSVVCETLRLNPPVPLQFARARKDFQLSSYDSVYDIKKGELLCGYQPLVMRDSKVFDDAESFKAERFMGDKGSELLSYLYWSNGPQTGTPNDMNKQCAGKDYVTLVACLT

SEQ ID NO: 2275 - protein, 560 aa, Arabidopsis halleri subsp. gemmifera
MASSTALISDTEAWKDLKGHVEDIKKTHLRDLMTDANRCQSMMMEFDGLLLDYSRQRATVETVDKLLNLAKVAQLTEKISRMFNGEHINSTENRSVLHVALRAPKDAVIKADGKNVVPEVWNVLDKIKEFSEKIRSGSWVGATGKPLKDVIAIGIGGSFLGPLFVHTALQTDPEALESAKGRQLRFLANIDPVDVARNINGLNPETTLVVVVSKTFTTAETMLNARTLREWITAALGASAVAKHMVAVSTNLALVEKFGIDPNNAFAFWDWVGGRYSVCSAVGVLPLSLQYGFSVVEKFLKGASSIDQHFQSTPIEKNIPVLLGLLSVWNVSFLGYPARAILPYSQALEKFAPHIQQVSMESNGKGVSIDGLPLPFETGEIDFGEPGTNGQHSFYQLIHQGRVIPCDFIGIVKSQQPVYLKGEVVSNHDELMSNFFAQPDALAYGKTPEQLQKENVSENLIPHKTFSGNRPSLSLLLPELTAYNVGQLLAIYEHRVAVQGFVWGINSFDQWGVELGKVLATHVRKQLHSSRTQGTTLEGFNYSTTTLLKRYLETSSEPQM

SEQ ID NO: 2276 - protein, 421 aa, Mycobacterium smegmatis
MALVVQKYGGSSVADAERIRRVAERIVETKKAGNDVVVVVSAMGDTTDDLLDLARQVSPAPPPREMDMLLTAGERISNALVAMAIESLGAQARSFTGSQAGVITTGTHGNAKIIDVTPGRLRDALDEGQIVLVAGFQGVSQDSKDVTTLGRGGSDTTAVAVAAALDADVCEIYTDVDGIFTADPRIVPNARHLDTVSFEEMLEMAACGAKVLMLRCVEYARRYNVPIHVRSSYSDKPGTIVKGSIEDIPMEDAILTGVAHDRSEAKVTVVGLPDVPGYAAKVFRAVAEADVNIDMVLQNISKIEDGKTDITFTCARDNGPRAVEKLSALKSEIGFSQVLYDDHIGKVSLIGAGMRSHPGVTATFCEALAEAGINIDLISTSEIRISVLIKDTELDKAVSALHEAFGLGGDDEAVVYAGTGR

SEQ ID NO: 2277 - protein, 354 aa, Silicibacter sp. TM1040
MLDATSTATRPDNAPADHPPVKAEKVGILLANLGTPDHYSYWPMRRYLNEFLSDKRVIDYPSWKWQPLLQLIILTKRPFASGEAYKSIWNHERGESPLMTITKDQTNAMAKAMEELYGDQVMVDFCMRYGNPSTKSKVEKMIAAGCRKILFVPLYPHYAGATSATANDQFFRVLMEQPWQPAVRTIEPYFDQPEYIDALARSVEDAYAKLDKTPDILVCSYHGMPKRYLMQGDPYHCQCQKTTRLLRERLGWDESKIMTTFQSVFGPEEWLRPYTVEHVAELAKQGKKNIAVIAPAFSADCIETLEEINEEIFESFEHAGGEEFTYIPCLNDSEAHIAALSSVIRNNLKGWLEA

SEQ ID NO: 2278 - protein, 101 aa, Robiginitalea biformata HTCC2501
MKASFSDLIRSENPVLVDFYADWCGPCKTLAPILKEVKGELGDRLRVVKVDVDRNQEVAGRYQVRGVPTMILFKNGKVLWRQSGVLSKPDLLRALEPLLAS

SEQ ID NO: 2279 - protein, 184 aa, Yersinia pestis
MLDKIIRIATRQSPLALWQAHYVQHLLQANHPGLQIELVPMVTRGDIILDTPLAKVGGKGLFVKELELALLDGRADIAVHSMKDVPIAFPEGLGLVTICEREDPRDAFVSSHYAHLDDLPAGSVVGTSSLRRQCQLRERRPDLIIRDLRGNVGTRLAKLDNGDYQAIILAVAGLKRLGLGKPNS

SEQ ID NO: 2280 - protein, 560 aa, Arabidopsis halleri subsp. gemmifera
MASSTALISDTEAWKDLKGHVEDIKKTHLRDLMTDANRCQSMMMEFDGLLLDYSRQRATVETVDKLLNLAKAAQLTEKISRMFNGEHINSTENRSVLHVALRAPKDAVIKADGKNVVPEVWNVLDKIKEFSEKIRSGSWVGATGKPLKDVIAIGIGGSFLGPLFVHTALQTDPEALESAKGRQLRFLANIDPVDVARNINGLNPETTLVVVVSKTFTTAETMLNARTLREWITAALGASAVAKHMVAVSTNLTLVEKFGIDPNNAFAFWDWVGGRYSVCSAVGVLPLSLQYGFSVVEKFLKGASSIDQHFQSTPIEKNIPVLLGLLSVWNVSFLGYPARAILPYSQALEKFAPHIQQVSMESNGKGVSIDGLPLPFETGEIDFGEPGTNGQHSFYQLIHQGRVIPCDFIGIVKSQQPVYLKGEVVSNHDELMSNFFAQPDALAYGKTPEQLQKENVSENLIPHKTFSGNRPSLSLLLPELTAYNVGQLLAIYEHRVAVQGFVWGINSFDQWGVELGKVLATHVRKQLHSSRTQGTTLEGFNYSTTTLLKRYLETSSEPQM

SEQ ID NO: 2281 - protein, 560 aa, Arabidopsis halleri subsp. gemmifera
MASSTALISDTEAWKDLKGHVEDIKKTHLRDLMTDANRCQSMMMEFDGLLLDYSRQRATVETVDKLLNLAKAAQLTEKISRMFNGEHINSTENRSVLHVALRAPKDAVIKADGKNVVPEVWNVLDKIKEFSEKIRSGSWVGTTGKPLKDVIAIGIGGSFLGPLFVHTALQTDPEALESAKGRQLRFLANIDPVDVARNINGLNPETTLVVVVSKTFTTAETMLNARTLREWITAALGASAVAKHMVAVSTNLALVEKFGIDPNNAFAFWDWVGGRYSVCSAVGVLPLSLQYGFSVVEKFLKGASSIDQHFQSTPIEKNIPVLLGLLSVWNVSFLGYPARAILPYSQALEKFAPHIQQVSMESNGKGVSIDGLPLPFETGEIDFGEPGTNGQHSFYQLIHQGRVIPCDFIGIVKSQQPVYLKGEVVSNHDELMSNFFAQPDALAYGKTPEQLQKENVSENLIPHKTFSGNRPSLSLLLPELTAYNVGQLLAIYEHRVAVQGFVWGINSFDQWGVELGKVLATHVRKQLHSSRTQGTTLEGFNYSTTTLLKRYLETSSEPQM

SEQ ID NO: 2282 - protein, 939 aa, Ashbya gossypii ATCC 10895
MTLIDGKAIAAEIRGEIAEEIARLCADGLFQAKLTIFQVGERHDSSTYVRMKRRAAAEAGIEVEFVQLGADVDEEEVLAAIDARNADETVHGILVQLPLPPGMDEERVTSRVAPEKDVDGFGSYNIGELNKRHGRPHFHPCTPKGIIELLRRMDVQIAGANVVVLGRSDIVGAPVACLLRALDATVTVLHSRSRDIPGYVGRADIVVVAIGQPEFVKGAWFTNPDAVVIDVGTNFVEDSTRKTGYRCVGDVEFGVASEKVRLITPVPGGVGPMTVAMLMQNTLDAAKKCHSAPRKLSPLPLQLQKPVPSDYEISRSQVPKNIAVVAREAGLLPSEVELYGSVKAKVKLDTLDRLAHRENGKYVLVTGITPTPLGEGKSTTTVGLVQALAAHLDKVAFATVRQPSMGPTFGIKGGAAGGGYSQVIPMDEFNLHVTGDIHAISMANNLLAAAIDTRMFHEATQKDAALYKRLVPEKNGTRKFTSTMLRRLQKLGIHKTDPNSLTESEIARFARLDIDADTITWRRVVDCNDRFLRGITVGEAPTERGYKRQTGFDISVASECMAILALADSLHDLRERLGRIVVAASRNGEPITCEDIGCAGAMAALLKDAIKPNIMQTLEGTPVFVHAGPFANISIGANSVLADKIALKLAGVDPNWSEAEKKKRQGYVVTEAGFDFTMGGERFLNIKCRASGISPDVVVIVATVRALKVHGGGPEVKAGAPLPSAYLNEDVDLLRKGCANLAKHIANARTYNLPVVVGINRMSSDTEREHEVIREEAIKAGAFDAIVSNHWEEGGQGAVKLAEGVIRATEECRPEFHYLYDTEGPSIEDKISTIAKTMYGAAEVEFLPEARKKIELYTKQGFNHLPICIAKTQYSLSHDANLKGVPTGFKFPVRDIRASIGAGYLYALAAEIQTIPGLPTHCGFMNIEINDKGEIDGMF

SEQ ID NO: 2283 - protein, 320 aa, Salmonella enterica subsp. enterica serovar Paratyphi A str.
MRQTKTGILLANLGTPDAPTPEAVKRYLKQFLSDRRVVDTPRLLWWPLLRGVILPLRSPRVAKLYQSIWMDGGSPLMVYSREQQQALAARLPDTPVALGMSYGSPSLESAVDELLASDVDHIVVLPLYPQYSCSTVGAVWDELGRILARKRRIPGISFIRDYADDGAYIDALAKSARESFARHGEPDVLLLSYHGIPQRYADEGDDYPQRCRDTTRELVSALGLPPEKVMMTFQSRFGREPWLTPYTDETLKMLGEKGTGHIQVMCPGFAADCLETLEEIAEQNREIFLEVGGKKYAYIPALNATPEHIDMMLKLTAPYR

SEQ ID NO: 2284 - protein, 379 aa, Aspergillus nidulans FGSC A4
MAEFVRAQIFGTTFEITSRYTDLQPVGMGAFGLVCSARDQLTAQPVAVKKIMKPFSTPVLSKRTYRELKLLKHLRHENIISLSDIFISPLEDIYFVTELLGTDLHRLISSRPLEKQFIQYFLYQIMRGLKYVHSAGVVHRDLKPSNILINENCDLKICDFGLARIQDPQMTGYVSTRYYRAPEIMLTWQKYDAKVDVWSAACIFAEMLLGAPLFPGKDHVNQFSIITELLGTPPDDVIQTICSENTLRFVKSLPKREPQDLAKLPKFLALVHPDKKPEEDEDYKNTINLLKAMLVYNPKDRISAEAALAAPYLAPYHDETDEPVAEEKFDWSFNDADLPVDTWKIMMYSEILDFHNIDQGGDINPALVEGAGLNQQGFQ

SEQ ID NO: 2285 - protein, 163 aa, Ashbya gossypii ATCC 10895
MTAENGLPGPWAVKFSKSRKREYYYNPETKESQWEVPADTDSEQLARHLAEHPVQVRCLHLLIKHAGSRRPASHRNEHITLDKAAAVAELEQYAERYRQGERFEELARERSDCSSYKRGGDLGTFGRGEMQPSFEKVAFALPVGGVSDVVESDSGVHLIKRVA

SEQ ID NO: 2286 - protein, 108 aa, Saccharophagus degradans 2-40
MSEAIVQVSDASFEQDVLSSDIPVLVDYWAAWCGPCKMIAPVLDELAKEYEGKIKICKMDVDANKETPAKYNIRGIPTLIMFKGGNAEGTKVGALSKAQLKEFIDASL

SEQ ID NO: 2287 - protein, 313 aa, Proteus mirabilis
MPKSTIRIATRQSPLAMWQALYVKEQLQIAHPSLVVELVPMVTKGDIILDTPLAKVGGKGLFVKELELALLSSRADIAVHSMKDVPIDFPEGLGLVTICEREDPRDAFVSNHYDSLEQLPAGSVVGTSSLRRQCQLKALRPDLIIRDLRGNVGTRLSKLDNGDYDAIILAVAGLKRLKLTERIRSSLSAEQSLPAVGQGAVGIECRLDDHDTQALLAALNHADTATCVKAERAMNTRLEGGCQVPIGSYAIWQNDKIWLRALVGAPDGKTILRGERLVSPEDAEQAGISLAEELLDKGAREILTAVYQGNTAI

SEQ ID NO: 2288 - protein, 198 aa, Amaranthus tricolor
ADIGGKGLFTKEIDEALLNNEIDIAVHSMKDVPTYLPDKIILPCNLEREDVRDAFISTTASSLADLPAGSVVGTASLRRKSQLLHRYPSLEVLDNFRGNVQTRLRKLNEGLVQATLLALAGLKRLNMTENVSSVLSIDDMLPAVAQGAIGIACLQDDDKMANYLALLNHEETQLAVACERAFLETLDGSCRTPIAGYA

SEQ ID NO: 2289 - protein, 158 aa, Geobacillus kaustophilus HTA426
MSVYEFSVKTIRGEEQPLSAYRGKVLLIVNTASRCGFTPQYKELQELYDEYRDRGFVVLGFPCNQFGGQEPGTEAEIEQFCQLNYGVTFPLFAKVDVNGDHAHPLFQYLKEEAPGALGTKAIKWNFTKFLVDRHGRVVARFAPQTKPSELKEDIEKLL

SEQ ID NO: 2290 - protein, 581 aa, Schizosaccharomyces pombe
MFLKYILASGICLVSLLSSTNAAPRHLYVKRYPVIYNASNITEVSNSTTVPPPPFVNTTAPNGTCLGNYNEYLPSGYYNATDRPKIHFTPSSGFMNDPNGLVYTGGVYHMFFQYSPKTLTAGEVHWGHTVSKDLIHWENYPIAIYPDEHENGVLSLPFSGSAVVDVHNSSGLFSNDTIPEERIVLIYTDHWTGVAERQAIAYTTDGGYTFKKYSGNPVLDINSLQFRDPKVIWDFDANRWVMIVAMSQNYGIAFYSSYDLIHWTELSVFSTSGYLGLQYECPGMARVPVEGTDEYKWVLFISINPGAPLGGSVVQYFVGDWNGTNFVPDDGQTRFVDLGKDFYASALYHSSSANADVIGVGWASNWQYTNQAPTQVFRSAMTVARKFTLRDVPQNPMTNLTSLIQTPLNVSLLRDETLFTAPVINSSSSLSGSPITLPSNTAFEFNVTLSINYTEGCTTGYCLGRIIIDSDDPYRLQSISVDVDFAASTLVINRAKAQMGWFNSLFTPSFANDIYIYGNVTLYGIVDNGLLELYVNNGEKTYTNDFFFLQGATPGQISFAAFQGVSFNNVTVTPLKTIWNC

SEQ ID NO: 2291 - protein, 313 aa, Gloeobacter violaceus PCC 7421
MEYRDYYEILGVPKSADEQQIKSTYRKLARQFHPDLNPGDKQAEEKFKTISEAYEVLSDPSKRSRYDQYGRYWQQAGRSGGTPAGGAAPAGAGVGGFEGFDFDFSRFGSFDEFIDSLMGNLRGSGGERAARANVRTTQRPGRSEDVEMSLELTLEEALNGTKKRVRTATGKVVEVNIPAGVHEGTKVRVAGEGSGRGDLFLVVKLKTHPFFAVDGDDLLCEVPLTPAEAALGTKVEVPTLTGRVRVTIPAGTSTGRTLRLAGRGLPRRGGGRGDQLVKIRIEVPTALSSEERDLYEKLSRTESFRPRARFDSQ

SEQ ID NO: 2292 - protein, 400 aa, Arabidopsis thaliana
MSVHVKEEPVLVPNCDVENTELAVFNGNGESELENFGTCVDEITDRVNQLEQKVVEVEHFYSTKDGAAQTNTSKSNSGGKKIAISQPNNSKGNSAGKEKSKGKHVSSPDLMRQFATMFRQIAQHKWAWPFLEPVDVKGLGLHDYYKVIEKPMDLGTIKKKMESSEYSNVREIYADVRLVFKNAMRYNEEKEDVYVMAESLLEKFEEKWLLIMPKLVEEEKKQVDEEAEKHANKQLTMEAAQAEMARDLSNELYEIDLQLEKLRESVVQRCRVRNRVFGVVLEINRKLSTQEKKGLSAALGRLSPEDLSKALKMVSESNPSFPAGAPEVELDIDVQTDVTLWRLKVFVQEALKAANKSSGGTNAQNNNNTGTGEINKNNAKRRREISDAINKASIKRAKKA

SEQ ID NO: 2293 - protein, 251 aa, Arabidopsis thaliana
MVNATVARNIAGICGNVISLFLFLSPIPTFITIYKKKKVEEYKADPYLATVLNCALWVFYGLPMVQPDSLLVITINGTGLAIELVYLAIFFFFSPTSRKVKVGLWLIGEMVFVGIVATCTLLLFHTHNQRSSFVGIFCVIFVSLMYIAPLTIMSKVIKTKSVKYMPFSLSLANFLNGVVWVIYALIKFDLFILIGNGLGTVSGAVQLILYACYYKTTPKDDEDEEDEENLSKVNSQLQLSGNSGQAKRVSA

SEQ ID NO: 2294 - protein, 265 aa, Arabidopsis thaliana
MYQDSGLMLRYMQNCPPDIQQFEDLFKSYKLSDEMNNTFVESSNISEYDIGEESDLFRAPDPILEEPILAVDPLSAALTMISCGEDTSQGLCELPDLGSLQSGQQLLDKAFYECEQDLMMKSAMDSPFSDVLDIKNISVVTTINENQDMQKSVSSGNLSSMDWSHAQQETVMIQNFPDFDFGYGMRRAFSEGDIQQKLGAGLVQSPLDRIIVSCTSEDRREKLSRYKNKKSRRNFGRKIKYACRKALADSQPRVRGRFAKTEERK

SEQ ID NO: 2295 - protein, 424 aa, Rickettsia akari str. Hartford
MTTMLVIVIIIMIALSALFAATETAITASSPGKIHKLKITGNKRAKTVLEVLKKKEKVIGTLLIGNSLINTVCTTIATTLFISFLGDNGPIVASGVMAFIIIVFAEVVPKAIAVAKPEQLALKMASTIVIFLKLFKPINIALDYITKIFCFIFRINLSPQISGTEEVRGVIEHYHQEGGVYKSDRNMLGGILDIRNMTVSEIMTHRSSIIALNIDLPHEVIIKTLLSGTHTRIPLWQDNRDNIIGILNLKDLLKALYENNNDTKKIDINTLLTPPWFIHENALVVDQLHAFRERNNHFACVVDEYGDLQGIITLEDVIEEIVGPITDEHDRLNNEIIQKSNTEFIIKGTTTIRDINRELDWNLSDEDANTIAGLIIHKIARIPNQGEVIEIFNFKIIILKKIANKIDSVKITVLPTTEEIISSE

SEQ ID NO: 2296 - protein, 403 aa, Rhizobium leguminosarum
MDRRVVITGLGGLCGLGTDASSIWTENARRPSAIGPISNSEIHELKGMIGTEIKVLPHNDIDRKQLISMDRFSLLAVLAAKQAMLQAGLSCNEGNAHRFGATVGVGFGGWDATEKAYRTLLLGGATRTELFTGVKAMPSAAACQVSMNLGLRGPVFGATSACASANHAIASAVDQIKLGRADVMLAGGSDAPLVWIVLKAWEAMRVLAPDTCRPFSADRKGLVLGEGAGMAVLESYEHAAARGATMLAEVAGIGLSADAYHIAAPAVHGPEAAMRACLVDASLNAEDVDYLNAHGTGTKANDQIETTAIKRVFGDHARSMSISSTKSTHAHCLGAASALEMIACVMAIQEGVVPPTANYREPDPDCDLDVTPNVPRERKVRVAMSNAFAMGGMNAVLAFKQVP

SEQ ID NO: 2297 - protein, 123 aa, Desulfovibrio gigas
MAKNNILIVDDSKTVRNLVAFILKKEGYKVTAAENGLDGLEKLYSMEQVDLIISDINMPKMDGFTFIRHVREQVLYRDLPIVVLSTEGQEKDIQQGLQLGANLYMVKPAQPEKLLRNVKMLLG

SEQ ID NO: 2298 - protein, 309 aa, Legionella pneumophila str. Lens
MSAKIIRIATRQSPLALWQANHVREMLVKQWPNLSIELLPMITSGDRFLKDKLLSAGGKGLFVKELEEALLDKRADLAVHSTKDMPAQLPDGLSLAAICKRDNPFDALISPQFKSLDALPKNAIIGTSSLRRQSQLLAYNPNLQVKTLRGNIHTRLSKLESGEYQAIILAAAGLERMGLAHHITQLIPDDIMLPTCAQGALCIECRTDDLEIQELIYGLNDPISALCVHTERRVNAKLGGNCHIPFAVYCTITAENLLLLRAKVLNLDGSQMIDDEQQGKIEEAEIIADRCTESLMTKGAMTLLSTIPS

SEQ ID NO: 2299 - protein, 481 aa, Francisella tularensis subsp. tularensis SCHU S4
MSENLDKIIEQDYEHGFVTNIEAETIEAGLNEDVIRLISARKNELEFLLEWRLKAYHKWLEMKSPKWADLNYPPIDFQAISYYSSPKSLKNHPKSLDEVDPEIIETYNKLGIHLHEQEMLAGVRNIAVDAVFDSVSVVTTFKEKLAEAGVIFCPISEAVQKYPELVQKYLGSVVPQGDNFFAALNSAVFSDGSFVYIPKGVTCPMELSTYFRINAMNTGQFERTLIIADEGSYVSYLEGCTAPMRDENQLHAAVVELVALDGAEIKYSTVQNWYPGDKDGKGGIYNFVTKRGVCHKNAKISWTQVETGSAITWKYPSVVLRGDNSIGEFYSVALTRHAQQADTGTKMIHLGKNTKSTIISKGISAGKASQAYRGLVRISPNAANARNFSQCDSLLIGHNCEAHTYPYIENKSNSSQIEHEATTSKISDDQLFYCKQRGLSEEDAIAMIVNGFCKEVFKKLPLEFAVEAQKLMEVSLEGAVG

SEQ ID NO: 2300 - protein, 447 aa, Prochlorococcus marinus subsp. marinus str. CCMP1375
MLRVAVIGGGPSGSCTAEILAKAGIKTWIFERKLDNAKPCGGAIPLCMVSEFELPDSIIDRKVRNMRMISPSNREVDISLDKVYGETENEYIGMCRREVMDAFMRNRAAELGAILVNGLVTKIETGTNRQGPYTLNYSDYSSGDAKGEAKTLEVDLIVGADGANSRVAKAMDAGDYNVAIAFQERIKLPEKEMSYYEDLAEMYVGTDVSPDFYGWVFPKFDHVAVGTGTMQKNQALIKDLQEGVRERAQKRLVNGEVIKVEAHPIPEHPRPRRVVGRMALVGDAAGYVTKSSGEGIYFAAKSGRMCAEEIVSASQGGSKIPTEDDLKKYIKKWDKKYGATYKVLEILQNIFYSNDGAREAFVEMCDDIDVQRLTFDSYLYKTVVAMKPLQQLKLTFMTLGSVLRGRALAPKSYKPVPSTVRGDEEVNKMLAVSTIKGGIKVGKKKVK

SEQ ID NO: 2301 - protein, 201 aa, Rickettsia akari str. Hartford
MICDIINLLKEDLNKADIENEIYMRLKGPYSVLTKMKRKEVPIDALKDLIACRIIVKSKALCYNALDVVKSSSHLDWLYTKDYINRPKSNGYQSLHNIMQCLHSQRNFEIQIRSEDMHKDAELGRAAHLNYKEEQDRHLKKVFDVSNDTILSKARKMVKQFKGLEEQIVEYEKEIMHIWDTKYEEMLKWENAAAVLVFNEE

SEQ ID NO: 2302 - protein, 281 aa, Corynebacterium diphtheriae
MSAIKLDGNLYRDEIFEDLKGRVNSLREKGIVPGLATVLVGDDPASHAYVRMKHKDCEIVGVKSIRKDLPADVTQEELLAVIDDLNADPECTGYIVQLPLPKHLDENAVLERIDPAKDADGLHPVNLGKLVLNEPAPLPCTPNGAIHLLRRFGVELDGKKVVVIGRGVTVGRPIGLMLTRRSENSTVTLCHTGTRDLAAETREADVIVAAAGKAHMLTADMVKQGAAILDVGVSRVDGKLLGDVHPDVWDVAGAVSPNPGGVGPLTRAFLIRNVVERAERA

SEQ ID NO: 2303 - protein, 137 aa, Zea mays
MQFLRGSGGGGGGGGFPGVAWEVLRRHFSKKRSVDVRRINPKVPKEEAVAISGRLLQILSDHGPLTVGNTWNHAKDAGIAGLNSKTHMKILLKWMTGRNVVKLTCVHVGNAKKFLYSPSTESSSSAGASPSSTSASQ

SEQ ID NO: 2304 - protein, 423 aa, Arabidopsis thaliana
  misc_feature (336)..(336): Xaa can be any naturally occurring amino acid
MRRTRCSWCFMSRESSTSGHKQVCTTRNGWTAFVKRVSMASGAIRRFQERVLGPNRTGLPSTTSDVWLLGVCYKISADENSGETDTGTVLAALQLDFSSKILMTYRKGFEPFRDTTYTSDVNWGCMIRSSQMLFAQALLFHRLGRAWTKKSELPEQEYLETLEPFGDSEPSAFSIHNLIIAGASYGLAAGSWVGPYAICRAWESLACKKRKQTDSKNQTLPMAVHIVSGSEDGERGGAPILCIEDATKSCLEFSKGQSEWTPIILLVPLVLGLDSVNPRYIPSLVATFTFPQSVGILGGKPGASTYIVGVQEDKGFYLDPHEVQQVVTVNKETPDXVDTSSYHCNVLRYVPLESLDPSLALGFYCRDKDDFDDFCLRALKLAEESNGAPLFTVTQTHTAINQSNYGFADDDSEDEREDDWQML

SEQ ID NO: 2305 - protein, 634 aa, Zea mays
MDGCDCIEPLWPTDDLLVKYQYISDFFIALAYFSIPLELIYFVKKSSFFPYRWVLIQFGAFIVLCGATHLINLWTFTTHTKTVAMVMTIAKISTAVVSCATALMLVHIIPDLLSVKTRELFLKNKAEELDREMGLIRTQEETGRHVRMLTHEIRSTLDRHTILKTTLVELGRTLGLEECALWMPSRSGSSLQLSHTLRHQITVGSSVPMNLPVVNQVFSSNRAIIIPHTSSLARVRPLAGRYVPPEVAAVRVPLLHLSNFQINDWPELSAKSFAIMVLMLPSDSARKLHVHELELVEVVADQVAVALSHAAILEESMRARDLLMEQNVALDLARREAEMAIRARNDFLAVMNHEMRTPMNAIIALSSLLLETELTPEQRLMVETVLKSSNLLATLINDVLDLSKLEDGSLELEIKAFNLHAVFKEVMGFIKPIASIKRLSVSVMLAPDLPLCAIGDEKRLMQTILNISGNAVKFTKEGHITLVASIVKADSLREFRTPEFHPTASDEHFYLKVQVKDTGCGVSPQDLPHVFTKFAHPQSGGNRGFNGSGLGLAICKRFVSLMGGHIWIDSEGTGRGCTATFVIKLGVCDNTNTYQKQLVPLIWPSSADSNLSAPKVLPDGRGSVSLKSRYQRSV

SEQ ID NO: 2306 - protein, 313 aa, Geobacter sulfurreducens PCA
MKRHTIVTILSVSLCLAALGGCKGKTESGTTAAPAKKAGQVLVEVNGDAITVENFNKELEGLPPYLKPMADTPEGKKELLDTMVVRELLYQQAKKDGVDKSAEIADRVEELKKRVVVEAYLKKKVEEQVQVSDEELKKFYDQNKDKFKSGAQIKASHILVRDEKLAQEIVKELKGGANFEELAKKHSIDSAAAKGGDLGWFSKGNMVPEFEKVAFGLKEGETSGIVRTQFGYHIIKVTGKRPAGERTFEEVKDQIKAAVLPGKQQEVFQKLKEDIKKGATISIKEDVLKGLGGQSAAAEHPAPAQPAATPAAK

SEQ ID NO: 2307 - protein, 593 aa, Oryza sativa (japonica cultivar-group)
MESTMKGIRGDNAPCVLDLDDAATVGGGVGDTYGEDCATEEQLVTPWTVSVASGYNLLRDPRYNKGLAFNERERETHYLRGLLPPAIVSQELQERKIMHNIRQYQLPLQKYMAMMDLQEGNERLFYKLLIDNVEELLPVVYTPTVGEACQKYGSIFSRPQGLYISLKEKGKILEVLKNWPERSIQVIVVTDGERILGLGDLGCQGMGIPVGKLALYTALGGVRPSACLPITLDVGTNNEALLNDEFYIGLRQKRATAQEYADFLHEFMTAVKQNYGEKVLIQFEDFANHNAFELLAKYGTTHLVFNDDIQGTASVVLSGLVAALKLVGGSLSEHSYLFLGAGEAGTGIAELIALEISRQTKAPIEECRKKIWLVDSKGLIVSSRKETLQHFKKPWAHEHEPVGNLLDAVKTIKPTVLIGTSGKGQTFTQEVVEAISSFNERPVIFALSNPTSQSECTAEQAYTWSKGRAVFASGSPFDPVEYDGKIYVPGQANNAYIFPGFGLGVVMSGAIRVHDDMLLAASEALAQQVTQENFDKGLTYPPFSNIRKISAHIAANVAAKAYELGLASRRPRPKDLVKYAESCMYSPLYRNYR

SEQ ID NO: 2308 - protein, 150 aa, Nostoc punctiforme PCC 73102
MEIQFREINPFDMWIWLKFSTNPSAREKQYVEEVFNSWFYLGKLGAFNAENLQVQDTGLDISYMNYDEQGYDKSLLALMHNIGEFEYEGQWGRCWFDLGTSDAIALDILINALTQLSQEYVTIEQLYIGGENPDWPIEDSESRPQSIYDN

SEQ ID NO: 2309 - protein, 181 aa, Brassica napus
RVRKLSKLKTDYKAFEAKRKLCDSYEMFFADRRVIPLLPRLIGKKFFTSKKIPAAVDLKHRNWKEQIEKACGSAMFFVRTGTCSVVKVGKLSMEGDEIVENVMATLNGVVEVLPGQWKYVRSLHLKLSESLALPVYQSVPDLKPKIDAFGSEKSVVVEEENKKKKVEGDSVVDGGEKSDGV

SEQ ID NO: 2310 - protein, 172 aa, Glycine max
YTGIGVYLEDKAVPSLAAKWKGKTSEELVHTLHFYRDIISGPFEKLIRGSKILPLAGAEYSKKVMENCVAHMKSVGTYGDAEAAAIEKFAEAFKNVNFAPGPLFLYRQSPDGILGLSFSEDVTIPEKEAAVIENKAVSAAVLETMIGEHAVSPDLKRILASRLLRIEHGIIV

SEQ ID NO: 2311 - protein, 160 aa, Bacillus cereus G9241
MTVYDFSAKTITGEDKSLKDYEGKALLIVNVASKCGFTPQYKGLQEVYDKYKDQGLEILGFPCNQFGGQEPGTEADITSFCELNYGVNFPMFAKIDVKGDKAHPLYTYMTEQAPGLLGMKAVKWNFTKFLIGKDGKVVGRFAPQTKPVDLEVEIEKVLGE

SEQ ID NO: 2312 - protein, 117 aa, Triticum aestivum
  misc_feature (9)..(9): Xaa can be any naturally occurring amino acid
  misc_feature (81)..(81): Xaa can be any naturally occurring amino acid
MARAAATQXLVLVALVAAMLLVATDAAISCGQVSSALSPCISYARGNGANPTAACCSGVRSLAGAARSTADKQAACKCIKXSAAGGLNAGKAAGIPSKCGVSVPYASSASVDCSKIR

SEQ ID NO: 2313 - protein, 303 aa, Helicobacter hepaticus ATCC 51449
MPFVTNSYHIAQPLPAFLFLMRHRGYTQAQAQKVLDKKRLRQHNRVIAKNEIICGQVELSEFEACDIELEPLFFNEDFCVYDKPHNLLTHPKGRFYHYSLNDALKLRFGNYANAIHRLDKQTSGLVLCAINPQSEPELKELISTRQILKTYYAIVEGKLTQECLIDEPIALQKYKGTDLSIKSIISPYGKPSRTKLYPLAYHSPTDSTLIRVLPLTGRTHQIRLHCAHIGHRILGDPLYGTKEEYSRFYLESPALPPHQYESYFGAPYLCLNAHTLAFSFKGKSYYFTSCHNFSFIPHFATYF

SEQ ID NO: 2314 - protein, 199 aa, Triticum aestivum
MADAMAAAAGETPPLQANYVFGRAWPDLNEGLSYTDTFRGADAETTATLTNFYSENYKSSAPLPGWIHRIRNGQITVDGQVVTDPDMILREGSKLVYHRLAWKEPFAPHLLQVLYEDDDMVALNKPSGLQVLPKGLFQQRTVLAQLQWKEWKMPPSSCSKRKNVQLHPVPVHRLGRGTSGLLLCAKTKLAKVQLASYFA

SEQ ID NO: 2315 - protein, 434 aa, Stigmatella aurantiaca
MRPIGSARQAGRGTSALALIVQKYGGTSVGDTERIKNVAKRCIAAQKAGHDVVVVVSAMSGETNRLLKLVSQITERPNEREQDVVVATGEQVSIGLVALAIQTQKRKAVSFLGHQVRITTDSTFSKARIKSIDAERIVDALKKKNIVVVAGFQGQDEHGNVTTLGRGGSDTTAVALAAALKADACEIYTDVDGVYTTDPNMVPAARKLERIAYEEMLELASVGAKVLQIRSVEFAMKYKVPLWVKSSFTDDPGTLVCEEDAAMEDVLVSGIAYDKNEAKIAIRGVPDVPGVAAKIFGALDEQSIVVDLIVQNVSKDGRTDVTFTVGKADLTKAKDVVKKIAKSVKAEGVETDDQVSKVSIVGVGMRNHSGVAAKMFTVLAGAGVNVQMISTSEIKVSCVIHSNYTELAVRSLHTAFGLDKPEAGAVSEVVSLKG

SEQ ID NO: 2316 - protein, 494 aa, Euglena gracilis
MTTPSLSSILRHTRPIFKETLRAARPTLQNALPNGFRIASESKDGDTCTVGVWIDAGSRWETEKNNGVAHFLEHMNFKGTGKRSRQDIEFGMEKMGAHLNAYTSREHTCYYVKCFKKDVPEAVDILADILLNSKRTEQDLDAERQTIVQEKEDVEARIDEVLMDHLHSAAFEGSGLGLSILGPLENIQKSITKGMIDDFVKTHYTGPRMALVGSGAVDHGQLCDLASKYFGALPTGQPKPSGFTRFLGGDKRETNQLNPLTHVAVAFQTPGISHPDAIKIKVLEQLLGSYSRDKGEAAYSCFARAIVMDFYDPKVGQFFRPNKAGHNPIHSLNAFWAPYSDVGLLGFYAIAEPGKSYGHEWENILHYAMRELIRVSRNISEEEFERAKNQLKLQTMLQLDGTTNIADDIGRQVLSFGARVPLASFFEQLDAISREDLIRVGPRVLLRQGPRGGGDWRHGQRARVRRPAGGDLLRGPLSCPLCTPLPRQSVVCMA

SEQ ID NO: 2317 - protein, 370 aa, Pyrococcus furiosus DSM 3638
MDYDVLIIGGGPVGNYLASLLAGKLSVAVVERKGSFGGKACTGIIGADNYEALGFPEKAVLNTFNGAYFISKKKYFHISRKTPQAYLVDRKILERELAKKAMKKGAEYYLATNFLKFKNGKAVLQHLDGRMEIGAKIYVGADGVNSTVAKEIGAKTEGEILKGWEVEVLGNFRRNSVEVWVNKDINPDFFFWVAPINEEVARVGTFGSVDSLAKFLQMRKLKGGQILEFKTGAVILGMRKPWVKGNVALVGDAALQIKPTTAGGIVFGALCARALAKAILNNKLSSYEKMCSWVKEQISFGLRIRKVFKSLTQDHIEEIFNVLSSEDVIRLIEERADFDDHAKTVKALLKSPKVLSKLIRIAPIILRTLV

SEQ ID NO: 2318 - protein, 474 aa, Euglena gracilis
MKSVVRSKGTQALFRRFSSALGDSINPNQVGVGDNVIRVNGRLFEVDKVQEKGLKTSVLDNGTKVITLDNGGSVAQLTFLYKDGPVYENIFNAGISSFMKHALTKDGLTSSEYITKTFLQKAGIIVHEPTVVNKSAIAFTVEGFRDTLAQPAVADKFWQSLLFPRFSPENVKEVKRLVELESKETKRDSPFAYLQDILHKTAFKGSPLGHTSFVPAYNLGYIDSNKLFDRWDAHYGFGNIAVIATNIEHEAVLAAITDSAWVARAHNKVGGVAAPASKYSGGEGYDVVHRAKEFDDQFTDVYSTYTAYAFKAPGRSNLKEHAASLVIAQALSNAVSPVLNTSFAPKRLEVFYQAYDTVGLIGLSSVQASNAQLKAFKAALSKIGTLSEADLAVHKSAALLTAYGNVESWRATQATLIDSFNTTGQPLSPLEIVSAIKAVSADTVKSVVATMLGSPATLVHHGDSPCAPTLDALQ

SEQ ID NO: 2319 - protein, 576 aa, Candida albicans
MIQADDTFISDDEEEYCPLCVEEMDISDKNFKPCPCGYQICQFCYNNIRQNPELNGRCPGCRRLYDDESVEYKTVSAEEYKLMQLKKEKRDREKKQKEKEKKEMEMVNKKHLAGLRVVQKNLVYVTGLNPPCNPDDLHSVLRSDKYFGQYGKISKIVINKKTPTTQTSTHHHQNPGLVVYVTFTRKEDALRCITELDGSLCDGRVLRAAHGTTKYCSSYLRGQPCPNPNCMFLHEPGEEADSYTRKDLSTQQGIKMGMTARSHTTSFGEESSNNSQSNQAGSDDDHHEAHKEHLPSTAHWAAAGTTSGSNSPSVNNNIPLANSAAFPTLGEIVRDQKQQQKKETKPRSKTTKSNNTLVPDELDAGDNSVFKFVETTTEQLRGLEDIRNVRFKGFDNGKILPLFSFKGNFSNDTQLEEEKVIARQVIEKFLLRPLKNYHLAYQNHPITQQQAILQRQQQQQQQQQQQQTPALQVAQLQQNKNDEQQKQAQQQLLLLQLQHQQQLQQQQQQRQLQQQQNQPHQLNILKTSDRVNTSTPPPPGLFAGKDVAASSDMSNTGAPLPSSSSQLLTQLMSGKR

SEQ ID NO: 2320 - protein, 403 aa, Triticum aestivum
  misc_feature (6)..(6): Xaa can be any naturally occurring amino acid
  misc_feature (24)..(24): Xaa can be any naturally occurring amino acid
QWKKGXLLGSGTFGQVYLGFNSEXGQFCAIKEVQVISDDPHSKERLKQLNQEIDMLKKASHPNVVQYYDSDMTDDTLSIYLEYVSGGSIHKLLREYGPFKEPVIRSYTCQILAGLAYLHAKNTVHRDIKGANILVGPNGDVKLADFGMAKHISSFAEIRSFKGSPYWMAPEVIMNSKGYNLAVDIWSLGCTIIEMATARPPWHQYEGVAAIFKIANSKDTPEIPDIFSEDGRSFLKLCLKRNPASRATASQLMDHPFVQDHPAVRAAKDSALRNAFSAPADVKHTMSNRELPSRRSITPLRDIGVSARDFTGFSTTVPSPRTSSPIPVRTNMSLPVSPCSSPLRQFKQSNWSCLPSPPHPMLSSGAAAYNSSSYALNQARRMPDPWQDGSLKLHSPYGSPKRF

SEQ ID NO: 2321 - protein, 823 aa, Azoarcus sp. EbN1
MKKMKLVMIGNGMAGVRTLEELLKHAPDLYDITVFGAEPHGNYNRILLSPVLAGEMTLPEIMLNDLGWYRDNGITLHAGKRITKIDRVRRRVIAGDGTEAEYDRLLVATGSTPFIPPIPGKELPGVLAYRDIADTEAMIDAAARYRHAVVIGAGLLGLEAANGLMLRGMDVTVVHLADWIMERQLDRAAADMLQASLEAKGMKFLLAKQTDALVEGGGDKNNAGRVAGVRFKDGGEIPADLVVVAAGIRPNYALAESAGLHCGEGRVRGIVVSDTMQTITDPRIYAVGECVAHRGVAYGLVAPLFEQGKVCANHLANFGIGRYEGSVTSTKLKVTGIDVFSAGDFSGGADTEEIVLHDRQGGVYKRIVLRNNRIVGSVLYGDTADGAWYFQLMKDGQDIGAIRDHLMFGQNNLGDAGHKGENKAAAMPDSAEVCGCNGVCKGTIVKAIKEKGLFTIDDVKKHTKAASSCGSCTGLVEQILASTIGGAYQAVSVHDKAVCACTELSHGDVRKAIRDHKLLTIPAAMDMMAWKTPNGCATCRPALNYYLISTWPHEAKDDPQSRFINERAHANIQKDGTYSVVPRMLGGLTTPAELRRIADVAEKYQIPTVKVTGGQRIDLLGIRKDDLPKVWQDLGMPTGHAYGKSIRTVKTCVGSEHCRFGTQRSMAMGVDLERMLFGMWSPHKVKLAVSGCPRNCAESGIKDVGVIGVDSGWELYVAGNGGIKTEVAQFLCKVATREEVLEYSAAFLQLYREEGFYLERTVHYVHRVGLEHVKKRVVEDAVNRKALYERLLYAVQDYTDPWAERYAADAAQALRAQFETLEA

SEQ ID NO: 2322 - protein, 192 aa, Arabidopsis thaliana
  misc_feature (137)..(137): Xaa can be any naturally occurring amino acid
  misc_feature (142)..(142): Xaa can be any naturally occurring amino acid
  misc_feature (144)..(144): Xaa can be any naturally occurring amino acid
  misc_feature (149)..(149): Xaa can be any naturally occurring amino acid
  misc_feature (151)..(151): Xaa can be any naturally occurring amino acid
  misc_feature (159)..(159): Xaa can be any naturally occurring amino acid
  misc_feature (162)..(162): Xaa can be any naturally occurring amino acid
  misc_feature (165)..(165): Xaa can be any naturally occurring amino acid
  misc_feature (168)..(168): Xaa can be any naturally occurring amino acid
  misc_feature (173)..(173): Xaa can be any naturally occurring amino acid
MASSMLSSTAVVTSPAQATMVAPFTGLKSSASFPVTRKANNDITSITSNGGRVSCMKVWPPIGKKKFETLSYLPDLSDVELAKEVDYLLRNKWIPCVEFELEHGFVYREHGNTPGYYDGRYWTMWKLPLFGCTDSAXVLKEXDXCKKEXPXAFIRIIGXDNXRQXMHXFIGYXPQLELIPWISAPILALILL

SEQ ID NO: 2323 - protein, 336 aa, Ashbya gossypii ATCC 10895
MLAAATRYRLGQALQTRMVHHKVTIIGSGPAAHTAAIYLARAEIKPTLYEGMFANGVAAGGQLTTTTEIENFPGFPDGLTGSDLMERMKAQSVKFGTEVVTETVAKVDLSARPFKLWTEFNEDEEPTTTDAIILATGASAKRLGLPGEETYWQRGISACAVCDGAVPIFRNKPLAVVGGGDSACEEASFLTKYGSKVFMLVRKDHMRASTIMQRRVERNEKIEVLYNTAPVEAKGDGSLLDALRVRDTRTGEESDLPVNGLFYAIGHTPATQLVAGQVDLDESGYVKTVPGSTLTNVPGLFAAGDVQDSRYRQAVTSAGSGCMAALDAEKFLSELE

SEQ ID NO: 2324 - protein, 457 aa, Francisella tularensis subsp. tularensis SCHU S4
MDKQKIYIFDTTLRDGQQSPGAGMSFEDNIAYADLADKLNIDVLEAGFPSASNTDFEIVNTISKRMAERNSNMIIAGLCQLRKNQVEITMDALRPSLAIGKARVHMYLPVDPNLAQASLGSKNDNEQNIKNVYELVKLASDEGFEVEFSAEGYSRLGDTFDYVTNVFRAAVAAGVKVINCPDTIGGACERENDNYFIKNMAKHAEIIKKEFPDRNIIWSAHCHNDLGLALENSMNAVFDGPARQVEGCINGVGERAGNASLEQCVMFINLFGKQKDYHYYNDVNIAHFKTISDFIGKRILSRQPHHPITGLNSARHTSGGHTNAILKNPLAYQPFHPESVGNEISFIFGPLSGGNHAKKIIEENGYICDDKEKAAIAQQIKDIYHERRKGITDEELIQAYKQIKSPIHVSAIDYGKSNGETYVELKGRFFGNTDYRITGRGENSALSALLKGIQEYI

SEQ ID NO: 2325 - protein, 366 aa, Glycine max
MGLRSKLRMSASVVQQGMKEIRRSVTYMPRPGDGAPRGVTLIPGDGIGPLVTHAVEQVMEAMHAPIYFEKYDVHGDMRRVPEEVLDSIRKNKVCLKGGLRTPVGGGVSSLNVQLRKDLDLYASLVNCFNLPGLPTRHHNVDIVVIRENTEGEYSGLEHEVVPGVVESLKVMSKFCSERIAKYAFEYAYLNNRKQVTAVHKANIMKLADGLFLESCRHVATKYPGIKYNEIIVDNCCMQLVSKPEQFDVMVTPNLYGNLVANTAAGIAGGTGVMPGGNVGADHAVFEQGASAGNVGKEKMVEQKKANPVALLLSSAMMLRHLQFPSFADRLETAVKRVISEGNCRTKDLGGDSTTQQVVDAVIANLD

SEQ ID NO: 2326 - protein, 80 aa, Thermoplasma acidophilum
MSKRTVKVGVAGRFGPRYGVTIRKEWSEIYKQKIALYTCPSCKKKRVKRVANGIWQCRHCGYKFAGGSYTPAYEIKVVEG

SEQ ID NO: 2327 - protein, 108 aa, Francisella tularensis subsp. tularensis SCHU S4
MALSNVIKTDEANFDKLIDNTNKAVLVDFYADWCGPCKTLAPILDQLSKDYTKAVIVKVNVDENQNLAARFAIRSIPTLIVFKNRKQLETLMGVHTASQLEQKLKAYE

SEQ ID NO: 2328 - protein, 513 aa, Gluconobacter oxydans 621H
MPASIQSPPDLPGPGRRKTLEQVLFENDTNGLKRSLTATQLIILGVGSTIGAGIYVMTGTAAAEYAGPSVLISFVIAALACLFTAFSYGELSSTLPVSGSAYSYAYISMGEKAAWMVGWLLLLEYGISCSAVAAGLSGYASSLLGVTGFHMPSALTHATLQPVPGTAGAQISADWRFDLIGFTATLLVTALLVRGVEESARINTMIVALKVGVLFVFVALGIGAVNPANWHPFIPASEGGFHYGVRGIFRAASVIFFAYVGFEAVSTASAEARNPTRDVPIGIIGSLLICTIVYMIVATVLLGIVPYRELDVPDPLAIAVKIMHTPWLSLLVNVGATIGLCSVLMGLMYAQSRVLLTISRDGLIPQIFSVIHPKFRTPWIGTIVLGFVVALITATLPIDIISDLVSIGTAAAFGIVCFTVIWQRNTRPDIVRPFSVPLGGIRIRGIWIGTTPALGILFCLVMTIPLVSDMVHAVTSGNPVPLILLVTYLALGIATYAFYGRRHSKMRPEPPLV

SEQ ID NO: 2329 - protein, 247 aa, Prochlorococcus marinus subsp. marinus str. CCMP1375
MSSAFTSSNRPIQIIPSVLPADWANMGQCVKDLEEAGVDRIQFDVMDGNFVPNLTFGPEMISACRKYCNVPFETQLMVSQYNCETMLEAYVEASKGPNGEPGVVIAHVEANVHLHRILGKIRQLGGSPSVALNPHTPMEMVKDVLDMVDHVLVMTVNPGFGGQAYIPTMLNKIKSLREVIVENNYDIDIEVDGGIKADWTISQCCAAGANCFIAGSGMFAYPSLKEGCDALRSVAKDAQNGKLLEKS

SEQ ID NO: 2330 - protein, 408 aa, Magnetococcus sp. MC-1
MSDFNSITEILEDFRQGKMVILVDDENRENEGDLIVAAEFCDAPAVNFMTKHGRGLICLSLTQARVEKLQLPLMVVDNDAKFKTAFTVSIEAKVGVTTGISAQDRARTIEAAIADTSGPEDISRPGHVFPLVAKDGGVLVRAGHTEASVDLARLSGLKPAAVICEILKDDGTMARVPDLIPLAKQMGIKLGTIADLIAYRRQTEQLVHRAVETRLPSAYGGEWKLVAYTNDVDQHQHVALVKGNVDDGSPVLVRVHSECLTGDMFGSLRCDCGPQLQAAMEQIGQEGRGVIVYLRQEGRGIGLINKMHAYNLQDEGQDTVEANEALGFSADLRDYGIGAQILKDLGVTHMKLMTNNPKKIVGLTGYGLDVVDRVPLEIKSGMTNERYLRAKKHKLGHMLRQFPESNES

SEQ ID NO: 2331 - protein, 300 aa, Francisella tularensis subsp. tularensis SCHU S4
MKQITIASRESKLALWQTNFVKNRIQLELNIPCEISTMKTQGDIILDQPLNKIGGKALFMKELEVAMLSNKADIAVHSLKDVPYQLPQGFCLAGFMPREDPRDAFVSNKYNSIDDLPKGAVVGTSSLRRKAQLLHYRDDLEIRDLRGNIQTRLSKLDNGDYDAIILASAGLIRLELVERITQFIPVEISLPAVGQGIVVIEALERDNDLLEKIQKLNCRESSRVATAERAFNQELKGGCHVAIGAYAELDNNQITLMAMVASSDGKKILKRKMIGDDPTKLGKLLAQEMIALGAYKILES

SEQ ID NO: 2332 - protein, 258 aa, Roseovarius nubinhibens ISM
MAYETIIVEVEDHVALITLNRPDALNALNDQLLSELVKALEDAQNNDKVRCIVITGSEKAFAAGADIKMMSEKSFVDVFAGDLFGPEAEGIMRIRKPIIAAVSGYALGGGCELAMMCDFIICSDTAKFGQPEINLGVIAGMGGSQRLTRFIGKSKSMDMNLTGRFMDAEEAERSGLVSRVVPAKKLMEETMTAAQKIAEKSMIAVMAVKEAVNRSYEVPLREGLLFERRVFQSLFATEDQKEGMSAFAEKREAQFRDK

SEQ ID NO: 2333 - protein, 195 aa, Arabidopsis thaliana
RRIPGRPPRRPSNTGRTSMTLSHATMDASPGQATMVAPFNGLKSSDAFPATRKVNNDITSITSNGGRVNCMQVWPPIGKKKFETLSYLPDLTDSELAKEVDYLIRNKWIPCVEFELEHGFVYREHGNSPGYYDGRYWTMWKLPLFGCTDSAQVLKEVEECKKEYPNAFIRIIGFDNTRQVQCISFIAYKPPSFTG

SEQ ID NO: 2334 - protein, 326 aa, Dunaliella salina
MAFALRTGVAPSVLPRGQSRRQMVCRAGKFDEELMKTARTIASPGRGILAMDESNATVGKRLDSIGLENSEANRQAYREMLVSTKGLGQYISGAILFEETLYQSGSNGKRMTDILVENGIVPGIKVDKGLAPLANSNNEQWAMGLDGLDTRCAEYYKTGARFAKWRSVVSIPNGPSPIAVRETAYGLARYAAICQNNGLVPIVEPEILLDGDHDINRCLAVFEDVWAETFKYLADNKVLFEGILLKPSMVTPGAESPARATPQQVAEMTLIGLKRRVPPAVPGIMFLSGGQSELEATLNLQEMNPPNPTLGQVSFLLTPVPCRTPC

SEQ ID NO: 2335 - protein, 519 aa, Populus tremula x Populus tremuloides
MAGGAFAPTSGGKEYPGKFTFRVFFTCLFAATGGLIFGYDLGISGGVTSMDVFLKDFFPDVYQKESSVKPSDDQYCKFDSQILTLFTSSLYLAALVSSIGASMATRTYGRRPTMMTSGLLFAAGAIVNGLAKNVVMLIVGRLLLGFGIGCANQSVPIYLSEVAPYKYRGALNMMFQLFITIGILIANSLNYAFARLIGGDMAWRLSLGGAIVPGLIILLGSCFLPDTPNSEIERGNYERAKDLLLKLRDVDNVDEEFNDLVEASEKAKLVKHAWLNIFKRKYRPQLVFAFCIPMFQQLTGMNVIVFYAPVLFKTIGFGSNASLLSSLITGFVNMVATFVSIFTVDKLGRRKLFLMGGTQMLICQVVITIAIAMKFGVSGNPGVISGTYAGAVVAFICVYVAGFAWSWGPLGWLVPSEIFPLEVRSAAQSINVSVNMIFTFVIAQIFTAMLCHLKFGLFICFAVCVVIMSIFIYKLLPETKGVPIEEMTIVWRNHPHWSKYFDEDDAQFEASKPKDIASA

SEQ ID NO: 2336 - protein, 628 aa, Francisella tularensis subsp. holarctica
MCGVVGFYSFNKEEGFDSIINQSLLSIKHRGSDDSGYWCDNQVTLGHTRLSIHDITNAGHQPMLSNSGNTAIVFNGEIYNYLSIKNQLLSEYSNLKFKSNSDTEVLVNAIELWGIDKTLEKCIGMFAFGVYSRKTSCLILARDRFGEKPLYFGIQNGILGFASELKALKPLKECGWRFDIDRDALAAYMRYAYVPTPYSIYKNISKLNVGSYIKFDAKGNSKEYKYWDSKKVLDSEKYKDSYDQAILDLEIKLKSTLSIQMQSDVPLGAFLSGGIDSTTVIALMQSMSKDKINTFSIGFNQKEYNEAEHARAVAKHIGTNHTDMYVTERDALDVIPKLAGIYDEPFADSSQIPTYLVSKIAKSKVTVALSGDAGDELFGGYNRYFLAPNIAKKIKFAKLLKYAPDAWIKKAEILNFGKFALLADKLLKLKRVLEKAKTNKELYVLLCSQINDTSFVLGAKEYDILRDKNIYDIPQLSFQEWMMFVDSNTYMIDDILVKVDRAAMANSLETRVPFLDHNIYEFAYSLPIDYKIQRGNGKRILKDLLYKYVPESLVNRSKMGFGIPLAKWLREDLREWADNLLDYSKIDKQGYLSPEVVQKYWQEHLSGKRNWQAILWNILIFQEWLDNE

SEQ ID NO: 2337 - protein, 190 aa, Griffithsia japonica
ARGTGGVYATAERCAVTTTLAGATGGVVTLIVIKIRDHIFDLLACLNGILAGLVAITACCAFVDPWAAVVIGAIGAVVYIGAAMLLLKFQIDDPLEAFPIHGASGAWGCLAGTLFNKQGHQVTAGFTDQIWGLFYGGGGRLLGVNALGMVVITVWTVGLVTPLFLVMKFTGILRISPEEEIIGNDVSKHG

SEQ ID NO: 2338 - protein, 402 aa, Desulfitobacterium hafniense DCB-2
MEFRFNTIEEAIEDIRQGKIIVVVDDEERENEGDLLMAAEKATPEAINFMATHGRGLICVPMTAERIQALNLEPMVTHNTDPHGTAFTVSVDGCDCTTGISAFERANTVKVLLDPHSRPENLRRPGHIFPLKAREGGVLVRAGHTEGAVDLARLAGFQPAGVICEILKDDGTMARVPDLMEFVKKHDLKMVTIKDLIHFRRQKEKLVERVVGIELPTDFGDFKAVGYRSLLDGQEHIALVKGDVDDGEPVLVRVHSECLTGDVFHSRRCDCGEQLSAALESIQKEGRGVLLYMRQEGRGIGLLNKLKAYKLQEEGKDTVEANLALGFPADLRDYGVGAQILVDLGIRKVRLMTNNPRKIVGLEGYGLEIQERVSMEMPVKPENQHYLHTKKIKLGHYLPGVR

SEQ ID NO: 2339 - protein, 248 aa, Mycobacterium sp. KMS
MGDSTLILLRHGESEWNAKNLFTGWVDVDLTDKGRAEATRAGELIADLDRLPDVLYTSLLRRAITTANIALDKADRHWIPVHRDWRLNERHYGALQGLNKAETKEKYGEEQFMAWRRSYDTPPPPIEAGSEYSQDRDPRYADIDGGPLTECLADVVARFVPYFEQTIVPDLREGRTVLIAAHGNSLRALVKYLDGMSDEDVVGLNIPTGIPLRYDLDSDLKPTVAGGTYLDPEAAAAGAAAVASQGAK

SEQ ID NO: 2340 - protein, 233 aa, Sinapis alba
DREGAGKHIQAGAKKVLITAPGKGDIPTYVVGVNAELYSHEDTIISNASCTTNCLAPFVKVLDQKFGIIKGTMTTTHSYTGDQRLLDASHRDLRRARAAALNIVPTSTGAAKAVALVLPNLKGKLNGIALRVPTPNVSVVDLVVQVSKKTFAEEVNAAFRDAAEKELKGILDVCDEPLVSVDFRCSDVSSTIDSSLTMVMGDDMVKVIAWYDNEWGYSQRVVDLADIVANNWK

SEQ ID NO: 2341 - protein, 193 aa, Cylindrotheca fusiformis
GGNAVNNMMTKKLNGVDFVALNTDAQHLSTNKASNKVQLGAELTKGLGCGANPEAGRLAAEESREEIKESLKGAHLVFITAGMGGGTGTGAAPVIADICYEMGIMTIGVVTMPFNFEGTHRRRLAIEGVERLQALVDTLIVIPNQNLFEIAGPETTFVDAFQMADDVLLGGVKTVTDLMTSPGLINLDFADVI

SEQ ID NO: 2342 - protein, 210 aa, Solanum chacoense
MDYAFEFVINNGGIDTEEDYPYKERNGVCDQYKKNAKVVKIDSYEDVPVNNEKALQKAVAHQPVSIALEAGGRDFQHYKSGIFTGKCGTAVDHGVVVAGYGTENGMDYWIVRNSWGANWGEKGYLRVQRNVARSSGLCGLAIEPSYPVKTGANPPKPTPSPPSPVKPPTECDEYSQCPIGTTCCCILQFHNSCFSWGCCPLEGATCCEDH

SEQ ID NO: 2343 - protein, 453 aa, Zea mays
MATAAAAVTATFRTLIQHAAACGAPVPLPSVRFQSLQRHRVGLRRFAPPRGRPVLPPPFAAEDFSSYVDDFSGDDGEEHFDEEEGSEPEEEAEAPRAYSSPRSRPPRGDDPGRLFVGNLPYTYTSEELAQVFSEAGRVDDAQIIYDKVTNRSRGFAFVTMATAEEAAKAIQMFDGALLGGRTARVNYPEVRRGGERRTFSMSGRRRDDGTYKIYAGNLGWGVRADTLRNVFEGRAGLLDARVIFERETGRSRGFGFVSFSTAEDAQAALESLDGVLVDKYMEMPTDPVALLSVACGHFKLNQQIRAHKELEGRSLRLSLAEQNPPPGSPPSTAQAQQEETDSGAPAGGGTEAASSSEPSEAEEPQGYKCVATTSKSCHSSPRVCAQLIDFVCQANFQMNWSDMGVKGTAVQMVLGHSLSRAVHSQNAPEMSSGSWDMAKLAARTKVYQTKNIS

SEQ ID NO: 2344 - protein, 421 aa, Bifidobacterium longum NCC2705
MVSLRGSQIEQMEQEDARGAKVAKIARDPNTFLSTVQIGVTLSGFLSASFGASSIAPYLIPAVESWGVHPGIASGLVNIILTLIISYCSIVISEMVPKRIAMQRTEQIARAVVPAIDAFAAVCRPIIWLIGKNTNGIVRLLGFDPQQTESEVSDDELRVLVSSNTNLSKDERTILDDVFDASETIVAEVMRPRADVVFIEGDQPLAEAAAFVRDQPYSRYPVTGKDFDDVIGFVHVRDLLDVRDPNAKIVRDVVREGISLPGTSKLLPSLELLRKRGIHLAVVIDEYGGTDGIVTLEDMTEELVGDIRDEYDLPSEKGGERTTRTAFVNGVATIEASMTIEDFADLTGIELEDGPYETVAGYFLSKTGKMGAVGDVLHSDDGYNMVITKVDGRRIETIEVRKAGAPDHAPLPAESQSDDAN

SEQ ID NO: 2345 - protein, 522 aa, Populus tremula x Populus tremuloides
MPAVGIAVGDNKKEYPGNLTPFVTVTCIVAAMGGLIFGYDIGISGGVTSMPSFLKKFFPSVYRKQQEDATSNQYCQYDSQTLTMFTSSLYLAALLASLVASIVTRKFGRKLSMLFGGVLFCAGAIINGFAQAVWMLILGRILLGFGIGFANQSVPLYLSEMAPYKFRGALNIGFQLSITIGILVANVLNYFFAKIHGGWGWRLSLGGAMVPALIITVGSLVLPDTPNSMIERGQHDEAREKLRRVRGVDDVDEEFNDLVAASEASMKVEHPWRNLLQRKYRPHITMAVMIPFFQQLTGINVIMFYAPVLFNTIGFGSNASLMSAVITGVVNVVATMVSIYGVDKWGRRFLFLEGGFQMLICQAVVAACIGAKFGVNGNPGELPKWYAIVVVLFICIYVAGFAWSWGPLGWLVPSEFFPLEIRSAAQSISVSVNMLFTFIVAQIFLTMLCHLKFGLFLFFAFFVVLMSIFVYYFLPETKGIPIEEMGQVWKTHWFWSRYVTDEDYPKAGGYEMTKGGQGPKNV

SEQ ID NO: 2346 - protein, 136 aa, Arabidopsis thaliana
  misc_feature (2)..(2): Xaa can be any naturally occurring amino acid
  misc_feature (28)..(28): Xaa can be any naturally occurring amino acid
  misc_feature (97)..(97): Xaa can be any naturally occurring amino acid
  misc_feature (100)..(100): Xaa can be any naturally occurring amino acid
  misc_feature (106)..(106): Xaa can be any naturally occurring amino acid
  misc_feature (109)..(109): Xaa can be any naturally occurring amino acid
  misc_feature (111)..(113): Xaa can be any naturally occurring amino acid
  misc_feature (118)..(118): Xaa can be any naturally occurring amino acid
  misc_feature (125)..(125): Xaa can be any naturally occurring amino acid
  misc_feature (129)..(129): Xaa can be any naturally occurring amino acid
  misc_feature (131)..(132): Xaa can be any naturally occurring amino acid
  misc_feature (134)..(134): Xaa can be any naturally occurring amino acid
MXSSMLSSTAVVTSPAQATMVAPFTGLXSSASFPVTRKANNDITSITSNGGRVSCMRVWPPIGKKKFETLSYLPDLSDVELAKEVDYLLRNRWIPCXEFXLEHGFXYRXTXXXPVTFXGRSWPIXEVSXFXXTXSR

SEQ ID NO: 2347 - protein, 355 aa, Claviceps purpurea
MSRANPPNAGGSRKISFNVSEHYDIQDVVGEGAYGVVCSAVHKPSGQKVAIKKITPFDHSMFCLRTLREMKLLRYFNHENIISILDIQKPRGYDSFNEVYLIQELMETDMHRVIRTQDLSDDHCQYFIYQTLRALKAMHSANVLHRDLKPSNLLLNANCDLKVCDFGLARSAASQDDNSGFMTEYVATRWYRAPEIMLTFKEYTKAIDVWSVGCILAEMLSGKPLFPGKDYHHQLTLILDVLGTPTMEDYYGIKSRRAREYIRSLPFKKKVPPRVLFPKTSDLALDLLEKLLAFNPVKRITVEEALKHPYLEPYHDPDDEPTAPPIPEAFFDFDKHKDNLSKEQLKLLIYEEIMR

SEQ ID NO: 2348 - protein, 482 aa, Alkalilimnicola ehrlichei MLHE-1
MSASKDIIEQHTKKGYEAGFTTDIEQEHLPPGLSEDTVRFISAKKGEPEWMLEWRLEAYRNWLKMPHPRWAHVDYPQIDFQAISYFAAPKSDDDRPKSLEDVDPKLLETYEKLGVPMHEREQLAGVAVDAVFDSVSIGTTYREKLAEQGIIFCSMSEAVREHPDLVKKYIGSVVPKGDNFFAALNSAVFSDGSFVYIPKGVRCPMELSTYFRMNASNTGQFERTLIIAEEGAEVSYLEGCTAPMRDDNQLHAAVVELVAHQDASIKYSTVQNWYPGDENGKGGIYNFVTKRGLCEGARSKISWTQVETGSAITWKYPSCVLKGDDSTGEFYSVAVTRGRQQADTGTKMIHLGKNTKSTIISKGISADHGQQSYRGLVRIAPTASGARNYSQCDSMLMSDTCGAHTFPYIDVQHPGAQLEHEATTSKISEDQIFYLRQRGLSEEDAVNLVVNGFCKEVFKELPMEFAVEAQALLAVTLEDSVG

SEQ ID NO: 2349 - protein, 398 aa, Candida albicans SC5314
MTVEYETKQLTPAQIKIILDTVPILEEAGETLTQKFYQRMIGNYDEVKPFFNTTDQKLLRQPKILAFALLNYAKNIEDLTPLTDFVKQIVVKHIGLQVLPEHYPIVGTCLIQTMVELLPPEIANKDFLEAWTIAYGNLAKLLIDLEAAEYAKQPWRWFKDFKVTRIVQECKDVKSVYFTPVDKDLLPLPKPERGQYLCFRWKLPGEEFEISREYSVSEFPKENEYRISVRHVPGGKISGYIHNNLKVGDILKVAPPAGNFVYDPATDKELIFVAGGIGITPLLSMIERALEEGKNVKLLYSNRSAETRAFGNLFKEYKSKFGDKFQAIEYFSEDNNTDDKIVIDKAFNRKLTTDDLDFIAPEHDVYLVGPREFMKDIKEHLGKKNVPVKLEYFGPYDP

SEQ ID NO: 2350 - protein, 130 aa, Brassica napus
  misc_feature (39)..(39): Xaa can be any naturally occurring amino acid
  misc_feature (68)..(68): Xaa can be any naturally occurring amino acid
  misc_feature (118)..(118): Xaa can be any naturally occurring amino acid
GGTSIHETYYEILSVKEDASYDQIRNSYRFGILQSQPDXLNNSPGWSSNDKFPKIQKGLEVLSGGKLXLVKKTNLRSSKQDGGTTADEISIEDMSVEINGQDMEIFYQCRCGDYFSVXSSELESMGFELL

SEQ ID NO: 2351 - protein, 113 aa, Plasmid pTiA6
QETFMKAAKARVKQMFDPAAGHSIIQELVYLWNEPRLRPILKEIDGYRYAMLFASQNQITADMLLQLDANMEGKLINGIAQEYFIHARQQEQKFPQVNAAAFDGFEGHPFGMY

SEQ ID NO: 2352 - protein, 662 aa, Magnetococcus sp. MC-1
MKSTNQSDKTIKGLPKNPRQSAYIYIIQLLFIFLLFSFFSFSGLELMSGLRGLVKAEGTWSKNQKSAVIQLISYSATGDALDYEKFQQALIPIMYMRKARNALQESPPNFEIASHNLKASGVHSNDIRTMSLIIVHLSWLEHIKEAIRIWELGDKEIFKLQDLAEKIQYTHNINGKNTVSPNILKQIKLIDNNATKLENNFSLVLGELGRLAKSLLNTLFATSFIFSSLISISLFKIVYSKFSKAAIAQEKLNREILIEKESQIIAAEILNKEKSLFIANISHEIRTPLNAIIGLGELLQEEITDFEHKRQLNILTSAGDNLLLLINDILHLSKIESGSMLIEENIFSLQNLLNNTVGMFEQGASKKGLYLKVEVKNALPSFVKGDIHRLRQVLFNLLGNAVKFTSCGGVTLTVSALENDRLSFSVSDTGIGIPSSLQEKIFLPFQQADSSITRKFGGTGLGLAITQSLIVQMQGNLSVESHEGTGSTFTFDLPLPETDPPQNHLLNSSSDNSIASPAVDRRQWERQKICADSTANKPAKRILLVDDSEDNRSLIQAYLRRYPHALTTAENGKEALTLVKEKHFDIIFMDIQMPVMDGLSATRAIRAWELTQQSNRNVPIIALTAHVMLEDEKKSIDAGCNFHLTKPIKKARLIDIIDNHAL

SEQ ID NO: 2353 - protein, 326 aa, Rickettsia akari str. Hartford
MQITVREALRDAMREEMIRDDKVFVMGEEVAEYQGAYKVTQGLLEQFGPKRVIDTPITEYGFAGLAVGAAFAGLRPIVEFMTFNFAMQAFDHIVNSAAKTHYMSGGQVKCPIVFRGPNGAASRVAAQHSQNYTACYSHIPGLKVVAPYGAEDHKGLMLTAIRDNNPVVFLENEILYGHSFYVPETIEPIPYGQAKILKEGSSVTIVTFSIQVKLALDAANVLHGDNIDCEVIDLRTIKPLDTDTIIESVKKTNRLVVVEEGWFFAGVGASIASIVMKEAFDYLDAPIEIVSGKDVPLPYAINLEKLALPSESDVIEAVKKVCYYSV

SEQ ID NO: 2354 - protein, 464 aa, Gluconobacter oxydans 621H
MSLPYPMPDPSAQRQTRTGALSAMSMPDTPVHDQVSGRADPHAAIKGESGKRKTVVMKFGGTSVGNIERIRNVAKRVKAEHDRGRRVAVVVSAMAGVTNRMVGYCAELDPLADPKEYDAVVAAGEQVTSGLVSIALQALGVKARSFQGWQIPLVTDDAHGKAAIESVDGTALLACLDDDVVPVVAGFQGVGPDGRIATLGRGGSDTSAVAVAAAINADQCDIYTDVDGIYTTDPRIVKRAKKLDRITYEEMLELASVGAKVLQTRSVGLAMREGVRVRVLSSFAETDDDSGSIVVDEDEIMEKELVAGIANSHDEAKISVRNIPDRPGIAAAIFDPLAAANINVDMIVQSVGVDNMTNMTFTVSKADEAAARAVLEKAREYVQYGELITSHNVVKISVVGIGMRSNAGLAARMFRTLADRGINVQVISTSEIKISVLIDSEYTELAMRALHTAYGLDAKEGADA

SEQ ID NO: 2355 - protein, 305 aa, Aspergillus nidulans FGSC A4
MPPRLTRLALPIRASPTVSLRVKVARYSTSPDDAVIQTQYVPAPGSGNIRVLLLNRPNARNALSKNLLTSLAQHVNSISAEGGNGPTRALVIGSNADSAFCAGADLKERLHMTKDETNAFLAKLRGTFRDLAALPVPTISAVSSLALGGGLELALCTHLRVFGSNSTVALPETKLAIIPGAGGTYRLPSLIGVNRARDLILTGRRVTGPEAYFIGLCDRLVEILPEEEQKEGAAREKVLRESIKLALDICDGGPIAIKQALKAVNGYEQGEAAENEAYDGVVETEDRREALIAFAEKRKPAFRGR

SEQ ID NO: 2356 - protein, 409 aa, Glycine max
MAACLQLWQCKLARPFDSLPVRRSIPLSLRCSAAPSSSKPTRSYSITLIPGDGIGPEIISVAKDVLVLAGYLEGIKYDFREMLMGGAALDATGLPLPHETLSAAKQSHAVLLGAVGGYKWDRNDKHLKPETGLLQIRKELGVFANLRPATVYSPLVDASTLKREVAEGVDIMLIRELTGGIYFGEPRGFGTNDNGEEIGFNTEIYATHEIDRIAHFAFKVAQKRRRKLCSVDKANVLEASMLWRKRFLAIAQEYPDVELSHMYVDNASMQLIRDPKQFDTMVTNNIFGDILSDEASMVTGSIGMLPSASLGASGPGLFEPIHGSAPDIAGQDKANPFATVLSAAMLLRYGLGEEKAAERIENAVMDTLNRGFRTGDIYSAGTKLVGCKQLGEEILKSVESNVPAGAAAV

SEQ ID NO: 2357 - protein, 318 aa, Prochlorococcus marinus subsp. pastoris str. CCMP1986
MEIIETDVAIIGGGPAGCTCALYTSRSNLNTVIIDKNPSVGALAITHQIANYPGVPVDISGEKLLTLMREQAVQYGTDYRRAQVFGIDVAEDWKTVYTPEGTFKAKALVLASGAMGRPASFKGEADFLGKGVSYCATCDGAFYKNREVAVVGANKEAIEEATVLTKFASTVHWITSSDPKSDNEEAMELMHSSNIKHWSRTRLLEIKGNDMGVNGVVVKNKQEEGPINLDLDGVFVYMSGSKPITDFLGDQIALKEDGGVIVDDFMSTNSDGVWAIGDIRNTPFKQAVVAASDGCIAAMSIDRYLNSRKNIRVDWIHS

SEQ ID NO: 2358 - protein, 175 aa, Triticum aestivum
MAPTVMASSATSVAPFQGLKSTAGLPVSRRSNGASLGSVSNGGRIRCMQVWPIEGIKKFDTLSYLPPLSTEALLKQVDYLIRSKWVPCLEYSKVGFIFREHNASPGYYDGRYWTMWKLPMFGCTDATQVINEVEEVKKEYPDAYVRIIGFDNMRQVQCVSFIAFKPPGCEESGKV

SEQ ID NO: 2359 - protein, 181 aa, Raphanus sativus
MASSMLSSAAVVTSQLQATMVAPFTGLKSSAAFPVTRKTNTDITSIASNGGRVSCMKVWPPIGKKKFETLSYLPDLSDVELAKEVDYLLRNKWIPCVEFELEHGFVYREHGSTPGYYDGRYWTMWKLPLFGCTDSAQVLKEVQECKKEYPNALIRIIGFDNNRQVQCISFIAYKPPSFTDA

SEQ ID NO: 2360 - protein, 962 aa, Mesorhizobium sp. BNC1
MKPPIWQWWDEHKQMSYTPTGYAPYDFANRRHIGPSPREMAEMLETVGAESLDAFIDAIVPADIRQTRPLAWGKALSERGVLERLRNVAKKNKPNASFIGQGYHGTFTPPAIQRNIFENPAWYTAYTPYQPEISQGRLEALLNYQTMMTNLTGLDIANASLLDEGTAAAEAMALCERASRTKARAFFVDHHCHPQTIAVVATRAEPLGWEVIVGDPFTYLDPSRVFGALFQYPGTYGHVHDFTAPIAALKDAGALAVVAADPLALTLLKPPGEMGADIAIGSSQRFGVPLGYGGPHAAYMTVRANLARSMPGRIVGVSIDARGNRAYRLSLQTREQHIRREKATSNVCTAQALLAVMASMYGVFHGPDGLRAIAERIHRKIVRLVKGLETLGFPIEPVSFFDTVTVECGPRRDAILASALREGINLRPIGETRIGITFDETVRRSHTEAIWRAFGGGMADDDMTPDYRLPEALLRTSSFMTHPVFHMNRAEAEMTRYMRRLADRDLALDRAMIPLGSCTMKLNATAEMMALSWPEFANMHPYAPADQAQGYAEMLSDLEAKLCQITGYDAFSMQPNSGAQGEYAGLLTIRRYHEVQGDGHRNICLIPTSAHGTNPASAQMAGMKVVVVGVAADGNIDVADFRAKAEAHAENLAACMITYPSTHGVFETTVREICDITHANGGQVYIDGANMNAMVGLARPGDIGGDVSHLNLHKTFAIPHGGGGPGMGPIGVKAHLVPHLPGNPPAGKFAISAAPFGSASILLISWAYCLLMGGEGLTQATKTAILSANYIARRLASAYPILYSSAAGHVAHECILDTRVLKERAGVTVDDIAKRLVDCGFHAPTMSWPVAGTLMVEPTESEPKAELDRFIEAMLGIAAEAEAIAAGTLDAQDNPLKRAPHTVEDLVGEWDRLYSREAACFPAGSFRTDKYWPPVNRIDNVHGDRNLVCTCPPLESYAEAAE

SEQ ID NO: 2361 - protein, 596 aa, Sulfitobacter sp. EE-36
MFQSFEVTSRPEQGPPRLAALRKELQAEALDGFLVPRADAHQGEYVAPRDDRLKWLTGFTGSAGFCAALRDVAGVFIDGRYRTQVKAQVADVYTPVAWPEVSLAEWLRAQLPQGGVIGFDPWLHAAGQIVQLEDALDGSGITLRRTDNLVDRVWEDQPAPPMNPAKVHPIDYAGEAHGDKIARLAEGLRDKGRGAAVITLPDSLCWLLNIRGSDIARNPVLHGFAVLHSAGHVDAFVAPSKLEGLEAHLGAHVTLRAPEAFLDALADLSGPVLVEKATVPVAVSDALGDRIVWGDDPCALPKACKNAAEIEGSVAAHLRDGAALVEVLAWLDAQPAGSVTETQVVTQLETARRRDPALQEISFETIAGTGPNGAIMHYRVTEDTDSLLQDGHLLVLDSGGQYLDGTTDITRTIAIGTPPVEAKEAFTRVLNGLIAMSRLRWPQGLAGRDIEAVGRLPLWMAGQDFDHGLGHGVGAYLSVHEGPQRLSKLSTVPLSEGMILSIEPGYYREGAFGIRLENLAVVRSAPDLPGGDAHRAMLSWETLSFAPIDTRLIVPQMLSQDARDWLNAYHHDVAEKIGPRLSPVAKLWLDAATAPV

SEQ ID NO: 2362 - protein, 456 aa, Streptococcus pyogenes MGAS10394
MSKIVVVGANHAGTACIKTMLTNYGDANEIVVFDQNSNISFLGCGMALWIGEQIAGPEGLFYSDKEELESLGAKVYMESPVQSIDYDAKTVTALVDGKNHVETYDKLIFATGSQPILPPIKGAEIKEGSLEFEATLENLQFVKLYQNSADVIAKLENKDIKRVAVVGAGYIGVELAEAFQRKGKEVVLIDVVDTCLAGYYDRDLTDLMAKNMEEHGIQLAFGETVKEVAGNGKVEKIITDKNEYDVDMVILAVGFRPNTTLGNGKIDLFRNGAFLVNKRQETSIPGVYAIGDCATIYDNATRDTNYIALASNAVRTGIVAAHNACGTDLEGIGVQGSNGISIYGLHMVSTGLTLEKAKRLGFDAAVTEYTDNQKPEFIEHGNFPVTIKIVYDKDSRRILGAQMAAREDMSMGIHMFSLAIQEGVTIEKLALTDIFFLPHFNKPYNYITMAALGAKD

SEQ ID NO: 2363 - protein, 483 aa, Rickettsia akari str. Hartford
MAEFTPITIAYGDGIGPEIMEAVLYILRKAEARIRLETIEVGEKLYKKHYTAGISEESWESIQRTGIILKAPITTPQGGGYKSLNVTIRKTLQLFANIRPSVSFHPFTRTLHPNLNLTIIRENEEDLYAGIEYRQTHNIYESIKLISHTGCEKIIRYAFEYAVKNNRKKVTCLSKDNIMKFSDGVFHKVFNEIAKEYPQISNEHYIIDIGTARLSTKPEIFDVIVTSNLYGDIISDVAAEISGSVGLAGSANIGQHYAMFEAVHGSAPNIAGKDIANPSGLLNAAIMMLVHIGQGDIATLIENAWKKTIEDGVHTADIYNQQNSSKKVGTKEFAEEVTKRLGKIPTKLPRADYPLIAEKQESNIDYKIDTKEVKKLVGTDIFVNINVSSAHDIADTVNKLELGNVELKTISSKGLKLWPRDTRFETVSDHWCCRFMNKDGTEIKHLDITRLLEALSKANIDFIKVENLFEFDGVAGYSLAQGE

SEQ ID NO: 2364 - protein, 107 aa, Haemophilus influenzae 86-028NP
MTLNITSKQMDITPAIREHLEERLAKLGKWQTQLISPHFVLNKVPNGFSVEASIGTPLGNLLASATSDDMYKAINEVEEKLERQLNKLQHKSESRRADERLKDSFEN

SEQ ID NO: 2365 - protein, 336 aa, Chromobacterium violaceum ATCC 12472
MTIRLAINGYGRIGRQVLRAIYENKLHDDFKVVAVNASGDLNINAHLTQFDTVHGRFPGSVEQDGEHLILNGDKIPFFSTRNPAELPWQALDVDLVLECTGAFTTKEKCQAHLNAGAKKVLISAPGGDDVDATIVYGVNHDTLTPEMTVVSNASCTTNCLAPVAKALNDAIGIKKGLMTTIHAFTNDQVLTDVKHKDLRRARSATDNMIPTKTGAAKAVGLVLPELKGKLDGFAVRVPTINVSLVDLTFTAMRDTCKDEINEILQGAAKGSMKGILGFNTLPLVSGDFNHTEEASTFDATLTKVTGGNLVKVLAWYDNEWGFSCQMLRTARAMFGR

SEQ ID NO: 2366 - protein, 628 aa, Bordetella bronchiseptica
MCGVLGAWWRHHDEHEDARFAAGLRKLAHRGPDDRGSEHFAAPHGRLSLGHTRLAVIDLSAAGHQPMHADADRLAVVFNGEIYNYRELRSELRQIGASFRGDSDTEVLLAAWQHWGVAALRRFKGMFAFALYDRRQQTLTLARDAFGIKPMYYHAAPERLLFGSELPAVQALLPHPPRLNWQRAYDYLAYGQYDQPPDTFIAGIRQLPAGHLLTLDLRTGQAGEPMAWDDPASQECRPIGFQEAAEELRARFLDNVRLHLRSDVPIGAALSGGIDSSAIVCAMRWLEPDLPIQTFSFISDDTHRSEERWVDLVNQHCGATGHKIHIAPHELLDDLDDLIRVQGEPVGSTSIYAQYRVFKLAREHGVVVTLDGQGADELLGGYGGYPTERLASLLETGRLGAAARLLRQQGRGAPARLLQAAALAAGGRHLANLRHATGRQHAPAWLDAQVLRDQGVTMREPAHAWAAATPLRGRRLVNELAHALYHRGLGALLRHGDRNSMRFSVESRVPFLTQDLAEFALSLPERYLVSDSGQTKHIFRKAMRGIVPDSILDRDDKIGFATPEQQWMQATAPQMRQWLVDAADIPFLRNAEVTAQFDAMIAGATPFSWQAWRWVNFQRWMQHATVLP

SEQ ID NO: 2367 - protein, 241 aa, Triticum aestivum
  misc_feature (117)..(117): Xaa can be any naturally occurring amino acid
RREREREREREREREREREREREREREREREKNWNYAISYGVASTSPLSPSFNFSLELARNTQLIASFYQHLVVQRRIKNPFEDDQVVGITNYIDLGLELATGIDKSKPAESGNSSXLFQLGASWQANKNFLLKGKLGPSKSSVALAFKSWWRPSFTFSVTAENDHSKGTTSYGFGIRVEDLRKPSYERADPNYVMMSTNKEHLAPAALREFGQRPMFQADVDSGNFDHLPTELRPMSKII

SEQ ID NO: 2368 - protein, 935 aa, Zea mays
EYDALLVDRFLNILQDLHGPSLREFVQECYEVSADYEGKGDTTKLGELGAKLTGLAPADAILVASSILHMLNLANLAEEVQIAHRRRNSKLKKGGFADEGSATTESDIEETLKRLVSEVGKSPEEVFEALKNQTVDLVFTAHPTQSARRSLLQKNARIRNCLTQLNAKDITDDDKQELDEALQREIQAAFRTDEIRRAQPTPQDEMRYGMSYIHETVWKGVPKFLRRVDTALKNIGINERLPYNVSLIRFSSWMGGDRDGNPRVTPEVTRDVCLLARMMAANLYIDQIEELMFELSMWRCNDDVRVRAEELHSSSGSKVTKYYIEFWKQIPPNEPYRVILGHVRDKLYNTRERARHLLASGVSEISAESSFTSIEEFLEPLELCYKSLCDCGDKAIADGSLLDLLRQVFTFGLSLVKLDIRQESERHTDVIDAITTHLGIGSYREWSEDKRQEWLLSELRGKRPLLPPDLPQTDEIADVIGAFHVLAELPPDSFGPYIISMATAPSDVLAVELLQRECGVRPAVPVVPLFERLASLQLRPASVERLFSVDWYMDRIKGKQQVMVGYSDSGKDAGRLSAAWQLYRAQEEMAQVAKRYGVKLTLFHGRGGTVGRGGGPTHLAILSQPPDTINGSIRVTVQGEVIEFCFGEEHLSFQTLQRFTAATLEHGMHPPVSPKPEWRKLMDEMAVVATEEYRSVVVKEPRFVEYFRSATPETEYGRMNIGSRPAKRRPGGGITTLRAIPWIFSWTQTRFHLPVWLGVGAAFKFAIDKDVRNFQVLKEMYNEWPFFRVTLDLLEMVFAKGDPGIAGLYDELLVAEELKPFGKQLRDKYVETQQLLLQIAGHKDILEGDPFLKQGLVLRNPYITTLNVFQAYTLKRIRDPNFKVTPQPPLSKEFADENKPAGLVKLNPASEYPPGLEDTLILTMKGIRAGMQNTG

SEQ ID NO: 2369 - protein, 271 aa, Rhodopseudomonas palustris CGA009
MTDTQRAPQTVSSEVLYAVEDHIATITLNAPERLNTISGPMLNTLAALLTKANEDPDVRCVILTGNGRAFCAGLDLNKERGDEGLSAASSPTTLDLRNTPPTVLQAMDKPVICAVNGGAAGYGMDTALGCDIRIMAESAKLAAAFVKRGVVPESGGTWFLPRMIGWAKAAELIFTGRTLSARESLEWGLANEVVPNAELMGRARAVAKEIAGNAPLAVQAAKRMMRMGLNETFPDHVHHVYLQLLPLFKSQDMAEGIRAFLEKREPNFQGK

SEQ ID NO: 2370 - protein, 433 aa, Glycine max
MGMERVQCAYASLDEAFEIGKEAYQGQQYSQIYFARLHLMRTLLYSLVPHWKPNFPVCTVLGLEEGKECVIVGTLYKHMKLKPCILDEYSKERSVVPLVKPHNFIHPDDHLVLEDESGRVKLSGSIILPSEYVTGIVVALLGKETGAGDFLVQDVLDAGLPPQIEFPLKPREDKYVVLVSGLSVGSSSSNPLQFQLLIDHITGHLGDEKEQSIASQIVRVVFAGNLVEIPRRLLNGQNLASKDLSRMAEPIKELDILLSQIAAGLPLDIMPGPSDPANFSLPQQSLHRCLFPGSSAYNTFRSCTNPHCFEVDNVRFLGTSGQNVDDLEKYSEAKDKLEFMERTLRWRHLAPTAPNTLGCYPYTDKDPFFIESCPHVYFVGNQDKFETRVIKGSEGQLVRLICVPKFSETGVAVMLNLRDLDCHALSFGTQFSS

SEQ ID NO: 2371 - protein, 78 aa, Viola cornuta
PMDFESKDPENEVIKPTVNGVLDIMRACAKAKTVRRVVFTSSAGTVDVEEPKKPVYDESNWSDLEFVRAVKMTAWMYF

SEQ ID NO: 2372 - protein, 222 aa, Arabidopsis thaliana
MRVSQSLVPFAIIALVLSFVNAYDPSPLQDFCVAIDDLKGVFVNGRFCKDPKRVDAKDFFFSALNVPGNTNNQVGSNVTTVNVDQIPGLNTMGISLVLVDYAPHGQDPPHTHPRGSEILVLVEGTLYVGFVSSNLDNNRLFAKVLHPGDVFVFPIGMIHFQVNVGKIPAVAFAGLSSQNAGVITIANTVFGSNPPIYPELLARAFQLDASVVKELQAKFGSI

SEQ ID NO: 2373 - protein, 488 aa, Listeria monocytogenes str. 4b H7858
MADVRKLKNYIDGEWVESKTDKYEDVINPATGEVLCQVPISTRAELDQAAVIAEQAFEKWSQVAVPRRARVLFSFQQLLIQHKEELARLITLENGKNLSEARGEVQRGIENVEFAAGSPTLMMGDSLASIATDVEAANYRYPVGVVGGIAPFNFPMMVPCWMFPMAIALGNSFILKPSERTPLLMEKLVELFSEAGLPKGVFNVVYGAHDVVNGILENEIIKAVSFVGSKPVGEYVYKTGSANLKRVQALTGAKNHTIVLNDADLEDTVTNVISAAFGSAGERCMACAVVTVEEGIADEFLAALRTAAQNVKIGNGLDDGVFLGPVIREENQKRTIAYIEKGLEEGAKLTVDGRETGLSEGHFVGPTILEDVTTDMTIWKDEIFAPVLSVIRVKNLQEAVRVANQSEFANGACIFTNNAKAIRYFREKIDAGMLGVNLGVPAPMAFFPFSGWKSSFYGTLHANGKDSVDFYTHKKVVTARYSLKGYEE

SEQ ID NO: 2374 - protein, 346 aa, Debaryomyces hansenii CBS767
MVLEMDVTDVISITKPESHDIGIDSDVEMSDGEETSKNEQSIVTPGELVTDDPVWMKGHGTYFLNDKTYSSVAGNVSRVNRLLSVVPLRGRYQAETGDHIVGRITEVGPKRWKVDIGAKQSAILMLGSVNLPGGVLRRKSESDELQMRGFLKEGDLLNAEVQSIFSNGSASLHTRSLKYGKLRNGIFVKVPSNLIIKSKNHSHNLPGNISVILGVNGYIWLSKTSSSGKSNANASSNKAQASIDAHGSYNPGQGSVSITRLEEESSWEIYSDKNDPNISNSVRSNITRYYNVIKALGYGELGITEQRITMGYEASLAYANVGKLIDKDAMASICQDVINNEKMRGN

SEQ ID NO: 2375 - protein, 373 aa, Alkalilimnicola ehrlichei MLHE-1
MSQLTVKSLFEGRKGFRHDDQPRLGVLVTNLGTPDAPTTPALRRYLHEFLWDPRVVEAPRWIWWLILNGIVLRTRPKKSAAAYREVWTEEGSPLLIIGRKQTRGILERLQSRLQGPVVAELAMRYGNPSIASGLRRLRDQGAERIVVLPLYPQYSGSTTGSTFDAVADELKRWRWVPEFRFIGQYHDDERYIEALAASIREHWAEHGRGEKLLFSFHGTPRRYLLDGDPYHCQCQKTARLVAERLELSDEAWQVTFQSLFGKEVWLQPYTDATVEQLARSGLKTLDVICPGFSADCLETLEEIEGENAEIFQEHGGDKLRYIKALNDRDDHLEMLAGLVHEHSQGWPEAGGPARTLRDPQATQERARALGSDV

SEQ ID NO: 2376 - protein, 161 aa, Geobacillus kaustophilus HTA426
MKTADLCDQFLDELQVCELPFQSYGGKRMFSGPIATVDVFEDNVLVREALETVPPGTVLVVDGKGSRRVALLGDRLAQIACERGLAGVIIHGCIRDSAEIGAMPIGVMAIGTCPVKSKKEGKGARDVVLEFGGVRWEPGAYVYADADGVVVANKDLLAKNG

SEQ ID NO: 2377 - protein, 112 aa, Mesorhizobium loti MAFF303099
MKKIEAIIKPFKLDEVKEALQEAGLQGITVTEAKGFGRQKGHTELYRGAEYVVDFLPKVKIEVVLGDDAVEGAIEAIRKAAQTGRIGDGKIFVSNIEEVVRIRTGETGMDAV

SEQ ID NO: 2378 - protein, 431 aa, Fusobacterium nucleatum subsp. nucleatum ATCC 25586
MSEEKFDAIIVGGGLAGCSAAIVLANAGLAVLVVERGDFCGAKNMTGGRLYGHSLEKIIPNFAEEAPIERKITREKISLMSEDSSLDIGFGSKKLSSNNENASYTVLRSTFDRWLASKAEEAGAEIIPGILVDELIVEDGKVVGVSATGEELYADVVILADGVNSLLAQSLGMKKELEPHQVAVGAKEVIKLGEDVINQRFAVNNGEGVAWLSCGDPTLGGFGGGLLYTNKDSVSVGVVATLSDIGHSDLSINQLLDRFKEHPAIAPYLEGGTSIEYSGHLVPEEGLHMVPELYRDGVLVTGDAAGFCINLGFTVRGMDFAIESGRLAAEAVIKAHEIGDFSAATLSNYKKLIDSSFIMEDLNQYKGFPTLLGRREIFEGLPAMVDDIATKAFTVDGKQGQSLMMYVIHSVAEHTTAAKLVDFVTTVLEAF

SEQ ID NO: 2379 - protein, 211 aa, Thermoplasma acidophilum
MLVSPSIVAASPLKIQDQVRECENAGSVSFHLDVMDGNFVPNITVGPDYYEFLRSISRIRIESHLMVMRPDLYYRKFAKEGDLVLVHYESPVNTLALLKRMKDEGIDAGIVINPDTSFSKVSDLLEYAQILLIMSVYPGFSGQKFIDVSDKIHEASAFIKKNGLKTKIEVDGGINDNTARIVKNAGADIVVSASYIFGGNISERIRILSSI

SEQ ID NO: 2380 - protein, 355 aa, Prochlorococcus marinus subsp. marinus str. CCMP1375
MALSYYKEELKKTASSLATSGKGILAVDESTKTIGKRLASINVENTEENRKAYRGLLFTTEGLGEYISGAILFEETLFQAHPDGEPMVKKLEKLGVIPGIKVDKGLRPLAGGNDVETFCSGLDGLVERSSDYYAQGARFAKWRAVLQITNNGSPSKLSIKENAWGLARYARSVQESGLVPIIEPEILMDGSHSINKTAEVQEEVIKEVYMACQLNGVFLEGTLLKPSMTVQGADCKDKADPQKISELTIRTMERCVPASVPGIVFLSGGLSEEAASIYLNLMNKQPRKANWNVGFSYGRALQHSCLKEWGGKNLEAGQKALLARAQANSEASKGIYVAGSQPSSDEALFVAGYKY

SEQ ID NO: 2381 - protein, 1375 aa, Rubrobacter xylanophilus DSM 9941
MGSEGETPDAREKRLLEFSHDAVLARDEDGRISFWNRSAERLYGWSSSEALGRNARELLKTRSGEPLEEIEERVRSEGAWEGELRQHARDGRPLVVECRWVRAGAGNIVEFSRDTAERQKAEEYRSVLEAIEDGYFETDLAGNLTFANQALGRILGYPASRLLGKNSRQYMDRENARKVHEAFKEVYATGRAARGLVWEMIPRTGSPRCVEGSVSLIRDGSGRPCGFRGILRDITERLRMEERLRSSEAELRALFAAIDDIVLKLDREGRCLDIAPSNPSPLYRPGREMVGRNVREIFPVDEKEPLLDSVRRVLQTGRPAAMECSMQLGYRRLYFDVSISPEGEGAAVLVARDVTRERLAEQELRRAEERYRRLIEQIPGIVYTEDARTGETLYDSPRVEEILGYPADTYRKDPNYWQKIIHPEDRELLRALEERASREGKLSAEYRVFAADGRVVWVREEGALIPGEEGRPDVWQGIILDITERKRAEQALHESEQRFRRAFDDAPIGMALVGLDGRWLQANRALCEIVGYPRERLLQKTFQDITHPEDLDADLELLRRLVAREIPGYQMEKRYIHASGRIVWVLLSVSLVTGENDEPLYVIAQVQDITERKRIEEELREAKEQAEAASRAKSEFVANMSHEIRTPMNGVIGMAELLLDTPLTPEQREYARTIRSSGEALLAILNDILDFSKIEAGRLSLERIPFEIHKEVEEVVSLLAPRAHAKGLELICFIEPGVPPLIKGDPFRLRQVLTNLIGNAIKFTEEGEVVVSASLSKEEKKKSAPAGERGGEIELRFEVKDSGIGIQEEQQKHLFEAFSQADASTTRRYGGTGLGLAISRQLVEMMGGEIGLKSSPKEGSTFHFSARFVLPEEEEEKSPKTPPEEGEGGGARRTREEEERGRRESLAGLRVLVVDDNATNRTILCRQLEAWRMEPKSVGGAQEAIRELEASGTFLASSSSGYDLVILDMQMPETDGLELARRIKSRLQEEEEKRGGAFSALRLMLLTSMDPQTKEKIKASGTVEACLQKPVRQSQLYDAIATLFQKKKEEERPLPLPAHQKEEEKEGKERPLILLAEDNPVNQQVAASMLKKLGYRVELAQNGEEALKKLFPPPSSPPSSSGREEGGGSPKKKYAAVLMDIQMPKMDGLEATRRIRSKEEEGVLRLPRTPIIAMSAHAMQEDRERALKAGMDHYISKPVKKEQLKEALERFVAATEGQKERPSSCPPGKKHREPERGGEGAALDPDSLKELDELGEGVFEELCQLFLEDAPRKLAGIKEALRLEAKEGGEKATSSSSSFAPREEVGRLSHALKGSAASLGAKRLAGLCQRLGEEAGGTGSEEQLLRLVWEMERELERVRGEIAARGGGGGEERAR

SEQ ID NO: 2382 - protein, 546 aa, Sulfitobacter sp. EE-36
MTLNLSMPGQGDLKPRITVFGVGGAGGNAVNNMIEKELDGVDFVVANTDAQALQQAKAESRVQLGIKVTEGLGAGARASVGAAAAEESIEQIVDHLAGAHMCFITAGMGGGTGTGAAPIIAQAARELGVLTVGVVTKPFQFEGIKRMRQAEDGIEALQKVVDTLIIIPNQNLFRLANEKTTFTEAFSMADDVLYQGVKGVTDLMVRPGLINLDFADVRAVMDEMGKAMMGTGEAEGEDRAIQAAEKAIANPLLDEISLRGAKGVLINITGGHDLTLFELDEAANRIREEVDPDANIIVGSTLDTELGGVMRVSVVATGIDAVDVNTEMPVPRRSMSQPLPAKAPEVEQAPAAEAPAPVAAQAEYEEEPQQQLFKEEPAVNHGGFSDTSYEDEASDADDLPPPAYRPEVASFQPRREEVNVDAQEQEAFVAPRAPAPGTPSPEALARLRAAAQKASPSQQQQRQPQAQPQQQRQQPAAEQGEKRFGINSLINRMTGHGEAETQQQRPARQQPPVQTRATSAAPQPRDVQDEDQERIEIPAFLRRQAN

SEQ ID NO: 2383 - protein, 364 aa, Rhodopirellula baltica SH 1
MPQSFHLVILGGDGIGPEVCDQSVRLLEIMQPHLDGVEFQLDRHSVGVGEYQRSGEALPQSAYDACLASDAVLLGAMGLPNVRYPNGKEIAPQLDLRERLQLYGGVRPIRLYHEADTPLKGHGPGEIDFVLVRESTEGLFYGRDAIADLEADEATNLLRITRSASERVCRLAFETARRRDGKKTVTLIDKANVLSSMVYFRHVFDEVAKEFLDIKAEHVYVDAAALFLVRRPQDFDVMVTENMFGDILSDLAAGLVGGMGMAPSGDIGDDAAVFQPSHGSAPDIAGQSIANPIAMHLSTAMMLEWLDHPETRRAADALNAAIADVLSDPTQRTADMGGNLSTVEITDKIAERLSKRLQGETTAV

SEQ ID NO: 2384 - protein, 489 aa, Burkholderia sp. 383
MSTVQETLALKDPSLFRQQAYVNGEWQGATNGETFEVRNPATGGLLGTVPAMGTAETRHAIEAANAAWPAWRKKTAKERAVVLRKWHDLMMEHADDLALILTTEQGKSLAEAKGEIGYAASFLEWFAEEGKRVYGDTIPTPASDKRIVVTKEAIGVCAAITPWNFPAAMITRKVGPALAAGCPIVVKPAEATPFSALAMAVLAERAGVPAGVFSVVTGDPKAIGGEMTSNPIVRKLSFTGSTPVGRLLMSQCAATVKKVSLELGGNAPFIVFDDADLDAAVQGAIASKYRNSGQTCVCTNRFYVHEAVYDQFAQKLAAAVGQLKVGRGTEPGVTQGPLINEAAVLKVEAHIEDALAKGATVVTGGKRHALGHGFFEPTVLTGVTPAMKVAKEETFGPLAPLFKFGSDDEVIRLANDTEFGLAAYFYSRDIGRVWKVAEALEYGMVGVNTGLISNEVAPFGGVKQSGLGREGSHYGIDDYVVIKYLCLAV

SEQ ID NO: 2385 - protein, 270 aa, Buchnera aphidicola
TINTSHVEYDTELRHYAHVDCPGHADYIKNMITGAAQMDGAILVVAATDGPMPQTREHILLGRQVGVPYIVVFLNKCDMVDDEELLELVEMEVRDLLTQYDFPGDNTPIIRGSALKALEGDPEWEAKIIDLSKFLDSYIPEPKRAIDQPFLLPIEDVFSISGRGTVVTGRVEKGVVKVGEEVEIVGIKKTTKTTCTGVEMFRKLLDEGRAGENVGVLLRGTKRDEIERGQVLAKPGSIHPHTTFESEVYVLSKEEGGRHTPFFKGYRPQF

SEQ ID NO: 2386 - protein, 584 aa, Solibacter usitatus Ellin6076
MGRLLSVNVGLPRDITWRGETVHTGIWKHPVSGRQMVRRLNIAGDGQGDLAGHGGEHRAVLVYQSASYRYWESQLNRKNLTYGQFGENFTVDGLPDDEVFIGDRYRIGGALFEVTQPRVTCYRVGIRMEEPQMAALLVSHHRPGFYLRVLEEGDVGGGDEITKVAEGPERITVAAIDALLYLPGHPREQLESALRIPALPPGWKGSLQALLNRGNAESGNPGLTGLAGAPPAWSGFRSLRVSKVQQECASVFSLCFEPVDGPALPAALPGQFLVFRLHTKPGLPPILRNYSLSSAPGSSTYRVSVKQEVNGAGSSFLLNHVNAGDVLEVSAPRGDFTLLGGDGPVVLVSAGIGATPVLAMLHALASTRSPREVWWLYGARDRKEHPFAKESRELLQSLARAQSHIVYSRPQPDDRLGLDYDSPGHLDIPLLDRLGVPQNADFYLCGPPSFLGSFTADLAKRGVDSARIHTEIFGPRESITPGIAPAPRPPAHLPAGAPGTGPQVAFARSGITVPWNPTFRSLLELAEACDVPARWSCRTGVCHTCECALIGGTVEYQTLPLEPPAEGNLLVCCSQPQGDVEIDL

SEQ ID NO: 2387 - protein, 564 aa, Pseudoalteromonas tunicata D2
MTNKDTKNFLYIPHSGPKLIETPLLNKGSAFTKRERESFNLMGLLPPRFESIEEQVKRCYQQYSSFTDNLNKHIYLRAIQDNNETLYYRLVRDHLEEMMPIIYTPTVGDACEQFSDIYRSARGLFISYEDRHQIDDILRNATKGKVKVIVVTDGERILGLGDQGIGGMGIPIGKLSLYTACGGISPAYTLPVMLDVGTNNEKLLNDPMYMGARHKRIGQEEYDEFLDLFINAVKRRWPNVLLQFEDFAQPNAMPLLKRYRNEICSFNDDIQGTAAITVGSLLAACRVKGEKLSDQTVAFVGAGSAGCGIAEQIISQMVFEGISDAQARSQIFMVDRFGLLTDGMADLRDFQQALVQNDTTLADWTFSGEYASLLDVMHCAKPHILIGVSGQPGLFTEQVIRAMYQGCERPIIFPLSNPSKQVEAVPHDVIHWTEGQAIVATGSPFSPVEYDGKTFPIPQCNNSYIFPGIGLGVIAAKAKTITDEMLMVSSETLAASSPLANTGKGSLLPALTQIEALSKEIAFAVAKKAIEQGVALEISDDALRSAIDKNYWLPQYRDYKRVSI

SEQ ID NO: 2388 - protein, 636 aa, Lycopersicon pimpinellifolium
MATQCYDPENSASRYTLLPDQPDSGHRKSLKIISGIFLSVFLLLSVAFFPILNNQSPDLQIDSRSPAPPSRGVSQGVSDKTFRDVAGASHVSYAWSNAMLSWQRTAYHFQPQKNWMNDPNGPLYHKGWYHLFYQYNPDSAIWGNITWGHAVSKDLIHWLYLPFAMVPDQWYDINGVWTGSATILPDGQIMMLYTGDTDDYVQVQNLAYPANLSDPLLLDWVKFKGNPVLVPPPGIGVKDFRDPTTAWTGPQNGQWLLTIGSKIGKTGVALVYETSNFTSFKLLDGVLHAVPGTGMWECVDFYPVSTKKTNGLDTSYNGPGVKHVLKASLDDNKQDHYAIGTYDLGKNKWTPDNPELDCGIGLRLDYGKYYASKTFYDPKKERRVLWGWIGETDSESADLQKGWASVQSIPRTVLYDKKTGTHLLQWPVEEIESLRVGDPTVKQVDLQPGSIELLRVDSAAELDIEASFEVDKVALQGIIEADHVGFSCSTSGGAASRGILGPFGVIVIADQTLSELTPVYFYISKGADGRAETHFCADQTRSSEAPGVGKQVYGSSVPVLDGEKHSMRLLVDHSIVESFAQGGRTVITSRIYPTKAVNGAARLFVFNNATGASVTASVKIWSLESANIQSFPLQDL

SEQ ID NO: 2389 - protein, 754 aa, Symbiobacterium thermophilum
MKFTRRSFVKASALATAMVAAGCSPQPVAPKQNPETEGATWYKTVCRYCGVGCGVMVAAKDNRVVAVKGDTENPVNKGLLCVKGYYLDRIMNTEEGRILKPLIRKNGQLTEASWDEALDLVAARFREAIDQHGPDSVGFYGSGQNLAEETYIANKLFKGCIGTNNVEGNPRTCMASAVAGFLSTFGKDEPMGNLDDIEHADTFFIIGSNTAEAHPIIYSRITTRKQTGKDVKVILADPRRHRVADIADIFLPFRPGTDLALLNAFAQVIIEEGLHDPDFIERHTTFQDGNGAITFEQYVAFLQDYTPEKVAPITGLSPDDIRAAAREIGARGRKTMTLWCMGINQRTVGTWLNNAIYNLHLLTGKICQPGNSPFSLTGQPSACGSVREGGGLSHLLPCGRQVTNEQHRKEVAAVWGVDYTRMSDKVGYHTMEMFRAAGDGRIKALLISCTNPGHSLPNLNSVRASLEKTFLVVMDAFHNRTTELADVVLPSALWCEKEGIYGNTERRTQHLAKAVEPKGEARPDVWILLEIAKRLGYGEYFSHYTSNEVIWEEFRKMGGGGTGYDYAPYERYKQERGLRWPVNDKQPAGTTLRYVEGDDPFVPEGAGIYFYGKPDGKAVIYARPHRDPAEVPDAEYPFYLSTGRILEHWHTITMTKRVPEIMKGAGEFYCEIHEEDAARLGIQNGDLVKLTSRRGQVVATARVGGRAVPQKGLVFLLMHDDRTERLANFLTNDAVDETSKQMEYKVCAVRVEKA

SEQ ID NO: 2390 - protein, 421 aa, Triticum aestivum
  misc_feature (145)..(145): Xaa can be any naturally occurring amino acid
  misc_feature (406)..(406): Xaa can be any naturally occurring amino acid
MAMASPFSPASAAAASPALFSVSTSRPLSLTTAATAAVSARAPCRGSRGFRRGRFAVCNVAAPSAAVQETKPAAAAKESQRPVYPFPAIVGQDEMKLCLLLNVIDPKIGGVMIMGDRGTGKSTTVRSLVDLLPDISVVVGDPFNXDPYDPEVMGPEVRDRLLKGEDLTVTTTKITMVDLPLGATEDRVCGTIDIEKALTEGVKAFEPGLLAKANRGILYVDEVNLLDDHLVDVLLDSAASGWNTVEREGISISHPARFILIGSGNPEEGELRPQLLDRFGMHAQVGTVRDAELRVKIVEERARFDKDPKTFRQSYLEEQGKLQDQITSARSNLGSVQLDHDLRVKISQVCSELNVDGLRGDIVTNRAAKALAALKGRDIVTVEDIATVIPNCLRHRLRKDPLESIXDSGLLVVEKFYESLG

SEQ ID NO: 2391 - protein, 97 aa, Arabidopsis thaliana
RSSAHASAPKLWINLFSPSKVLRRSYRAAKMDPCHSLIHTDDVPATPKANNDITYITSNGGRANCMQEWPPIGKKKYETVYNLTDLTESELANDVDY

SEQ ID NO: 2392 - protein, 263 aa, Oryza sativa (japonica cultivar-group)
MLHVVYRVGDLDKTIKFYTECLGMKLLRKRDIPEERYTNAFLGYGPEDSHFVVELTYNYGVESYDIGTAFGHFGIAVEDVAKTVDLIKAKGGTVTREPGPVKGGKSVIAFIEDPDGYKFELIERGPTPEPLCQVMLRVGDLDHAINFYEKAFGMELLRKRDNPQYKYTIAMMGYGPEDKNAVLELTYNYGVKEYDKGNAYAQIAISTDDVYKTAEVIRQNGGQITREPGPLPGINTKITACTDPDGWKTVFVDNVDFLKELEE

SEQ ID NO: 2393 - protein, 847 aa, Desulfovibrio desulfuricans G20
MRLRWRRLADTPVIMAYCQLTLCLQTREALMMYAVHALLKALWRLEKENETLRSALSGTQHAAQARPLGGLPYAEVALRPGAGEQTGGEAGKQADTSPEMGRDLYVSHVSDALLELAGMTAPLKDPADIFTAVPWQLALLCTQSTPVLVSIPLRIRTAQGGSLPVLAMPLPLPHHDSAASRTSWRFMVLPVDGVPCEDGINLTRAMADNMIDMLWAKDTKGRYLFANRAICEKLLCCDGIDPLGRDDIYFARRQRALGWQHTFGELCLNSDDIVLLSQKPGRFVEDGLVQNKYLALEVQKSPLYDPRGVLIGTVGTGRDITRQKEAEEALRRSEHRFGMVLRATSDIIWAYDIAKDTMTCGKMDSPDPFRAMQECHCLPVHHEELKDIKDHVSRFFREGGDNLQHEFNLTAHDGNTIWLLSRGRVMEFDEKGAPLLAVGSHTDITELKTAQVAAEAAAKAKSAFLATMSHEIRTPLNGVLGMLQILGNEITDPKPLRLTRTALDSGRKLLAIINDILDFSTIDAGAAPLDHAPLRIRETVNSVLANFSEEVRQKGLTLTAVVDRAVPDVLVGDESRIRQILFNLVGNAVKFTREGSVRVDVLLLTAPADEEARLLVTVEDTGIGMEAEMLPRIFDPFFQVDGTYRRRYQGTGLGLGIVRSLVSMMNGNISVESTPGVGTTICCSLLLRKAQQQEQPAGGQEQEIPALPPARILLAEDEEVNRMAATYLLRKMGHTVTAATSGLHVIELLQDHEPDCILMDIQMPDMDGIETTKVIRGGQIAGLENIPIIALTAHAMKGDKEIFLAAGMDGYISKPIDAAELQRELYRILHTGKNKKPPHTKHDGTQE

SEQ ID NO: 2394 - protein, 263 aa, Rhodopseudomonas palustris CGA009
MTELIPIELRDGVALLTLNRPEKLNALSYALIDRLMQRLDAIEVDNAVRAVILTGASERAFSAGADIAEFSASVARGADHAVRDFVRRGQTMTARLESFNKPVIAAVNGLAYGGGCEITEAVHLAVASDRARFAKPEIKLAMPPTFGGTQRLPRLAGRKRALELLLTGEPFSPAHALAIGLVNRVVPHEELIGAADALARQIIRHPPGAVAAVITATTRGLNLSIDEGLLVERAQFAMLAGREELSHGLAEWRNRPRDAAQTG

SEQ ID NO: 2395 - protein, 103 aa, Glycine max
  misc_feature (47)..(47): Xaa can be any naturally occurring amino acid
LQCAASFIMSAPMAHAPITCWHVTNILINCITYLHNRRTPSSVYYNXMKSLNANAKTTPNLHTACNCLNSATSQISCFKTNNVALLPGKCRVSIPYKINTFTN

SEQ ID NO: 2396 - protein, 104 aa, Magnetospirillum magnetotacticum MS-1
MKIVTDSSFEAEVLKAPGPVLVDFWAEWCGPCRQIAPALEELSKDRADKITIAKINIDENPGTPGKYGVRGIPTLMIFKNGQVAATKIGALPKSKLYEWVDSSL

SEQ ID NO: 2397 - protein, 560 aa, Arabidopsis thaliana
MDFDEYEYLEKTVENPHLENEVGNGGGDEKVKSEGKERSRSSRHRGDKKKERDEDEDGRRSKRSRSHHRSRSRDRERDRHRSSREHRDRDREKDVDKEERNGKDRERDRDKDRDSKGRDHEKDRSRRSRSRSERHRSQEREKSLEIEPKERETKDRDRDRRRHKDKKEDKVEPEADPERDQRTVFAYQIALRATERDVYEFFSRAGKVRDVRIIMDRISRRSRGIGYVEFYDTMSVPMAIALSGQPLLGQPVMVKPSEAEKNLVQSTTAAAGAGGMLGPYSGGARRLYVGNLHINMSEDDLRKVFESFGSVELVQVPRDETGLCKGFGFVQFARLEDARNALNLNGQLEIAGRAIKVSAVTDQTEVPEAGQTQTTGDLDDDDGGGLSLNAQSRALLMQKLDRSGTASSTGLTTAASFNGGVSTISSLAAPALVQGSFPAVAGLAGGIIPGVIPAGFDPIGVPSECLLLKNMFDPSTETEDDFDEDIKEDVKEECSKFGKLNHIFVDKNSVGFVYLRFENAQAAIGAQRALHGRWFAGKMITATYMTTEAYEAKFPESKVV

SEQ ID NO: 2398 - protein, 174 aa, Triticum aestivum
MAPAVMASSATTVAPFQGLKSTAGLPVSRRSSASLGSVSNGGRIRCMQVWPIEGIKKFETLSYLPPLSTEALLKQVDYLIRSKWVPCLEFSKVGFVFREHNSSPGYYDGRYWTMWKLPMFGCTDATQVLNEVEEVKKEYPDAYVRVIGFDNLRQVQCVSFIAFRPPGCEESGKA

SEQ ID NO: 2399 - protein, 291 aa, Listonella anguillarum
MNEDNPQNSEGPSRKSFFERLGQLFQGDPRDRQELVDVIRDSEINDLIDHDTRDMLEGVMEISEMRVRDIMIPRSQMVTIDKNDDLDTLIALITDAQHSRYPVISEDKDHVEGILLAKDLLKYLGSDSAPFNILEVIRPAVVVPESKRVDRLLKEFREERYHMAIVVDEFGGVSGLVTIEDILEEIVGDIEDEFDDEEQLDIRKLSKHTFAVKALTTIEEFNETFGTKFSDEEVDTVGGLVMTAFGHLPSRGEVVEIDKYSFKVTAADNRRVVQLQVTIPDLESLPVIAEE

SEQ ID NO: 2400 - protein, 297 aa, Azoarcus sp. EbN1
MSILINKDTKVITQGITGKTGQFHTEKCIEYANGKNCFVAGVNPKKAGEKILDVPIYGSVKDAKQATGATVSVIYVPPAGAADAIWEACEADLDLAICITEGIPVRDMLIVRNKMKQKVAKGGKETLLLGPNCPGLITPDEIKIGIMPGHIHRKGRIGVVSRSGTLTYEAVAQLTEIGLGQSSAVGIGGDPINGLKHIDVMRMFNDDPDTDAVIMIGEIGGPDEAEAAQWCKANMKKPIVGFIAGVTAPAGKRMGHAGALISGGADTADAKLAIMEECGFTVTRNPSEMAKLLKAML

SEQ ID NO: 2401 - protein, 129 aa, Listeria innocua
MTAKMLHTCIRVKNLTESIAFYEKALGLKEVRRKDFPDFEFTLVYMAFEEGGFELELTYNYDQKEAYDLGNGYGHLAVGVPDVRALLEEHKEAGYTVTDLKGLPGEDPFYYFLTDPDGYKTEIIQDGAL

SEQ ID NO: 2402 - protein, 121 aa, Oryza sativa
MAGARRTMALVALVAVVAAAVVAERASAAVSCGDVTSSIAPCLSYVMGRESSPSSSCCSGVRTLNGKASSSADRRTACSCLKNMASSFRNLNMGNAASIPSKCGVSVAFPISTSVDCSKIN

SEQ ID NO: 2403 - protein, 664 aa, Coccidioides immitis RS
MSVTTVLHPVQHPSIGSLKQQPQMNLPSSDGTLDKFPALDDESHRTPADADVPLSASNFRYSPEPFWLPRKNGTLSHGFPSSRKQRPRKSISEAIGSFKKRSASVSVNAQELAEALKAPVSYRLIGLCIVWYMTSALTNTSSKEILNALPKPITLTIVQFGFVSTCCLLLSYLASVFPTLRSTVPALKNGIRYPTLEVISTALPLALFQLAGHILSSMATSQIPVSLVHTIKGLSPLFTVLAYRVLFRIRYARATYLSLVPLTMGVMLACSAGFSTNFFGILCAFCAALVFVSQNIFSKKLFNESSRIEAEGQALTGRKLDKLNLLCYCSGLAFFLTAPIWFFSEGYPLLMDLLQDGAIDLTEKKGSLDHGPLILEFIFNGMSHFAQNILAFVLLSMISPVSYSVASLIKRVFVVVVAIVWFGNATTPIQAFGIGLTFVGLYLYDRNSHEDAADRRANADHFHIKKTILPLSVRNTNNNNKGWSSNGYAFPPIKEGSPENTKGYISASTGNFKKDDSGPNGRPRKSSAVRPWMPPGTKQESTWQPGDSAKTHPHNYVDGRLLKCILKSEDVATVDWKFQRKPIENNTNRRNDVVLVTRNPPSLPIIPFSSLSPFSSLSYFSPCDIFSSLQDAAAIVPCGGPLEEMVQTQLLPHIRNDCPSSSGG

SEQ ID NO: 2404 - protein, 827 aa, Haemophilus somnus 2336
MNLSRRDFMKANAALAAASVAGLIIPVKNVNAADTSITWDKAVCRFCGTGCAVLVGTKDGRVVASQGDPDAEVNRGLNCIKGYFLPKIMYGKDRLTHPMLRMKNGQYDKEGEFTPVTWDFAFKTMAEKFKSALKAKGPNGVGMFTSGQSTIFEGVAKSKLFKAGLLSNNIDPNARHCMASAAVAFVRTFGIDEPMGCYDDIEHADAFVLWGSNMAEMHPILWSRISDRRLANPDTVSVNVLSTFEHRSFELADLGILLKPQSDLAILNYIANYLIENNAINREFIEKHTKFKRGETDIGYGLRPQDPREQTAKNVKTAGKMYDSSFEEFKKLVAPYTLEKAHEISGVPKEQLEKLAKLYADPNKKVVSYWTMGINQHTRGVWANHLIYNIHLLTGKISLPGCGPFSLTGQPSACGTAREVGTFIHRLPADLVVIKPEHRKIAEKIWKLPEGLISDKLGFHAVAQSRALKDGKMQVLWQMCNNNMQAGPNINEETYPGWRNPDNFIVVSDPYPTVSALSADLILPTAMWVEKEGAYGNAERRTQFWRQQVKAPGEAKSDLWQLVEFSKYFTTDEVWPAEILAKNPAYQGKTLYEVLYLNGQVNQYSNDELKGRLNDEAYHFGFYIQKGLFEEYASFGRGHGHDLADFDTYHKARGLRWPVVDGKETLWRYREGYDPYVKAGEGVSFYGQADKRAVILAVPYEPPAEVPDRKYDLWLTTGRILEHWHTGSMTRRVPELHRSFPNNLVWMNPNDAKKRGLKHGDKIKVISRRGEITSYIDTRGRNKCPEGLIYTTFFDAGQLANKLILDATDPISKETDFKKCAVKVVKA

SEQ ID NO: 2405 - protein, 381 aa, Magnaporthe grisea 70-15
MLGTSRSAQVSSGINSLIQIDASRTFATVQSDIFKPSKYGGKYTVTLIPGDGIGAEVAESVKTIFKADNVPIEWEQVEVSGIADSAAPSGRTEDLFKESVASLRRNKLGLKGILHTPISRSGHQSFNVAMRQELDIYASISLIKNIPGYETRHKDVDLCIIRENTEGEYSGLEHQSVPGVVESLKIITRAKSERISKFAFSFALANNRKKVTCIHKANIMKLADGLFRSTFHQTAKEYPTLEANDMIVDNASMQCVSRPQQFDVLVMPNLYGGILSNIGAALVGGPGIVPGCNMGRDVAVFEPGCRHVGLDIKGKDQANPTALILSGSMLLRHLGLDDHANRISKAVYAVIAEGKTRTRDMGGEATTNQFTKAILDKMETF

SEQ ID NO: 2406 - protein, 458 aa, Lactobacillus johnsonii NCC 533
MVKKTVPKKLTFMSIYFLGINGIIGSGAFLLPQSIYKDMDLLSVVVLLSAALTVGLIALCYADLASRFTGSGAAWLYSYNAFGRFAGYELGVFTWFLGCCTYAAEVVAFLTTLKSFVPAFNQSSVYFAVGIGLVLLFSIINFFGRALVKIIDNTSSIAKLSTIILFIIVGMFFMHIANFHPVLPAAAAKGVGPFFHHFGAAFSVVFYLFSGFSFIPIAASQMKDPAKNIPRALVAVMVTVTILYTLMVLIAIGILGHKMSWYTIPIANAFKSAVGEWGYVIIIIGVLLSIFGVAFTCSFNTPALIASLALEHQLLPNWVGKKNKFDAPWVGIILTAAVTLLLITQSYLFLVGCIVLASFVQYVPSIFAVIKFKHTGQYPNHGFKLPGGYTIPILALLVACYLIFNFTWETILLSIVVAAVTAVLYLFLGKKRLAKMGGIPTAVREKKNHIEADLKKKN

SEQ ID NO: 2407 - protein, 573 aa, Prochlorococcus marinus str. MIT 9313
MTGADALMDALRRNGVEIIFGYPGGAILPIYDAVYKAEQQGWLKHILVRHEQGGAHAADGYARATGRVGVCFGTSGPGATNLVTGIATAQMDSVPMVVITGQVPRPCIGTDAFQETDIFGITLPIVKHSWVVRDPGDLASVVAQAFFIAASGRPGPVLIDIPKDVGQEEFDYQPVEPGSVVPAGFHRFPAPELSSIEAALDLIDDAQRPLLYVGGGVISAGAHESLKGFAERHQIPVTTTLMGKGAFDERHPLALGMLGMHGTAYANFAVTECDLLIAVGARFDDRVTGKLDTFAPRARVIHFEIDPAEVAKNRRPDVAVLGDVGVSLVKLFDLSKQKSVELRTSAWLTRIESWKNLYPLMTPPEEGPIYPQEVLLAIRDLAPEAYITTDVGQHQMWAAQYLRNGPRQWISSAGLGTMGFGMPAAIGVQVALPDEQVVCIAGDSSILMNIQELGTLIEYNIPAKIVIVNNHWQGMVRQWQQSFYEDRYSATDMLPGMPDFVALAKAFRVGGVLITERKDLRSSLKQALATPGPMLIDVHVRRDENCYPMVPPGKSNAQMVGLSNHPELSGVSL

SEQ ID NO: 2408 - protein, 119 aa, Glycine max
MAAIAGAHVFGVVSFQLKQAEMPFACSSLIRKHIGDSPQRNVALRRRANGTILPQIRAQNVLPDYVPKSEFYKVEAILRPWRVPQVSSAMLKMGIRGVTVSDVKGFGSQGGSKERQGGK

SEQ ID NO: 2409 - protein, 584 aa, Nostoc punctiforme PCC 73102
MLFDAFKNRKSPKIEFIKTDPTWRVAWGTVDESYENIAWRDEKFYVVLPRTASGFLTEKLAISSGGRFVVVGDVWLTNQVQLLQKLGIEPDSFQGSYLQVVANLWERWGFECLHQLVGMFALVVWDRERQVLKLVRDRIGVRTLYYTTTGSVRWIAPQLRTLSPHRSSELDLVALRDYLCCAFVPGERTLWEQVRELRPGTVLEFPDQKIEAYWQLQEQIVAIDQPLAWHGDRLRELLDQVVQEYLPPANEPVGVFLSGGLDSSCITALAAKFHKAPVHTFSIHFGSECPNELEFSSLVASHCQTQHHILEITFKDMWSRLPETMAYLDDPIGDPLTVPNLLLGRLARENVEVVLNGEGGDPCFGGPKNQPMLINSLYGSVTNQDALQAYLISFQKCAVDLPQLLKPEVWTAVQTAPWVFEEDLYSQASYLNRLMAMNIKFKGADQILTKVSNLTQAALLHGRSPLFDQRVVDLSMEIPPEYKLSGVEEKAVLKQVIADILPEEIIHRPKSGMMVPVQLGFRKYWQQEARDLLLNRNAAITPYLNQLPIRNWLNYQGDTWSRYGVKLWLLASLEIWLQVNQKVR

SEQ ID NO: 2410 - protein, 391 aa, Prochlorococcus marinus str. MIT 9313
MARVGVLLMNLGGPERIQDVGPFLFNIFADPEIIRLPNPALQRPLAWLISTLRSSKSEQAYRSIGGGSPLRRITEQQARELQSLLRQRGIDATSYVAMRYWHPFTESAVADIKADGIDQVVVLPLYPHFSISTSGSSFRELQRLRQTDESFRKLPIRCIRSWYDHPGYVRAMAELIAEQVRLSDVPEEAQVFFSAHGVPKSYVEQAGDPYQKEIEACTTLIMAELENLLGYGNPHSLAYQSRVGPEEWIQPYTDQVIEQLGEAGTRDLVVVPISFVSEHIETLAELDIEYRELATEAGIVHFRRVPALDTYPTFIEGLADLVGSSLEGPEINLDEAAKLAGRVKFYPQERWQWGLNTSSEAWNGRIAMLGFAAFLLELISGHGPLHAIGLL

SEQ ID NO: 2411 - protein, 124 aa, Zea mays
  misc_feature (51)..(51): Xaa can be any naturally occurring amino acid
MAAPKLATLALAVLLAATVVAPPAAVRAAMSCSTVYSTLMPCLPFVQMGGXAMPPQPCCGGIRSLLQQANNTPDRRTICGCLKNVANGANGSGTYISRAAALPSKCGVALPYKISTNVNCNTYG

SEQ ID NO: 2412 - protein, 329 aa, Prochlorococcus marinus str. NATL2A
MKGTLLFNALREAIDEEMGRDPLVCVMGEDVGQYGGSYKVTKDLYEKYGEFRVLDTPIAENSFTGMAVGAAMTGLRPIVEGMNMGFLLLAFNQISNNMGMLRYTSGGNFTIPTVVRGPGGVGRQLGAEHSQRLEAYFHAVPGIKIVACSTPTNAKGLMKAAIRDNNPVLFFEHVLLYNLTEELPEGDYVCALDQADLVKQGSDITILTYSRMRHHCLKAVELLEAKGIDVELIDLISLKPFDMNTISKSIKKTHRVIIVEECMKTGGIAAELMSLITENCFDDLDSPPVRLSSQDIPTPYNGNLENLTIIQPHQIVDAAEKIINNGGLD

SEQ ID NO: 2413 - protein, 194 aa, Chlamydomonas sp. HS-5
MDESNATCGKRLDSIGVENTEENRRAYRDLLLSTPGLGQYISGAILFEETLYQSTKDGKTFVQVMNDQGIVPGIKVDKGLVPLVNSNGESWCMGLDGLDKRCAEYYKAGARFAKWRSVISIPAGPSIIAQRDCPTAWPATPPLPSPLAWCPSSSPRCCWTVTRTLTRLWRLPRTSGLRLSSTWPTTRSCSRVSC

SEQ ID NO: 2414 - protein, 638 aa, Azotobacter vinelandii
MSEIIRVPDIGGDGEVIELLVKTGDLIEVEQGLVVLESAKASMEVPSPKAGVVKSVSVKLGDKLKEGDAIIELEPAAGAAAAPAEAAAVPAAPTQAVDEAEAPSPGASATPAPAAASQEVRVPDIGSAGKARVIEVLVKAGDQVQAEQSLIVLESDKASMEIPSPASGVVESVAIQLNAEVGTGDLILTLRTTGAQAQPTAPAAAAAASPAPAPLAPAAAGPQEVKVPDIGSAGKARVIEVLVKAGDQVQAEQSLIVLESDKASMEIPSPAAGVVESVAVQLNAEVGTGDQILTLRVAGAAPSGPRARGSPGQAAAAAAAAPAPAPVGAPSRNGAKVHAGPAVRQLAREFGVELAAINSTGPRGRILKEDVQAYVKAMMQKAKEAPAAGAASGAGIPPIPPVDFAKYGEIEEVPMTRLMQIGATNLHRSWLNVPHVTQFESADITELEAFRVAQKAVAEKAGVKLTVLPLLLKACAYLLKELPDFNSSLAPSGQALIRKKYVHIGFAVDTPDGLLVPVIRNVDQKSLLQLAAEAAELAEKARSKKLGADAMQGACFTISSLGHIGGTAFTPIVNAPEVAILGVSKASMQPVWDGKAFQPRLMLPLSLSYDHRVINGAAAARFTKRLGDLLADIRAILL

SEQ ID NO: 2415 - protein, 151 aa, Methanococcoides burtonii DSM 6242
MARIKYTTELDAETSAKAMGSELHISPKKSRELCKAIKGMRTNAARQYLEDVVILKQAVPFGRHNDSLGHRKGPMAAGRYPVKVASEMLKLLKNAESNAEYKGLNPEHMFIAHTAMNRGRVIHGMRPRARGRASPENTETVNLEMIISEVR

SEQ ID NO: 2416 - protein, 78 aa, Mycoplasma genitalium G37
MGGTVIGSSRFKQFQDPSLRKQAVLNLKKRGINNLVVIGGDGSYMGAKALSELGLNCFCLPGTIDNDVNSSEFTIGFW

SEQ ID NO: 2417 - protein, 258 aa, Pseudoalteromonas tunicata D2
MTAQIKVEKRGTIAILTMSNPPANTWTRDTLVNLKEIVTELNLDKNIYSLVITGEGEKFFSAGADLNVFASGDKGIAADMSRVFGEAFETLSDFRGVSIAAINGFAMGGGLEVALACDIRIAEAQAQMALPEAKVGLLPCAGGTQNLAWLVGEGWAKRMILCGERLKADKALEIGLVEEVVETGSSLQAALALAEKVEQQSPVAVTACKALIQKGRFGTINSALPLERELFVTLFDSKDQTEGVNAFLEKRAPKWVNG

SEQ ID NO: 2418 - protein, 341 aa, Bifidobacterium longum NCC2705
MTMFHVKHNVIIIGSGPAGYTAAIYLGRAGLNPVMVTGALSPGGQLVNTTEVENFPGFPEGILGPDLMDRMKEQAKRFGTTYIADDVSSIEACESDSVKPTYRVTLSDDSQLEASSLIIATGSSFRKLGVPGEQELSGHGVSYCATCDGFFFRNKPIVVVGGGDSAFEEALFLTRFGSSVTLIHRRDSFRASQIMVDRAKANPTITLMTNTVVTSITGTSSPTQNTGAPIAIPGLTLKRPAVAPASVSSIAVRNMVTGEESTLDTNAVFVAIGHTPATDFAAGVVDRDDDGYVVVQGASTVTSAPGIFAAGDCVDRTYRQAISAAGMGCRAALDTQAYLTD

SEQ ID NO: 2419 - protein, 954 aa, x Mokara cv. 'Yellow'
MAKASVAKLPSMDAHLRLLAPGKVSDDDKLVEYDAMLLDRFLEIVQDLHGEGIRETVQECYELSAEYERTHDSKKLDELGNVLTSLEPGDSIVVASSFSHMLNLANLAEEVQIAQRRRTKPKKGYFESNLEETFKRLIGELKKTPEEIFDALKNQTVDLVFTAHPTQSIRRSLLQKHGRIRNSLTQLCAKDITPDEKQELDEALQREIQAAFRTDEIRRTQPQPQDEMRAGMSYFHETIWKGVPKFLRRVDTAPKSIGINERLPYNAPLIQFSSWMGGDRDGNPRVTPEVTRDVCLLARLMAANLYFSQIEDLMFELSMWRCSDELRLRADELHRSSKKDAKHYIEFWKKVPPSEPYRVILGDVRDKLYNTRERARQLLSSGISDIPEEATLTNVEQFLEPLELCYRSLCACGDSPIADGSLLDFLRQVSTFGLSLVRLDIRQESDRHTDVLDAITRHLQIGSYREWPEEKRQEWLLSELRGKRPLFGSDLPKTEEIADVLGAFDVIAELPSDGFGAYIISMATATSDVLAVELLQRESRVKKPLRVVPLFEKLADLEAAPAAVERLFSIDWYRNRINGKQEVMIGYSDSGKGAGRLSAAWQLYKAQEELVKVAKEYGVKLTMFHGRGGTVGRGGGPTHLAILSQPPDTILGSLRVTVQGEVIEQSFGEENLCFKTLQRYTVGTLEHGMQLPISPKPEWRALMDEMAIVATEEYRSVVFKEPRFVEYFRLATPELEYGRMNIGSRPSKRKPSGGIESLRAIPWIFAWTQTRFHLPVWLGFGAAFKHVIKKDPKNLLILREMHNDWPFFRVTIDLIEMVFSKGNSGIAALYDKLLVSPDLLPFGEQLRANYEETKDLLLQVADHKTLLEGDPYLKQRLRLRVPYITTLNVYQAYTLKRIREPDYAVPHISNDKLNSNKTAAELVKLNPTSEYAPGLEDTLILTMKGIAAGLQNTG

SEQ ID NO: 2420 - protein, 217 aa, Candida albicans SC5314
MSSSSRKKTLLKVIILGDSGVGKTSLMQQFVNSKFSHQYKATIGADFLTKEITVDNNKSVTLQIWDTAGQERFQSLGVAFYRGADCCVLCFDVTNEKSLNNLTSWKDEFLVQSNVSNPQDFPFIIIGNKIDVDDSKKIPSLSKKLNNITNNQMGGLNYPVFETSAKDGVNVEAAFEVIAKMALQQEELNASNGNDVNDDYNDAINIHLDSEASACGC

SEQ ID NO: 2421 - protein, 125 aa, Pyrococcus furiosus DSM 3638
MATFKLVISDPKSGIAKQVEITGAETEKLIGKRIGDQIPAKELNINLNELFGKEFPEDVKLEIRGGTDKDGFPMRPDIHGPRRVRVLLSKGPGFRPKEKGERRKKTVRGNTISPEIVQVNVKLVY

SEQ ID NO: 2422 - protein, 572 aa, Burkholderia pseudomallei K96243
MASTIADYLARTLAAAGVTKIWGVTGDSLNGLSDSLRRDGGIRWMHTRHEEVAAFAAGAEAAQTGRLAVCAGSCGPGNLHLINGLFDCHRNHVPVLAIAAQIPSTEIGLGYFQETHPQELFRECSHYVELVTNASQFPRVLERAMRAAIGEHGVAVIVLPGDVALSAAPARTPSWFDFASPVTTPVDADLERLAALLDGSDAVTLLCGSGCAGAHDEVVALADALAAPVVHALRGKQHIEYDNPNSVGMTGLIGFSSGYHAMQSCDTLLMLGTDFPYRNFYPTRARIAQIDRRASALGRRAPLDVGLVGDVRATLSALLPRIRRKTRRGFVERALAHYAAARKGLDELARPSPAGRPIHPQYLTRVVDELAAADAIFAADVGTPTLWAARYLTMNGRRRLHGSFNHGSMANALPQALGAQAAHPGRQVVSLSGDGGLSMLLGDLLSARQLDLPIKVIVYNNSSLGFVAMEMKAGGYLDTGTDLHETDFAAIAKGAGLYSLRVTESEALPDALGKLLAHPGPALLDVVTDKHELAMPPKIEWAQAKGFSLYMLRAVLSGRGDEVLELAQTNLR

SEQ ID NO: 2423 - protein, 294 aa, Thermoplasma acidophilum
MKGSRRCSKMVLINKNTKVIVQGITGHQGSFHTGEMLKFGTKVVAGIAPGKGGTKFADKVPIVNSVSEAMQYEPDATMISVPAPYVKDAAYEAIDNGLKIVYILTEHVPYQDTMEIVKEASLRGITVLGPNGPGITVPFESKIGIMPNHIFKEGDVAIASRSGTLTYEIVYAVTKAGMGESTVIGLGGDRVVGLTFIDVLKMFEKDEKTKRIVLVGEIGGNNEELAADYIKKHVKKKVVAYIAGRSAPPGKRMGHAGAIIERGVGTAESKLKAFAEAGVKVADYPQDIPKLLEE

SEQ ID NO: 2424 - protein, 365 aa, Candida glabrata
MAVTKTIVVPPGDHVGQEITEEANKVLNAIQECRPDKVNFKFDHHLIGGAPIDATGVPLPDEALEASKKADAVLLGAVGGPKWGTGAVRPEQGLLKIRKELQLYANLRPCNFASDSLLDLSPLKPEIARGTDFVVVRELVGGIYFGERKEDEGDGVAWDSEKYSVPEVQRITRMAAFMALQHNPPLPIWSLDKANVLASSRLWRKTVEETIKNEFPQLTVQHQLIDSAAMILVKNPTHLNGIIITNNMFGDIISDEASVIPGSLGLLPSASLASLPDKNTAFGLYEPCHGSAPDLPKGKVNPVATILSAAMMLKLSLDLFEEGEIIEQAVKKVLDSGIRTADLKGTNSTTEVGDAVAKAVRELLA

SEQ ID NO: 2425 - protein, 340 aa, Pisum sativum
FTGTYMPSTQLTGGYRILSYLDPPEPKHDQLKRFLFFLLKSRSSHFIPEFHSSYTNLFETLEKELAKKGKAVFTDSGDQTAFNYLAKAFYGVNPSETKLGTDAPSIITKWAARQLGPILTTGLPRLIEEPLLHTFLLPPALVKKDYQRLYEFFYESSSGPVLDEAVRLGVSKEEAVHNLIFATCFNSFGGMKILFPSMLAYIGEAGVNLHRRLAEEIRSVVKSNGGKVTMAGLEQMRLMKSVVYETLRIDPPVPFQYAKAKRDLVIENHENAFQVKEGEMLFGFQPFATKDPKIFDRAEEFVGDRFLGEGEKLLKHVLWSNGPETEQTNVGNKQCAGKDL

SEQ ID NO: 2426 - protein, 349 aa, Arabidopsis thaliana
MGVDYYNVLKVNRNANEDDLKKSYRRMAMKWHPDKNPTSKKEAEAKFKQISEAYDVLSDPQRRQIYDQYGEEGLKSTDLPTAAETAAHQQQRSYSSSNSEFRYYPRDAEDIFAEFFGESGDAFGGGSSGRTRGDGGDGGGRRFKSAEAGSQANRKTPPTNKKTTPPANRKAPAIESKLACTLEELYKGAKKKMRISRVVPDDFGKPKTVQEILKIDIKPGWKKGTKITFPEKGNQEPGVTPADLIFVVDEKPHSVFKRDGNDLILEKKVSLIDALTGLTISVTTLDGRSLTIPVLDIVKPGQEIVIPNEGMPTKDPLKRGDLRVTFEILFPSRLTSEQKNDLKRVLGGS

SEQ ID NO: 2427 - protein, 314 aa, Nitrosomonas europaea ATCC 19718
MEYKDYYQTIGVPRDATQDDIKRAYRKLARKYHPDVSKEPEAEARFKEIGEAYEVLKDPEKRTAYDRLGTRWKSGQEFQPPPGWDQGFEFHGGGFTEAASQFSSFFESLFGRNQQSHRYRDREFNLHGEDSHARISIALEDSFQGGIRSLTLQHTESGQDGRPLIKERTLKVRIPKGIQQGQHIRLAGQGSPGTGGGKAGDLYLEIVFKPHPLFRVEGKDIFLDLPVAPWEAALGATVAIPTPAGTVDLKIPAGSRSGQKLRLKERGIPGTPSGDLYVVLQIVLPAADSEQARAFYREMEQKLAFNPRAGMSIR

SEQ ID NO: 2428 - protein, 392 aa, Methanosarcina acetivorans C2A
MQSIVQEAMKFSEKEKEYRKNSSSEEDIEEFGQPRIMIVGCGGAGNNTVNRLYNIGIEGAETVCINTDKQHLDNVRADKKILVGKTLTRGLGAGGYPETGKKAAELARGTLEEVLKNVDLVFITAGLGGGTGTGVAPVVAEVAKEQGAIVVGMVSSPFRVERARIFKAEEGLEDLRRAADTVIVLDNNRLLNYVPNLPIDQAFSVMDQLIAETVKGITETITVPSLINLDYADIRTIMSCGGVAVMLVGESKSQDKSTEVVRTALNHPLLDVDYKGATGSLVHVTGGPDLSLKEAEEIASMLTYELSSSANVIWGARIREDYEGRVRVMAIMTGVQSAQILGPQAGAGIFESRAEAEPIQEKRFGRLSPGRRGETAGPLRKKHEESIIDFIN

SEQ ID NO: 2429 - protein, 181 aa, Prochlorococcus marinus subsp. pastoris str. CCMP1986
MQSGNKESFLNSSQKSILILFFALIICSALVLKNFIFQPTFLLKKFGQSSIDPEIAFTNNKPTFLEFYADWCEVCKEMAPKVEDIKNKYEKDINFVFLNVDNPKWEKYIRNFNVNGIPQINIFDNDSNLELTFIGKQEEDSIKESLDNLYDKFRGDSQILNSEFSIIKDNKNYQSSPRSHG

SEQ ID NO: 2430 - protein, 355 aa, Streptococcus thermophilus CNRZ1066
MCYNENVKYIKGVSGIMKRIAVLTSGGDAPGMNAAVRAVVLKAISEGIEVFGINRGYAGMVEGDIFKLDAKRVENILSRGGTFLQSARYPEFAQLEGQLKGIEQLKKYGIEGVVVIGGDGSYHGAMRLTEHGFPAVGLPGTIDNDIVGTDYTIGFDTAVATATEALDKIQDTAFSHGRTFVVEVMGRNAGDIALWAGIASGADQIIVPEEEYDINEVVRKVKEGYESGEKSHHIIVLAEGVMGAEEFAAKMKEAGDTSDLRATNLGHVIRGGSPTARDRVLASWMGAHAVDLLKEGIGGVAVGIHNEQLVESPILGTAEEGALFSLTEDGKIIVNNPHKARLDFAELNRSLANLK

SEQ ID NO: 2431 - protein, 496 aa, Nicotiana plumbaginifolia
MAGNGVFVDIIEGDVFKYYSEGEWKKSASGKSVAIINPTTRKTQYKVQACTQEEVNKVMEVAKTAQKSWAKTPLWKRAELLHKAAAILKEHKAPIAECLVKEIAKPAKDAVTEVVRSGDLVSYTAEEGVRILGEGKFLVSDSFPGNERTKYCLTSKIPLGVILAIPPFNYPVNLAVSKIAPALIAGNSLVLKPPTQGAVACLHMVHCFHLAGFPKGLISCVTGKGSEIGDFLTMHPGVHCISFTGGDTGVAISKKAGMIPLQMELGGKDACIVLEDADLDLAAGSIVKGGFSYSGQRCTAVKVVLVMESVADALVEKVNAKVAKLTVGPPEDDCDITPVVSESSANFIEGLVMDAKQKNATFCQQYKREGNLIWPLLLDNVRPDMRIAWEEPFGPVLPVIRINSVEEGIHHCNASNFGLQGCVFTKDINKAILISDAMETGTVQINSAPARGPDHFPFQGIKDSGIGSQGITNSINMMTKVKTTVINLPTPSYTMG

SEQ ID NO: 2432 - protein, 348 aa, Streptococcus thermophilus CNRZ1066
MLNMTKKIVTLSGDGIGPEIMAAGLGVLDKVASKIEFDYDVDAKPFGGAGIDAEGHPLPKATLEAAKSADAILLAAIGGPKYDNAPVRPEQGLLAIRKELNLFANIRPVRIFDALKHLSPLKPERIEGVDFVVVRELTGGIYFGEHILEEDKARDINDYSADEIRRIMRRAFKIAQGRGKKVTSIDKQNVLATSKLWRKVADEVSLEFPDVTLEHQLVDSAAMIMITNPARFDVVVTENLFGDILSDESSVLPGTLGVMPSASHSENGPSLYEPIHGSAPDIAGQGIANPISMILSVAMMLRESFNETEGAELIENAVDKTLNQGILTRDLGGQASTAEMTAAIISNL

SEQ ID NO: 2433 - protein, 530 aa, Streptococcus thermophilus CNRZ1066
MFLLLERGLSMRKVEFLDTSLRDGEQTPGVNFSIKEKVAIAKQLEKWGISSIEAGFPAASPDSFEAVKQISAAMTTTAVSGLARSVKSDIDACYEAIKDAKFPQCHVFIATSPIHREFKLKKSKEEILEIIKEHVTYARERFDVVEFSPEDATRTELDYLLEVVQTAVDAGATYINIPDTVGFTTPEEFGHIFKYLIENVKSDREIIFSPHCHNDLGMAVANTLAAIKNGAGRVEGTVNGIGERAGNAALEEVAVALNIREDYYQATSDIVLNETVNTAELVSRYSGIAIPKNKAVVGGNAFSHESGIHQDGFLKNPLTYEIITPELVGVKKSSLPLGKLSGRHAFIEKLKELELDFVEEDIKPLFAKFKRLADKKHDITDADIRALVAGTNVENPEGFHFQDLRLTTNPDETITAAVSLVNEDGEAVEFLANGQGSVEAIFNAIDKFFNQTVRLTSYNIDAITDGIDAQARVLVSVENVDTDTIFNASGLDFDVLKASAIAYINANTLVQKENAGEMARKVSYRDLPQT

SEQ ID NO: 2434 - protein, 230 aa, Streptococcus thermophilus CNRZ1066
MVKLVFARHGESEWNKANLFTGWADVDLSEKGTQQAIDAGKLIKEAGIEFDKAYTSVLKRAIKTTNLALEASDQLWVPVEKSWRLNERHYGGLTGKNKAEAAEQFGDEQVHIWRRSYDVLPPKMDRDDEYSAHKDRRYASLDDSVIPDAENLKVTLERALPFWEDKIAPALKDGKNVFVGAHGNSIRALVKHIKKLSDDEIMDVEIPNFPPLVFEFDEKLNVVSEYYLGK

SEQ ID NO: 2435 - protein, 960 aa, Synechococcus sp. CC9605
MHSTLTSPFAQRHIGPSEAEQLRMLNALGYSDLQEFIADVVPADILDSKPPVEALPEGCGEAEALQQLKQLSETNTLRRSLIGLGYYGTATPALIQRHVFENPAWYTAYTPYQAEIAQGRLEALLNFQTLISELTGLPIANASLLDEATAAAEAMSLSFGVCRRPEATRFLVDANVLPQTWAVLQTRAEPLGISLECIDPATAPIDASVFGVLLQLPGADGCLWDPSAVIQAAHAAGALATVAIDPLAQTLMAPVGSLGADIAVGSAQRLGVPMGFGGPHAAFFATVEAYKRQIPGRLVGQSKDAEGRSALRLALQTREQHIRRDKATSNICTAQVLLAVMASFYAVHHGPDGLQAIAQRIVGLRSQLEQGLRALGYPLQLADRFDTVTVHCVLAPAVHRAAAVAGFNLRVLPDGAAPADATGFGISLDELSDQQELQALLALLAEACGQVPPQLEAAQPPSLSLPQRSQPWLSQSVFHQYRSESELLRYIQRLVSRDLSLVHGMIPLGSCTMKLNAAAELQPVSWPAFAALHPFSPADQAQGYRRLADDLEQWLAALTGFAAVSLQPNAGSQGEYAGLLVIRAWHHSRGEAHRDICLIPTSAHGTNPASAVMAGLKVVAVACDDEGNIDQQDLAAKAAEHADRLAALMVTYPSTHGVFETGIREICAVVHRHGGQVYLDGANLNAQVGLCRPGAFGADVCHLNLHKTFCIPHGGGGPGVGPIGVAAHLEPFLPGHPLQAGAASAIGPVSAAALGSASILPISWMYLRMMGAEALRQASALALLSANYLAHRLDASYPVLFRGSTGRVAHECILDLRPLKRDAGIDVDDIAKRLMDYGFHAPTVSWPVAGTVMVEPTESESLAELDRFADALVAIREEIRAIEAGTSDPQNNPLKRAPHTLAAVTADTWDRPYSRQQAAFPMEEQQESKIWPAVARIDNAFGDRNLVCTCPSVESVAVAV

SEQ ID NO: 2436 - protein, 487 aa, Burkholderia vietnamiensis G4
MTIKHWIDGREVASRDTFTTLNPATGDVIADVASGGDAEVDAAVRAAKAAFPKWANTPARERAKLMCRLAELIEKHVPMLAALETQDTGLPIAQTSKQLIPRAAENFNFFAQVCVQMNGRTYPVDDQMLNYTLYQPVGVCALVSPWNVPFMTATWKTAPCLALGNTAVLKMSELSPLTADQLGRLALEAGIPPGVLNVVHGYGATAGDALVRHSDVRAVSFTGGTVTGKRIMERAGLKKYSMELGGKSPVLIFDDADFDRALDASLFTIFSINGERCTAGSRIFVQRTIYDRFVQAFAQRANRLVVGDPADPATQLGAMITRQHWEKVTGYIRLGEQEGARVVAGGAQAPAGLAAHLRNGNFVRPTVFADVDNRMRIAQEEIFGPVACLIPFDDEDDGLRLANETSYGLASYLWTQDVGKVHRLARGIEAGMVFVNSQNVRDLRQPFGGVKESGTGREGGEYSFEVFAEIKNVCISMGSHHIPRWGV

SEQ ID NO: 2437 - protein, 237 aa, Lycopersicon esculentum
DVSKQIQQMVRFILQEAEEKANEISVSAEEEFNIEKLQLVEAEKKKIRQEYERKEKQVDVRKKIEYSMQLNASRIKVLQAQDDLVNTMKEAAAKELLNVSHHEHGIIDSILHHHHGGYKKLLHDLIVQSLLRLKEPCVLLRCRKHDVHLVEHVLEGVKEEYAEKASVHQPEIIVDEIHLPPAPSHHNMHGPSCSGGVVLASRDGKIVCENTLDARLEVVFRKKLPEIRKCLFGQVAA

SEQ ID NO: 2438 - protein, 496 aa, Pseudoalteromonas tunicata D2
MHKVPLYIAGEMCQSETSQWIDVLNPATQEIIAQVPCTTNEEMARAITSAKETFKTWKEVQISERARIMMRYAALLKEHHDEIATIICHELGKTFEDAKGDLWRGIEVVEQAANAPSMMMGETVENVARGIDTYSYMQPLGVCAGITPFNFPAMIPLWMFPMAIVCGNTFILKPSEQDPLTPMRLVELFEEAGAPKGVLQVVHGTKPQVDILLEDPAIRAISFVGSCGVGEYIYSKGTANLKRVQACVGAKNHMVIMPDAKKERLISNLVGASVGAAGQRCMGISVAVFVGQTKEWINDLKEAFSQVRPGVWDDPKAAYGPQTTPQAKARILSLIANGKKQGATCLLDGSDFTVEGYEQGNWVGPTLFTDVTTEMDLYKEEIFGPVLACICVDTLDEAIALINNSPYGNGTSLFTACGAAARKFQHEIEVGQVGINVPIPVPLPFFSFTGWKGSFYGDQHTYGKQGIRFYTETKTITARWFEDDIATGPNMSINLK

SEQ ID NO: 2439 - protein, 204 aa, Debaryomyces hansenii CBS767
MSAKFVSIPEAIEAFKNGEYLIVMDDESRENEGDLIMSAELMTQEKMAFLVRYSSGYVCVPLSTERADALNLHPMLANETDRHGTAYTVTCDYADGTTTGISAHDRALTSTKLADPNSKPVDFIRPGHILPLRAVPGLLKKRRGHTEAGVQLCELAGLQPAAVICEMVRDEDGLMMRLDDCTKFSKTHNIKMITIEQLVEHISQ

SEQ ID NO: 2440 - protein, 339 aa, Hordeum vulgare subsp. vulgare
MENILHATPAHVSLPESFVFASDKVPPATKAVVSLPIIDLSCGRDEVRRSILEAGKELGFFQVVNHGVSKQVMRDMEGMCEQFFHLPAADKASLYSEERHKPNRLFSGATYDTGGEKYWRDCLRLACPFPVDDSINEWPDTPKGLRDVIEKFTSQTRDVGKELLRLLCEGMGIQADYFEGDLSGGNVILNINHYPSCPNPDKALGQPPHCDRNLITLLLPGAVNGLEVSYKGDWIKVDPAPNAFVVNFGQQLEVVTNGLLKSIEHRAMTNSALARTSVATFIMPTQECLIGPAKEFLSKENPPCYRTTMFRDFMRIYNVVKLGSSLNLTTNLKNVQKEI

SEQ ID NO: 2441 - protein, 574 aa, Ehrlichia canis str. Jake
MKSRLNQLINLMSEYAIDLLLLHNTDEYQSEYVPVNKQRVKWLCGFSGSNATLIISREGKQHFFTDGRYILQATRELDLNDYQIHNVCDLTPWQWCVENLASNAVIAYESSLVTLSHVKKYEDCSLILRPLDQILIDKLWIRDFSMECDIVEHPLKYSGVESYKKSCEAVKYLSGKDAALITDTDVISWLLNIRNNKFVYNPSVLSRAILYSDGRVDLFVDDICSVDVKYEHLKVYSLNDLFNVLESIESIVIDASTIPMNVFQCLNQQDILIKNSDNCLLMKSEKNNVEIQGAVNAHIRDGVAVINLLYWLNVQLDNNQEITELDVESKLLSFRQEQDLFRGESFATISGFGENGAIIHYRANNNTNKLICKNGLYLLDSGGQYLDGTTDITRTIVVGEPTPEQITNFTLVLKGHIALATAVFPLGTNGGMLEVLARQYLWKSGLDYQHGTGHGVGSFLSVHEGPCAISCRNDIVLKPNMVLSNEPGYYKNGEYGIRIENLMYVEKCMDNFLRFKQLTCVPIDLKLIDSNMLNNEEISYIDQYHSFVYNTVAPYLDQKVKCWLHNACRNLKDK

SEQ ID NO: 2442 - protein, 455 aa, Sulfolobus solfataricus P2
MYKHPWLPNLDLTDEMLKEIGVNSLDDLFNDIPAEIKINRLLKVAKDKPLSEYEIEKEIYEKVKKNVELEAPPFIGAGICPHYIPNAVKFIIGRSEFYTSYTPYQPEISQGILQALFEYQSLMAELLEMDVVNASMYDWGSALAEAVLMANRINGKKTVLVPENANPFHKEVMRTWIQGKGIKIEEVKYDKNSGEVDIEDLEKKSSSNDVSAIYVQQPNFFGIFESNIEHIIDVAKHKKALSIIGVNPLSLGLIKPPGSYEADIVVGDGQELGLPLNFGGPLMGIFAVRWDMGLVRQMPGRIVGITRDVNNNMGFTLILQTREQFIKREKATSNITTNEALLALANAVYLSLLGKEGIRELAEEIYFRSHYAAKRLTEIDNVIMPFTSDFFEEFVIKFPIEYNIINDKLKERKLQGGLKLSIHTSLFCVTEVHDKKSIDLLVSTIQEAIKSVETS

SEQ ID NO: 2443 - protein, 710 aa, Synechococcus sp. WH 5701
MVVSGSAASPAGARAAATSSFPLAAITGHGTLKLALLLAAVDPGLGGVVIAGGRGTGKSVLARGLHALLPPIDVLALGEACRRLNVDPQRPDDWDATIHGRITQLGGDPSGSDPTALLPTTVIPAPFIQVPLGVTEDRLVGSVDVAASLAAGAPVFQPGLLAEAHRGVLYVDELNLLDDNITNLLLAAVGSGENRIEREGLSLSHPCRTLLIATYNPEEGAVRDHLLDRFAIALSANQLLAIEQRVAITSSALDHGSSSEAFRARWQEETDALATQLLLARQWLPDVSIAREQIAYLVNEALRGGVEGHRSELYAVRVARAHAALSGRDQVDADDLQVAVRLVIAPRALQLPPPDPEQPLEPPPPPPPPQGEQPPEPDTPDDPEPPEQDPPEQEEADEEREDDSPEDQAPPQVPEEFLLDPEAIAIDPDLLLFAAAKSRSGGSGKRSVVLSDSRGRYVKPMLPRGPVRRIAVDATLRAAAPYQKARRAREPHRTVIVEEGDLRAKQLQRKAGSLVIFLVDASGSMALNRMQSAKGAVIRLLTEAYENRDEVALIPFRGEQAEVLLPPTRSITAARRRLEQMPCGGGSPLAHGLTQAARVAANALATGDLGQVVVVAITDGRGNVPLSRSLGQPQLEGEEPVDLKEEVIQVAGRYRALGIKLLVIDTERKFIGSGMGKDLAQAAGGKYVQLPKASDQAIAAIALDALNGAA

SEQ ID NO: 2444 - protein, 640 aa, Saccharum hybrid cultivar
GRSRRRSLCAAALVLSAALLLAVAALAGVGVVPGVGTPQATSTRSISRGPDAGVSEKTSGAWSGVVDDGGRLRADGGGNAFPWSNAMLQWQRTGFHFQPQRNWMNDPNGPVYYKGWYHLFYQYNPDGAIWGNKIAWGHAVSRDLIHWRHLPLAMLPDQWYDTNGVWTGSATTLPDGRLAMLYTGSTNASVQVQCLAVPADDADPLLTNWTKYEGNPVLYPPPGIGPKDFRDPTTAWFDPSDNTWRIVIGSKDDAEGDHAGIAVVYRTKDFVHFELLPDLLHRVAGTGMWECIDFYPVATRGKASGNGVDMSDALGKNGAVVGDVVHVMKASMDDDRHDYYALGRYDAAANAWTPLDAEKDVGTGLRYDWGKFYASKTFYDPAKRRRVLWGWVGKTDSERADFSKGWASLQGIPRTVLLDTKTGSNLLHWPVEEVETLRTNSTDLSGITIDYGSAFPLNLRRATQLDIEAEFQLDRRAVMSLNEADVGYNCSTSGGAAARGALGPFGLLVLADKHLHEQTAVYFYVAKGLDGSLTTHFCQDESRSSSANDIVKRVVGSAVPVLEDETTLSLRVLVDHSIVESFAQGGRSTATSRVYPTKAIYANAGVFLFNNATAARVTAKKLVVHEMDSSYNHDYMVTDI

SEQ ID NO: 2445 - protein, 422 aa, Streptomyces antibioticus
MTRRVVITGVGVRAPGGNGTKAFWDLLSAGRTATRSISFFDASPFRSRIAGEVDFDAAAEGFGPREIRRMDRATQFAVACTREAVADSGLDLSALDPHRIGVSLGSAVASATSLENEYLVMSDAGKEWEVDPAYLSPHMFDYLSPGVMPAEVAWEVGAEGPVTMVSDGCTSGLDSVRYAVQLIREGTVDTVVAGAADTPISPIVVACFDAIKATTTRNDDPAHASRPFDGTRNGFVLAEGAAMFVLEEYEAAKNRGAHIYAEVGGYATRCNAHHMTGLRKDGREMAEAIRVSLDEARLDGTKIDYINAHGSGTKQNDRHETAALKRSLGQHAYDVPVSSIKSMVGHSLGAIGSVEIAASLLAIEHNVVPPTANLHTPDPECDLDYVPLTAREQRVDTVLTVGSGFGGFQSAMILHRPEVAAA

SEQ ID NO: 2446 - protein, 461 aa, Mesorhizobium loti MAFF303099
MPIEILMPALSPTMEEGNLSKWLKNEGDKVVAGDVIAEIETDKATMEVEAVDEGTLAKIVVPAGTEGVKVNAVIAVLAVEGEDTDKAGEGIGEEPAKAETASPAPVAAKSEAAAPVAAAPKTEIAADPDIPAGTEMVSTTVREALRDAMAEEMRRDGDVFVMGEEVAEYQGAYKITQGLLQEFGPRRVVDTPITEHGFAGVGVGAAMAGLKPIVEFMTFNFAMQAIDQIINSAAKTLYMSGGQMGAPIVFRGPNGAAARVAAQHSQCYAAWYSHIPGLKVVMPYTAADAKGLLKAAIRDPNPVIFLENEILYGQSFDVPKLDDFVLPIGKARIHKQGKDVTIVSFGIGMTYAVKAEAELRGLGIDAEIIDLRTIRPLDLDTIIASVKKTNRLVVVEEGFPQSSVGDHIANQVSQRAFDFLDAPVITIAGKDVPMPYAANLEKLALPNVGEVIEAVKAVTYR

SEQ ID NO: 2447 - protein, 481 aa, Streptomyces coelicolor A3(2)
MTSTHAFWLAGRQAAGESGFDVTSPWDGTTVGTVSLPTDAQVEEAVAAAYAVRDEFAATPAHVRAAALDHVGRRLAERTEEIARLISAENGKPVKWARGEVGRAVSVFRFAAEEARRFNGGEAQRLDTDAGGQGRLALTRRFPKGVVLGIAPFNFPLNLCAHKIAPAIAAGAPLILKPAPATPLSGLILGELLAETDLPAGSWSILPVPNDKMPALVQDERLPVISFTGSETVGYAIMDSVPRKHCTLELGGNGAAVVLADWASDEDLDRAATRIATFSNYQGGQSCISVQRVIADAAVYDRLLPRIVAAVEAQVTGDPNDDATDVGPLVSEAAAERVEAWVREAVDAGAKLLTGGKRDGASYAPTVLTELPADTTLAHEEVFGPVLSVQRVTGEAEAFAAVNDSKYGLQAGVFTHDLQAAFRAHRALEVGGVVIGDIPSYRADQMPYGGAKQSGVGREGVKFAMDDYTYERVLVLTGLAL

SEQ ID NO: 2448 - protein, 302 aa, Zea mays
  misc_feature (115)..(115): Xaa can be any naturally occurring amino acid
  misc_feature (144)..(144): Xaa can be any naturally occurring amino acid
MDGGGGAGGAEGELTAQETALYDRQIRVWGVDAQKRLSKAHVLVCGMNGTTIEFCKNIVLAGVGSLSLMDDNVVTEEDLNANFLIPPDESIYGGRSRAQVCCESLIDFNPMVRVXVEKGDPSLIDGEFLDKFDIVVLSRASLKXQRQKHSYVQKKPGGATEQQELTYSSLQEAISVPWNSLPKKTAKLYFAMRVLEDYELSEGRSPGETTLSDIDAVLARRKDMCDKMSLNESRIPTTLVERLLAAGKKEHPPVCAILGGILGQEVIKSISCKGDPVKNFFYFDVADGKGVIEDIPPPPPAK

SEQ ID NO: 2449 - protein, 477 aa, Thermus thermophilus HB27
MAKEKGLTPQSQDFSEWYLEVIQKAELADYGPVRGTIVVRPYGYAIWENIQQVLDRMFKETGHQNAYFPLFIPMSFLRKEAEHVEGFSPELAVVTHAGGEELEEPLAVRPTSETVIGYMWSKWIRSWRDLPQLLNQWGNVVRWEMRTRPFLRTSEFLWQEGHTAHATREEAEEEVRRMLSIYARLAREYAAIPVIEGLKTEKEKFAGAVYTTTIEALMKDGKALQAGTSHYLGENFARAFDIKFQDRDLQVKYVHTTSWGLSWRFIGAIIMTHGDDRGLVLPPRLAPIQVVIVPIYKDESRERVLEAAQGLRQALQAKGLRVHLDDRDQHTPGYKFHEWELKGVPFRVELGPKDLEQGQAVLASRLGGKETLPLAALPEALPGKLVAFHEELYRRALAFREAHTRKVDTYEAFKEAVQEGFALAFHCGDKACERLIQEETTATTRCVPFEAEPEEGFCVRCGRPSAYGKRVVFAKAY

SEQ ID NO: 2450 - protein, 480 aa, Methanosarcina acetivorans C2A
MAESEKEAALPPKEEFSDWYNELLWMAEIMDVRYPVKGLYVWYPFGFAIRRSTYNIIREILDNSGHQETLFPLLIPENEFMKEAEHIKGFENEVYWVTHGGKDSLDIPLALRPTSETAIYPMYKMWVRSHADFPIKLYQIVNTFRYETKHTRPLIRLREITSFKEAHTVHATWEDAEAQVKEAVELYTEIYRRLAVPVLRSRRPDWDKFPGADYTDAIDAMMPDGRTLQIGTVHHLGDNFAKTFDIKYEAPDGEQRYAHQTCYGISERSIAATISIHGDDKGLVLPPEIAPVQVVIIPIIFKKGAEEVLAACRDVQERLKKTGVKVEIDASDLRPGAKYYRWEMKGVPLRLEIGPRDLENNVAVSVRRDTGEKEQIPLPEIETGVLQKFEAIQNSLYEKAKVGLESRIFDCTELEEVKEKIQKGVATIPWCGKKECGLAMEDRIGAGILGIPLTPRGKGKEKCPVCGAETETRVYVARTY

SEQ ID NO: 2451 - protein, 413 aa, Triticum aestivum
  misc_feature (250)..(250): Xaa can be any naturally occurring amino acid
  misc_feature (363)..(363): Xaa can be any naturally occurring amino acid
CISDYRTSLHKKAGWYRSGIPGISSTHASATCCAVLCRFLLAPLAVWIFLAYKYMKTRIIIDAVEKFLRIQQMIGPARYSYTDIVAVTSHFRDKLGQGGYGSVYKGVLLPGGVHVAVKMLEGNSNCNGEDFISEVSTIGRIHHVNVVRLVGFCSEEMRRALVYEYMPNGSLDKYIFSTEKSFSWDKLNEIALGIARGINYLHQGCDMQILHFDIKPHNILLDSNFVPKVADFGLAKLYPRGDSFVPLSAXMRGTIGYIAPEMISRSFGVISSKSDVYSFGMLLLEMAGGRRNADPNMGSSSQAYYPSWVYDRLTQEEAGEISDVVVDMHDLEKKLCVVGLWCIQMRSRDRPTMSEVIEILEAXGVDSPTRCLPRPFFCDEGHIHVGGTPYQVASSRSCRAVSGGRSVGVGKNF

SEQ ID NO: 2452 - protein, 479 aa, Sulfolobus solfataricus P2
MQEDKISLDLHEIINATIDAKYNKLNQLEFHRRIVESGLSRSTIEEISRIKKEPEWMLKLRLKGLELFEKLPTPNWLPDVLSSLDISALELYVKPGVDKAQSWEELPPEIRKYYDELGIPESEKKFLGGLVAVLESEPIYSNVKIELMKKGVVMLPIDEAVSKYPDLMKEYFMKIFPASDHKFAALHGALWSGGVFVYVPKNVKITTPVEGFFVIGSELEGQFEHTLLIADEGSYIHFIEGCTAPQLKKYSFHDGMVELYAKKNAYIKFTTIQNWSKNVINFNNKRAWADENSTVEWVEGSLGSKYSFVYPSTILRGKNASSTSLVVTMTSGEGEWKDSGSKMIHAAPYTKSKVVNKNIGFNGGVNVYRGLVKVNKGAVGSKAFVKCDSLMLDDKTKAYTYPHNQVLEEDADVGHEAHTFRMNEDQLFYLMTRGIDEKEATSMLVLGFIDEIMKELPFEYATMLNKVIKLELDKLGAVA

SEQ ID NO: 2453 - protein, 348 aa, Nitrosomonas europaea ATCC 19718
MPASRGCSLVTGGGGFIGTHLVRLLLEQGERVRVLELDDVPVLDGAEVIRGSVADEAVVHRAVKGVRRVYHLAAHTDLWAPDKRIFRQINYESTRTVLREAMYADVEVVVHTSTEAILTGRGDPDQSDRTLSSSSRKRKTLGPYCQAKLMAEQAALEASRNGLSVVVVSPTLPVGPGDRHITPPTRMIVDFLNRKIPAYLDCRLNLVDVRDVAEGHILAAQRGRSGERYLLGHENIMLSRLLLMLKEITGVVMPEHKIPYWLALVVGILQEFVADHVTHKAPMAPLTGVRLAGRGNDFDSDKAVRELGFRQTPIRQALIDEIIWLVETGHINLPVHSFRKHFGSTEKK

SEQ ID NO: 2454 - protein, 305 aa, Streptococcus pyogenes MGAS315
MYDTLIIGSGPAGMTAALYAARSNLSVAIIEQGAPGGQMNNTFDIENYPGYDHISGPELAMKMYEPLEKFNVENIYGIVQKIENFGDYKCVLTEDASYEAKTVIIATGAKYRVLGVPGEEYYTSRGVSYCAVCDGAFFRDQDLLVVGGGDSAVEEAIYLTQFAKKVTVVHRRDQLRAQKILQDRAFANDKVDFIWDSVVKEIKGNDIKVSNVLIENVKTGQVTDHAFGGVFIYVGMNPVTDMVKDLEITDQEGWIITDDHMRTSIPGIFAIGDVRQKDLRQITTAVGDGAIAGQGVYHYLESFPS

SEQ ID NO: 2455 - protein, 212 aa, Arabidopsis thaliana
KALHKYDCLRANKSTSAFGLEARVPFLDKDFINTAMSLDPESKMIKPEEGRIEKWVLRRAFDDEERPYLPKHILYRQKEQFSDGVGYSWIDGLKDHAAQNVNDKMMSNAGHIFPHNTPNTKEAYYYRMIFERFFPQNSARLTVPGGATVACSTAKAVEWDASWSNNMDPSGRAAIGVHLSAYDGKNVALTIPPLKAIDNMPMMMGQGVVIQS

SEQ ID NO: 2456 - protein, 581 aa, Hordeum vulgare
MCGILAVLGCGDESQGKRVHVLELSRRLKHRGPDWSGLHQVADNYLCHQRLAIIDPASGDQPLYNEDKSVAVAVNGEIYNHEELRERLSGHRFRTGSDCEVIAHLYEEHGESFIDMLDGVFSFVLLDARDHSFIAARDAIGVTSLYIGWGIDGSVWISSEMKGLNDDCEHFEIFPPGNLYSSKEKCFKRWYNPPWFSEVIPSVPYDPLRLRSAFEKAVIKRLMTDVPFGVLLSGGLDSSLVAAVAARHFAGTKAAKRWGTRLHSFCVGLEGSPDLKAAKEVADHLGTVHHEFNFTVQVRIDAIEDVIYHIETYDVTTIRASTLMFQMSRKIKALGVKMVISGEGADEIFGGYLYFHKAPNKEEFHQETCRKIKALHQYDCLRANKATSAWGLEVRVPFLDKEFIDEAMSIDPEWKMIRPDLGRIEKWILRKAFDDEEKPFLPKHILYRQKEQFSDGVGYSWIDGLKDHAASNVSDKMMSNAKFIYPHNTPTTKEAYYYRMIFERYFPQSSAILTVPGGPSVACSTAKAIEWDAQWSGNLDPSGRAALGVHLSAYEQDTIAVGGSNKPGPMETVVNGVAIES

SEQ ID NO: 2457 - protein, 558 aa, Cucurbita maxima
MGNTCRGSFKGNIFQGYSQPEESSTPNFKRNINGSSDHSPSSINTNNLISQAFAEENKTKSKDNDCKKDYTMRKSAENQAYYVLGHKTANIRDLYTLGRKLGQGQFGTTYLCTEIMTGIEYACKSISKRKLIAKEDVEDVRREIQIMHHLAGHKNIVTIKGAYEDSLYVHIVMELCSGGELFDRIIQRGHYSERKAAELTRIIVGVVETCHSLGVMHRDLKPENFLLVNKDDDFSLKAIDFGLSVFFKPGQIFTDVVGSPYYVAPEVLLKHYGPAADVWTAGVILYILLSGVPPFWAETQQGIFDAVLKGHIDFDSDPWPLISDSAKDLIRKMLCSRPSDRLTAHEVLCHPWICENGVAPDRALDPAVLSRLKQFSAMNKLKKMALRVIAESLSEEEIAGLREMFTAMDTDNSGAITFDELKAGLRRYGSTLKDTEIRDLMEAADIDNSGTIDYGEFIAATIHLNKLEREEHLVAAFRYFDKDGSGYITVDELQQACAEHNMTDAYLEDIIREVDQDNDGRIDYSEFVAMMQKGNAGIGRRTMRNSLNLSMRDGPGAL

SEQ ID NO: 2458 - protein, 496 aa, Arabidopsis thaliana
MAGTGLFAEILDGEVYKYYADGEWKTSSSGKSVAIMNPATRKTQYKAQACTQEEVYAVMELAKSAQKSWAKTPLWKRAELLHKAAAILKDNKAPMAESLVKEIAKPAKDSVTEVVRSGDLISYCAEEGVRILGEGKFLLSDSFPGNDRTKYCLTSKIPLGVVLAIPPFNYPVNLAVSKIAPALIAGNSLVLKPPTQGAVSCLHMVHCFHLAGFPKGLISCITGKGSEIGDFLTMHPAVNCISFTGGDTGISISKKAGMIPLQMELGGKDACIVLDDADLDLVASNIIKGGFSYSGQRCTAVKVVLVMESVADELVEKVKAKVAKLTVGPPEENSDITAVVSESSANFIEGLVMDAKEKGATFCQEYKREGNLIWPLLLDNVRPDMRIAWEEPFGPVVPVLRINSVEEGINHCNASNFGLQGCVFTKDINKAILISDAMETGTVQINSAPARGPDHFPFQGLKDSGIGSQGVTNSINLMTKVKTTVINLPTPSYSMG

SEQ ID NO: 2459 - protein, 415 aa, Oryza sativa (japonica cultivar-group)
MSAAQQQKHEVDRATVAGAVAALFKWMRARAAEAPPNLLADERDDLLLLQLSLRRIPPSPTTKPRLLPLPHPVIVPGESASICVISDDRPKSRSPAASDLLDASRSHHLPVSEVIPLSALRTDYRPYESRRRLAASHDLFIADRAVLPLLPRVLGKAFYSTKKAPVAVDFARTGWLEQVRKVMNSTFLYLRTGTCSGIKVGRLDMKEEDTVENVMAAVEAAVENVPKKWANVRSLHLKAVDSVALPIYQAVPELGMKIEVRFAQLEGEVGSGEVIDASEAGAALKGVGKKKAKKALKHVEEENAGEEAAQESGKRKRGKKQLAEDLMEQDIQDVSEKRKKVKEGTPAAETPKISKKGKEKSKRALDKEGEDASVEEASNKKKKGKKEVVSDVGEKNSKVKKSNGDKEKRRTRLRV

SEQ ID NO: 2460 - protein, 558 aa, Pseudoalteromonas tunicata D2
MCSIFGVLDIKSDPIQLRSQAIEMSKLLRHRGPDWSGVYSSEKAILVHERLAIVGVTSGAQPLYNPEQTNILAVNGEIYNHKELAKNLKVDFEFQTESDCEVILALYKEKGPEFLDDLNGIFAFCLYDEEQDAYLIGRDHIGIIPLYTGTDEHGNFYVASELKALSPICNHIKEFPPGHYLWSQDGELRPYYQRDWTSFDAVKDNSATAQDVKVALEAAVKRQLMCDVPYGVLLSGGLDSSVISAITQRFAAKRIEDNDNSNAWWPQLHSFSVGLAGSPDLAAAQKVADMIGTVHHPIIFTVQQGIDALKEVIYHLETYDVTTIRASTPMYLMARQIKAMGIKMVLSGEGADELFGGYLYFHKAPDEKEFHEELNRKVSKLHLFDCLRANKSMAAWGVEARVPFLDKEFVDVAMRVNPIAKMCGKNGKIEKHILRQAFEGYLPHEVLWRQKEQFSDGVGYSWIDSLKEYVAEQVTDQMLASAAFKFPINTPDSKEAYFYRCIFAEHFPGDAAALCVPFGKSVACSTPQALAWDASFANNADPSGRAAGVHNDAYNKTK

SEQ ID NO: 2461 - protein, 218 aa, Mycoplasma genitalium G37
MERGGDPAKGASLAISFQEQFNTLTDGYDFCILVAGFGKGTGTGATPVFSKILKTKKILNVAIVTYPSLNEGLTVRNKATKGLEILNKATDSYMLFCNEKCTNGIYQLANTEIVSAIKNLIELITIPLQQNIDFEDVRAFFQTKKTNQDQQLFTVTHPFSFSFDSKDSIEQFAKQFKNFEKVSYFDHSIVGAKKVLLKANINQKIVKLNFKQIQDIIW

SEQ ID NO: 2462 - protein, 292 aa, Triticum aestivum
GRTEDAFRESVASLKRNKLGLKGILHTPISRSGHQSFNVAMRQELDIYASISLIKNIPGYETRHKDVDLCIIRENTEGEYSGLEHQSVEGVVESLKIITRAKSERIAKFAFSFALANGRSKVTCIHKANIMKLADGLFRSTFHQVAKDYPTLETNDMIVDNASMQAVSRPQQFDVMVMPNLYGGILSNIGAALVGGPGIVPGCNMGREVAVFEPGCRHVGLDIKGKDQANPTAMLLSGSMLLRHLGLDEHANRISKATYAVIAEGKVRTPDMGGKSTTHEFTRAILDKLETV

SEQ ID NO: 2463 - protein, 181 aa, Arabidopsis thaliana
MASSMLSSAAVVTSPAQATMVAPFTGLKSSAAFPVTRKTNKDITSITSNGGRVSCMKVWPPIGKKKFETLSYLPDLSDVELAKEVDYLLRNKWIPCVEFELEHGFVYREHGNTPGYYDGRYWTMWKLPLFGCTDSAQVLKEVEECKKEYPGAFIRIIGFDNTRQVQCISFIAYKPPSFTEA

SEQ ID NO: 2464 - protein, 307 aa, Staphylococcus epidermidis ATCC 12228
MTKTIGLLVMAYGTPYKESDIEPYYTDIRRGKKPTEEELQDLKDRYEFIGGLSPLAGTTDRQAEALLEALNKEQDDVNFKLYIGLKHISPYIEEAVEQMHNDGIKEAVTVVLAPHYSSFSVGSYDQRAQEKADEYGIQLTHIKHYYQQPKFIKYWTEKINETLEQIPNQEHDETVLVVSAHSLPKGLIERNNDPYPHELHETAEILKQESNIIHVAEGWQSEGNTGTPWLGPDVQDLTRDLYKEHQFKHFIYTPVGFVCEHLEVLYDNDYECKVVCDDIGVNYYRPEMPNTHPLFIGAIVDEIQSHI

SEQ ID NO: 2465 - protein, 319 aa, Acacia mangium x Acacia auriculiformis
MSKVVCVTGASGAIGSWLVRLLLDRGYTIHATVQNLKDENETKHLEVMEGAKSRLRLFEMDLLDEDSIMATVKGCAGVFHLACPNVIGQVQDPEKEIVEPAVKGTVNVLKAAREAGVERVVATSSISAIIPSPNWPSDRIKNEDCWCDLDYCKRKGLWYPIAKTLAEKAGWEFAKETGYDVVMINPGTALGPLIPPRLNSSMAVLLGVLKGDTETYEDFFMGMAHFKDVAMAHILAFEKKEASGRNLCVEAIRHYGDFVEKVAELYPQYHVAKVPKDTQPGLLRATDASKKLINLGMKFTPIEQIITDAVESLKSLGFL

SEQ ID NO: 2466 - protein, 159 aa, Capsicum annuum
MSDEEHHFESKADAGASKTYPQQAGTIRKNGYIVIKGRPCKVVEVSTSKTGKHGHAKCHFVAIDIFNGKKLEDIVPSSHNCDVPHVNRTDYQLIDISEDGFVSLLTENGNTKDDLRLPTDDTLLSQVKGGFEEGKDLVLSVMSAMGEEQICAVKDIGKN

SEQ ID NO: 2467 - protein, 529 aa, Saccharum hybrid cultivar
LRTGYHFQPPMNWINDPNAPMYYKGWYHLFYQYNPKGAVWGNIVWAHSVSRDLINWIALDPAIYPSIPSDQYGCWSGSATMLKDGTPAILYTGINRPDINYQVQVLAFPKNASDPLLREWEKPAAYNPVAAPVGGINATQFRDPTTAWYADGHWRMLVGSVRDTRGMALVYRSRDFRTWRKAKHPLHSALTGMWECPDFFPVSGPALEDGLDTSDAGAKYVLKSSLDLTRYDYYTIGSYDRRKDRYYPDNPNGDYHRLRYNYGNFYASKTFYDPANRRRVLLGWANKSDSVPDDKAKGWAGIHAIPRKIWLDPSGKQLLQWPIEEVEKLRGKPVSVGSKLVKPGEHFEVTGVATYQADVEVTFEVSSLEKAEAFDPAYGNDAQKLCGVKGADVKGGVGPFGLWVLASADLQEKTAVFFRVFKDGYGKPKVLMCTDPTKSSLSPDLYKPTFAGFVDIDISSGKIALRSLIDRSVVESFGAGGKTCILSRVYPSIAVGKDAHLYVFNNGEVDVKVSSLTAWEMKKPLMNGA

SEQ ID NO: 2468 - protein, 389 aa, Sulfolobus solfataricus P2
MQWLKLGVVDIQLAKKVINENFTQDKGEREKAFSLYLSKPYQLIHDSPTIKHYTEWDLYDSLNLTNISRQEVKYNDTANVIEIIDDTIKIPKNDIQIDDLLNDSIISSDEHKLVSLAYSLSRRITINNEGEYYVKHVLNKDKYFSPSHLIINVPNDKQIKVVYEVLNLSESSLITPIISVNIEDNSSLDFQFVNFSSDNSLLFSYIKANIKGTMHSSIFVNGNKMGHVQFSTRLEESSVSEFSSRAFGTHSNKIDVVNNVIHLGQKSVSNGFMKAISNDQAFTVVRGVATIDETAINSSTSIIGRSLVLGKDAKAVVSPMLEVKTGRVVMAKHSAAVSKIDENQIFYLQTRGLSRREAEGIIIRGFIIEEQDPETLKDRIEEILKSLGY

SEQ ID NO: 2469 - protein, 588 aa, Citrus sinensis
MDTPYHHLHSPPQYPPLLPEEQPSDAGPPASHRKPFKGFAAILASVIFLLSLVALIINQTQKPLPSQNNIVPTSKPTSFSNPEPRGVAEGVSAKSNSHLLRNIKGSYNWTNAMFTWQRTSFHFQPEKNWMNDPNGPLFYKGWYHLFYQYNPDSAVWGNITWGHAVSADLIHWLYLPIAMVPDQWYDINGVWTGSATILPDGQIVMLYTGSTDKSVQVQNLAYPADPSDPLLLDWVKYPGNPVLMPPRHIGPKDFRDPTTAWAGPDGKWRLTIGSKIGKTGISLVYQTTDFKTYELLDEYLHAVPGTGMWECVDFYPVAINGSVGLDTSATGPGIKHVLKASLDDTKVDHNKTGTYNPENDKWTPDNPEEDVGIGLKWDYGRYYASKSFYDPYKKRRIVWGWINETDTESDDLEKGWASVQLDISAEFETELLGSGAPEEGYGCSGGAIDRSAMGPFGLLVNAHDSLSELTPIFFRSSNTTKGTNTYFCADETRSSLAPDVFKQVHGSKVPVIQGEKLSMRILVDHSIVESFGQGGRTVITSRIYPTKAIYGAARLFLFNNATGVNVKATLKIWRLNSAFIHPFPLDQI

SEQ ID NO: 2470 - protein, 212 aa, Oryza sativa
  misc_feature (16)..(16): Xaa can be any naturally occurring amino acid
MDPQARGRALEASGDXIDSAIKSLNELCLESAAVGDSNSVLPAALKLSAEGVVNNGHLDVLTENPHATENFQTNHHGSEWVELFVREMMSASDIDDARARASRALEALEKSIMERAGTEAVHNLHKENVMLKEQLAIYLRENAVLKRAVAIQHERQKEFDERTQEVHSLKQLVLQYQEQIKTLEINNYALRVHLKQAQQNNSMPGRFPPDVF

SEQ ID NO: 2471 - protein, 806 aa, Arabidopsis thaliana
MICFILFVFSFLVSVSATAPYKPDDVFLINCGETDVPFDNHGRTWTQEEKNILPKNSDNASFSSVVSYKEESGIPQVPYMTARIFRSDFTYSFPVSPGWKFLRLYFYPTSYKSGFDAVNSFVSVTVNDFTLLQNFSADLTVKASIPESKSLIKEFIVPVYLTLNLTFRPSNNSLAFVNGIEIVSMPDRFYSKGGFDDLITNVGSLIDFEIDNSTASETVHRLNVGGHMVDEVNDSGMFRRWLSDDYEFLIGGVSPYMPDVNISYTEKTPAYVAPAYVYSTCRMMGNAQDTYLNLNFNLTWLFTVDAGFSYLVRLHFFEKYLNKANQRVFSIFLGNQMAREEMDVIRLSGGPRIPIYLDFRIYVGSESGPRPDLRLDLHPLVKDNPEYYEAILNGVEILKLNNSGNLAIIQDNELKPNPPLSSNLTPNHVTQQIKGKSSHLLVKIFIAVGPGTGLATFVVVLMLWMRQMKRKNRKEERVVMFKKLLNMYTYAELKKITKSFSYIIGKGGFGTVYGGNLSNGRKVAVKVLKDLKGSAEDFINEVASMSQTSHVNIVSLLGFCFEGSKRAIVYEFLENGSLDQFMSRNKSLTQDVTTLYGIALGIARGLEYLHYGCKTRIVHFDIKPQNILLDGNLCPKVSDFGLAKLCEKRESVLSLMDTRGTIGYIAPEVFSRMYGRVSHKSDVYSFGMLVIDMIGARSKEIVETVDSAASSTYFPDWIYKDLEDGEQTWIFGDEITKEEKEIAKKMIVVGLWCIQPCPSDRPSMNRVVEMMEGSLDALEIPPKPSMHISTEVITESSSLSDGGEDV

SEQ ID NO: 2472 - protein, 646 aa, Triticum aestivum
  misc_feature (313)..(313): Xaa can be any naturally occurring amino acid
MKSRGASAVPDTPPVMSGHAPQHHQRGGGGGSTRWRECAAVLGAVAVVALVVTPALLNVGDDLDDVADPVARLRAATDEKAALLSKKTPGEAQAEQDIKAAAGADADGSPWSSEMLQWQRTGYHFQPDGNFMNDPNAPMYYRGLYHFFYQYNPKGVVWNKIAWGHAVSPDLVHWRHLPVAMVPDQWYDINGVLTGSATMLPNGTVILLYTGNSDTFAQVQCLAFPADPADPLLRTWTKHPANPVIFPPPGIGDRDFRDPMAAWFDKSDNTWRTIIGSKDDHGHAGIALMYKTKDFIKYELIPDPVHRVEGTGXMWECIDLYPVSGGSNSPEEVIYVMKASVNDEWHDYYALGRFHAEANRWTPMDPEADVGIGMRVDWGKFYASTSFYDPVKQRRVSWGFVGETDSPNTDIAKGWASLQGIPRKVVLDQKTRTNILQWPVEEIDTLRYNATKFSGITIESSSVITLPLRQVSQLDIEASFRLNASAIAALHEADVSYNCSTSGGATERGALGPFGLLIHATNSGSEQLAVYFYIYKGLDGGLRTQFCHDESGSSRAKELLKRVVGSTVPVLHGEALSARVLVDHSIVESFVMGGRMTVTSRVYPMEAIHAAGRVCVFNNATGSAVTVEKLVVHEMASAPIQPYRDA

SEQ ID NO: 2473 - protein, 147 aa, Glycine max
MSSMGESQQRSLFGSTKASSLPVSTSRSDSEGGLRRRLSSLSLKIQLESPNSSSWSFPRSKSLSSMGDYARTWWDWSWAWILSRKLIFATDLEMNDQETKLLASHNRGTWRHVFYKLRSEIRRFINTSDHTTLPKTYHHKSTPQVFS

SEQ ID NO: 2474 - protein, 221 aa, Rubrobacter xylanophilus DSM 9941
LPGHISEPAVFSALDPLKDIEAVHPVNAGLLALGRPRYVPSTPAACFYLLDRYLERSGRPPEEFYPRSTVVVVGRSNNVGKPAVSLGFARGAAVISCDANAYRAGRLREHTLKADALIVAAGVAGLIDESYVREGVIAVDVGINPVADPGGSGRTLLVGDLDFGSVARKAEALTPVPGGVGPITDVWLLKNTVAAGRGLAFRARSGGERGAPGISGGYGGQ

SEQ ID NO: 2475 - protein, 454 aa, Arabidopsis thaliana
MASVVLRNPSSKRLVPFSSQIYSRCGASVTSSYSISHSIGGDDLSSSTFGTSSFWRSMATFTRNKPHVNVGTIGHVDHGKTTLTAAITKVLAEEGKAKAIAFDEIDKAPEEKKRGITIATAHVEYETAKRHYAHVDCPGHADYVKNMITGAAQMDGGILVVSGPDGPMPQTKEHILLARQVGVPSLVCFLNKVDVVDDPELLELVEMELRELLSFYKFPGDDIPIIRGSALSALQGTNDEIGRQAILKLMDAVDEYIPDPVRVLDKPFLMPIEDVFSIQGRGTVATGRIEQGVIKVGEEVEILGLREGGVPLKSTVTGVEMFKKILDNGQAGDNVGLLLRGLKREDIQRGMVIAKPGSCKTYKKFEAEIYVLTKDEGGRHTAFFSNYRPQFYLRTADITGKVELPENVKMVMPGDNVTAVFELIMPVPLETGQRFALREGGRTVGAGVVSKVMT

SEQ ID NO: 2476 - protein, 396 aa, Methanosarcina acetivorans C2A
MIPKASYDVIVVGAGPSGSTAALHSAKNGASVLLLDKKREIGNPIQCAGFLPDASEVQALLPEAKLPETLKNYPDSCVLQHIKTQRIIPPNGNVKEFAVRGRVLDRRRYDQFLAEQAAAAGAELMAKTRVTRVEGTKVETSGVFGKHILKAKVVIGADGPNSLVAKSKGLAMKPESKETSVALEYQVRNVDIDPDALEMYFGKDYVPGGYAWIFPEGERRANVGIGIRSGMAEKGISAKDYLHRFMRDHPLAAPKLKNAIIMNVVAGIIPINGAPANTATEDTLIAGDAAGHIIATNGGGIPPAMIAGKIAGETAAEFAAGKCKLEAYDRRWRVQFGSALETSVQARQIMDGIMKSDALMNAAFKFISPEQMKVMQCGKLPGPVKLGLQALSRGKK

SEQ ID NO: 2477 - protein, 193 aa, Arabidopsis thaliana
  misc_feature (101)..(101): Xaa can be any naturally occurring amino acid
  misc_feature (105)..(105): Xaa can be any naturally occurring amino acid
  misc_feature (119)..(119): Xaa can be any naturally occurring amino acid
  misc_feature (130)..(130): Xaa can be any naturally occurring amino acid
  misc_feature (135)..(135): Xaa can be any naturally occurring amino acid
  misc_feature (138)..(138): Xaa can be any naturally occurring amino acid
  misc_feature (143)..(143): Xaa can be any naturally occurring amino acid
  misc_feature (148)..(149): Xaa can be any naturally occurring amino acid
  misc_feature (152)..(153): Xaa can be any naturally occurring amino acid
  misc_feature (157)..(157): Xaa can be any naturally occurring amino acid
  misc_feature (161)..(162): Xaa can be any naturally occurring amino acid
  misc_feature (164)..(164): Xaa can be any naturally occurring amino acid
  misc_feature (172)..(172): Xaa can be any naturally occurring amino acid
  misc_feature (176)..(177): Xaa can be any naturally occurring amino acid
MASSMLSSAAVVTSPAQATMVAPFTGLKSSASFPVTRKANNDITSITSNGGRVSCMKVWPPIGKKKFETLSYLPDLTDVELAKEVDYLLRNKWIPCVEFEXEHGXFVYREHGNTSGYYXWTGTWTMWEGXICSGXTDXPFKVXKEGLXXKKXXPGAXIRVXXFXKTRKANEXVYLXXAPSLLVNPFWLLDPFF

SEQ ID NO: 2478 - protein, 218 aa, Oryza sativa
MVVLVEASPRGGAGDHPASCELDAGGDVGSGGRQYAAVVVGGTFDRLHQGHHLFLKAAAEFARERIVIGICDGPMLAKKQASRMYAYLIQPIEKRMENVKEYIKAMIASYHFQAIKPDLEVHVEPIVDPFGPSIVDEALEAIIVSSKETLPGGLAVNRKRAERGLAQLEIEVVELVPEKSTGNKISSTAFRKKEAERELHSKFLEAPHEQAVELECRI

SEQ ID NO: 2479 - protein, 268 aa, Arabidopsis thaliana
KNPQLSRFQFSSSSPNPLFLRPRIQILSMTMNKSPSLVVVAATTAAEKQKKRYPGESKGFVEEMRFVAMRLHTKDQAKEGEKETKSIEERPVAKWEPTVEGYLRFLVDSKLVYDTLELIIQDSNFPTYAEFKNTGLERAEKLSTDLEWFKEQGYEIPEPTAPGKTYSQYLKELAEKDPQAFICHFYNIYFAHSAGGRMIGRKVAERILDNKELEFYKWDGELSQLLQNVREKLNKVAEEWTREEKNHCLEETEKSFKYSGEILRLILS

SEQ ID NO: 2480 - protein, 486 aa, Prochlorococcus marinus subsp. pastoris str. CCMP1986
MTTALQTPQRRSRSKLQDASLVNGPMLLLRSIRGFSSNRSMLWLATVPLALFGLGIFNLSAHAADLPELNAAFLANNLWLLIATILVIFMNAGFAMVEAGMCRSKNAVNILAKNLFVFALAVTSYWFIGYSLMYGGSVADGWLYFGGLFFDPTVTADMVTDAGLVPTVDFLFQSAFAGTAATIVSGLVAERVKFGEFVVFAIVLTAFIYPIAGSWKWNGGWLDSLGFVDFAGSSIVHSVGAWAGLVGAMLLGPRIGKYSDGKPQAMPGHNMAIATLGALILWIGWYGFNPGSQLAMDQWVPYVAVTTTLAAAAGAIGATIVSTLTSGKPDLTMIINGILAGLVSITAGCGDMTLAGAWFAGLVGGIIVVFSVAALDAAEIDDPVGAFSVHGVCGVWGTLVIGLWGTAVQGDGAGMGLFNGGGINLLLVQALGAAAYAIWTLVTCWIAWSIIGGLFGGIRVSEEEETQGLDISEHGMESYPDFASAK

SEQ ID NO: 2481 - protein, 496 aa, Haloferax volcanii DS2
MVDDIATDADWNALYIDGEWTESESGESIAVEDPSTRETVAHVPRGTEADVDAAYEAAAEAQESWAEAPPARRQEVVEQFLQALNEYEDEIIDLLAHEVGGSRIMGETSIQIASDHASEAATLPRRMRGEHVASNIPGKENIVQKNPKGVVTVISPWNFPLNLSMRAVAPAVAAGNAVVLKPSTNSPITGGLLFAKLFEETDLPEGVVNVVTGRGSEIGDRVAGHPESDVVAFTGSTEVGKRVSGIAGENLAVPAMELGGNNAHVVTEGADVDRAADAAVFGSFVHQGQVCISINRHIVHESVYDEYVEKLTERAAELPVGSAHEDDTVVGPIIDESQRDEMLGYVEETVAAGATLETGGSTADLDGVDDSLVVQPTVLSGVTNDMAAARNEHFGPIAPVIPFSDVDEAVELANATEYGLSGSVHAGDLATGKEIALRMETGNVHVNDQPINDEAHVPFSGTGASGVGTYNSDAFLDEITEDKWISLQHEPRDYPL

SEQ ID NO: 2482 - protein, 176 aa, Triticum aestivum
  misc_feature (105)..(105): Xaa can be any naturally occurring amino acid
MAPTVMASSATSVAPFQGLKSTAGLPVSRRSNGASLGSVSNGGRIRCMQVWPIEGIKKFETLSYLPPLSTEALLKQVDYLIRSKWVPCLEFSKVGFIFREHNASXPGYYDGRYWTMWKLPMFGCTDATQVINEVEEVKKEYPDAYVRIIGFDNMRQVQCVSFIAFKPPGCEESGKA

SEQ ID NO: 2483 - protein, 493 aa, Gluconobacter oxydans 621H
MPAVTETRETVEKLAKSSYEWGFETDIEMDIAPKGLNEETVRLISERKGEPQWMLDWRLKAFRAWLEMEEPTWAHIHHPPIDYQDAHYFAQPKKKPGPKSLDEVDPELLKTYAKLGIPLHEQALLAGVEGAEERLPVAVDAVFDSVSVATTFRKTLAEAGVIFCPISDAIREHPELVQKYLGTVVPVADNFFAALNSAVFTDGSFVYIPEGVRCPMELSTYFRINARNTGQFERTLIIAEDRATVSYLEGCTAPQRDENQLHAAVVELVAMEDASIKYSTVQNWYPGDDEGRGGIYNFVTKRGICRGARSKISWTQVETGSAITWKYPSCVLAGEGSVGEFYSVAVTNNHQQADTGTKMIHLAPNTRSTIIAKTISAGHSDSTYRGLVRMQPKARNARNFTQCDSLLIGDQCGAHTVPYIESRNMTARVEHEATTSKISEDQLFYCRSRGLSEEDAVGLIVNGFCREVLKELPMEFAVEAQKLLQISLEGSVG

SEQ ID NO: 2484 - protein, 155 aa, Brassica rapa
MPVPLAPYPTPPATPLAPAYTPPSPANGSTGGQSQLVCSGCRNLLMYPVGATSVCCAVCNAVTAVPPPGTEMAQLVCGGCHTLLMYIRGATSVQCSCCHTVNLALEANQVAHVNCGSCKMLLMYQYGARSVKCAVCSFITSVGGSTSTTDQKLNN

SEQ ID NO: 2485 - protein, 330 aa, Methanocaldococcus jannaschii
MLKESEDIEGIAIEGPWLEDDISLEEIIKKYYLKIGFQASHIGKAIKIWKHIEEKRKKGDEITVFFGYTSNIVSSGLREIIAYLVKHKKIDIIVTTAGGVEEDFIKCLKPFILGDWEVDGKMLREKGINRIGNIFVPNDRYIAFEEYMMEFFEEILNLQRETGKIITASEFCYKLGEFMDKKLKSKEKEKSILYWAYKNNIPIFCPAITDGSIGDMLYFFKKYNKDEELKIDVANDIVKLNDIAINSKETACIVLGGSLPKHSIINANLFREGTDYAIYVTTALPWDGSLSGAPPEEGVSWGKIGAKADYVEIWGDATIIFPLLVYCVMK

SEQ ID NO: 2486 - protein, 302 aa, Synechococcus sp. CC9605
MGWSAADIPNQQGRIALITGANSGLGLETARALKRCGATVVLACRSPRKAELAKQELLQERDGGAVDLVDLDLADMTSVERAAATVGERYGCLDLLINNAGVMAPPRRTTAQGHELQFGVNHLGHMALTQALLPLMQNRPDPRVVTVTSGAQYFGKIRWDDPSWSKGYDRYGAYGQSKLANVMFALELDARLHKKGSPIRSLAAHPGIARTELQPTAIANVGNRFEALAYRLMDPLFQSAGMGALPQLHAATAATAQGGEHYGPEQFGGLRGAPALCRVAPAASQPAERQRLWSLSEELLSA

SEQ ID NO: 2487 - protein, 880 aa, Cochliobolus carbonum
MSAAIDNEDLEELSISMPSQRRGAAQTSTTKAQDPAPPPPTALGTAVHETKSKDTKASQRLGQYTIVRTLGEGSFGKVKLATHQVSGQKVALKIINRKRLVTRDMAGRIEREIQYLQLLRHPHIIKLYTVITTPTEIIMVLEYAGGELFDYIVNHGKLQEAQARKFFQQIVCAVEYCHRHKIVHRDLKPENLLLDHDSNVKIADFGLSNIMTDGNFLKTSCGSPNYAAPEVISGKLYAGPEVDVWSCGVILYVLLVGRLPFDDEYIPTLFKKIAAGQYSTPSYLSPGATSLIRKMLMVNPVHRITIPELRQDPWFTTDLPAYLEPPAQEFFDSGADPNKAIDPKALAPLADAPRVQALHENVVTKLGKTMGYAKHDVQDALARDEPSAIKDAYLIVRENEMMRENPLLTNQDGVPVWNHQSPPAHDSYMEKFRPQSLNAVSRPQFIPPAPSDHERARQGSNASSQLASIRSPVSTIAILPSSLTEYHKAYMKGHPRPTNKISESEALPPTPEQTEEQRQISARRLKPNFRTMPEAGRTKPEPMTSLPTKKPRATKWQFGIRSRNQPAEAMLAIFKALKAMGADWEVPKIRRAGGRSGSRSRSTSQAPEDRKSKSRNHSQDSISSHSSDEDQGSRKGSPRREPLSVRNNGTSEQEARGRQKKHYNHTNDWGYHVPEDPWVIHARFLKEGMFPPGVAHPSSTHSSRVDLANDSSGARRRSSTNTSTSSAGHGVEGMTPSERAGSVSEDHVNPDEAVYIYMSIQLYSIDRDFFVVDFKCAGYERLVTNLVREIKASIPLSGSHQPPPHHQDGWDDEQGVWRRLDENEPLPEDLAKKLNEGGTEILRERTELVGAGRQEGEKIVTSPFPFLDVASTLILQLSGE

SEQ ID NO: 2488 - protein, 273 aa, Mycoplasma genitalium G37
MKSESEKFAGAKNTWTIEAIMPDGQSLQCATSHDLGDTFTKSFTISYQSKTNQKMTPSSFSCGMSTRILGAIFLTHSDDYGLVLPWYLASKQVKLYLFDKNNNPKTRALAFLVKDFLEKLKIRFSFIEINNQLGKQLLKGEIEGIPLQMIVDNEKTINIFNRLTRLKTSLTFANLQTEFVNLVNNYHTEMYRKANDLVEQKLARVQTLKEIEQAFKNKKAVLCTVKLTGELEQHLKTKYQVSVRCVFKKSDVTQNCPFTNQPCFDSVLIARAY

SEQ ID NO: 2489 - protein, 395 aa, Saccharomyces cerevisiae
MSEGITDIEESQIQTNYDKVVYKFDDMELDENLLRGVFGYGFEEPSAIQQRAIMPIIEGHDVLAQAQSGTGKTGTFSIAALQRIDTSVKAPQALMLAPTRELALQIQKVVMALAFHMDIKVHACIGGTSFVEDAEGLRDAQIVVGTPGRVFDNIQRRRFRTDKIKMFILDEADEMLSSGFKEQIYQIFTLLPPTTQVVLLSATMPNDVLEVTTKFMRNPVRILVKKDELTLEGIKQFYVNVEEEEYKYECLTDLYDSISVTQAVIFCNTRRKVEELTTKLRNDKFTVSAIYSDLPQQERDTIMKEFRSGSSRILISTDLLARGIDVQQVSLVINYDLPANKENYIHRIGRGGRFGRKGVAINFVTNEDVGAMRELEKFYSTQIEELPSDIATLLN

SEQ ID NO: 2490 - protein, 115 aa, Triticum aestivum
MARGAATQLVLVSMVAAMLLVACDAAMSCGQVTSALSPCISYARGNGANPPAACCSGVRSLAGAARSTADKQAACKCIKSAAGGLNAGKAAGIPLKCGVSVPYAISSSVDCSKIR

SEQ ID NO: 2491 - protein, 287 aa, Debaryomyces hansenii CBS767
MSAIYKALQSKSSKETSEKAKHINRQRLLVISSRGVTYRHRHLISDLVALLPHARKEPKFDSKKNLYQLNEVAELYNCNNIFFFESRKHQDLYLWISKPPNGPTLKFHIQNLHTLDELNFTGNCLKGSRPILSFDKSFEVTDHHKLLKELFTHTFGVPPNARKSKPFVDHVMTFSIVDNKIWIRNYQINETVDSKDASELNPEELSLVEIGPRFVLTLITILEGSFGGPKIYENKEYVSPNFVRAQLKQQAADQAKSRASAALEKKLKRRDQVLKKDPLANDSLFKE

SEQ ID NO: 2492 - protein, 286 aa, Desulfovibrio desulfuricans G20
MILLDGKATAAAVREELKKDVDALKDRAGRAPGLAVILVGDDPASQVYVRNKERACADAGIRSEAFRISAQTTQQELEERIAALNAREDIDGILLQLPLPAGLDSQRCLELIDPAKDVDGFHPVNMGKLTLGLPGFRPCTPAGVMTLLERYNLSPAGKKAVVLGRSNIVGKPLALMLGASGPFANATVTVCHSRTPDLAQQCREADFLFVAIGRANFVTADMVKPGAVVVDVGINRTENGLAGDVDFGPVSKVASAITPVPGGIGPMTIAQLLVNTVASWKKRCGV

SEQ ID NO: 2493 - protein, 99 aa, Oryza sativa
AERASAAVSCGDVTSSIAPCLSYVMGRESSPSSSCCSGVRTLNGKASSSADRRTACSCLKNMASSFRNLNMGNAASIPSKCGVSVAFPISTSVDCSKIN

SEQ ID NO: 2494 - protein, 491 aa, Magnetococcus sp. MC-1
MSVIFESSTPGRINPQHATPLEADEQQAALADLPEALLRQSPTGLPEVSELEVVRHYTKLSQKNYSIDTHFYPLGSCTMKYNPRAANKVAMLPGFLGRHPLDDPHYATGLLHTLFELQEMLREITGMAAISLAPMAGAQGEFAGVAMIRAYHDARGDSARREILVPDASHGTNPATATMCGYVTREVPTNAQGDVDIEALKSMVGPQTAGLMLTNPSTLGVFERSVGLIARIIHDAGGLLYYDGANLNAIAGRVRPGEMGFDAIHINVHKTFATPHGGGGPGAGPVGVSARLQPFLPIPRIVKQGASYALLESADCPQSIGRMGAFGGNIGVLLRAHAYLCMIGRQGVRRVGEYATLNANYLLARLTAAGFKPAYAERRATHEFIITLKAEADAYGLTALNMAKRLLDYGFYAPTIYFPLLVPECLLIEPTETESPEQLDAFVAAMVAIRKEAQESPEFVKNAPYTTPVRRLDETRAARKPDLIWRGPLEQ

SEQ ID NO: 2495 - protein, 461 aa, Magnetococcus sp. MC-1
MPFIPHTEDDVRLMLDTIGVESIDALFDEIPAELNTHPILESVPKPQSEAATLRLQSARAREGDGRLNFIGAGAYEHHIPAAVWELVTRGEFYSAYTPYQAEASQGILQTIYEFQSMMAGLMGMDLSNASLYDGATALAEAVLMAVRANPAPRGSTPRVIMPATVHPAYREVVQTMVRHQGIELVEPSFCAKRGGVAVSALNLYADEPVQALVIAQPNFFGQLEDVDFLTNWAHKRGALVIGVVNPVAMALLKPPAAWGEKGADIACGEGQPLGVPLSFGGPYLGFLSCRQALARQMPGRIVGRTLDQEGKEGFVLTLQAREQHIRRAKATSNICTNQGLLSIAATIHMAMLGPEGLKNVALTCHRRTQQLWQRLALLEGVERCFEGPFFHEVAIKLSKPAEEVLTCLSGVNIAGGYAVGRRYPGMENVLLVCCTETKERSDLDHYADALGLIMSEQGSAA

SEQ ID NO: 2496 - protein, 270 aa, Burkholderia sp. 383
MAGPGRVLLDAPQLPSLPTARSMYKLVLIRHGESTWNKENRFTGWVDVDLTEQGRNEAYQAGELLKEAGYTFDIAYTSVLKRAIRTLWHVQDKMDLMYLPVVHSWRLNERHYGALSGLNKAETAAKFGDDQVLVWRRSYDTPPPALEATDERAPFNDPRYAKVPREQLPLTECLKDTVARVLPLWNESIAPAVRAGKQVLIAAHGNSLRALIKYLDGISDSDIVGLNIPNGVPLVYELDENLKPIKHYYLGDQDAIAQAQAAVAKQGKAG

SEQ ID NO: 2497 - protein, 285 aa, Glycine max
MTLRFESVVWALNPKLSHHRFSIPNLRRNPHSLFAPPPPPRIRTSFLAFEEGGGGEIEPEKNENNNDNRTGAEESWKQALDTFREQASKIRDASQEAYELYSEKAIAVLKDATEELRVAAKEIGDEGKQYLTVVAENSPEVKEVVESFTSPSRDLSEISQLRDFYVGVPYGLVLSVGGFVSFMVTGSIAALRFGIVLGSVLLALGVSSLRAYKRGQPSSLMLKGQTAIASILFLREIRLLAAEGSPLVTYFTSLISGAVVAFYVYRLVLEHKQKNASNLENGAEN

SEQ ID NO: 2498 - protein, 125 aa, Methanosarcina acetivorans C2A
MKEITAIIRMNKVQKTKNALLGCGFPSFTVRRVMGRGKQRGLCFEFNPPLPDPEKEAETCIRFIPKRMFTVVVDDENVSEVVQKIIEVNQTGNAGDGKIFVSNITEAIRIRTGESGEATISKELM

SEQ ID NO: 2499 - protein, 258 aa, Azoarcus sp. EbN1
MSFQNILVETRGRVGLITLNRPKAMNALNDQVVDEMWEALDHFEADEGIGAIVITGSEKAFAAGADIGAMANFSHMDAYKGDYITRNWERVKTCRKPVIAAVAGFALGGGCELAMMCDMIIAADNAKFGQPEIKLGILPGSGGTQRLPRAIGKAKTMDMCLTARLMGAEEAERSGLVARVVPADKLLDEALAVATEVANFSLPVVMMIKESVNRAFEGSLNEGLLFERRVFHAAFGLDDQKEGMAAFVEKRKPDFKHR

SEQ ID NO: 2500 - protein, 917 aa, Pseudomonas fluorescens
MLRKMGIKGRVLLLTLLPTSLMALLLGGYFTWMQLSELQTQLLQRGEMIAEQLAPLVAPPLSSKNTDLLERIATQSLEQPDVRTVSFLAPDRSSLAHAGPTMLNQPPIGNSSYLLQRTGNDATRYLLPVFGRHRNLAGELIPDESDRLLGWVEVELSHNGMLLRGYRSLFASLLLIAIGLICNAALALRISRTINLPISQIKLAVAQLKDGNLETRLPPLGSQELDQLASGINRMAETLQNAQEELQHSIDQATEDVRQNLETIEIQNIELDLARKEALEASRIKSEFLANMSHEIRTPLNGILGFTHLLQKSEMSPRQLDYLGTIEKSADNLLGIINEILDFSKIEAGKLVLDSVPFNLRDLLQDTLTILAPAAHAKQLELVSLVYRDTPLALVGDPLRLKQILTNLVSNAIKFTREGTIVARAMIEDEQEDSVQLRISVQDTGIGLSNQDVRALFQAFSQADNSLSRQPVGTGLGLVISKRLIEQMGGEIGVDSTPGEGSEFWISLNLPKTRDDVEDLPAAPLLGRRVAVLENHELARQALQHQLEDCGLEVTPFNSLENLTNGITSAHQTEQAIDLAVLGVTANDIPPERLNQHLWDLEHLGCKVLVLCPTTEQMLFNQSVPNPNSQLQAKPACTRQLRRALADLISPRPSRSEPGEPLSSRAPRVLCVDDNPANLLLVQTLLEDMGAKVLAVESGYAAIDAVKQETFDLVLMDVQMPGMDGRQSTEAIRQWESERHGTPLPVVALTAHAMANEKRALLQSGMDDYLTKPISERQLAQVVLKWTGLALRNQGPERAPDGLAPGVRLQVLDHEEGLRLAANKADLAADMLAMLLASLEADRQAITAAREANDNNALIERVHRLHGATRYCGVPQLRAACQRAETLLKQDDAKAMTALDELDMAIARLASEARVSA

SEQ ID NO: 2501 - protein, 169 aa, Triticum aestivum
  misc_feature (158)..(158): Xaa can be any naturally occurring amino acid
MAAASSATSVHDFTVKDASGKDVDLSVYKGKVLLIVNVASQCGLTNSNYTELSQLYPKYKDQGFEILAFPCNQFGGQEPGTNDEIVQFACTRFKAEYPIFDKVDVNGSNVSPLYKFLKSSKGGLFGDSIKWNFSKFLVDKEGHVVDRYAPTTSPLSIXEKDIKKLLGSS

SEQ ID NO: 2502 - protein, 127 aa, Heliobacterium chlorum
MKEIVAFIRRHQLPATKKALEEAGFPAMTIQSVEGRGKQKGIGGWAAEVDPEMNKFGNALQNIEPEIKWIPKRMITIIVQDDQVSSAVDAIMLANKTGHIGDGKIFVCPMEEVVRVRTEERGAQAVS

SEQ ID NO: 2503 - protein, 317 aa, Prochlorococcus marinus str. MIT 9313
MVLTQLRIASRRSQLAMVQTNWVQAELEQAHPGLSISVEAMATQGDKILDVALAKIGDKGLFTKELEAQMLVGRADIAVHSLKDLPTNLPEGLMLGCVTEREDPADALVVNQKNAEHQLDTLPEGAIVGTSSLRRLAQLRHHYPHLVFKDVRGNVITRLEKLDAGNYDCLILAAAGLTRLGFGDRIHQLIPSEISLHAVGQGALGIECVEGHPEVLEAIKALEHKPTAQRCLAERALLRELEGGCQVPIGVNSRIEANELLLTGMVASLDGKRLIRDQQRGPIDRCEAIGKELAETLKSQGAGEILAEIFAAVRPEA

SEQ ID NO: 2504 - protein, 136 aa, Burkholderia sp. 383
MRVAEKSPLQHSNQFDGTTQREDFMKLITAIIKPFKLDETREALSALGVSGITVTEVKGFGRQKGHTELYRGAEYVVDFLPKMKIEAAVSDDLVDQAVEAIERAARTGKIGDGKIFVTAIEQVIRIRTGETGADAL

SEQ ID NO: 2505 - protein, 532 aa, Coccidioides immitis RS
MSEHPQTNGHIDDGQITRLTNGVPGSPPSDWIVQKFGGTSVGKFALEIVDKVIKPNIEDHRVAVVCSARSSSSKADGTTNRLLRAAREAENPKSSNYLSLIEAVKQEHIDVAREYVQNPDLKAELIAQVEAECLRILKILDAAQTLGETSSRCVDMVISAGEKLSCRFMTILLKDRGVDAQYVDLSDIIDFAAGIQALDQDFYDRLAELFGCKVQECTAKVPVVTGYFGVVPGGLLDKIGRGYTDLCAALVAVGVHAEELQVWKEVDGIFTADPRKVPTARLLSMITPAEAAELTFYGSEVIHPFTMEQVIRAKIPIRIKNVMKPKGRGTVIFPDSTSELEKTAPGHDPKLFRTRGPQFWSQQPGPKRPTAVTAKHKILVINVHSNKRSLSHGFFAGIFSVLDKWRLSIDLISTSEVHVSLALHSEIPLLNGVGHDEYQIIDEDLRGAIQDLRKYGTVDIIPEMAILSLVGKQMKNMVGVAGRMFTVLGEHNVNIEMISQGASEINISCVIEERDADRAINILHTNLFTFLD

SEQ ID NO: 2506 - protein, 375 aa, Heliobacterium chlorum
MGQRVWMMDTTLRDGEQSPGAAFSPEEKESIARALVEAGVHEIEAGVPAMGEDEQATIARLVALNLPVRLTTWNRAVIDDLEASLKTGVRAVAISVPSSDQQIRRKLQQSREWVLETLGKCLYRAKQEGLYVCIGLEDASRADTDFLIRLGLEAQRLKANRLRVSDTLGVLDPIRTFTLFDRLATSLTIPLEIHAHNDLGMATANTVAAIQAGAKAASVTVCGLGERAGNAPLEEVAVALRQCCNADTHIQMTKLQSLCQLVSRITRRPIPLAKPVVGRYAFTHASAIHVDGLRKDKGNYEGLPPEYINRKHRIALGKYSGKKSLVQVIQTLNLEMDPTMLDHLIQKVRLKSQILKRPLRRQDILEIVANEQIVK

SEQ ID NO: 2507 - protein, 319 aa, Vibrio vulnificus
MNNTKKRGVLLVNLGTPEEATAPAVKRFLSQFLHDQRVVDMTRWLWCPILHGIILPIRSPKVAKLYQTVWMKEGSPLMVYSKRQQVELQAKLNCPVEIGMTYGTPSVLDGVNKLQAQGVDEICVLPLYPQYSGTTTGAAYDALAHALRKVAVVPSIQFIRDYHDHPLYIKALAESVRQSWQVQGKGDYLLCSYHGIPQRYADNGDVYPLHCEMTTELLRLELGLDKSQIGTTYQSRFGREEWLQPYTDKTLESLPAKGIKSLDVITPAFSVDCLETLEEISEQGQESFLHAGGEQYRFIPCLNDAPSHIEMMARLVTER

SEQ ID NO: 2508 - protein, 388 aa, Synechococcus elongatus
MASQTGVLLLNLGGPDRPEDVRPFLYNLFSDPEIIRLPFRWLQKPLAWFISTSRARRSQANYAQIGGGSPLRRITEQQARALKDALEGIGIEANLYIGMRYWHPFTEEAIAQIKADQIRELVILPLYPQFSISTSGSSFRLLESLWNQDPELQKIRYTLIPSWYNHPGYVAAMADLIRQELDRCPNPDEAVIFFSAHGVPKSYVTEAGDPYQEEIEACVRLIMAALNRPNAHVLAYQSRVGPVEWLQPYTEDVILELAAQGVKTLVVVPISFVSEHIETLQEIDIEYREIAAEAGIEVFRRVPALNDHNGFISALAQLVKEALAAPPRTFAEVNQSRKRVKLYPQERWEWGMTSAAERWNGRLAMLGFLALMIELISGQGPLHMLGLL

SEQ ID NO: 2509 - protein, 549 aa, Pseudoalteromonas tunicata D2
MTGAQLLIELLAKHGVNEVFGYPGGAIMPIYDALYGAPIKHYLTRHEQGAGFAAVGFARSTGKLGVCFATSGPGATNLITSLADAMMDSVPLLAITGQVPTAAIGSDAFQEIDVLGMSLSCTKHSYLVERPEDLAEILQEAMHVAQSGRPGPVLVDIPKDIQLAQVPFHPWLAVDDYKPQVSNDEVLKANQLLAHAKRPVAYVGGGVQAADAQQHLMDFLNATQMPAVSTLKALGSVLPEYQHDLGMLGMHGGQAANLAVQECDLLVCIGARFDDRVTGNLAKFAAKAKVIHLDIDAAEVGKRKPVAASLVADLKDSLPKLNGPLTTADWLDHCSAMKQQYAWRYDYPGEKVYAPYLLNQLSQLMPKNGVVCCDVGQHQMWVAQHMKFRHPSNHLSSGGAGTMGFGLPAAIGAQVARLNDFVITVSGDGSIMMNIQELATIRRNNLPVKILILDNQRLGMVRQWQQLFFEGRYSETDLSDNPDFVALAAVFGIPGQTITHANEVDAALVKLVSATGPYILHACIDDKENVWPLVPPGAGNEQMLTEVVS

SEQ ID NO: 2510 - protein, 240 aa, Zea mays
IGPDIDILAPDVYTNEMMMGWMMDQYSIIRRKISPAVVTGKPVTMGGSQGRNTATGTGAFYIMQGMLPKFDQYPENTTVAVQGFGNAGMVVAECLYQDGYKVVAISDSQGGIYNEQGIDIPAVIDYKQRHRTLAGMYCDQAICDLGENQQISNAELLALDVDVLIPAALENQITRDNADQVRARYIFEVANGPTTTAADDILASKGIYVFPDILVNAGGVTVSYFEWVQNRSGLYWSAKE

SEQ ID NO: 2511 - protein, 476 aa, Arabidopsis thaliana
MASLTLRCDSTHLLPSRDVVKGTKPFGTSLVYPRIISKKFNVRMRVIPEEGDVFSSSKSNGSSMGIELQPDLVSFGTLAAEMIPTTMDSPEVEDEEFDLDRPTDGFASIPQAIEDIRHGKMVVVVDDEDRENEGDLIMAASLATPEAMAFVVKHGTGIVCVSMKGEDLERLELPLMVTRKDNEEKLRTAFTVSVDAKKGTSTGVSARDRAQTILTLASKDSKPEDFNRPGHIFPLRYREGGVLKRAGHTEASVDLTVLAGLEPVSVLCEIVDDDGSMARLPRLRQFAQENNLKLISIADLIRYRRKRERLVEFTAVAPIPTMWGPFKAHCFKSLLDGVEHIAMVKGEIGDGKDILVRVHAECITDDIFGNSSGGKQLAIAMRLIEENGRGVFVYLRGPESKGIDLSHKPRTYNTNSDQAEGVSFPVASREYGIGAQILRDLGVREMKVMTNNPAHYVGLKGYGLSISGKVPLITTP

SEQ ID NO: 2512 - protein, 498 aa, Colwellia psychrerythraea 34H
MNEVNVIGHLINGEMVNDDVRTQAVFNPATGAAEKKVALASKQTVEQAISAAQTAFPAWRNTPAIKRARVMFRFKELLEQHADTICRLIGEEHGKISHDAAGELQRGIENVEYACGAPELLKGEHSKNVGPNIDCWSEFQPLGVVAGITPFNFPAMVPMWMFPLAIVCGNCFILKPSERDPSSTLYIAQLLKEAGLPDGVMNVVNGDKEAVDVLLSDERIKAVSFVGSTPIAEYIYATANANGKRCQALGGAKNHAIIMPDADMDNAVNQLLGAAFGSSGERCMALSVAVAVGDEAADALVEKMTEAMKNLSVGAHDKASNDFGPVITQAHKDKVEGYITSAQNQGATIVVDGRQPHVEGYENGFFVGATLIDGVTADMDSYVAEIFGPVLQVMRVKTMQEAMQLINDHEYGNGTCIFTRDGEAARYFSDNIQVGMVGINVPLPVPVAYHSFGGWKRSLFGDLHAYGPDGVRFYTKRKTITQRWPSSGVREGASFAFA

SEQ ID NO: 2513 - protein, 116 aa, Brassica napus
  misc_feature (19)..(19): Xaa can be any naturally occurring amino acid
  misc_feature (108)..(108): Xaa can be any naturally occurring amino acid
VGKLSMDSDEVVENVMATXNGVVEVLPSQWKYVRSLHLKLSESVSLPIYQCVPDLKLKIDDFEEESGVTEEEKKKKGKSDGVKGKKKKGRIHEVRCMDSNVSEVLDEXEVSIESGG

SEQ ID NO: 2514 - protein, 312 aa, Azoarcus sp. EbN1
MSVARAQAPDRAIKSPVFGITTMTARILDGNALSARVRGELAERAAALADGGVQPCLAVILVGVNPASAVYVRNKVAACEKAGIRSLRFDFAADVDAAEVMAKIAELNADSAVHGVLVQLPLPKQFNEAEVLEAIRVEKDVDGFHAENVGRLSQGQEAFLPCTPHGVMKMLEAGGVPVQGAEAVVIGRSNIVGKPMAMLLTNAGATVTVTHSKTRDLAFHTRRADILVAAIGKPRFVTGDMIKPGAVVIDVGINRLTEGPDAGKLCGDVDFESAKEVASLITPVPGGVGPMTITMLLANTVESAERVARSKG

SEQ ID NO: 2515 - protein, 537 aa, Bifidobacterium longum NCC2705
MGGNQSQPNATAIIGTGKGGPLDTSAGTIASRGISFTYDHAAEPALRDITLTVPAGECIVLCGASGCGKTSYTRVANGLIPSFFHGAFAGNQTTCGLDVETVPIDRLTPLVGSVFQNPKTQYFNANVTDELAFPAENIGLPAEDINRRITAVAERFGIGHLLHRSIFHLSGGQKQRIAVAAATMLGPRLVVLDEPTSNLDANAIADMRAMIEQMKDEGLTIVIAEHRLAWLNGVADRYVVFDGGHIVQDYEADEFLSLSPGCVAAMGLRALDLQPYRHRIATLASSPAADECTSALLGTHNLTIGYKGKDGFTRAIPDLRFRAGEITGLMGNNGCGKTTLVRTLTGLIKPVSGRIELNGVPAKPRDLTRAGFLVMQDVNYQLFSDSVREELLIGLDETDAGITAQANQVMADLDLAAFVERHPMSLSGGQKQRVAIGSALMCGKDLIILDEPTSGLDRYHMEQVGELLRQLASQGKAILVVTHDEELAAGWCDRIVNLGADDSGNNGSHASNPDASSPNPNASTNFATTSTHERNAQ

SEQ ID NO: 2516 - protein, 339 aa, Arabidopsis thaliana
MASIRRTLSPMYHDRSHENGGSHKGFTIGGSSSKHNSSQFLSYLTKLLGVTSDPKSSRRGPWRRPFYQFLVFFLLGFVLGLTPFGKMEDVNGSDRFSFEIKQPYVEERLENRKREEAAVDAVSFVAETENGKKEVNFVPKKLLIVVTPTYNRAMQAYYLNRVAQTLRLVESPVLWIVVEGNVASFETSEILRKTGVMYRHLVCKRNMTSIKDRGVHQRNTALEHIELHKLDGIVYFADDDNIYSLELFQSLRQISRFGTWPVAMLAQSKNKAILEGPVCNGSQVIGWHTNEKSKRLRRFHVDMSGFAFNSTILWDPKRWRRPFSHPTRQLDTVKEGFQV

SEQ ID NO: 2517 - protein, 583 aa, Azoarcus sp. EbN1
MSELIEVKVPDIGDYADVPVIELFVKPGDTIKVEDPIATLESDKATMDVPSTAAGVVREVLVQVGDRVAEGKVLIKVEAAGAENTAAPEAAGNAAAQATPASSGAALEQSEASAPSAASAATASAPTPTPTSAPAATGGSTEVRVPDIGDFSDVPVIELFVKVGDTIKVEDSIATLESDKATMDVPSSAAGVVREVKIKVGDRVSEGAVLIVVDSAAGAATAPAPAATPATARIAAADATPADAPEAFEQSKLSAPAAGQAGAPSAVALGGRVHASPSVRAYGRELGVDLAQVRATGPKGRVVREDVTAFVKGAMQTGIVPGKAAAAGAGVSLGGGLDLLPWPKVDFSKFGEIETKPLSRIKKISGQNLARNWVMIPAVTYHEDADITDLEAFRVAINKENEKSGKKLTMLAFIIKASVRALQQFPEFNTSLDASGGEMSLVYKKYFNIAFAADTPNGLVVPVIKNADRKSVFEIAAESGELAKKARDGKLGPADMSGACFTISSLGGIGGTYFAPIVNAPEVAILGVNKSAMKPIWDGKQFVPRLTLPMSLTADHRVIDGALATRFNVYLAQLLSDFRRVML

SEQ ID NO: 2518 - protein, 482 aa, Caulobacter crescentus CB15
MTALNLVETAALIDGQWVRGEASFDVLNPADGTLIAAVADLGAAETTLAIDAAHRALPAWAARTAKERGAILRRWSDLILAHADDLARLMTDEQGKPLAEAKGEVVYGASFIDWFAEEAKRAYGHTIPTPMPGKRLASIKQPVGVCAAIAPWNFPIAMITRKVGPALAAGCTVVVKPAAETPLSALAIARLATEAGVPAGVLNIVTTTRSSEVGKVLCDDSRVRKLSFTGSTPIGKVLYQQCAGTMKKLSLELGGNAPFIVFDDADLEAAVDGAIASKYRNAGQTCVCANRLIVQSGIHDAFAARLAEKVAALKVGPGTGEGVQIGPLINEKALTKVVGLVSGAVQAGAEVLTGGDVHGLGGHFYQPTVLVGATPEMRIFQEEIFGPVAPIVKFETEAEAVELANATPFGLAAYFYSRDVGRCWRVAEQIEAGMVGINEGLISTEVAPFGGVKESGLGREGASEGLDEYLETKYLCFGGVAG

SEQ ID NO: 2519 - protein, 420 aa, Streptococcus pyogenes MGAS10394
MTKEKLVAFSQAHAEPAWLQERRLEALKAIPELELPTIERVKFHRWNLGDGTLTENESLASVPDFIAIGDNPKLVQVGTQTVLEQLPMALIDKGVVFSDFYTALEEIPEVIEAHFGQALAFDEDKLAAYHTAYFNSAAVLYVPDHLEITTPIEAIFLQDSDSDVPFNKHVLVIAGKESKFTYLERFESIGNATQKTSANISVEVIAQAGSQIKFSGIDRLGPSVTTYISRRGRLEKDANIDWALAVMNEGNVIADFDSDLIGQGSQADLKVVAASSGRQVQGIDTRVTNYGQRTAGHILQHGVILERGTLTFNGIGHILKGAKGADAQQESRILMLSDQARADANPILLIDENEVTAGHAASIGQVDPEDMYYLMSRGLDQETAERLVIRGFLGAVIAEIPIPSVRQEIIKVLDEKLLNR

SEQ ID NO: 2520 - protein, 394 aa, Ureaplasma urealyticum serovar 13
MAKAKFERTKPHVNIGTIGHVDHGKTTLTAAISTVLAKKGQAIAQSYADVDKTPEERERGITINASHVEYETKTRHYAHVDCPGHADYVKNMITGAAQMDGAILVIAASDGVMAQTKEHILLARQVGVPKIVVFLNKCDFMTDPDMQDLVEMEVRELLTKYGFDGDNTPVIRGSGLKALEGDPVWEAKIDELMDAVDSWIPLPERSTDKPFLLAIEDVFTISGRGTVVTGRVERGTLKVNDEVEIVGLKDTQKTVVTGIEMFRKSLDQAEAGDNAGILLRGIKKEDVERGQVLVKPGSIKPHRTFTAKVYILKKEEGGRHTPIVSGYRPQFYFRTTDVTGAISLPAGVDLVMPGDDVEMTVELIAPVAIEDGSKFSIREGGKTVGHGSVIKTSN

SEQ ID NO: 2521 - protein, 472 aa, Streptococcus pyogenes MGAS10394
MSDINEKVELKPIDLGDYQFGFHDDVEPIYSTGKGLSEAVVRELSAAKNEPEWMLEFRLKSLETFNKMPMQTWGADLSDINFDDIIYYQKASDKPARSWDDVPEKIKETFDRIGIPEAERAYLAGASAQYESEVVYHNMKGEFEKLGIIFTDTDSALKEYPDLFKQYFAKLVPPTDNKLAALNSAVWSGGTFIYVPKGVKVDIPLQTYFRINNENTGQFERTLIIVDEGASVHYVEGCTAPTYSSNSLHAAIVEIFALDGAYMRYTTIQNWSDNVYNLVTKRARALTDATVEWIDGNLGAKTTMKYPSVYLDGPGARGTMLSIAFANAGQHQDTGAKMIHNAPHTSSSIVSKSIAKSGGKVDYRGQVTFNKQSKKSVSHIECDTILMDDISKSDTIPFNEIHNSQVALEHEAKVSKISEEQLYYLMSRGLSESEATEMIVMGFVEPFTKELPMEYAVELNRLISYEMEGSVG

SEQ ID NO: 2522 - protein, 520 aa, Nitrosomonas europaea ATCC 19718
MIFWRVKSLDAILATAEKKSLHRSLGVWQLTLLGVGAIIGTGIFVLTAEAAQKAGPGMMIAFVIAGFVCAVAALCYSELSSMVPVSGSAYTYSYAVLGELIAWMVGWALILEYSVAAGAVAVGWSGYFVGLLNNASLGFEIPYVLANGPFAGGIINLPAVVICLLVVGLLIIGTRESAMFNAILVAVKIIALTAFIALALPATDMNHFDPFLPLGTSGVVAAAASIFFAYVGFDAVSTAAEETKDPQRNLPIALISSLLLCTLFYLLVSAGVIGAVGAQPLVDAAGEGLAPGSREMAAQCKSLAAAGQQPVVCSHEALAHVLREIGWEKIGNLLGLAAFLALPSVILMMLFGQTRIFFVMSRDGLLPEVLSRIHPRFKTPYIVTLVTGVGVMAAAAFLPVGKLANISNSGTLFAFLVVALTVMILRVRDKNRPRPFRTPMIWLVGPLAIGGCLILFLFLPMDAKLVFPVWTGIGLIFYFLYGYRRSHVLLGIDTPSGGENLIEPIRSLADGSDETEVKVK

SEQ ID NO: 2523 - protein, 414 aa, Bradyrhizobium sp. BTAi1
MLKFGGTSVANIDRIRNVARHVKREVDAGHEVAVVVSAMSGKTNELVAWCTEASPMHDAREYDAVVASGEQVTSGLLAIVLQSMGIQARSWQGWQIPIKTSDAHASARIVDIDGSELIQRFQERKEVAVIAGFQGINPATNRITTLGRGGSDTSAVAIAAAIKADRCDIYTDVDGVYTTDPRVVPKAKRLDKIAFEDMLELASQGAKVLQVRSVELGMVHNMPIFVRSSFDKPEDIDPHAKQPPGTLICSEEQIMENHVVTGIAFSKDEAQISVRQIEDKPGIAASIFGPLADANINVDMIVQNVSEDGKTTDLTFTVPATDYNRARETIAAAKDKIGYQRLDTATDVAKVSVIGSGMRSHAGVAAKGFAALAARNINIRAITTSEIKFSVLIDAVYTELAVRTLHTLYGLDQA

SEQ ID NO: 2524 - protein, 625 aa, Bradyrhizobium japonicum USDA 110
MCGIFGWVLAAAKHQNRDTLIGLTDLMSHRGPDASGYWLHQTSDERYQIGFGHRRLSIIDIGGGAQPMATEDGRFNLVFNGEIYNYLELRKELVALGHHFRTDSDTEVLIEAYRAWQLDAVRRLRGMFAFALWDDAEQRLVLARDAFGKKPLFLAEAQGAVLFGSEIEPLVQFPGFSRALDSDAIGHYLLNRYVPGPSTFFQSVKKLQPGHCAVWQNGMLKSTRYYTPPFATTVPDVKDFNSAIRLFEGAFDEAVRIRMRSDAPYGAYLSGGIDSSAVVATMVKHSTEPVRTFSVGFRETGYSELDHARVIAGQFGTIHNDLIVEPSAFMDHWSTAALRRGAPVSEASDIPIFMLSEMASRSVKMVLTGEGADELMGGYPKYRAERWIGLYQWLIPHLLHERLIHPLVRSLPYGMRRAKIVALAAGERDLANRMRVWFGGLSVGESEAMLGRLLSATPPDLFPYSSQIGSSLRRTLFFDQTSWLPDNLLERGDRMMMAGSIEGRMPFMDTVLAGVVARFPDDFLTGGKGGKRVLRAAMDKILPSEIIRRKKIGFRVPIGEWFRGPYREFLRDMLVSETSAVAQMVRGDRLRQLVTEHLDARQNHERLLWSFVNLEIFVRAFRVAS

SEQ ID NO: 2525 - protein, 136 aa, Triticum aestivum
HASGTMAEETRNPARDIPIGLVGSMAVTTALYCVLAVTLCLMQPYGAIDKDAPFSVAFADRGMDWAKYVVAFGALKGMTTVLLVSAVGQARYLTHIARTHMMPPWLAQVHPRTGTPVNATVVMLLATAAIAFFTDL

SEQ ID NO: 2526 - protein, 478 aa, Prochlorococcus marinus subsp. pastoris str. CCMP1986
MNKPRILFWHRKDLRIFDNQALIKAFSLSDAITSTYIFDKNYSHDFNASSRAWFLGNSLQELGNNWKKMGSRLVLEEGDPVLIIPQLAKKIDAKFVFWNRSIEPYEINRDLEIKNNLKEQNIQVIETWDHLLIEPLKIFSGNNNPYSVYGPFYKNLKSKINLLGSFEQDKVVFQFKDIDNKFKENKAINSSDSVLEKFIKNIKFPGSNICPCRPGENAAQTLLENFINEKKIYSYNSARDFPSHNGTSFLSASLRFGTISIRKVWNATLNLNSDFANQENYLSIETWQKELVWREFYQHCLFHFPELEKGPYRKKWDHFPWQNNNELFQHWSNGETGVPIVDAAMRQLNSTGWMHNRCRMIVASFLVKDLICSWQMGEKKFMETLVDGDLAANNGGWQWSASSGMDPKPLRIFNPYTQAKKFDPICEYIKYWIPELSRVSNSELLNGEISNLEKNNYSSPIVNHNIQQRLFKSLYAEI

SEQ ID NO: 2527 - protein, 625 aa, Trichophyton rubrum
MPPPPVDTTQRLAKLRELMAQNKVDVYIVPSEDSHQSEYIAPCDGRRAFISSFTGSAGCAIVSMSKAALSTDGRYFSQAAKQLDANWILLKRGVEGVPTWEEWTAEQAETRQGCGSDARKLSQTLKTTGGSLVGIDQNLIDAVWGDERPARPANQITVQPVERAGKSFEEKVEDLRKELTAKKRSAMVISSKFLYKWYLSLYTKSHADWCSIPYNPVFFSYAIVTPSVAELYVDESKLSPEARKHLEGKVVLKPYESIFQASKVLAESKASASSGSSGKFLLSNKASWSLSLALGGEQNVVEVRSPITDAKAIKNEVELEGFRKCHIRDGAALIEYFAWLENALIKEGAKLDEVDGADKLFEIRKKYDLFVGNSFDTISSTGANGATIHYKPEKSTCAIIDPKAMYLCDSGGQYLDGTTDTTRTLHFGEPTEFQKKAYALVLKGHISIDNAIFPKGTTGYAIDSFARQHLWKEGLDYLHGTGHGVGSFLNVHEGPMGIGSRAQYAEVPLSASNSLDIMKTATSAFVSRVSSMTAYSSFFILTASLDLVICKEVQTAHKFGDKPFLGFESITLVPFCQKLLDASLLTEAERKWVNDYHAKVWEKTSPFFEKDELTTAWLKRETQPI

SEQ ID NO: 2528 - protein, 720 aa, Prochlorococcus marinus subsp. pastoris str. CCMP1986
MILNPELQEKGEIKDLMKSRGSFRAFPLAAITGHSLLKLSLLLAAVDPSLGGVIIAGGRGTGKSILARGLHTLLPPIEVLDNESILEKLTMSNSNTSLRPIGRNLDPDKAEEWDISTNKLLEEVIGSDYLNQIEEIPKKVREAPFIQVPIGITEDRLVGSIDVAASLSSGEQVFQPGVLAEAHRGVLYVDDINLLDDGIVNLILEATGREQNNIERDGLSLSHPCRSLLIATYNPEEGALRDHVLDRFAIVLSADQSIDNNQRVEITKSVLSHAENNIKFSEKWSEESDNLSTQLILARQWLKDVKITKEQITYLVNEALRGGVEGHRSELFAVKVAKANAALRGDENVNSDDLKVAVRLVILPRATQIPPQDDDIQPPPPQDQSPPPPQSNNEDSEPESNEKEDNQEEEQDNSDGEEDSTPDIPEEFILDPESCMVDPDLLLFSSAKSKAGNSGSRSVILSQSRGRYVRPLIPRGKVKRIAVDATLRAAAPYQKSRRLKNPNKTIIIEENDFRAKLLQKQAGALVIFLVDASGSMALNRMQSAKGAVIRLLTEAYENRDEVALIPFRGNQAEVLLPPTRSITAAKRRLETMPCGGGSPLAHGLTQSAKVAKNALSTGDIGQVIVVGITDGRGNVPLGTSLGQAEVNENENVDLKQEVLDIAAKYPMLGIKLLIIDTERKFIASGFGKELAEAAQGKYVQLPKATDKTIAAMALNAINEF

SEQ ID NO: 2529 - protein, 240 aa, Triticum aestivum
  misc_feature (140)..(140): Xaa can be any naturally occurring amino acid
  misc_feature (182)..(182): Xaa can be any naturally occurring amino acid
  misc_feature (184)..(184): Xaa can be any naturally occurring amino acid
MSFARAVQRIKSIQNFLTRPTVPHISAAAAGQSRLINMASTTETNNYKFNHSMIRVKDPKASTKFYEFLGMSLVKKLEFPDNKFDLYFFGYDSPNALSHNKSTFDRQGLIELTHNYGTENDPEYKVNNGNQDPHRGFGHXCIAVDNIQAACQRIEDAGYKFQKKLTDGRMRNIAFVLDPDGXWXVEVVARNDYKETENVKETDVSTYTMNHTMLRVKDAEKSPEYYPRSLGMSRLRTLRN

SEQ ID NO: 2530 - protein, 351 aa, Arabidopsis thaliana
MTTICDLPRDLVARILSRVPLTSMRRVRFTCKRWNTISKDPSFAKTHFGKAARQFIMMSQSRVSLMSVKLHGDGNEDELADPYIYEGYRLDVYALGYDKNLKNHKILRFVDSYEPAVKHSIIEHEIFDLKSNAWRVLDATPDWEIDSYQRGVSLKGNTYFFAKEKIVVEGDDVVVIEDFKDFLICFDFTSERFNLDHVCLYRFTLTMERPVREEQLAVLYQQDTCLMEIWVTNKIEPDVVSWSKVFLAVDMEPLTGSFIPFAFFAGSFFIDEEKKIAVVFDKDQEEINDRAYLIGENGYYKEVDLGYMNGYYQQQVDPRGPDPVFPLVCSYSPSLVTIPQGTRGKRKERDY

SEQ ID NO: 2531 - protein, 1037 aa, Arabidopsis thaliana
MERARRLAYRGIVKRLVNDTKRHRNAETPHLVPHAPARYVSSLSPFISTPRSVNHTAAFGRHQQTRSISVDAVKPSDTFPRRHNSATPDEQTHMAKFCGFDHIDSLIDATVPKSIRLDSMKFSKFDAGLTESQMIQHMVDLASKNKVFKSFIGMGYYNTHVPTVILRNIMENPAWYTQYTPYQAEISQGRLESLLNFQTVITDLTGLPMSNASLLDEGTAAAEAMAMCNNILKGKKKTFVIASNCHPQTIDVCKTRADGFDLKVVTSDLKDIDYSSGDVCGVLVQYPGTEGEVLDYAEFVKNAHANGVKVVMATDLLALTVLKPPGEFGADIVVGSAQRFGVPMGYGGPHAAFLATSQEYKRMMPGRIIGISVDSSGKQALRMAMQTREQHIRRDKATSNICTAQALLANMAAMYAVYHGPAGLKSIAQRVHGLAGIFSLGLNKLGVAEVQELPFFDTVKIKCSDAHAIADAASKSEINLRVVDSTTITASFDETTTLDDVDKLFKVFASGKPVPFTAESLAPEVQNSIPSSLTRESPYLTHPIFNMYHTEHELLRYIHKLQSKDLSLCHSMIPLGSCTMKLNATTEMMPVTWPSFTDIHPFAPVEQAQGYQEMFENLGDLLCTITGFDSFSLQPNAGAAGEYAGLMVIRAYHMSRGDHHRNVCIIPVSAHGTNPASAAMCGMKIITVGTDAKGNINIEEVRKAAEANKDNLAALMVTYPSTHGVYEEGIDEICNIIHENGGQVYMDGANMNAQVGLTSPGFIGADVCHLNLHKTFCIPHGGGGPGMGPIGVKNHLAPFLPSHPVIPTGGIPQPEKTAPLGAISAAPWGSALILPISYTYIAMMGSGGLTDASKIAILNANYMAKRLEKHYPVLFRGVNGTVAHEFIIDLRGFKNTAGIEPEDVAKRLMDYGFHGPTMSWPVPGTLMIEPTESESKAELDRFCDALISIREEIAQIEKGNADVQNNVLKGAPHPPSLLMADTWKKPYSREYAAFPAPWLRSSKFWPTTGRVDNVYGDRKLVCTLLPEEEQVAAAVSA

SEQ ID NO: 2532 - protein, 176 aa, Glycine max
  misc_feature (125)..(125): Xaa can be any naturally occurring amino acid
MVLVLALGDLHIPHRAPDLPAKFKSMLVPGKIQHIICTGNLCIKEVHDYLKSLCPDLHITRGEYDEDARYPETKTVTIGQFKLGLCHGHQVVPWGDLDSLAMLQRQLDVDILVPGEPHKVKGLKXRGGGAPLNPGSGTGAPGGFQIDPHPEFLGSGKPKGPPGWLPTGEQPFWGGG

SEQ ID NO: 2533 - protein, 335 aa, Pseudoalteromonas tunicata D2
MTTVNLFRLGVLTSGGDAPGMNAAIRAITLKGLSAGFEIVGINAGYNGIFNLDTQILSAQSVDNIIQRGGTLLKTARCSQLREEDGPRLAAEKLTQLKLDALIIIGGDGSFRGAVKLAEFWPKPIIGIPGTIDNDINGTDQTIGFWTAIDTALDSIDKIRDTADAFERIFVVEVMGRDCGFIAMESGIACGAEQIICHELIEDEETYLAQLYNAILHAVTWRQTQSYVIVIAEHSLSICSAELAKRIADFTGVDTKSAILGYIQRGGAPVAMDRVLATQLGISAVKAVCEGKTGLMIGMKNNEMVEIPFAQTGLKNTHNQDLIKRLKHFNFDLTD

SEQ ID NO: 2534 - protein, 224 aa, Pseudomonas syringae pv. syringae B728a
MQPFVIAPSILSADFARLGEEVDNVLSSGADFVHFDVMDNHYVPNLTIGPMVCSALRKYGVTAPIDVHLMVSPVDRIIGDFIEAGATYITFHPEATQHIDRSLQLIREGGCKAGLVFNPATPLNLLEYVMDKVDMILLMSVNPGFGGQKFIPGTLNKLREARALIDASGRDIRLEIDGGVNVNNIREIAAAGADTFVAGSAIFNAPDYREVIEKMRTELASSRA

SEQ ID NO: 2535 - protein, 323 aa, Aspergillus oryzae
MAAFIGANLNPCNYIGGVSFNPERDIPDLSGKVALVTGGNAGLGKETILQLAKHRPQRIYLAARSETKAQAAISSLKGSLSNNVEITWLPLDLMSIKSIQTAAQTFNAESSRLDILILNAGVMSLPPGETEMGHEIQLGTNHTGHFLLTKLLLPTLLKTAEEPNSDVRVVSLSSIGHNLAPSFETILDQDRLKKVNTNTRYGASKAANILFAAELARRYPSITSVSVHPGIILTDLYSSVSDRSALAALGSKTLGLFGTQVPQGAYNELWAAAGAKKHDLVNGSYYIPVGHLKPYNQYARSEDMGRRLWDWTESELRKFNALP

SEQ ID NO: 2536 - protein, 125 aa, Methanosarcina barkeri
MKEITAIIRMNKAQRTKDVLLECGFPSFTIRRVMGRGKQRGLCHEFNPPLPDPEKEAETCIRFIPKRMFTIVVDDENVSEVVQKIIEVNQTGNAGDGKIFVSDVTEAIRIRTGESGEATVNKELV

SEQ ID NO: 2537 - protein, 118 aa, Nostoc sp.
MSTLYDNIGGQPAIEQVVDELHKRIATDSLLAPIFAGTDMAKQRNHLVAFLGQIFEGPKQYGGRPMDKTHAGLNLQQPHFDAIAKHLGEAMAVRGVSAEDTKAALDRVTNMKGAILNK

SEQ ID NO: 2538 - protein, 537 aa, Arabidopsis thaliana
MDALSQAISSGISVPYKNNSSSLVPSHGLTSLILRKSRSPVNPSSRSRVSVRASEIQHSKTSASSIDLSDPDWKLKYEKDFEQRFSIPHITDVLPDAEAIRSTFCLKMRSPTEDFVGGYPSDEEWHGYINNNDRVLLKVISYSSPTSAGAECLDHDCSWVEQWIHRAGPREKIYFRPEEVKAAIITCGGLCPGLNDVIRHIVITLEIYGVKNIVGIPFGYRGFSDKDLTEMPLSRKVVQNIHLSGGSLLGVSRGGPSVSEIVDSMEERGINMLFVLGGNGTHAGANAIHNECRKRKIKVAVVGVPKTIDNDILHMDKTFGFDTAVEEAQRAINSAYIEAHSAYHGIGVVKLMGRNSGFIAMQASLASGQVDICLIPEVPFNLHGPNGVLKHLKYLIETKGSAVICVAEGAGQNFLEKTNAKDASGNAVLGDFGVYIQQETKKYFKEISTPIDVKYIDPTYMIRAVRANASDGILCTVLGQNAVHGAFAGYSGITVGIINTHYAYLPITEVIAYPKSVDPNSRMWHRCLTSTGQPDFI

SEQ ID NO: 2539 - protein, 503 aa, Rubrobacter xylanophilus DSM 9941
MSAPASEVHPKLFIANEWRPSHTGQTFETVDPSTEEVIASIPRGGAEDVDEAVSAAREAFNGPWRRLTPEDRARFLYQVARSLESRLEEFARLETLDTGKPLQHSRNEIRNCVRYFDYYAGAADKIHGETIPLGPNYLDYTVREPLGVTAHIVPWNVPLGMVCRSLAPALAAGNAAVVKPAEQTPLTALKLAELFLELDAPPGVYNVVTGFGEEAGRALSEHPGIDSITFTGSVETGRAVLRAAAEHVRPVVLELGGKSPQVVFADCDLDFAADEVAKGIYSNSGQYCDAGSRLLIDGSIKEPFLEKVIERARAIKLGAGMDEPDMGPLVSEEHFKRVLGYIEVGNKEGARMLTGGRAEGFERGYFVAPTIFDEVESNMRIAQEEIFGPVLATLSFGSEVEAIEIANDSSYGLAAGIFTRDIDRALRFASEIQAGYVMINEYFSGGMGSPFGGYKQSGIGRERGLIALDNYTQIKNVVVKVGQRLPRRSAGIQDALAPITKPG

SEQ ID NO: 2540 - protein, 180 aa, Brassica napus
KNATRPQPLINATCRVPASKLEMVTLIVATTYDPASINPATALLAMPGWTTGPILPPNIKSFTNQQTRLIQHDVSIVKEDDLDSRWEEATGEVVDEVIFLSRHTAASNRPALTVHPIGVLHLKEGESPPHGGKAGWAALPSPRIGPWLRLLKKMAEAHSLVPEFEITLEGTHHGPITSKP

SEQ ID NO: 2541 - protein, 154 aa, Aspergillus oryzae
MSDDEQHDQTFEQHQQHASPTYAALVSTLTKGAHVIIRGRPCKILEISKIGTNIHLVARDIFTDRILSDDIESTQSVEIPHVYRNEYMLVNIDEGFLNLTNQDGTMKDNVKVPGGGLGQQIEQDFEAGTDLLIAVISAMGEEHAVSVREAPKGS

SEQ ID NO: 2542 - protein, 394 aa, Ureaplasma parvum serovar 14
MAKAKFERTKPHVNIGTIGHVDHGKTTLTAAISTVLAKKGQAIAQSYADVDKTPEERERGITINASHVEYETKTRHYAHVDCPGHADYVKNMITGAAQMDGAILVIAASDGVMAQTKEHILLARQVGVPKIVVFLNKCDFMTDPDMQDLVEMEVRELLSKYGFDGDNTPVIRGSGLKALEGDPVWEAKIDELMDAVDSWIPLPERSTDKPFLLAIEDVFTISGRGTVVTGRVERGVLKVNDEVEIVGLKDTQKTVVTGIEMFRKSLDQAEAGDNAGILLRGIKKEDVERGQVLVKPGSIKPHRTFTAKVYILKKEEGGRHTPIVSGYRPQFYFRTTDVTGAISLPAGVDLVMPGDDVEMTVELIAPVAIEDGSKFSIREGGKTVGHGSVIKTSN

SEQ ID NO: 2543 - protein, 343 aa, Lycopersicon pimpinellifolium
MEMDLPVSAIGFEGFEKRLEISFVEPGLFADPNGKGLRSLTKAQLDEILGPAECTIVDNLSNDYVDSYVLSESSLFVYSYKIIIKTCGTTKLLLAIPPILRLAETLSLKVQDVRYTRGSFIFPGAQSFPHRHFSEEVAVLDGYFGKLAAGSKAVIMGNPDKTQKWHVYSASAGTVQCNDPVYTLEMCMTGLNREKASVFYKTEESSAAHMTVRSGIRKILPKSEICDFEFEPCGYSMNSIEGTAVSTIHITPEDGFSYASFESVGYDPKTTELGPLVERVLACFEPAEFSIALHADVATKLLEHVCSVDVKGYSLAEWSPEEFGKGGSIVYQKFTRTPYCESP

SEQ ID NO: 2544 - protein, 941 aa, Mycobacterium tuberculosis CDC1551
MSDHSTFADRHIGLDSQAVATMLAVIGVDSLDDLAVKAVPAGILDTLTDTGAAPGLDSLPPAASEAEALAELRALADANTVAVSMIGQGYYDTHTPPVLLRNIIENPAWYTAYTPYQPEISQGRLEALLNFQTLVTDLTGLEIANASMLDEGTAAAEAMTLMHRAARGPVKRVVVDADVFTQTAAVLATRAKPLGIEIVTADLRAGLPDGEFFGVIAQLPGASGRITDWSALVQQAHDRGALVAVGADLLALTLIAPPGEIGADVAFGTTQRFGVPMGFGGPHAGYLAVHAKHARQLPGRLVGVSVDSDGTPAYRLALQTREQHIRRDKATSNICTAQVLLAVLAAMYASYHGAGGLTAIARRVHAHAEAIAGALGDALVHDKYFDTVLARVPGRADEVLARAKANGINLWRVDADHVSVACDEATTDTHVAVVLDAFGVAAAAPAHTDIATRTSEFLTHPAFTQYRTETSMMRYLRALADKDIALDRSMIPLGSCTMKLNAAAEMESITWPEFGRQHPFAPASDTAGLRQLVADLQSWLVLITGYDAVSLQPNAGSQGEYAGLLAIHEYHASRGEPHRDICLIPSSAHGTNAASAALAGMRVVVVDCHDNGDVDLDDLRAKVGEHAERLSALMITYPSTHGVYEHDIAEICAAVHDAGGQVYVDGANLNALVGLARPGKFGGDVSHLNLHKTFCIPHGGGGPGVGPVAVRAHLAPFLPGHPFAPELPKGYPVSSAPYGSASILPITWAYIRMMGAEGLRAASLTAITSANYIARRLDEYYPVLYTGENGMVAHECILDLRGITKLTGITVDDVAKRLADYGFHAPTMSFPVAGTLMVEPTESESLAEVDAFCEAMIGIRAEIDKVGAGEWPVDDNPLRGAPHTAQCLLASDWDHPYTREQAAYPLGTAFRPKVWPAVRRIDGAYGDRNLVCSCPPVEAFA

SEQ ID NO: 2545 - protein, 379 aa, Lycopersicon esculentum
MASEAHAVVDAHSPPKTTTVWVTGGAGFIGSWLVMRLLERGYNVHATVRDPENQKKVKHLLELPKADTNLTLWKADLAVEGSFDEAIQGCQGVFHVATPMDFESKDPENEVIKPTVRGMLSIIESCAKANTVKRLVFTSSAGTLDVQEDQKLFYDETSWSDLDFIYAKKMTGWMYFVSKILAEKAAMEEARKNNIDFISIIPPLVVGPFITSTFPPSLITALSLITAHYGIIKQGQYVHLDDLCEAHIFLYEHPKAEGRFICSSHHAIIYDVAKMVRQKWPEYYVPTEFKGIDKDLALVSFSSKKLMDIKFQFKHTLEDMYKGAIETCRQKQLLPFSTRSTADNGKDKEAIPISTENYSSGKENAPVANCTGKFTNGEI

SEQ ID NO: 2546 - protein, 491 aa, Lycopersicon esculentum
MANTKDSYHIITMDTKESSIPSLPMKEIPGDYGVPFFGAIKDRYDFHYNQGADEFFRSRMKKYDSTVFRTNVPPGPFNARNSKVVVLVDAVSYPILFDNSQVDKENYFEGTFMSSPSFNGGYKVCGFLGTSDPKHTTLKGLFLSTLTRLHDKFIPIFTTSITSMFTSLEKELSEKGTSYFNPIGDNLSFEFLFRLFCEGKNPIDTSVGPNGPKIVDKWVFLQLAPLISLGLKFVPNFLEDLVLHTFPLPYILVKRDHQKLYNAFYNSMKDILDEAEKLGVKRDEACHNFVFLAGFNSYGGLKVFFPSLIKWIGTSGPSLHARLVKEIRTAVKEAGGVTLSAIDKMPLVKSVVYETLRMDPPVPFQTVKARKNIIITNHESSFLIKKDELIFGYQPLATKDSKVFKNAEEFNPDRFVGGGEKLLKYVYWSNGKEIDNPSVNDKQCPGKDLIVLMGRLLVVEFFMRYDTFEVEFGKLLLGSKVTFKSLTKATS

SEQ ID NO: 2547 - protein, 511 aa, Blastopirellula marina DSM 3645
MSDQRTIKIFDTTLRDGEQSPGASMNLPEKMEIAQALVDLGVDIIEAGFPIASPGDFEAVHEIASNIRGASICGLARCNDRDIDRAWEALKSAKSPRIHVFLATSAIHREFKLKMTPDEIVERAISGVARAAGYCDDVEFSPEDAARTEPDFLCRVVEAAIKAGATTVNIPDTVGYATPSHMGRVISDLVNRVPNIDQAVISVHCHNDLGLAVANSLAAVEAGAGQIECTINGIGERAGNCALEEIVMAMRTRNDYYNVDSRINTERLVPTSRLVSSVTGMQVQRNKAIVGRNAFAHEAGIHQDGMLKEPSTYEIMRPEDVGFAKTDLVLGKHSGRAALADRARSLGYHLTGEQLQVVFEQFKELADKKKEIYDGDISALCEQQIRGSDLTREWSLVSLEVSSGTKRQPNVKMTLAHAGEEHSAEVSEGDGPIDAAFWAVERITGVKLNCKDFQVRSATLGRDAQGTVTVDIDHNGTIFRGRGVSTDTVESTVLAILDAVNRICWKTAQPA

SEQ ID NO: 2548 - protein, 415 aa, Rubrobacter xylanophilus DSM 9941
MSSTGNGHALITGLGAVTPLGSGVENFWDAALHGKSGIGEITLFDPSPYPSRIAGECRDFDPTDYMSRKEARRMDRYGQFGVAAGIEAAQHAGIVDIVRRRPERVAIVIGSGIGGISTWEREYRVLHERGPGRVSPFLITMMVPNMAAGQLAIMLGATGPTQCPVLACATGGEAIAEGLELIRRGDADVVIAGSSEAPITPLSMAGFCAIRAVSRRNEEPHRASRPFDAGRDGFVMSEGAGAMVLESPEHAERRGAEPIAAVAGYGRTTDAYHVTAPDEQGRGVERAIRLALEDAGMSPEDVGHVNAHATATPTGDGPETRAIARVVPHAHVSGTKSMTGHSFGAVGTTEGIMCALALKHKVVPPTINLERVADDCERLNYVGPEARRVPDLKGAISNSMGFGGHNVVVAFRSVE

SEQ ID NO: 2549 - protein, 112 aa, Porphyra purpurea
MKKIEAIIRPFKLNEVKLALVKGGIGGMTVVKVSGFGRQKGQTERYKGSEYSIDIIDKIKIEIIVSDDKVNSITEIIIKTAKTGEIGDGKIFISDVEQVIRIRTNDLNSAAL

SEQ ID NO: 2550 - protein, 148 aa, Vicia faba
MEFTLRQEALVNSSWEAFNQNLPLFSVLFYTFILEKAPIAKNMFSVLKDANEIPLANPSINAHTEMVFEMVRDAAAQLQTTGQVVLGDTTLGVVHTQKRVDGLHFMVVKEALLKTIKEAVGDKWSEELSNAWEIAYDGLAVAIMKEMS

SEQ ID NO: 2551 - protein, 165 aa, Actinobacillus pleuropneumoniae serovar 1 str. 4074
MRIDTSALCDIYSDQVDVVEPIFSSFGGASSFYGKITTVKCFESNGLIASVLEEEGQGRVLLIDGGGAVRRALIDAELAQLALDNGWEGIIVYGAVRQLDVLETLDIGIHALAPIPVGADDNEIGEVDTPVNFGGVTFFPEDYVYADLTGIILSPELLDLAELEE

SEQ ID NO: 2552 - protein, 146 aa, Vicia faba
MGFTQQQEALVNSSWESFKQNPSYSVLFYTIILEKAPAAKGMFSFLKDSAGVVDSPKLQAHAEQVFGMVRDSAIQLQATGEVVLKNGSLGAIHIQKGVVDPHFVVVKEALLKTIKEASGDKWSEELSIAWEVAYDGLATAIKKAMS

SEQ ID NO: 2553 - protein, 158 aa, Nitrosomonas europaea ATCC 19718
MNIYDCGIKTMDGQDKLLGDYKGKVLLIVNTASKCGFTPQYQGLEDLYRRYKDRGFVVLAFPCNQFGHQEPGSESEIQQFCTTRYDVSFPVFAKIEVNGANTHPLYRYLKNEKSGVLGTKAIKWNFTKFLVDRSGHVVRRYAPADKPESLTGDIEQLL

SEQ ID NO: 2554 - protein, 147 aa, Vicia faba
MGFTDKQEALVNSSWESFKQNLSGNSIFFYTIILEKAPAAKGLFSFLKDTAGVEDSPKLQAHAEQVFGLVRDSAAQLRAKGEVVLGNATLGAIHVQKGVTDPHFVVVKEALLQTIKKASGSNWSVELSTAWEVAYDGLASAIKKAMN

SEQ ID NO: 2555 - protein, 146 aa, Vicia faba
MGFTEKQEALVNSSWELFKQNPGNSVLFYTIILKKAPTAKGMFSFLKDSAGVVDSPKLQAHAEKVFGMVRDSAVQLRASGEIVLGDATLGAIHIQKGVLDPHFVVVKEALLETIKEISGDKWSEELSAAWEVAYEGLAVAIKKAMS

SEQ ID NO: 2556 - protein, 247 aa, Raphanus sativus
MSSSDCPSPLPTAPKLQVDSVTFPPSVISPASSNTLFLGGAGVRGLEIQGKFVIFTVIGVYLDPVSVPSLSVKWEGKTTEELTESVPFFREIVIGAFEKFIKVTMKLPLTGQQYSEKVTENCVAIWKSLGIYTDSEAKAVERFLEVFKDETFPPGASILFALSPEGSLTVAFSKDDSIPETGKAVIENKLLAEAVLESIIGKNRVSPGARLRVAERLAQLMKENKVEEDATKTDQEEANDLSLAKEN

SEQ ID NO: 2557 - protein, 312 aa, Sulfolobus solfataricus P2
MINREDLLKNPVEDITLSDLKKYNDIVSVFDKIYGFSSEGIVNGSKILKEMIKNADLRFLSFTANLVSTGLRGLFADLIKKGYFNIVVTTGGTIDHDLARSFGGVYYKGSFDIDDTMLKDLEIHRLGNVLVPFESYGKVIEDVVRKFLPEITKDRKEISAYELLWEFGKRITDSNSILRAAYDKNVPIIVPGILDGSFGTNLFIQSQFLNFRINLFEDMRLIKDLIFSSKKSGALIIGGGISKHHTIWWNQFKDGLNYAIYITTAQEYDGSLSGAKPREAISWNKIRPDAKHVTIYGDATIIVPILAASLLS

SEQ ID NO: 2558 - protein, 358 aa, Coccidioides immitis RS
MGSHADAPPSRATDAVLVASENVPEGTPQVSGIDFDKYADRDITAAELLENMAGMGFQASAVAEAARIINEMIAWRDPKTGKGTTIFLGYTSNLISSGLRETLRYLVQHKHVSAIVTTAGGVEEDFIKCLAPTYLGSFTMKGAPLRERGMNRIGNLIVPNNNYCLFEDWVMPILNKMLEEQEASKSTDDPLHWTPSKVIHRLGKEINNEESVYYWAYKNDIPVFCPALTDGSLGDMLYFHTFSAAPAQLRIDIVEDIRRINSMSTFAERAGMIILGGGLVKHHIANACLMRNGAESAVYINTAQEFDGSDAGARPDEAVSWGKIKADAQSVKVYAEATAVFPLIVAATFAKVNKQVIK

SEQ ID NO: 2559 - protein, 433 aa, Glycine max
  misc_feature (216)..(216): Xaa can be any naturally occurring amino acid
MGMERVQCAYASLDEAFEIGKETYQGQQYSQIYFARLHLMRTLLYSLIPHWKPNSPVCTVLGLEEGKECVIVGTLYKHMKLKPCILDEYSKERSVVPLVKPHNFIHPDDHLVLEDESGRVKLSGYIISPSEYVTGIVVALLGKETGAGDFLVQDVLQAGLPPQIEFPLKSREDKYVVLVSGLSVGSSSSNPLQFQLLIDHITGHLGDEKEQSIASXIAQVVFAGNLIEIPHRLLNGQNLASKDLSRMAEPIKELDILLSQIAAGLPLDIMPGPSDPANFSLPQQSLHRCLFPGSSTYNTFRSCTNPHCFELDNVRFLGTSGQNVDDLEKYSEAKDKLEFMERTLRWRHLAPTAPNTLGCYPYTDKDPFFIESCPHVYFIGNQDKFETRVIKGSEGQLVRLVCVPIFSETGVAVMLNLRDLDCYALSFGTQFSS

SEQ ID NO: 2560 - protein, 713 aa, Nitrosomonas europaea ATCC 19718
MMTDQKLYILMMSVHGLVRGHDMELGRDADTGGQITYVVELARALGRNSHIAQIDLLTRQIEDPNISPDYAAEIEELGPNARIVRLPCGPRKYLRKELLWPHLDQMVDRCLHYLRQQGRLPDLIHTHYADAGYVGQHLSNLLGIPQIHTGHSLGRPKRARLLASGRKEQAIERQFNLSRRIAAEEEVLVHASLIITSTSQEIEDQYGMYKNTDPRRCQVIPPGTDTSRFSPPGRKPLDPAIQAGIDRFLNTPEKPVILTICRPDTRKNLHGLIQAYGSDPSLQDMANLVIIAGSREDIRAMEESQRKIMNDVLLDIDRYDLWGKIAIPKHFMVEDVPEVYRLAVRRRGIFVNSALTEPFGLTLIEAAASGLPIIAPEDGGPRDIITNCRNGLLVNTLNPSDIASALKDALSDRKRWRNWSRNGIASVRRHYTWDAHVSKYLREADKLLYRERKRLRRQLAATLHAGRSPMPLARKVIISDIDNTLLGDEQGLAEFLQWLRMHAGNISFGIATGRTVESAVRILKKWRVPMPDILITSVGSEINYWPSLRPDKGWSNHIRHRWRREALAEALKEIPGLALQAPENQREFKLSYLVTPERMPPLKQLYQHLHKQNLHAKLIYSHEAFLDVLPVRASKGLAVRYLAYKWGLPLQSFLIAGDSGNDEEMLVGDTLGVVVGNHSPELESLRDREQIYFAKNTYALGILEGMKHYHFDQ

SEQ ID NO: 2561 - protein, 415 aa, Solibacter usitatus Ellin6076
MGLERRVVVTGVGLISPVGIGTENTWKAITAGKSGIASITQFDATDYDCQIAGEVKGFDPTNWIERKDVKKLGRFAQFAVAASQMALTDAGLKIDETNAERVGVLIGAGIGGFEVIEREYRTLMEKGPSRISPFFIPATIINLAAGQVSIRTGAKGPNSAVATACTTGAHAIGDAFKLIQRRAADAMICGGTEAAITPLGVAGFCAMRAMSTRNQDPERASRPWDRDRDGFVIGEGGGILILEERESALRRGAPIVAEIVGYGMSSDAYHLSAPLEDGDGILRVMRNALDDAGLVPEQIEYLNAHATSTPLGDRGEACAIMRLFGETPRRLAVSSTKSMTGHLLGGSGSLEAGLAVLAIRDQVAPPTINLENRDPEIWLDLVPKCARPLPITYAMSNSFGFGGTNGCLIFHSHSI

SEQ ID NO: 2562 - protein, 420 aa, Shewanella oneidensis MR-1
MGEPTNPTRLGRRVVVTGIGGITALGHDWLSIESSLKAQKNCVVTMADWDKYDGLNTRLAAPVTDFEVPSHYSRKKIRSMGRVSIMATRASELALIDAGLLDDPIVTSGEMGIAYGSSTGSTDPITAFGDMLKTGDMSGVTATSYIRMMAHTTAVNVGVFFGLKGRIHTTSSACTSGSQGIGYAYEAIKYGQQTLMLAGGGEELCPTEAVVFDTLFATSTKNTTPELSPRPFDAQRDGLVIGEGACTLVLEELEHAKARGAKIYAEIVGFGTNSDGQHVTQPNSETMEIAIRLALKDAALTPDAIGYVNAHGTATDRGDIAESHATHAVFGADMPISSLKSYTGHTLGACGALEAWVSIEMMNAGWFAPTLNLDNIDPECAALDYIRGEPRALDTDYVMSNNFAFGGINTSLIFKRWKTT

SEQ ID NO: 2563 - protein, 332 aa, Ralstonia eutropha JMP134
MTIKIGINGFGRIGRMVFRAAAANFKDIEVVAINDLLEPDYLAYMLKYDSVHGRFDGEVSVDGNTLVVNGKKIRLTAVKDPAELKWGEVGADVVIESTGIFLTKEGAQKHIDAGAKKVIMSAPSKDDTPMFVYGVNHETYKGEAIISNASCTTNCLAPVAKVLNDKWGIKRGLMTTVHAATATQKTVDGPSNKDWRGGRGILENIIPSSTGAAKAVGVVIPQLNKKLTGMSFRVPTSDVSVVDLTVELEKSASYEEICAEMKAQSQGALKGVLGYTEDKVVATDFRGDARTSIFDAEAGIALDGTFIKVVSWYDNEWGYSNKCLEMARVVAK

SEQ ID NO: 2564 - protein, 416 aa, Neisseria meningitidis MC58
MLNTRRVAVTGIGGITAFGRDWQSIQAAFKAEKNAVKYMDWHERFPELEAQLGAPIENYAPPKHWTRKQLRSMGRVSYLCVDAAEQALADAGLLGDESITDGRMGVACGSSSGSTKDIGDVGELLLTGTSRNFSANTYVRMMPHTTAANIGIFFGLKGRIIPTSSACSSGSQGIGYAYEAIKYGLTDMMLAGGGEEFFPSEVYVFDSLYAASRRNGEPEKTPRPYDANRDGLVIGEGAGIFVLEELEHAKRRGAIIYAELVGYGANSDAYHISTPRPDAQGAILAFQTALQHANLAPEDIGWINLHGTGTHHNDNMESRAVAAVFGNNTPCTSTKPQTGHTLGAADAIEAAFAWGIADRQSNPEGKLPPRLWDGQNDPNLPAINLTGSGSRWETEKRITASSSFAFGGSNCVLIIG

SEQ ID NO: 2565 - protein, 377 aa, Corynebacterium efficiens
MNARTPDTKSDSYDALLVLSFGGPEGPEEVRPFLENVTRGRGIPPERLDEVGAHYYHFGGVSPLNRLNKEIIANVKAELAARGYDIPVYFGNRNWKPFDNEAAEQMAADGIRNALVFATSAWGGYSGCRQYHEDIQGMRAHLEEIGAPEVTFTKLRQFYDHPRFVRTMAQYVRESFDKLPEDLRDEARLVFTAHSIPLNSKDADGNPIDGSIYSRQVEESSALIAREAGIDDFDVVWQSRSGSPHVPWLEPDIVDHAVELNENNGQKALVVCPVGFISDHMEVIWDLDSELMDEATRRGMVIERVATVGPSDEFATMVVDLIDEMEMKRVIERLGTLPVRGSTVNGEPCVPGCCAPRRRPAASQTNPNADAPVASRS

SEQ ID NO: 2566 - protein, 412 aa, Rhodococcus aetherivorans
MTSDIVVIGGGVAGVSAVQSLRSEGYDGRLFLIGKERELPYDRTSLSKAVLAGDLADPPPLSPADWYDELQVETVLDRTVLQVDVTRKEVLLDGGRSLEVDRVLLATGASARVPSFSGADLPGVTTLRTVDDAQRLRQDWEPGQRLVVVGGGLIGCEVATTARKLGLEVSILEASDELLQRVLGRRIGGWCRARLEELGISVMVNTGVAEFDGVDRITAVIGTDGRRFPADSAIVCVGAEPETAIAEQAGLACSRGIIVNDSGGTAAEGVFAAGDAASWPLRTGGRRSLETYINSQKEATAVASAMLGKAVHAPQLPLSWTEIAGHRIQMIGDIEGSGEYVMRGAPDDGPALLFRLTDGKLTAALSVDAPREFAMATRLVESGAQVGRDVLADTSVELRELNRAARERTTAA

SEQ ID NO: 2567 - protein, 280 aa, Cryptococcus neoformans var. neoformans JEC21
MLLPLVRHVSKSLTKQRCFAAWGRTISTTPEPHAYLRPLLSTTADAKLPELDKVMTLMLNRPATKNALTVQMVSSSNPSLFCSGADLRERRTMSPMQVSNFLDNLRQLLAELEALPIPTVAVIDGYALGGGAELALGCDLRVGGDNTKIALPETKLGIIPGAGGTQRLTRIVGMAKSKELIFTGRHVQGPEAERIGLLNIYASSPSSPFEAALILARQILTSAPLALAAAKRAISSAPELSLEAGLDLERAVYNGLLDTDDRQEGLKAFAEKRRADFRGR

SEQ ID NO: 2568 - protein, 745 aa, Zea mays
MGKSSKKSSVKAAPAAVSVPEGKSAKKGKRNAEDEIEKAVSAKKQKTVPEKAVPVKKQPPPKKVESSSSEEDSSDSEVEVKVQPKKVIQPKKSTQPAKQESSDDSSSESSSDDEPSKKPVAGSKKPPASSSSSDDSSDSDDSSSDEEPAKKPTVLSKKPTVLSKKPTVLSKKPVTAVSNGSKQVKPDSSSSDSSSDEDEKPAASLKKPVVASVQKKTQESDSSDSDSDEDESEDDIPAKAQVVAKKKEESSSSSDSDSDSESEDEKPAANLKKPPVPSVQKKTQESDSSDSDSDEDESDDIPAKAQVVAKKKEESGSSSDSDSEFESDDEDSNAKTVQPAKAAAIKKKEDSSESSETDSQSDSEDSEPEKPTVPAKRPLATNKKNEQSSEKSDDSSDESSDESDEEPPQKKTKNSAPSGAAKAATNVSKKKSSSDEDDESSEESSDDEDTEQVETKETSVVTTQKPAHNEPKTPAKSQSQATGSKTIFVGNLAYSIEREQVKEFFEEAGEVVDVRLATFDDGSFKGFGHVEFATVEAAQKALEFVGHDLMGRPLRIDMATERGAYTPSSGKDNGSFKKFAPRSGNTVFIKGFDTSGGEDQIRTALEEHFGSCGDITRISIPKDYDTGVSKGMAYMDFKDPDSLNKAYELNGTDLGGYSLYVDEAKPRPDNSGGFSGDRGGGRGRSGGFSGGRGGRSDRGRGGSRGRGFGGRGGRGDRGRGGRGTPFRQTAGTASTGKKTTFGDDD

SEQ ID NO: 2569 - protein, 290 aa, Robiginitalea biformata HTCC2501
MSVLVNKDSKIIVQGFTGSEGTFHAEQMIDYGTNVVGGVTPGKGGQKHLGKPVFNTVQDAVSETGADTSIIFVPPAFAADAIMEAAHAGIKVIITITEGIPVADMIKAHSYVKDRGSRLIGPNCPGVITPGEAKVGIMPGFVFEKGGVGIVSKSGTLTYEAADQVVRQGLGITTAIGIGGDPIIGTTTREALELLVTDPETECVVMIGEIGGQLEAEAARWYKESGSKKPVVGFIAGETAPAGRTMGHAGAIVGGSDDTAQAKKRIMRECGIHVVDSPAKIGEKVSEVLA

SEQ ID NO: 2570 - protein, 481 aa, Rickettsia rickettsii
MRDNSQKISSLKQEKLMSFLRKKSFESVKEIGSSSGFSKTLGAFDLILLGLGAMIGTGVFVVTGIIAAKYSGPAVMLSYAIAGITCIFVALVYTELAAMLPTSGSIYTYSYVAFGEVFAWMIGSVIILELGFAAGIVAAGWSGYVQGILAAGGINLPKELTTVPTNGGIINLPAFLISGFIGFILYLGTKDSKRLNAILVFIKMTAIFVFILAAAPHFDATNWSNFMPFGFSNVLVGASILFLAFTGFGTIATAAEECKNPKRDIMIGIIGSLVLTTIVYVTMAGLVTGIAPFDQLNNDQPLAYALTINNSKIGSAIVATGAVCGMMTVLMMNIYGTSRIFYAIARDGLLPKSFAKLHPKYDSPYITIIIFASLAAILGGFCSTELLTQLTSMGALIDYITVTIIVVLFRVTLPDAQRPFRCPLVFIIVPFILIACAYLLFIQIYDGEFNLLTAGRVLIYWFITIFVLYIIRSFFMQKEQN

SEQ ID NO: 2571 - protein, 598 aa, Azoarcus sp. EbN1
MSDTVGDFLLQRLSAWGVQRVFGYPGDGINGIMGAFGRYGEGLRFVQARHEELAAFMACAHAKFTGEVGVCLATSGPGAIHLLNGLYDAKLDHQPVVAIVGQQSRGALGGDYQQEVDLLSLFKDVAHEFVHMVTVPEQVRHVVDRAMRIARDRRTVTCIIFPNDVQDLPYQAPPREHGTVHSGVGYTGIRIVPREEDLVRAAAPLNAGQKVAMLVGAGALDATDEIIEVAERLGAGVAKALLGKAAVPDDLPFVTGAIGLLGTKPSWDLMNDCDTLLMVGSGFPYSEFLPKEGQARGVQIDIEPRMLNLRYPMEVALLGDAKETLQGLLPHLVAKPDRAWRATIEHGVERWWRVLEGRALNTAHPINPQRVFWELSPRLPERCILTCDSGSAANWYARDLKMRRGMMASLSGGLATMGPAVPYAIAAKYAHPDRPIIALVGDGAMQMNGINGLVTIAKVWREWKDPRLVVMVLNNGDLNQVTWEQRAMEGDPKFVDAQAVPDFPYAEYARRLGLGGMRVDDPGEVGAAWDAALHAERPTLLEMVTDPDVPPLPPHISAKQAKAYLSALLHDDPDSLGIVVASFKESWDSLFPPGSIPG

SEQ ID NO: 2572 - protein, 128 aa, Archaeoglobus fulgidus
MKQQVEVRQLREGGYVVIDDEPCEILSISVSKPGKHGAAKARIDAIGIFDSQKRSIVQPVTAKIYVPIVERKRAQIISVTGNVAQLMDLETYETFELEVPEELKDKMEQGREVIYLESLGKRKIERMA

SEQ ID NO: 2573 - protein, 240 aa, Oryza sativa
MVSPDLIRNVVGIVGNVISFGLFLSPVPIFWRIIKNKNVQNFKADPILVVTINGISLVIEAVYLTIFFLFSDKKNKKKMGVVLATEALFMAAVAVGVLLGAHTHQRRSLIVGILCVIFGTIMYSSPLTIMVVKTKSVEYMPLLLSVVSFLNGLCWTLYALIRFDIFITIPNGLGVLFAIMQLILYAIYYRTTPKKQDKNLELPTVAPIAKDTSIVAPVSNDDDVNGSTASHATINITIEP

SEQ ID NO: 2574 - protein, 513 aa, Hordeum vulgare subsp. vulgare
MDGNNRGGGHSEVLKNYNLGKTLGLGTFGDVKVAEHKLTGQRVAIKILNRRKMETMEMEEKANREIKIMRLFIDFIHPHIIRVYEVIETPKDIFVVMEYCNNGELLDYIIENGRLQEDEARRIFQQILAGVEYCHRIMVVHRDLKPENLLLDSKYNVKLADFGLSNVMRDGHFLKTSCGSLNYAAPEIISSKLYAGPEVDVWSCGVVLYALLCGSVPFDDDNIPSLFRKIKGGTYILPSYLSDSARDLIPKLLNIDPMKRITIHEIRVHPWFKNHLPCYLAVPPPYKEQQAKMIDEDILREVVNLGYDKDHVCESLWNRLQNEETVAYYLLLDNRFRSTSGYLGADHQHLMDRSFNEFTLSESASPSTRNYLPGINDSQGGGLRPYYPVQRKWAIGLQSGAHPRDIMIEVLKALKELNVCWKKNGLYNMKCRWCPGFPQVSDMLLDSNHNFVDDSTIMDNGNADGRLPAVVKFEIQLYKTKDNKYLLDIQRVTGPQLLFLEFCGAFLTNLRVL

SEQ ID NO: 2575 - protein, 736 aa, Candida albicans SC5314
MTYSEKQPLLEYSKKIADDHEVSVRSFNFPIFENTLSLFNSINPFQNCLTPLTRKVSDISLNDTDDIDVDSDYNLSDDEDTPLPDLPYESDDFPILLPSSKLSQREKLYELRKIMKEYNIGTYIIPSEDEHQSEYTSLSDKRREYITGFTGSAGIAIVTLTNANTLTGEAILSTDGRYFLQAEKQLNPRLWKLFKQGATGYKPWHEWSVESASKNGFSKVISCDPRVVSLSIGEYFDKQAKFHKSFQFKPLLSVNLVDEIWGAEKPSRPLDPIYVLPLRYSGEHTNDKLTKIRQAMKEKNSTHYVVSELDSIAWLFNLRADKDIPFTPVFFAYALVTLDSIVLYVNNDKLPNDDAQLNEHLSSIENLTIKDYNEFFKDVSKLSELKDKESVVLPTRSATSYALYDTISKSVNKSSLYHESIIANLKIFKNKTELFNAKIAQYKDSLAFIIFSAWLDYQLVIKKKKISEYDAACKIYSIRQKLPNFKGLSYETISSTGANAAIIHYAPTKTEHSIIDPTKPYLIDSGAHYLEGTTDITRTYKFGYHGLTDRDKLYYTLVLKGHLSLAMAKFPPNSSSTGTILDAFARQPLWNKGLDFNHGTGHGVASFGPVHEGPLYISTTSGGPSKGLFQPGAILTDEPGYYVDGEVGFRIESELEVVECDGSLGKTRQGENFLGFNYLTKVPFCRKLIDTTQLSPIEIQWINEYHQSIRDDFGSKLLELNEKKVYSWLLNETEPI

SEQ ID NO: 2576 - protein, 498 aa, Bradyrhizobium sp. BTAi1
MPAVQETVDRVRRIDVDQYRYGFETVIESEKAPKGLSEDTIRYISGKKNEPAWMLEWRLEAYRRWLTMTEPTWARVDYPKIDFQDLYYYSAPKPKKQLSSIDEIDPEILKTYEKLGIPLREVAILEGVEPKPGAGSPETRKIAVDAVFDSVSVATTFKEELKKAGVIFMPISEAIREHPELVQKYLGSVVPTSDNFYATLNSAVFSDGSFVYVPPGVRCPMELSTYFRINERNTGQFERTLIIADKGAYVSYLEGCTAPQRDENQLHAAVVELVAHDDAEIKYSTVQNWYPGNSEGVGGIYNFVTKRGDCRGNNSKISWTQVETGSAITWKYPSCILRGDNSRGEFYSIAISNGYQQVDSGTKMIHLGKNTSSRIISKGIAAGRSQNTYRGLVTAHRKATGARNFTACDSLLIGDRCGAHTVPYIEAKNSSATFEHEATTSKISEDVLFYCIQRGLSQEEAVGLVVNGFVKDVLQQLPMEFAVEAQKLISISLEGSVG

SEQ ID NO: 2577 - protein, 523 aa, Rubrivivax gelatinosus PM1
MLDAALKTQLKSYLEKVEHPIDIVASVDEGDKSQELLALLNDIAELSARITLSVRRDDAERKPSFSLNRPGARIGLRFAGLPMGHEFTSLVLALLQVGGHPSKAAAEVIEQVRGLEGDYLFETFFSLSCQNCPDVVQALNLMAVLNPNIRHVAIDGALFQAEVEQRQVMAVPTIFLNGQVFGQGRMGLEEIVAKLDTGAVKREAAKLSAKAPYDVLIVGGGPAGAAAAIYAARKGIRTGLAAERFGGQVLDTLAIENFISVKETDGPKFAVALEEHVKAYDVDIMNLQRAEALIPGKPGELTEVRFAGGAALKASTVIIATGARWRDMNVPGEQVYRTKGVTYCPHCDGPLFKGKRVAVIGGGNSGVEAAIDLAGVVAHVTLLEFAAELRADAVLQRKLHSLPNVKVITQAQTTEVTGDGHKVNGLTYTDRASGEVHQLTLEGVFVQIGLLPNTDWLKGTVELSRHGEVIVDARGQTSVPGVFAAGDVTTVPYKQIVIALGEGSKAALSAFDHLIRSTAPALA

SEQ ID NO: 2578 - protein, 484 aa, Burkholderia sp. 383
MMAHPRHDHPAFRAEALRWCGTRATRERTLDVMDPYTGTRVGTAPLASVDDVRAAFDYAMAYRPKLTRYERSQILERAAALLRERTEEASDLITLESGLSKQDSRYEIGRVADVLKFAAIEALRDDAQSFSCDLTPHGKARRVFSQRQPLDGVIVAITPFNHPMNQVAHKIAPAIATNNRVIVKPSEKVPLSAFYLADLLYEAGLPEPMLQVLTGDPREIADELVTHPHASLITFTGGVAIGKAIAARAGYRRIVLELGGNDPLIVLDDADLDRATSLAVLGSYRNSGQRCTAVKRMLVQRSIAPAFTELLVEKTRAWKYGDPFDPANEMGTVIDEEAARLFEARVEEAVAQGARLLTGNVRRGALYAPTVLDNVDPSMTIVREETFGPVSPVITFDTIDDAIRISNGTAFGLSSGVCTDSTAAVVRFVNELNVGTVNVWEVPGYRIELSPFGGIKDSGLGYKEGVQEAMKSFTNLKTFSLPWE

SEQ ID NO: 2579 - protein, 131 aa, Sulfolobus solfataricus P2
MSITYTTVGELKVGSYVVIDGEPCRVVEVTKAKTGKHGSAKANVVAIGVFSGAKKTLMAPVDQQVEVPIIEKHIGQIIADMGNKIQVMDLESYETFEIEKPTEDELASKIKPNAELEYWEIMGRRKIVRVK

SEQ ID NO: 2580 - protein, 281 aa, Bartonella sp. BNfRs
RHTVFGVGGGGGNAVNNMINAGLQGVDFVVANTDAQALAMSKAERVIQLGAAVTEGLGAGALPEVGQAAAEECIDEIIDHLADSHMVFITAGMGGGTGTGAAPVVARAAREKGILTVGVVTKPFQFEGARRMKTAETGIEELQKSVDTLIVIPNQNLFRIANDKTTFADAFAMADQVLYSGVASITDLMIKEGLINLDFADVRSVMHEMGRAMMGTGEASGEGRALAAAEAAIANPLLDDTSMRGARGLLISITGGRDMTLFEVDEAANRIREEVDADANV

SEQ ID NO: 2581 - protein, 878 aa, Photorhabdus luminescens subsp. laumondii TTO1
MNQQYSAMRSNVSMLGKLLGDTIKEALGEDILDKVETIRKLSKSSRAGNEAHRQQLLSTLQNLSNNELLPVARAFNQFLNLTNVAEQYHSISPHGEAASNPVALAKLFTRLKEKNFNNGDLKKAVNELSIELVLTAHPTEIARRTLIHKLVAVNTCLSQLDHDDLADYERNNIMRRLRQLVAQSWHTDEIRKIRPTPIDEAKWGFAMVENSLWEGVPAFLREFNEQLEESIDYSLPVEAVPVRFTSWMGGDRDGNPNVTAEVTRHVLLLSRWKAADLFLKDIQVLVSELSMSECTPEVRKLAGGDEILEPYREIAKKLRTQLSNTLTYLEKQLKGEQVLPPTDLLVDNEQLWQPLYACYQSLKTCGMEIIANGQLLDILRRIRCFGLSLVRIDVRQESTRHTTAISELTQYLELGDYASWSEEEKQAFLLYELHSKRPLIPHNWQPSAETQEVFATCKVIAESPQDAIAAYVISMAKAPSDVLAVHLLLKEAGCPFTLPVAPLFETLDDLNNAENIIQQLMNIQWYRELIHDKQMVMIGYSDSAKDAGVMAAAWAQYRAQDALINVCEKEGITLTLFHGRGGTIGRGGAPAHAALLSQPPGSLKGGLRVTEQGEMIRFKFGLPQVTISSLALYASAILEANLLPPPEPKPEWHQVMDTLSDVSCKMYRDYVREQPDFVPYFRAATPEQELAKLPLGSRPAKRHPAGGVESLRAIPWIFAWTQNRLMLPAWLGAGAALQQVVNDGKQDVLAEMCRDWPFFTTRIGMLEMVFAKADLWLAEYYDHRLVDKNLWPLGQKLRKQLSADIKTVLAISKDEHLMADLPWIAESIALRNVYTDPLNVLQVELLLRSRQQQYSDPQVEQALMVTIAGIAAGMRNTG

SEQ ID NO: 2582 - protein, 605 aa, Legionella pneumophila str. Lens
MFGFISDLLTAAVSSLDELLQDTPAHQIILGTAALYFLYNQYHNPSISRWYLSRNNASMKQRIIDSAYALAKNLPGVNQIIEKELNKELSSTREKLRIQRSGMTLREEIPEEGLSPQDILSAFDVDVEKCHFDFLSVNNDSPEREFLVGGGDGKDSGALYAIHPKELTELLKEVYGATALTNPLHDKWPRINAMQAEVIRWCQNLFHGSKEGYGLLTHGGTTSIIEAMAAYVIRARAKGIDYPEIVVPETAHAAFKKAAELTGAILITVPVDKKTGAVNPRVMSSYITRNTAVIVGSAPSFMNGIHDPVSELGQLAKKKNVPFHVDACLGGFLTAFLDTSSEPMDFRVPGVTSISADLHKYGCCPKGTSVCLFSEDSPALSVYAALNWSGGLYATPGILDGSTSGARVAEVYATLSYYGKNKYQEIAKSIIKLRNAIQKELTALVEEGNGLTSEDIYVYGNPQWSILGFRSNTCNAHFIADELEKRGWKLNLLQNPDGFHLCLTHVHTLVRGFETQFIKDLREAVIDVKNYPPGKKASGNVKVYGAVGMMPIELQKEICKQYQKARLDFTAASHGSLGIFTTSPTEEDDGLRNRKVGEQKVQTSL

SEQ ID NO: 2583 - protein, 403 aa, Caulobacter crescentus CB15
MRRVVVTGLGIVSSIGNNAHEVLASLREAKSGVIAAPEYAELGFRCQVHAAPQIDWEAMVDRRAARFLAPGTAYAHIAMEQAIADSGLSETELSHERTGLIVGSGGPSTRVIIDAAAITREKGPKRIGPFAVPKAMSSGPSAVLSTWFKIRGINYSISSACATSAHCIGAAAEQIQMGKQDVVFAGGCEELDWSLSNLFDAMGAMSSNFNDRPAVASRAYDKNRDGFVIAGGAGIVVLEEYERAKARGAKIYGEVVGYAANSDGYDMVAPSGEGAARCMRLAMAEAGNRAIDYLNPHGTSTPVGDSKEMGAVREVFGDKAPMISSTKSLTGHSLGAAGAQEAIYSILMLNNDFAAESANIEELDPEFADLPILRQRVDKPLETVMSNSFGFGGTNGTLIFSRV

SEQ ID NO: 2584 - protein, 210 aa, Aspergillus nidulans FGSC A4
MIFRQKVNTGLPAGWEVRHSNSKNLPYYFNPATRESRWEPPADTDMETLKMYMATYHSGAATYHEAPSQEGKIRCSHLLVKHRDSRRPSSWREAEITRTKEEAREILRGHQERIMRGEIRLGDLAMSESDCSSARKKGDLGFFGRGEMQKEFEEAAFALQPGQVSDIVESGSGLHLIERYVSFSMPWVALIMLFFTGYNRYCWALLFWYI

SEQ ID NO: 2585 - protein, 668 aa, Mesorhizobium sp. BNC1
MATKEKEEVEIERDGTDGPLLDLSDDAVKKMIKLAKKRGYVTMDELNAVLPSGEVSSEQIEDTMAMLSDMGINVVEDEEAGEEAEADSAPEEESGELAETGSAVATVAKKEPTDRTDDPVRMYLREMGSVELLSREGEIAIAKRIEAGRETMIAGLCESPLTFQALIIWREELNDGKILLREIIDLEATYAGPEGKQAPVIARPEDVARPAPEEKLMRRARDDDDITNVGGESRPEEDDEEEDETNLSLAAMEAELKPGFMTTLDFIADTYSKLRKLQDQEVESRLGDSDKLSAGQERRSKELKDELIKAVKSLSLNNQRIETLVEQLYDINKRLVQNELKLFRLAESYGVRREDFLKAYQGSELDPNWGSTVAVLPQPGWRDFVKHEADTIEALRSEIQNLAQETGISIGEFRRIVNQVQKGEREAAIAKKEMVEANLRLVISIAKKYTNRGLQFLDLIQEGNIGLMKAVDKFEYRRGYKFSTYATWWIRQAITRSIADQARTIRIPVHMIETINKIVRTSRQMLHEIGREPTPEELAEKLAMPLEKVRKVLKIAKEPISLETPVGDEEDSHLGDFIEDKSAILPIDAAIQANLRETTTRVLASLTPREERVLRMRFGIGMNTDHTLEEVGQQFSVTRERIRQIEAKALRKLKHPSRSRKLRSFLDS

SEQ ID NO: 2586 - protein, 676 aa, Legionella pneumophila str. Lens
MRSQTIRLTQKDFPIFGKAFSLVNISFLVINENMELEYINDTAKKKLKINWSSTDRKSFFQLWELANLTPILTKKGDLIPNKVLQVGSYSIQWQKTVAIVNEKHYILLMDKDVATTSHLFEEIGAAIYGEIGYAPKNKISVKEYIQELTNYYTSVIDKIPCYVYWKNTSFEYMGCNEMAAQFFGFKSTSDIIGKNDFDLFQDPDFAKNYQEQDKQVFSTGEPILKMPSDLKDRNGMVTNTLVSKVPITNLSGSIVGLVGITVDVTELTKAKEAAEAANQAKTAFIANMSHDIRTPLTGVIGMSELLENTVKDPEQKEEAHMLHDSGEELLNMLNDILDDVHAGFMDKEDIRIETFDLYQCIEDLVKLERPTTVMKHLELIVHIGKSVPRYIQSDRKKIHRVLLNLLGNAIKFTPKGQITIQVACLEVSGKNIHLQFKVSDTGIGIPTSLQEKVFERFFRISPSYKGIYKGHGLGLHIAQSYVNLLGGHIALISEEGKGTTFYFDIPCQTGTQKKIKTNKLTNSSKKIDSSLPTSSNSQLTPKLSSKTEENSPYVLLVEDNNIALKVLELILSNEGYRFKSASNGEEALALIQTESFDLVITDLGLPGISGCELSVKIREWEKKHSKKPLPVIGLTGHTKDSSEKGCLASGMNNVFTKPVTPELIRNIINKYLLGEK

SEQ ID NO: 2587 - protein, 477 aa, Streptococcus thermophilus CNRZ1066
MAKQYKNYVNGEWKTSENSITIYAPANGEELGSVPAMSQAEVDEVYAAAKAALPAWRALSYAERAAYLHKAADILERDAEKIGQVLSKEISKGLKSAIGEVVRTAEIIHYAAEEGLRLEGEVLEGGAFDAGSKKKIAVVRREPVGLVLAISPFNYPVNLAGSKIAPALIAGDVVAFKPPTQGSISGLLLVEAFVEAGIPAGVLNSITGRGSVIGDYIVEHKAVDFINFTGSTPVGENIGRLAAMRPVMLELGGKDAAIVLEDADLDLTAKNIVAGAFDYSGQRCTAIKRVLVMDSVADELVEKVTALVGNITVGMPEESASVTPLIDTKAADFVQGLIDDAVEQGATAKTELKREGNLIYPAVFDHVTTDMRLAWEEPFGPVLPFIRVSSVEEAIKISNESEFGLQGAVFTQDYPRAFAIAEQLEVGTVHINNKTQRGTDNFPFLGVKGSGAGTQGVKYSIEAMTRVKSTVFDISDY

SEQ ID NO: 2588 - protein, 420 aa, Oryza sativa (japonica cultivar-group)
MAVEYHCCGAAFFEHVVIIVVLVLFAGLMSGLTLGLMSLSLVDLEVLAKSGTDQDRKHAAKILPVVKNQHLLLCTLLICNAAAMEALPIFLDSLVTAWGAILISVTLILLFGEILPQSICSRYGLAIGASVAPLVRVLVWVCFPVAYPISKLLDHLLGKGHTALFRRAELKTLVTLHGNEAGKGGELTHDETTIIAGALELTEKKAKDAMTPLCQTFAIDINAKLDRDLMQKVLDKGHSRVPVYYEKKTNIIGLILVKNLLSINPDDEIPIKSVTIRKIPRVSEDMPLYDILNEFQKGHSHMAVVIRQTNANYAAEPPANDGGTLEVAISIDDKHGEKVVKNLPPLRRWKSCPNSQNSNRGNRNRKWSKDQSDVLQIHEEPLPTLNEDEEAVGIITMEDVIEELLQEEIYDETDVHVEEQ

SEQ ID NO: 2589 - protein, 293 aa, Synechococcus sp. CC9605
MALRLDGKVLARDVEHRLQTLIERCLAEAGRPPGLAVLRVGDDPASAVYVANKEKACARIGVASFGDHLPGDTPPALVLQTIERLNANPEVDGILLQLPLPAGLDEGPLLMAIDPEKDADGLHTLNLGRLLKGEPGPRSCTPAGVMAMLRSNGIDPAGKRAVVIGRSILVGQPMALMLQAANATVTIAHSRTADLAAHTREADILVVAAGRPEFIGAEHVRPGAAVVDVGIHRKPEGGLCGDVRAAEVESIAAALSPVPGGVGPMTVTMLLVNTVVAWCRRHNLDHDLDDLVP

SEQ ID NO: 2590 - protein, 444 aa, Neisseria meningitidis MC58
MTDLNTLFANLKQRNPNQEPFHQAVEEVFMSLDPFLAKNPKYTQQSLLERIVEPERVVMFRVTWQDDKGQVQVNRGYRVQMSSAIGPYKGGLRFHPTVDLGVLKFLAFEQVFKNALTTLPMGGGKGGSDFDPKGKSDAEVMRFCQAFMTELYRHIGADTDVPAGDIGVGGREIGYLFGQYKKIRNEFSSVLTGKGLEWGGSLIRPEATGYGCVYFAQAMLQTRNDSFEGKRVLISGSGNVAQYAAEKAIQLGAKVLTVSDSNGFVLFPDSGMTEAQLAALIELKEVRRERVATYAKEQGLQYFEKQKPWGVAAEIALPCATQNELDEEAAKTLLANGCYVVAEGANMPSTLGAVEQFIKAGILYAPGKASNAGGVATSGLEMSQNAIRLSWTREEVDQRLFGIMQSIHESCLKYGKVGDTVNYVNGANIAGFVKVADAMLAQGF

SEQ ID NO: 2591 - protein, 95 aa, Glycine max
  misc_feature (43)..(43): Xaa can be any naturally occurring amino acid
  misc_feature (92)..(92): Xaa can be any naturally occurring amino acid
MADLLEWSKQDKKRMLHVVYRVGDLDRTIKFYTECLGMKLLRXRDIPEEKYANAFLGFGPEESHFGVELTYNYGVTSYDICDGFGHFAIATXDIY

SEQ ID NO: 2592 - protein, 570 aa, Oryza sativa
  misc_feature (29)..(29): Xaa can be any naturally occurring amino acid
  misc_feature (95)..(95): Xaa can be any naturally occurring amino acid
  misc_feature (373)..(373): Xaa can be any naturally occurring amino acid
IRHEARIARARLPRRRRPWRSSCRHSPKXRRAHAILGCERGTVVRHFSSSTCSSLVKEDTVSSSNLHPEYAKKIGGSDFSHDRQSGKELQNFKGXSRKEASRASNFMRASKYGMPITANGVHSLFSCGQVVPSRCFSSGADLPPHQEIGMPSLSPTMTEGNIARWVKKEGDKVSPGEVLCEVETDKATVEMECMEEGYLAKIIHGDGAKEIKVGEIIAVTVEEEEDIGKFKDYKAPSSAESAAPAESKPQSEPTEPKKEKEQPKAPEPKATKTEESFLSEDRTFSSPIARKLAEDNNVPLSSIKGTGPDGRILKADIEDYLASVAKGAKKETAAAPGLGYVDLPNTQIRKVTANRLLHSKQTIPHYYLTVDTXRVDKLIKLRSELNPLQDTSGGKKISINDLVIKAAALALRNVPECNSSWMNDFIRQYHNVNINVAVQTEDGLFVPVIRDADKKGLATIADEVKQLAQRARDNSLKPEDYEGGTFTVSNLGGPFGIKQFCAIVNPPQSAILAIGSAEKRVIPGAEGQFEVGSFMSATLSCDHRVIDGAIGAEWMKAFKGYIENPTTMLL

SEQ ID NO: 2593 - protein, 567 aa, Triticum aestivum
MASPALISDTDQWKALQAHVGAIHKTHLRDLMTDADRCKAMTAEFEGVFLDYSRQQATTETVDKLFKLAEAAKLKEKIDKMFKGEKINTTENRSVLHVALRAPRDAVINSDGVNVVPEVWAVKDKIKQFSETFRSGSWVGATGKPLTNVVSVGIGGSFLGPLFVHTALQTDPEAAESAKGRQLRFLANVDPVDVARSIKDLDPATTLVVVVSKTFTTAETMLNARTIKEWIVSSLGPQAVSKHMIAVSTNLKLVKEFGIDPNNAFAFWDWVGGRYSVCSAVGVLPLSLQYGFPIVQKFLEGASSIDNHFHTSSFEKNIPVLLGLLSVWNVSFLGYPARAILPYSQALEKLAPHIQQLSMESNGKGVSIDGVRLPYEAGEIDFGEPGTNGQHSFYQLIHQGRVIPCDFIGVIKSQQPVYLKGETVSNHDELMSNFFAQPDALAYGKTPEQLRSEKVPENLISHKTFQGNRPSLSFLLSSLSAYEIGQLLSIYEHRIAVQGFIWGINSFDQWGVELGKSLASTVRKQLHASRMEGKPVEGFNPSSASLLTRFLAVKPSTPYDTTVLPKV

SEQ ID NO: 2594 - protein, 154 aa, Oryza sativa
MASPTTMVGVATSAHLHTTTTGRLSCACAPPTRGTRRRRLAVAVRVRVRVRASASEAMATEKLGVRVERNPPESRLSELGVREWPKWGCEKSKFPWTYSAKETCYLLQGKVKVFPDGAGEDFVEIAAGDLVVFPKGMSCTWDVAEAVDKHYKFE

SEQ ID NO: 2595 - protein, 1124 aa, Arabidopsis thaliana
MNSPASDETAPRRNRRKVSRKNYDENAMDELIEKQLGGKAKKKYRTKQDLEKETETEALIALSVGFPIDELLEEEIRAGVVRELGGKEQNDYIVVRNHIVARWRGNVGIWLLKDQIRETVSSDFEHLISAAYDFLLFNGYINFGVSPLFAPYIPEEGTEGSVIVVGAGLAGLAAARQLLSFGFKVLVLEGRSRPGGRVYTQKMGGKDRFAAVELGGSVITGLHANPLGVLARQLSIPLHKVRDNCPLYNSEGVLVDKVADSNVEFGFNKLLDKVTEVREMMEGAAKKISLGEVLETLRVLYGVAKDSEERKLFDWHLANLEYANAGCLSNLSAAYWDQDDPYEMGGDHCFLAGGNWRLINALAEGLPIIYGKSVDTIKYGDGGVEVISGSQIFQADMILCTVPLGVLKKRSIKFEPELPRRKQAAIDRLGFGLLNKVAMLFPSVFWGDELDTFGCLNESSINRGEFFLFYAYHTVSGGPALVALVAGEAAQRFECTEPSVLLHRVLKKLRGIYGPKGVVVPDPIQTVCTRWGSDPLSYGSYSHVRVGSSGVDYDILAESVSNRLFFAGEATTRQHPATMHGAYLSGLREASKILHVANYLRSNLKKPVQRYSGVNINVLEDMFKRPDIAIGKLSFVFNPLTDDPKSFGLVRVCFDNFEEDPTNRLQLYTILSREQANKIKELDENSNESKLSCLMNTLGLKLMGANSVLDTGEQPFLRTSTPKLLKLERMTTMGDLPGDLVEEILSRVPLTSLRAIRSTCQKWNSLSKSQICGRKATAAENKFLGFMMKDSRVCSMKFDLQGIRNDDGELVEPSIKQVSKLDQIEVSQVFHCDGLVLCIIKDNTGLLVWNPYLGQTRWIHPRNNYQIEDRYALGYDNNRNHKILRIFDLYPSSNRVFGYEVYDFSSNSWKVLDVIPEWDIQSHFRGASLKGNAYFPAQKKETVGGIKTINIEDVLLCFDFTRERFGPPLPLPFHSYNADFFVSLACVREEQLAVLYQRWGAFETIEICVTNKIDPNTVSWSKFLITSTGFPVDTFSGSFFIDEEKKVAVVFDLDRYKPTETCRYQIVYIIGQDEYFKSVNMGVAPNIAKNSYQAYCVPLVCSSSYVPSLVQLQINKPGKRKESN

SEQ ID NO: 2596 - protein, 527 aa, Oryza sativa
MTFSGMDIALKASTHSSTSQQHWLHSTRYRCQYGLGSTHLNGRKRSPMVLSVRAVSGKSDLDFSDPSWKEKYQEDWNRRFSLPHITDIYDLKPRLTTFSLKKNRTDGGSLSADKWNGYVNKDDRALLKVIKYASPTSAGAECVDPDCSWVEHWIHRAGPRKEIYYEPAEVKAAIVTCGGLCPGLNDVIRQIVFTLEIYGVKNIVGIQFGYRGFFEKGLKEMPLSRKVVENINLSGGSFLGVSRGGAKTSEIVDSIQARRIDMLFVIGGNGSHAGANAIHEECRKRKLKVSVVAVPKTIDNDILFMDKTFGFDTAVEEAQRAINSAYIEARSAYHGIGLVKLMGRSSGFIAMQASLSSGQIDVCLIPEVSFTLDGEHGVMRHLEHLLEKKGFCVVCVAEGAGQDLLQKSNATDASGNVILSDFGVHMQQKIKSHFKDIGVPADVKYIDPTYMVRACRANASDAILCTVLGQNAVHGAFAGFSGITSGICNTHYAFLPITEVITKPKRVNPNSRMWHRCLTSTGQPDFH

SEQ ID NO: 2597 - protein, 265 aa, Arabidopsis thaliana
MAQTFLLTSGVTAGHFLRNKSPLAQPKVHHLFLSGNSPVALPSRRQSFVPLALFKPKTKAAPKKVEKPKSKVEDGIFGTSGGIGFTKANELFVGRVAMIGFAASLLGEALTGKGILAQLNLETGIPIYEAEPLLLFFILFTLLGAIGALGDRGKFVDDPPTGLEKAVIPPGKNVRSALGLKEQGPLFGFTKANELFVGRLAQLGIAFSLIGEIITGKGALAQLNIETGIPIQDIEPLVLLNVAFFFFAAINPGNGKFITDDGEES

SEQ ID NO: 2598 - protein, 183 aa, Zea mays
MGAAESVPETSIHEFTVKDCNGKEVSLETYKGKVLLVVNVASKCGFTETNYTQLTELYQKYRDKDFEILAFPCNQFLRQEPGTDQQIQDFACTRFKAEYPVFQKVRVNGPDAAPVYKFLKASKPGLFGSSRIKWNFTKFLVGKDGKVIERYGTSTAPMAIEVSFPLCLCLSLPLSRRLPTFSF

SEQ ID NO: 2599 - protein, 392 aa, Zea mays
  misc_feature (142)..(142): Xaa can be any naturally occurring amino acid
MSSWEEDARQFLLDQEEDDDELFLVIVPVVLAAMQEEKRAVHTSSLTGAMKIKEVLEGHEIWSKVEFRMEQDIFRAIVAFLRAEDLLRDTRGVTVEEQFGMFMYMISHNGTNQDMQKWFQHSGETIHRKINEVFDIIPALTXRFVKLPSSVQTHIKIATDSRFMPFFQNCISAIDGTLIPITISEDKAAPYRNRKGSLSHNVMVACDFNLNFTFISCGWEGSASDAGVLRSALGRGFHVPEGKFYLVDGGYANTTSFIAPYRGVRYHLIEFRSRRSYANYKELFNHRHAILRNHIERDIGVLKKMFPILKVGTFYPIQSQVKIPAVAAVFHNVIKQHNGQEGWLDHLPGNIEPSQYVDVPEGEVNYPTGSESVDGNILRDDIAMQMWVAHNV

SEQ ID NO: 2600 - protein, 147 aa, Pisum sativum
MGFTDKQEALVNSSWESFKQNLSGNSILFYTIILEKAPAAKGLFSFLKDTAGVEDSPKLQAHAEQVFGLVRDSAAQLRTKGEVVLGNATLGAIHVQRGVTDPHFVVVKEALLQTIKKASGNNWSEELNTAWEVAYDGLATAIKKAMT

SEQ ID NO: 2601 - protein, 400 aa, Rubrobacter xylanophilus DSM 9941
MPFSPVEEIIEEIRAGRMVIVCDDEDRENEGDLTVAAELVTPEHINFMAKYGRGLICLPMAQELIERLEIPEMVRHNSSRMGTAFTVSIEAREGISTGISAADRAHTCRVAVSDEAGPEDIVMPGHVFPLKARKGGVLQRPGQTEAAVDLARLAGLKPAGVICEVMKDDGTMARVPDLERFSAEHGIKMVTVAQIIEYRRAYETQVRCAAQTRLPTPFGEFRLRAYENDVDELTHLALIMGEPEGKEDVLVRIHSACLTGDALHSLRCDCGEQLRASMERVAAEGEGVIVYMQQEGRGIGLLNKMKAYHLQDEGLDTVEANQKLGLAPDLRDYGIAAQILKDLGLERIRLLTNNLTKVVGLQGFGLTIGERIQIEVPPNGHNERYLRTKREKLNHLLREV

SEQ ID NO: 2602 - protein, 342 aa, Aspergillus oryzae
MTITHSKTILVTGASGFLATHIVKAFLQQGYYVRGTVRSDQAAANVRKGFSQYSDRLSFAVVEDISQPGAFNEAVEGVDGIIHTASPFQTSVRDNKRDLLWPAINGTTSILQAAQEYAPRVSRVVITSSMAAVIDVGKGPQPGYPYTEEDWNPMTFEQAENAHGIVAYAASKALAEKAAWRYMETNTPDFSLTTICPPMIYGPVEHHVSTMERLNTSAGDIYRLFNGSSIEIPSAILPVFADVRDVAQAHLSAFESEKGAGERFIVSSGGYTYQEVCDILRSVVPEVRDKVPIGQPGKHESAVIKVSNNKVKTLLGITVHTLQETVKDTAYSLLALEKAFKA

SEQ ID NO: 2603 - protein, 225 aa, Rubrobacter xylanophilus DSM 9941
MAFFGKLGDRVVGAPSILSADFAHLADEVERARRGGAELVHFDVMDNHFVPNLTVGPAVAASLVEATELPVDAHLQVENPDSLIPAFIEAGVASISVQVEAATHLHRTLKLIKSGGCEAGVALNPTTPPELLGWALPYLDYVLVMSVNPGFGGQRFIPEMVQKVRRIREMAPVPVEVDGGITAETAPLMVKAGAQVLVAGSAVYRGDPAAEMRRIIEAGRAARGR

SEQ ID NO: 2604 - protein, 459 aa, Streptomyces coelicolor A3(2)
MTSRSATATARTSSEARAVARTQTLIKGEHGIGTVRRTTLPGGLRIVTETLPSVRSATFGIWAHVGSRDETPALNGATHYLEHLLFKGTRKRSALDISSAIDAVGGEMNAFTAKEYTCYYARVLDTDLPLAIDVVCDMLTGSLIQEEDVDVERGAILEEIAMTEDDPGDCVHDLFAHTMFGDNALGRPVLGTVDTVNALTADRIRRFYRKHYDPTHLVVAAAGNVDHNKVVRQVRAAFEKSGALKDPAAQPLAPRAGRRTVRAAGRVELIGRKTEQAHVILGMPGLARTDERRWAMGVLNTALGGGMSSRLFQEVREKRGLAYSVYSYTSGFADCGLFGVYAGCRPSQVHDVLKICRDELDHVAEHGLTDDEIGRAVGQLQGSTVLGLEDTGALMNRIGKSELCWGEQMSVDDMLARIASVTPDDVRAVARDVLGRRPSLSVIGPLKDKQASRLHDAVA

SEQ ID NO: 2605 - protein, 379 aa, Lepocinclis salina
IGHVDHGKTTLTAAITTALATFGKVKAKKYEEIDSAPEEKARGITINTAHVEYETVNRHYAHVDCPGHADYVKNMITGAAQMDGAILVVSGADGPMPQTKEHILLAKQVGVPSMVVFLNKEDQVDDKELLELVELEIRETLNSYEYPGDNIPIVVGSALLCLEALTKNPNLKKGENIWVDKVLNLMEKIDMYIPTPKREIEKDFLMAVEDVFSITGRGTVATGRIERGKIKVGETVELVGLKPTKTTIVTGLEMFQKSLEEALAGDNIGILLRGIQKNDIERGIVVAKPNSISPHIKFDSQVYILTKEEGGRHTPFFEGYRPQIYVRTTDVTGKMESFITNEGKKTMIVIPGDKIKIRVELIQPIAIEKGMRFAIREGG

SEQ ID NO: 2606 - protein, 359 aa, Bradyrhizobium japonicum USDA 110
MKDTYTIAVVHGDGIGPEVARAAVAVLQAGVQAGTLRFVDYPAGADHFLKTGDSFPAASFEGCRTADAILHGAAGIPGVVHPDGTEAGLDFTLTLRFKLDLFANVRPIKLYKGVPSPLGRPGPIDYVIVRENSEGLYAARGAGALLREEVAVDTLVQTRKGVERIVRFAFELARTRNGSPKDGRRRVTCCDKANVLRTYAFFRAVFDEVAKEYPDIEAEHVLVDAMTVHLVNKPTHFDVIVTENMFGDIISDLGAATVGGMGMAPSEEVGDGIGFFQASHGSAPDIAGKGLANPYGTILASILMLRRLDQRHRDSRLKLGADRIEAAVCAGLEDPALRTRDIGGVAPTNQVVDALLKRL

SEQ ID NO: 2607 - protein, 461 aa, Sulfolobus solfataricus P2
MIKVGILDSTLREGEQTPGVIFTVDQRVEIAKALSDLGVSMIEAGHPAVSPDIYEGIKRIVKLKKEGIITSEIVGHSRAVKRDIEIAAELEVDRIAIFYGVSDIHLKAKHKATREEALRVIAETISYARSHGVKVRFTAEDGSRTDFDFLVTVSRTARDAGADRVSIADTVGILYPSKTKELFSALIREVPNLEYDIHAHNDLGLAVANALAAVEGGATIVHATVNGLGERVGIVPLQQIVAAIKYHFGIEVVKLDKLQYVSSLIEKYSGIPMPPNYPITGDYAFLHKAGVHVAGVLSDPRTYEFMPPETFGRTRDYTIDKYTGKHALRDKYEKLGVKISEAEMDQILAKIKSNTTIRFYRDVDLLELAEEVTGRVLKPRPPEQIEALISVKCDSNVYTTSVTRRLSVINGVKEVMEISGDYDILVKVQAKDSNELNQIIESIRATKGVRSTLTSLVLKKM

SEQ ID NO: 2608 - protein, 605 aa, Oryza sativa
MRRLLAASGRCAPATRTHHGLFARAIQILAPPDPVSLHKLSAPDCAPPSPDAAWVPIPRFALYLLGSRPGGIGDSAWRRRGPGTVERYKEVEIVELRLERPEVKNAINWEAMRLLRGVVEKVEADDTVKVVLVTSSVPGVFCAGADLKALSIPTIAVIEGAALGGGLELALSCDLRICGENATLGLPETGLAIIPGAGGTQRLPRIVGRSRAKEMIFTGRRCNATEAVMMGLANYCVPAGEAHEKALELAREIAQKGPLGIRMAKKAIDQGMQAADMPSALAVEGECYEQLLHTEDRLEGLAAFAERRKPMAADGAVEAPSATSAWRAAGMRILRGILAVSGHLAGRRAPANNVHLALFSRALQILAQQEPVRLQKLSAPDSGIVEMRLERPEARNAIGREMLQGLRSAIEKVKADATANVVLLASSVPKVFCAGADLKALSIPTIAIVEGAAFGGGLELALSCDLRICGENATFSLPETGLAIIPGAGGTQRLPRIVGKSRAKELIFTGRRFDAVEAVTMGVVNYCVPAGEAYKRALELAQEINQKGPLAIRMAKKAINQGMEVDLSAGLAVEEECYEQVLHTQDRLEGLAAFAEKRKPVYTGK

SEQ ID NO: 2609 - protein, 493 aa, Bradyrhizobium japonicum USDA 110
MTKAEIRFPLDGRARKMFVDGAWVEARSGKVFETRNPATGEVIGRVPRGEAADISVAVAAARRAFVGPWSRFKPFERQALLLRIADLFEKHWEEISQSDTADMGMPIARTRANKLRVIGMLRYYAGMATALHGQTVDNSLPGDIVSFTRKEPIGVVGAIIPWNAPTAASVWKIGPALATGCTIVLKPSEEAPLTPLLIADLMNEAGVPPGVVNVVTGTGVEAGAPLAEHPDVDKIVFTGSTATGQAIIRASAGNLKRVSLELGGKSPVIVCADADLDKAVPIAAMAAFANSGQICIAGSRLFVERKIHDELVERLGKFASALKIGDGADPTTEIGPLVSQRQLDKVEGFLQSGREEGAKVVAGGRRVREGNLAKGNFVEPTVFAGVSDDMQIARDEIFGPVISALPFDTLDEAVERANATPYGLAAGVFTRDVSKAHVISRSLRAGSVWVNTYHALDPAMPFGGYKMSGYGREGGTEHLDEYLHTKGVWIKLD

SEQ ID NO: 2610 - protein, 352 aa, Sulfolobus solfataricus P2
MNRLRKLKAILEDKKDSCAIIFGSPNLFYFLEYSGAGALIYCDSRFTLLVPALEMYRAENVKDVDIAIYYPSKILENVIEGNIFRAIEKIVNKSNIMLDVSWVEASTYKALSEKYKVIDFSNEIVRLREVKDNDEIERIRKAGEITAVAMKIGMEKLSEGTSNEKQVAGIIDMTMRSMGAEDYAFPSIVAFGENSAYPHHIPTDRVLGNNDIVLFDIGAKYNGYCFDSTRTFVFKNSEAKKVYEVVLEAQMEAIDAVRDGVMASEVDITARRVIEKAGYGKYFIHSTGHGVGVEIHESPAVSMNSKQILKENMIITVEPGIYLKGRFGIRIEDTLIVTKGKPIVLETAYKLL

SEQ ID NO: 2611 - protein, 518 aa, Triticum aestivum
MGNRTSRHRRAAADQPATAPPPTAQPKPQPPPKPQTAPAPAPTPEAGQVAMGRVLGRPMEDVRATYTFGRELGRGQFGVTYLVTHKATGQRFACKSIATRKLVHRDDIEDVQREVQIMHHLTGHRNIVELRGAYEDRHSVNLIMELCEGGELFDRIIARGHYSERAAALLCREMVSVVHSCHSMGVFHRDLKPENFLFLNNKEDSPLKATDFGLSVFFKHGEQFKDLVGSAYYVAPEVLKRHYGAEADIWSAGIILYILLSGVPPFWADNEDGIFEAVLLGHIDFSSDPWPSISNGAKDLVKKMLRQDPKERLTAAEILNHPWIREDGEAPDKPLDITVISRMKQFRAMNKLKKVALKIVAENLSEEEITGLKEMFRSLDTDNSGTITLEELRSGLPKLGTKISESEITQLMEAADVDGNGTIDYSEFVSATMHMNRLEKEDHILKAFEYFDKDHSGYITVDELEEALKKYDMGDDKTIKDIIAEVDTDHDGRINYQEFVAMMRNNSPEIVPNRRRMF

SEQ ID NO: 2612 - protein, 140 aa, Zea mays
STYKGKVLLIVYVASQCGLTDSNYTELSHLYEKHKGQGFEILAFPCNQFGAQEPGTNDEIVEFACTRFKAEYPIFDKVDVNGDTAAPIYKFLKSSKGSLFGDGIKWNFAKFLVDKEGHVVHRYAPTTSPLSIEKDIKKLL

SEQ ID NO: 2613 - protein, 469 aa, Triticum aestivum
  misc_feature (295)..(295): Xaa can be any naturally occurring amino acid
  misc_feature (359)..(359): Xaa can be any naturally occurring amino acid
  misc_feature (378)..(378): Xaa can be any naturally occurring amino acid
  misc_feature (387)..(387): Xaa can be any naturally occurring amino acid
  misc_feature (404)..(404): Xaa can be any naturally occurring amino acid
  misc_feature (410)..(410): Xaa can be any naturally occurring amino acid
  misc_feature (413)..(413): Xaa can be any naturally occurring amino acid
  misc_feature (419)..(419): Xaa can be any naturally occurring amino acid
MASPRFKPVEECSSEGRSAQTVAADFDGTLLRSSNAFPYYLLVALEAGSVLRAVALLLSVPFVYVTYIFFSESLAISTLVYISVAGLKVRSIEMAARSVLPKFYAQDVHPESWRVFRSFGKRYIITASPRVMVEPFAREFLGADRVVGTELEVGKSGKATGFMVKPGVLVGDHKKQAVVKELGDAVPDVGMGDRATDFNFMSICKEAYLVTSRKYSPVPKKQLLTPLILHDGRLVQRPTLLVALVTFLWMPFGFALALLRVYINLPLPERIVFYIYHMMGIRLIVEGNPPPPPKXGSPGVPFGGNPRTGLDPIEVPVALARRVSCVTFSISRFSELIPPTRAGALTREPDRDAENIRRXLEEGDLVICPEGTTCREPXLLRFNALFXAELNDRILPVAIKHQGXFPRSTXRGXNSWTLXFSMNPRPVYEALPQICQTAGESHAIINLTQSFNDTKIRLADLLKGRKYVR

SEQ ID NO: 2614 - protein, 414 aa, Sesamum indicum
SYFHETIWKGVPKFLRRVDTALKNIGIDERVPYNAPLIQFSSWMGGDRDGNPRVTPEVTRDVCLLARMMAANLYCSQIEDLMFELSMWRCSDELRVRADELHRSSKRDAKHYIEFWKTIPPNEPYRVILGDVRDKLYQTRERSRHMLAHGICDIPEEATYTNIEQFLEPLELCYRSLCACGDRPIADGSLLDFLRQVSTFGLSLVKLDIRQESDRHTDVLDAITKHLDIGSYRDWSEERRQEWLLSELASKRPLFGADLPKTEEIADVLDTFHVLAELPSDCFGAYIISMATAPSDVLAVELLQRECKVRQPLRVVPLFEKLADLEAAPAAVARLFSIDWYKNRIQGKQEVMIGYSDSGKDAGRLSAAWQLYKAQEELIKVAKEYGVKLTMFHGRGGTVGRGGGPTHLAILSQP

SEQ ID NO: 2615 - protein, 337 aa, Coccidioides immitis RS
MVVKVGINGFGRIGRIVFRNAVEHPEVEIVAVNDPFIETHYAAYMLKYDSTHGRFKGDVKFSDNGLDVDGKHVRFYQERDPANIPWAETGADYVIESTGVFTTTEKASAHLKGGAKKVIISAPSADAPMFVMGVNNETYKSDIKVLSNASCTTNCLAPLAKVVNDNFGLVEGLMTTVHSYTATQKTVDGPSSKDWRGGRAAAQNIIPSSTGAAKAVGKVIPSLNGKLTGMSMRVPTSNVSVVDLTCRTDKSVTYDQIKEAMKKASANELKGIMSYSEDALVSSDLNGDTHSCIFDATAGIALNDHFIKLVAWYDNEWGYSRRVIDLIAYIAGVDAGK

SEQ ID NO: 2616 - protein, 159 aa, Bacillus thuringiensis serovar konkukian str. 97-27
MWKTTDLCDEFEKDLQICRQSFRSFGKKEQFHGKIATVKVKDDNVLVKEGLQTLPEGTVLVVDGGASTNCALLGDNLAAIAEERKLAGIIVNGYVRDSSELKNINIGILALGTMPNRSVKEGKGERNISLQFGQVEWKPDEYVYVDEDGVIISEKSLHR

SEQ ID NO: 2617 - protein, 239 aa, Helianthus annuus
QYGRETRHTGDYENPIHSTGGQYEQEVPQTDEYGNPVRRTDEYGNPVHSTTGGTMGDYGSTGLGQGTGTGGIGTGGYGTTGHHGLGTGVGHTTGGTGTDYTSGGRSTGQTGYQGLGTEPEFGGKTGTFQNQPSATPVGGVGLSSGTGAGVGGTGTGTGILHRSGSSSSSSSEDDGQGGRRKKKGVMQKIKEKLPGGHRQEEQYQSQTTTTTTGGGAGYGETHEKKGMMEKIKEKLPGHH

SEQ ID NO: 2618 - protein, 119 aa, Triticum aestivum
MASRDQVKASHILIKHQGSRRKASWKDPEGKVIMATTREAAAEQLRSIREDILSGKANFEDVATRVSDCSSAKRGGDLGPFGRGQMQKPFEEATYALRVGDISEIVDTDSGVHIIKRTA

SEQ ID NO: 2619 - protein, 55 aa, Chorispora bungeana
YRGVRRRNSGKWVCEVREPNKKTRIWLGTFPTVEMAARAHDVAAIALRGRSACLN

SEQ ID NO: 2620 - protein, 169 aa, Photorhabdus luminescens subsp. laumondii TTO1
MKYDTSELCDIYQEEVNVVEPMFSNFGGRTSFGGQIITVKCFEDNGLLYDLLEDNGHGRILLVDGGGSVRQALINAELAQLAVQNGWEGIVVYGAVRQVDQLAEFDLGIQAIAAIPAGCRDEGTGASDIRVNFGGVTFFSGDYLYADNTGIILSEEPLELDDNEEDEII

SEQ ID NO: 2621 - protein, 539 aa, Coccidioides immitis RS
MAGTSDVSRVEAPVTLKAYLMCAFAAFGGIFFGYDSGYINGVLGMDFFIEEFTGLRKSDFSPDEVKDKFVVPSWQKSLITSILSAGTFFGAIIAGDLADFFGRRTTIISGCAVFIVGVALQTASTTVALLVVGRLVAGFGVGFVSAIIILYMSEIAPRRVRGAIVSGYQFCITVGLLLASCVDYGTQERTDSGSYRIPIALQMLWALILAVGLFLLPESPRYYVKKGDVERAKAALASVRGQPLDSEFIQQELAEIVANHEYELQVVPQGSYWASWLNCFRGSLFDPASNLRRTILGTSLQMMQQWTGVNFIFYFGTTFFQSLGTISNPFLIGLITTLVNVCSTPISFWAIERIGRRPLLIWGACGMFVCEFIVAIVGVTVGERQDAVRAMIAFICIYIFFFASTWGPGAWVVIGEIFPLPIRARGVGLATASNWLWNCIIAVITPYLVYSDKANLGPKVFFLWGSLCVMCFIYAYLLVPETKGLTLEQVDKMLEETTPRTSAKWKPHTTFASEMGLTEKATLEEAVAIEVSPDHKETV

SEQ ID NO: 2622 - protein, 540 aa, Synechococcus sp. CC9605
MAKDPGRVLIFDTTLRDGEQSPGASLNLEEKLAIAQQLARLGVDVIEAGFPFASPGDFAAVQRIAQQVGGDNGPIICGLARASRADIKACADAVAPAPRRRIHTFIATSDIHLEHKLRKSRGDVLGIVPEMVSYARSLVEDVEFSCEDAGRSDPEFLYEVIEAAIAAGATTINIPDTVGYTTPSEFGALIAGINQHVPNIGEAVISVHGHNDLGLAVANFLEAVKNGARQLECTINGIGERAGNASLEELVMALHVRRRYYNPFFGREEDSPTPLTAVRTEEITKTSRLVSNLTGMVVQPNKAIVGANAFAHESGIHQDGVLKNRLTYEIIDAQTVGLSDNRISLGKLSGRSAVRARLEELGYDLTREDLDEAFARFKELADRKREITDRDLEAIVSEQVQQPEARFQLKLVQVSCGSSLRPTATVTLLDEEGSETTGSAVGTGPVDAVCRALNDLAGVPNELIEFSVKSVTEGIDAMGDVTIRLRRNGALYSGHAADTDVVVAAGMAFVNALNRLVAGEERQSLHPQKDPVVLESRPTL

SEQ ID NO: 2623 - protein, 168 aa, Arabidopsis thaliana
  misc_feature (106)..(106): Xaa can be any naturally occurring amino acid
  misc_feature (112)..(113): Xaa can be any naturally occurring amino acid
  misc_feature (117)..(117): Xaa can be any naturally occurring amino acid
  misc_feature (124)..(124): Xaa can be any naturally occurring amino acid
  misc_feature (132)..(132): Xaa can be any naturally occurring amino acid
  misc_feature (134)..(135): Xaa can be any naturally occurring amino acid
  misc_feature (146)..(146): Xaa can be any naturally occurring amino acid
  misc_feature (152)..(152): Xaa can be any naturally occurring amino acid
  misc_feature (155)..(155): Xaa can be any naturally occurring amino acid
  misc_feature (163)..(163): Xaa can be any naturally occurring amino acid
  misc_feature (165)..(165): Xaa can be any naturally occurring amino acid
  misc_feature (167)..(167): Xaa can be any naturally occurring amino acid
MASSMLSSTAVVTSPAQATMVAPFTGLKSSASFPVTRKANNDITSITSNGGRVSCMKVWPPIGKKKFETLSYLPDLSDVELAKEVDYLLRNKWIPCVEFELEHGFXVYREQXXNTPXYYDGRYXWAMWKLPXFXXPIPLKFLKEVXGSRRGXPGXLFGSIGFXKXRXA

SEQ ID NO: 2624 - protein, 489 aa, Oryza sativa
MCPQPDEPQALGANGVHQNGNGTTNGDHEGYRAFKTDQSKKVQSSNPYAPVGDFLSNVSKFKIIESTLREGEQFANAFFDTETKIRIAKALDDFGVDYIELTSPAASEQSRLDCEAICNLGLKAKILTHVRCNMQDAKLAVATGVDGVDVVIGTSSHLMEHSHGKDITYIKNTAIEVIEYVKSQGKEIRFSSEDSFRSDLVDLLTIYSAVDKVGVHRVGIADTVGCATPRQVYDLVRTLRGVVSCDIETHFHNDTGCAIANAYCALEAGATHIDTSVIGIGERNGITPLGGLMARMIVADRDYVKSKYKLEKLKEIEDIVAEAVEINIPFNNYITGFCAFTHKAGIHAKAILNNPSTYEIIDPKDFGMSRYVHFASRLTGWNAIKSRAEQLGLDMTDAQIKTVTLKIKAMADVRPLAIDDADSIIRTYHYNLNATQEKPLLQLTEEEKEKFAKAERELAQEDEKKALERKADDEADVPRAKKQKTETVA

SEQ ID NO: 2625 - protein, 118 aa, Saccharomyces cerevisiae
ASQSRSAKAGLTFPVGRVHRLLRRGNYAQRIGSGAPVYLTAVLEYLAAEILELAGNAARDNKKTRIIPRHLQLAIRNDDELNKLLGNVTIAQGGVLPNIHQNLLPKKSAKATKASQEL

SEQ ID NO: 2626 - protein, 146 aa, Mesorhizobium sp. BNC1
MRYLHTMVRVRDIGESLDFYCNKLGMKEVRRIENEAGRFTLIFLAAPEDVEAAERHKAPLVELTYNWDPEDYQGGRNFGHLAYEVDDIYAFCQHLMDAGITINRPPRDGNMAFIRSPDGISIEILQKGEAKPKAEPWASMPNTGAW

SEQ ID NO: 2627 - protein, 620 aa, Neorickettsia sennetsu str. Miyayama
MTKGYSSKFHQVVKALITKGVKRGFVTYGELSDSFSDEDFENLNCIEEAISKLEESGIGILEKDEEDELSEEVKEEDEEEDEAADILGHTDDPVRLYLREMSYVKLLSRDDEVEIAKAIVAEKFESLSAVLLFPSVLKSIVNLGTKLRECTISLREVIESDSGLKSELTEETGKGDDLFEGMDGKPEEGNQMSDEELMEKVLDIFGELETIITSALDKAKEGQMVKIVDGEVILDPEYRELHTLAVNHLNQVKLNPKLLAEFFENTRKKNELILEKKKVLLTFLEEHGLDRTVLIKGKVHILDAVVLSELLKEHNICDTHFSLEEFLSPIRELEKNEGMDYRSISFLTRKVATHLDNANAAKHRMVEANLRLVISIAKKYTNRGMPFPDLIQEGNIGLMKAVDKFDHRRGHKFSTYATWWCRQAITRAIADCGSIVRKPVHIHETANKVMRTRRRLYNLNGREPTVEEIANLLKISPDKVKKSLKVNQDPISLESPVGDDSNSGSFGDFIEDKNAVSQVDVVLSKNLRKVLDEALAMLSPREEKILRYRFGLCNSVHSPEDEHYLKSLKIDLNRGTNLTLEQVGILYNVTRERIRQIESKSLRKMRSPSRSIKLRTFLKY

SEQ ID NO: 2628 - protein, 679 aa, Lycopersicon esculentum
MSGGGCSIVWFRRDLRVEDNPALAAGVRAGAVIAVFIYAPEEEGHYYPGRVSRWWLKQSLAHLDSSLKSLGTSLITKRSTDSISSLLEVVKSTGATQLFFNHLYDPISLVRDHRTKEILTAQGISVRSFNADLLYEPWEVNDDEGRPFTTFSAFWEKCLSMPYDPEAPLLPPKRIISGDASRCPSDNLVFEDESEKGSNALLARAWSPGWSNADKALTTFVNGPLLEYSQNRRKADSATTSFLSPHLHFGEVSVRKVFHFVRIKQVLWANEGNKAGEESVNLFLKSIGLREYSRYMSFNHPYSHERPLLGHLRYFPWVVDEGYFKAWRQGRTGYPLVDAGMRELWATGWLHDRIRVVVSSFFVKVLQLPWRWGMKYFWDTLLDADLESDALGWQYISGTLPDGRELDRIDNPQFVGYKCDPHGEYVRRWLPELARLPTEWIHHPWNAPESVLEAAGIELGSNYPLPIVEIDSAKVRLEQALSQMWQNDAAARAAIENGMEEGHGDSADSPIAFPQAMHMEMDHEPVRNNPVIVTVRRYEDQMVPSMTSSLFRAEDEENSVDIRNSVVESRAEVPTDINVAEVHRRDTRDQAVMQTARTNATPHFNFAVGRRNSEDSTAESSSSTRERDGGVVPTWSPSSSNYSDQYVGDDNGIGTSSSYLQRHPQSHQLMNWQRLSQTG

SEQ ID NO: 2629 - protein, 104 aa, Spinacia oleracea
  misc_feature (1)..(1): Xaa can be any naturally occurring amino acid
XQDVNDSSWKEFVLESEVPVMVDFWAPWCGPCKLIAPVIDELAKEYSGKIAVYKLNTDEAPGIATQYNIRSIPTVLFFKNGERKESIIGAVPKSTLTDSIEKYL

SEQ ID NO: 2630 - protein, 190 aa, Glycine max
MVLVLALGDLHIPHRAPDLPAKFKSMLVPGKIQHIICTGNLCIKEIHDYLKTLCPDLHITRGEYDEETKYPETKTLTIGQFKLGLCHGHQVIPWGDLDSLAMLQRQLDVDILVTGHTHQFTAYKHEGGVVINPGSATGAYSSITYDVNPSFVLMDIDGLRVVVYVYELIDGEVKVDKIDFKKSSTSHSAH

SEQ ID NO: 2631 - protein, 395 aa, Ehrlichia canis str. Jake
MVEERKPHINVGTIGHVDHGKTTLTAALTTVLAKRLSGEGNKSVKYDEIDKAPEEKARGITISTAHVEYETENRHYAHVDCPGHADYIKNMITGAAQMDAAILVVSATDGAMPQTREHILLAKQVGVKDIVVWMNKCDVVDDEEMLSLVEMEIRELLSKYGYPGDDIDVVRGSAVKALEEETGSGVWSEKIMELMNALEKISLPVREKDKPFLMSIEDVFSIPGRGTVVTGRIERGVIRVGDKIEIVGLREIQSTVCTGVEMFHKALDAGEAGDNAGILLRGIKKEDVERGQVLSAPGQIHSYKRFKAEVYILKKEEGGRHTPFFSNYQPQFYVRTTDVTGNIKLPEGVEMVMPGDNINIEVSLDKPVAIDQGLRFAIREGGRTVGSGIITEILE

SEQ ID NO: 2632 - protein, 235 aa, Debaryomyces hansenii CBS767
MDETKNVYIGNIPFDHTEEQVLEIAKSVGPVIDLKLLFDPMTGKSRGYAFIKYGDHETAASAVRNLNNMAIGNRNIKCSFSNDNSAFPDSSNGNADKLPALPLGIQLFNNQTIPQAISNALSGLDQRSAYQLMKEAKQMSEDNPTLMKKLLDQFPQLAHALVETSLLLNFTTPEIVKLCVNSKQLELESLTLDHVQLLKQVSQLSDPEIDSLTKDQRNIISKMKSEIANGSYGVI

SEQ ID NO: 2633 - protein, 284 aa, Pseudomonas fluorescens Pf-5
MTAQLIDGKAIAASLRQQIAKRVAERRQQGLRTPGLAVILVGSDPASQVYVSHKRKDCEEVGFLSQAYDLPANTTQEDLAGLIDRLNDDPNIDGVLLQLPLPEHLDASLLLERIRPDKDVDGFHPYNVGRLAQRIPLLRPCTPKGIMTLLESTGADLYGMDAVVVGASNIVGRPMAMELLLAGCTVTVTHRFTKDLAGHVGRADLVVVAAGKPGLVKGEWIKEGAIVIDVGINRQDDGKLVGDVVYETALPRAGWITPVPGGVGPMTRACLLENTLYAAESLHS

SEQ ID NO: 2634 - protein, 290 aa, Debaryomyces hansenii CBS767
MDAKEIKSAVSSLDKSTDDATILKLLNILNDGVEPTEKLLRETKVGVAVNKFRGNSNPEVSSLVKKMIRNWREVVQNEKTKKKTGSATPDKDSKPVNNNTKQSSTESKFHSGPRNPKTDGINTTLYDNTTRNASVSALYTALAIERNDSGEHILAVSRDIENEVFKAEYLSVNDNYRNKLRTFTMNLRNKKNPDLRDRLLTNKIKPSNFIKMTPNEMAPESLKKEIEKLHKQNLFDAQGATEKRAVTDRFTCGKCKHKKVSYYQMQTRSADEPLTTFCTCENCGNRWKFS

SEQ ID NO: 2635 - protein, 605 aa, Shewanella sp. MR-7
MSLPSSSQSLQPNKIANRLAAIRSELASANLDAFIIPRADEYLGEYVPEHNERLYWATDFTGSAGMAIVLKDKAAIFTDGRYTVQVRLQVDANLFSYESLTDTPQIEWLCDTLAAGSRVGFDARLHTLAWFENAKATLAKAQIELVAVEQNPIDKHWQNRPAPSSTPITLFSNESAGKTSLQKRTEVGALVKKAGADVALIAALDSFCWLLNIRGNDVPRLPVVLGCGLLHANGDMQLFTDLNKLPEGIEEHVGAGVSFKSEASLADTLASLQGVKLLADPNSANAWAQNIARDAGAKLIAGIDPVSLPKAQKNAAELAGMRASHIRDGVAVSRFLAWLDAEVAANRLHDEATLADKLESFRLEDPQYREPSFDTISAAGANAAMCHYNHNNGTPAMMTMNSIYLVDSGAQYLDGTTDVTRTIAIGNVTDEQKKMVTLILKGHIALDQARYPKGTTGQQLDAFARQYLWQHGFDYDHGTGHGVGHFLSVHEGPQRIGKNLNAIALMPGMVLSNEPGYYRADSFGIRLENLVVVQHCEALKGAEREMYEFDALTLIPMDARLIDKSLLTQGEIDWFNAYHQKVFNTLSPLMSGSELKWLTQATKAI

SEQ ID NO: 2636 - protein, 523 aa, Saccharomyces cerevisiae
MRVYQFCRPFQLFTCFLCYLLVFVKANKEKISQKNYQVCAGMYSKEDWKGKIDPFISFNLKKISGLSDESDPGLVVAIYDFQDFEHLGVQLPDEEMYYICDDYAIDIGICEEENRDEFIVQDVVYDPYTSTNRSLANPIMTFSQNEVGLHDTRYPIKETGFYCVTAFRSSTSTKFNAVVNFRNAYGQLAGTEINKLPLYGLLAVAYVVAMALYSFAFWKHKHELLPLQKYLLAFFVFLTAETIFVWAYYDLKNEKGDTAGIKVYMVFLSILTAGKVTFSFFLLLIIALGYGIVYPKLNKTLMRRCQMYGALTYAICIGFLIQSYLTDMEAPSPLILITLIPMALALIIFYYMIIRSMTKTVIYLKEQRQIVKLNMYKKLLYIIYASFLSVLAGSIVSSFIYVGMNTIDMIEKNWRSRFFVTDFWPTLVYFIVFVTIAFLWRPTDTSYMLAASQQLPTDPENVADFDLGDLQSFDDQDDASIITGERGIDEDDLNLNFTDDEEGHDNVNNHSQGHGPVSPSPTK

SEQ ID NO: 2637 - protein, 281 aa, Mycobacterium tuberculosis
VGAIMLDGKATRDEIFGDLKQRVAALDAAGRTPGLGTILVGDDPGSQAYVRGKHADCAKVGITSIRRDLPADISTATLNETIDELNANPDCTGYIVQLPLPKHLDENAALERVDPAKDADGLHPTNLGRLVLGTPAPLPCTPRGIVHLLRRYDISIAGAHVVVIGRGVTVGRPLGLLLTRRSENATVTLCHTGTRDLPALTRQADIVVAAVGVAHLLTADMVRPGAAVIDVGVSRTDDGLVGDVHPDVWELAGHVSPNPGGVGPLTRAFLLTNVVELAERR

SEQ ID NO: 2638 - protein, 323 aa, Debaryomyces hansenii CBS767
MNKQFIRGFASTNPAKNYASTIKNLKVNSDTKVIYQGFTGKQGTFHAEQAIAYGTQVVGGTNPKKAGSKHLDRPVFATVKDAMKETGASATAIFVPPSIAAGAIEEAIEAEIALAVAITEGIPQHDMVRIAQMLKTQSKTRLVGPNCPGIIAPEQCKIGIMPSHIHKRGKVGVISRSGTLTYEAVSQTTQVGLGQSLVIGMGGDPFPGTNFIDALTLFLNDPETEGIILIGEIGGTAEEEAAEFLKQHNLTRPEGPKPVVSFIAGVSAPPGRRMGHAGAIVAGGKGDANSKIAALQSAGVVVEKSPARLGNSLLQEFKNKGLL

SEQ ID NO: 2639 - protein, 163 aa, Triticum aestivum
MITPRYLCDTIEYSSYASNALGALPYGRPAGGRTSDCGRGRGIASLIEMARSAVAQVVLVAVVAAMLLAVTEAAVSCGQVSSALSPCISYARGNGASPSAACCSGVRSLASSARSTADKQAACKCIKSAAAGLNAGKAAGIPTKCGVSVPYAISSSVDCSKIR

SEQ ID NO: 2640 - protein, 133 aa, Sulfolobus solfataricus P2
MSEIDSLIKEVAERLQKKAEEYGKKKEDVTLVLTEENFDEVIRNNKLVLVDCWAEWCAPCHLYEPIYKKVAEKYKGKAVFGRLNVDENQKIADKYSVLNIPTTLIFVNGQLVDSLVGAVDEDTLESTVNKYLK

SEQ ID NO: 2641 - protein, 510 aa, Zea mays
  misc_feature (30)..(30): Xaa can be any naturally occurring amino acid
  misc_feature (227)..(227): Xaa can be any naturally occurring amino acid
MDGSSKGSGHSEALRNYNLGRTLGIGTFGXVKIAEHKLTGHRVAIKIINCRQMRNMEMEEKAKREFKILKLFIHPHIIRLYEVIYTPTDIYVVMEYCKYGELFDYIVEKGRLQEDEARRIFQQIISGVEYCHRNMVVHRDLKPENLLLDSKYNVKLADFGLSNVMHDGHFLKTSCGSPNYAAPEVISGKLYAGPEVDVWSCGVILYALLCGTLPFDDENIPNLFKKXIKGGIYTVPSHLSALARDLIPRMLVVEPMKRITIREIREHQWFQIRLPRYLAVPPPDTTQQAKMIDEDTLRDVVNMGFNKNHVCESLCSRLQNEATVAYYLLLDNRFRATSGYLGADYQESMDRNLNQLASSESSSSGTRNYVPGSSDPHSSGLRPYYPVERKWALGLQSRAHPREIMVEVLKALQELNVRWKKNGHYNVKCRWCPGFPEVNDTLDASNSFLGDSTIMDNDDANGRLPTVIKFEFQLYKTKDDKYLLDMQRVTGPQLLFLDFCAAFLTKLRVL

SEQ ID NO: 2642 - protein, 456 aa, Streptococcus pyogenes MGAS315
MSKIVVVGANHAGTACIKTMLTNYGDANEIVVFDQNSNISFLGCGMALWIGEQIAGPEGLFYSDKEELESLGAKVYMESPVQSIDYDAKTVTALVDGKNHVETYDKLIFATGSQPILPPIKGAEIKEGSLEFEATLENLQFVKLYQNSADVIAKLENKDIKRVAVVGAGYIGVELAEAFQRKGKEVVLIDVVDTCLAGYYDRDLTDLMAKNMEEHGIQLAFGETVKEVAGNGKVEKIITDKNEYDVDMVILAVGFRPNTTLGNGKIDLFRNGAFLVNKRQETSIPGVYAIGDCATIYDNATRDTNYIALASNAVRTGIVAAHNACGTDLEGIGVQGSNGISIYGLHMVSTGLTLEKAKRLGFDAAVTEYTDNQKPEFIEHGNSPVTIKIVYDKDSRRILGAQMAAREDMSMGIHMFSLAIQEGVTIEKLALTDIFFLPHFNKPYNYITMAALGAKD

SEQ ID NO: 2643 - protein, 309 aa, Carica papaya
MENFPVINMEGLNGEERAATMKKIEDACENWGFFELVNHGIPIELLDTVERLTKGHYRKCMEQRFKEIMASKGLDGIQTEVTDMDWESTFFIRHLPEPNIAEIPDLDDEYRKVMKEFALKLEKIAEELLDLLCENLGLEKGYLKKAFYGSRGPTFGTKVSNYPPCPKPNLIKGLRAHTDAGGIILLFQDDKVSGLQLLKDGKWVDVPPMRHSIVVNLGDQLEVITNGKYKSVEHRVVAQTDGTRMSIASFYNPSDAVIYPAPILVEKETEEKKTAYPKFVFEDYMKLYAGLKFQAKEPRFDAMKAAAKA

SEQ ID NO: 2644 - protein, 244 aa, Helianthus debilis
ANYGGDKQYGRETRQTGDYENPIHSTGGQYEQDVRQTDEYGNPVRRTDEYGNPVHSTTGGTMGDYGSTGLGRGTGGIGTGGYGTTGHQGLGTGVGHTTGGTGTDYTSGGRSTGQTGYQGLGTESEFGGTTGTFQNQPSATPIGGTGLGGGTGAGFGGTGTGTGTGILHRSGSSSSSSSEDDGQGGRRKKKGVMQKIKEKLPGGHSQEGQYRSQTTTTAGGAGYGETHEKKGMMEKIKEKLPGHH

SEQ ID NO: 2645 - protein, 501 aa, Solanum chacoense
MQLISIFLFICFLFLLRKWKKYSKNSQTKKLPPGPWKLPFIGSMHHLAGGRPHRVLRDLAKKYGPLMHLQLGEVSAVVVTSPDMAKEVLKTHDIAFASRPKLLAMDIICYDRCDIAFSPYGEYWKQMRKICVTEVLSAKSVRSFSSIRCDEVVRLIDSIQSSSSSGELVNFKERVIWFTSSMTCRSAFGQLPKEQDMFIKLIREVIRLAEGFDVADIFPSYKFLHVFGRAKRKLLNVHRKVDAIVEDVINEHKKNFATRKNDDHALGGENLIDVLLKLMNDKSLQFPINNDNIKAIIIDMFAAGTETSSTTTVWAMVEMLKNPRVLAKAQAEVREAFRNKVTFDENDVEDLKYLKLVIKETMRLHAPIPLLVPRECRKETEINGYTIPVKTKVMVNVWALGRDPKYWDDVECFKPERFEQCSIDFIGNNFEYLPFGGGRRICPGTSFGLANDYLPLAQLLCHFDWKLPTGMEPKDLDLTELAGMSAASKDDLYLIATPYQP

SEQ ID NO: 2646 - protein, 480 aa, Pseudomonas syringae pv. phaseolicola 1448A
MQLKDSTLFRQQAYINGQWLDADGGQSIKVNNPANNEILGTVPKMGAAETRRAIEAADKALPAWRALTAKERGNKLRRWFELMIENQDDLGLLMTLEQGKPLAEAKGEITYAASFIEWFAEEAKRVYGDVIPGHQPDKRLIVLKQPIGVTAAITPWNFPAAMITRKAGPALAAGCTMVLKPASQTPFSALALAELAERAGIPAGVFSVVTGSAGDIGAELTGNPIVSKLSFTGSTDIGRQLMAECAKDIKKVSLELGGNAPFIVFDDADLDKAVEGAMISKYRNNGQTCVCANRIYVQDAVYDAFAEKLKAAVGKLKIGNGLEDGVTTGPLIDDKAVAKVKEHIADAVSKGATVLTGGNSLEGSFFEPTILVNVSKDAAVAREETFGPLAPLFRFKDEAEVIAMANDTEFGLASYFYAQNMSRVFRVAEALEYGMVGINTGLISNELAPFGGIKSSGLGREGSKYGIEDYLEIKYLCLSV

SEQ ID NO: 2647 - protein, 427 aa, Bradyrhizobium japonicum USDA 110
MGERSVKLPDIGEGIAEAELVEWHVKEGDLVREDDLLATVMTDKASVEIPSPLAGEVSWIGARIGDAVAIGSTLVKLKVAGDDTSEPADEAPTEDVATPSAVTNAKTPDAVPTPPARIRPAAIEARPATTSAVRRTPGEKPLASPAIRLKAREAGLDLRQVHGTGPAGRITHEDIDAFLSRGPAPTHGRGMAPKTAVTDVKVVGLRRRIAEKMALSKSRIPHITIIEEVNVSPLEDLRATLNRKPAPEHPKLTLLPFLMRAMVKALTEQPALNALYDDEAGIVHEHAGIHIGIATQTPSGLVVPVVKHAEARDLRDCSIELNRLAQRAREGTATREELTGSTITITSLGALGGLATTPVINHPEVAIVGVNKIAIRPVWDGTQFVPCKMMNLSCSFDHRVIDGWDAAVFVQRVKELLENPATIFVDP

SEQ ID NO: 2648 - protein, 246 aa, Helianthus debilis
ANYGGDKQYGRETRQTGDYENPIHSTGGQYEQDVRQTDEYGNPVRRTDEYGNPVHSTTGGTMGDYGSTGLGRGTGGIGTGGYGTTGHQGLGTGVGHTTGGTGTDYTSGGRSTGQTGYQGLGTESEFGGTTGTFQNQPSATPIGGTGLGGGTGAGFGGTGTGTGTGILHRSGSSSSSSSEDDGQGGRRKKKGVMQKIKEKLPGGHSQEGQYQSQTTTTTTAGGAGYGETHEKKGMMEKIKEKLPGHH

SEQ ID NO: 2649 - protein, 592 aa, Leptospira interrogans serovar Copenhageni str. Fiocruz L1-130
MKIRFLLTVAFLLSLWTLRGRIIMSAESRRVTGARLMVELLEEYGVDVVFGYPGGAILPFYDEIYKSKKIKHILVRHEQGAVHMAEGYARATGKLGVCIATSGPGATNLVTGITDAKMDSVPILAITGQVATNAIGTDAFQEADIFGITIPITKYNALIKSADDIARHFEEATLIALGGRPGPVLLDFPKDVQTELTNVRKSSRLKIAPHHYKKPAVSGNLEEFAEAINRSQKPLLYVGGGAINAGASKEILELATKGGIPVTTTLMGLGAFPGTHPLSIGMLGMHGTATANKAVLECDYILNLGARFDDRVAKIGEFAEGAVRAHIDIDTAEFNKRIQVDYLLHGDLKDALSAILPFVKKQERKEWLTHLQNLKKEHPLDFDNSGNEIKPQDFLERLYKKTQGKAIVSTDVGQHQMWAAQYYLMDEPNNWLTSGGLGTMGYGLPAAIGAKFGRPDKTTICISGDGSIQMNIQELATIVANKLGVKILVFNNNFLGMVRQWQELFYEERFSESEWNFNPDFVKLAEAYSIPAMKISNKSEIDKAIEFFTKDDGAAFLEVMIPAEEKVFPMIPAGKSQKEMIEFKDLAGLKKV

SEQ ID NO: 2650 - protein, 440 aa, Rhodospirillum rubrum ATCC 11170
MPIEILMPALSPTMEEGTLAKWLKKEGDPIAAGDVIAEIETDKATMEFEATDEGVLGKILVADGTAGIKVNQPIGILLEEGEDASALVQAAPAKAPDAPAKAAPEPAPVAAASQSDAAPAPAAAAPKRAAGERLFASPLARRIAAAEGLDLGALQGSGPHGRIVRRDVEAALAAGTGKTAEKAVAAPVAPAAPPQAVAAAAPKPVALPDAPHTKVANTSMRKIIARRLTESKQTVPHFYLTVDCKIDALLDLRKSLNARAEKRGDGVKLSVNDLIIKAVALALRKVPAANASWSDEAIVLWSDVDISVAVATPGGLITPIVRKADQKGLATISAEMKDLATRARDGKLKPEEFQGGGFSISNLGMYGIREFAAIINPPQGCILAVGAGEQRPVVEAGALAIATVMSCTLSVDHRVVDGAVGAEFLSAFKILIEDPMAMML

SEQ ID NO: 2651 - protein, 686 aa, Oryza sativa
MSGKLCFLASVLLSMSTVVDLAMAASGGVNIAVYWGQNGSEGTLGETCGTGLYAYVNLAFLSTFGAGRAPVLNLADHCDAPSGTCASLAADIASCQAAGVKVLLSIGGGALGYNLSSPSDARDLAAYLWDNFLGGGATGASRPLGDAVLDGVDFDIESPSRFYDDLARNLASLYTRAPRPPRGGKTYLLTAAPQCPYPDASLAAALATGLFDHVWVQFYNNPPCQYAAPGDASALRSAWAQWTAGFPAATVFLGLPASLDAADSGFVDADTLASQVLPVVEGAANYGGIMLWSRSYDKDSSFSVKLQAALQNRNKPTGAGASSHTKRRIYIIAGVFAGVLLLFLLLITYFLCHKKHHGQQPPVQELTTPPKAEPSQKKQRAQHLKRYSYSEVERMTKTFAHKIGQGNYGDVYKGNLRDGRQIVVKLLKNCRGNDKEFLNEVASIGTISHVNVIPLLGFCLQGTARALIYEYMPNGSLESYAFSNDDSIEENYSLWIYWEKLYEIAIGVARGLEFLHGSGNANIMHLKIKPRNILLDQELCPKISDFGVANLCLWKESKKSAQNARGRDSYDAPEVVSTKFGAVSSKSDVYSYGVMVLEMIRAKRRINVGADTTTKYFAQWLYDHLDQFCNSISDISDETRESVRRIIIVGLWCIQAAPANRPSMSRVVKMLESSSTKMDLPRKSIE

SEQ ID NO: 2652 - protein, 500 aa, Solanum chacoense
MQLVSIFLFISFLFLLRKWKKYLNNSQTKKLPPGPWKLPFIGGMHHLAGGLPHRVLRDLAEKYGPLMHLQLGEVSAVVVTSPEMAKQVLKTHDIAFASRPKLLAMDIICYNRRDIAFSPYGDYWRQMRKICIMEVLSAKSVRSFSSIRHDEVVRLIDSIQPCFTSGELVNFTERIIWFTSSMTCRSAFGQVLKEQEVFIKLIREVISLAEGFDVADIFPSYKFLHGFGGAKQKLLNAHRKVDSIVEDVIKEHKKNLATRKSDDAIGGEDLVDALVRLMNDKSLQFPINNDNIKAVIIDLFAAGTETSSTTTVWAMAEMLKNPSVFAKAQAKVREAFRDKVTFDENDVEELKYLKLVIKETMRLHAPVPLLVPRECREETEINGYTIPVKTKVMVNVWALGRDPKYWDDAESFKPERFEQCSIDFIGNNFEYLPFGGGRRICPGISFGLANVYLPLAQLLYHFDWKLPTGMEPKDLDLTESAGITAARKGDLYLIATPHQP

SEQ ID NO: 2653 - protein, 468 aa, Rhodospirillum rubrum ATCC 11170
MPVQILMPALSPTMTEGTLAKWLKKEGDTIAAGDVIAEIETDKATMEFEAVDEGVLGQILIEAGTQNVPVNAPIGILLEEGETIDDVHKPSASAPAPAKDVSLETTPAPAEPRRDPVPADTPLAAGGRAEAGRQEEKRYDKFVTLSVREALRDAMAEEMRRDDKVFLLGEEVAQYQGAYKISQGLLDEFGEKRVIDTPITEMGFAGLATGAAFSGLRPIVEFMTFNFSMQAIDQIINSAAKTLYMSGGQMGCPIVFRGPNGAAARVGAQHSQCYASWYAHCPGLKVIAPWSAADAKGLLKAAIRDPNPVVFLENEILYGQTFEVPDDADFVLPIGKAKVERAGADVTLVAFSRMVGVALEAAKALAGEGIEAEVINLRTIRPLDVETILSSVRKTNRCVTLEEGWPFAGIGAEIGMTIMENAFDYLDAPVIRITGEDVPMPYAANLEKLALPSIEAVVKAAKAACYKS

SEQ ID NO: 2654 - protein, 242 aa, Helianthus debilis
ANYGGDKQYGRETRQTGDYDNPIHSTGGQYEHDVHQTDEYGNPVRRTDEYGNPVHSTTGGTMGDYGSTGLGRGTGGIGTGGYGTTGHQGLGTGIGHTTGGTGTDYTSGGRSTGQTGYQGLGTESEFGGIQNQPSATPIGGTGLGGGTGAGFGGTGTGTGTGILHRSGSSSSSSSEDDGQGGRGKKKGVMQKIKEKLPGGHSQEGQYQSQTTTTTTAGGAGYCETHEKKGMMEKIKEKLPGHH

SEQ ID NO: 2655 - protein, 240 aa, Helianthus hirsutus
ANYGGDKQYGRETRHTGDYENPIHSTGGQYDQDVRQTDEYGNPVRRTDEYGNPVHTATGGTMGDYGSTGLGQGTGGIGTGGYGATGHQGLGTGVGHTTGTGTDYTSGGRSTGQTGYQGLGTESEFGGTTGTFQNQPSATPIGGTGLSSGTGAGLGGTGTGTGTGILHRSGSGSSSSSEDDGQGGRRKKKGVMQKIKEKLPGGHSQEEQYQSQTTTTTGYGETHEKKGMMEKIKEKLPGHH

SEQ ID NO: 2656 - protein, 140 aa, Glycine max
  misc_feature (50)..(50): Xaa can be any naturally occurring amino acid
METPNVTIPKVGPKPSRKVKLPTPKELISHYESKGMDSQDAPLKVIEDLXQKALFRVISSGKGKHDKLLTESSRKIDAINNRLTVLDMKLDSKPAYVETFAIGLASGAALKGIGAVVPHIIAPLTQIWNSVSSAIKSSPQ

SEQ ID NO: 2657 - protein, 241 aa, Helianthus mollis
ANYGGDKQYGRETRHTGDYENPIHSTGGQYEQDVRQTDEYGNPVRRTDEYGNPVHSATGGTMGDYGSTGLGQGTGGIGTGGYGTTGHQGLGTGVGHTTGGTGTDYTSGGHSTGQTGYQGLGTESGFGGTTGTFQNQPSATPMGGTGLGSGTGAGFGGTGTGTGTGILHRSGSGSSSSSEDDRQGGRRKKKGVMQKIKEKLPGGHSQEEQYQSQTTTTTGYGETHEKKGMMEKIKEKLPGHH

SEQ ID NO: 2658 - protein, 461 aa, Streptococcus thermophilus CNRZ1066
MDKFMSKIVVVGANHAGTYSINTILDNYGDQNEVVVFDQNSNISFLGCGMALWIGNQISGPDGLFYANKEGLESKGAKVYINSPVESIDFDGKTVTALVDGKEHVESYDKLILATGSQPILPPIDGAEIKEGSRTFEATLENLQFVKLFQNAQEVIDKLNDKSQDIKRVAVVGAGYIGVELAEAFQRHGKEVILIDVVDTCLAGYYDRDFTDRMAKNLEDHGIQLAFGETVKAVEGETKVERIVTDKNAYDVDMVVLAVGFRPNTALGAGKLETFRNGAYLVNKKQETSVKDVYAVGDCATVYDNALDDVNYIALASNAIRSGIVAGHNAGGGDVESNGVQGSNGISIYGLNMVSTGLTEEKAKRFGFNPAVVESTDLQKPPFMKDENEDVTIKIVYDKDTRKVLGAQMVSLMDISMGIHMFSLAIQEGVTIDRLQLLDLFFLPHFNQPLSYIAKAAISAE

SEQ ID NO: 2659 - protein, 168 aa, Saccharum hybrid cultivar H32-8560
MALTVMASSATAAAPFQGLKSTASLPVARRSTTSLAKVSNGGRIRCMQVWPAYGNKKFETLSYLPPLTQEQLLKQVDYLLRNNWVPCLEFSKEGFVYRENSTSPCYYDGRYWTMWKLPMFGCTDASQVYKELQEAIASYPELRAILGFDNIRQTQWLTFIAYKPAGSE

SEQ ID NO: 2660 - protein, 124 aa, Synechococcus sp. CC9605
MFSLETVAKFSLNSPAYMSSAAAVTDASFEQDVLQSDVPVLVDFWAPWCGPCRMVAPIVEEIAKEFDGQIKVFKLNTDENPNVASQYGIRSIPTLMVFKGGQKVDTVVGAVPKATLSGTISKYL

SEQ ID NO: 2661 - protein, 323 aa, Photorhabdus luminescens subsp. laumondii TTO1
MSNEIKRIGVLTSGGDAPGMNAAIRGVVRAGLTEGLEVFGIYDGYLGLYENRMKKLDRFSVSDMINRGGTFLGSARFPEFRDEKVRTVAIENMRKNGLDALVVIGGDGSYLGAKKLTEAGFPCIGLPGTIDNDVAGTDYTIGYFTALETVVEAIDRLRDTSTSHKRISIVEVMGRYCGDLTLSAAIAGGCEFIVLPEVSFSCDELVAEIKAGIDKGKRHAIVAITEHVCDVYELAKHIEKETHHETRATVLGHVQRGGSPVAYDRILASRMGAYSIQLLLEGYGGRCVGIQNEKLVHHDIIDAVQNMKRVFKQDWLETAKKLY

SEQ ID NO: 2662 - protein, 111 aa, Brassica napus
  misc_feature (86)..(86): Xaa can be any naturally occurring amino acid
  misc_feature (90)..(90): Xaa can be any naturally occurring amino acid
MFEHTLLSLLLLPSLLSLLLFLILLKRRSRHRFNLPPGKSGWPFIGETIGYLKPYTATTLGDFMQQHISKHGKIYRSNLFGEPTIXSADXGLNRFILQNEGRLFECSYPRS

SEQ ID NO: 2663 - protein, 409 aa, Rhodobacter sphaeroides 2.4.1
MRRVVITGIGIVSPIGNNAAEVEASLRAGRSGISFSEDYAHHGFRSQIHGMPDLVLEDHVDKRDLRFMGAGAAYNFIAMEQAIKDSGLEATEVSNPRTGLVMGSGGPSTSNFFQAHKIVIEKGSPKRMGPFMVTRCMSSTNSACLATPFKIKGVNYSITSACSTSAHCIGNGTELIQMGKQDIVFAGGGEELDWTLSCLFDAMGAMSSKYNDAPETASRPFDATRDGFVIAGGGGVVVLEELEHALARGAKIYAEVTGYGATSDGADMVAPSGEGGERSMRLALGTLPEGRRVDYINAHGTSTPAGDVTEVRAIRRIFGEGKVPPISSTKSLTGHSLGATGVHEAIYSILMMQGDFIAASANVTQLDPEIQPDEIATTLREGVEIDSVLSNSFGFGGTNASLLLSKFNN

SEQ ID NO: 2664 - protein, 966 aa, Saccharum hybrid cultivar H32-8560
MARNAVDKATSIDAQLRLLAPQKLSDDDKLVEYDALLLDRFLDILQDLHGEDIRETVQECYELAAEYENKLDPKMLDEIGNVLTSLDPGDSIVITKSFSHMLILANLAEEVQIAYRRRIKLKKGDFVDENSATTESDIEETLKRLMHQLKKSPLEVFDALKNQTVDLVLTAHPTQSVRRSLLQKHGRIRNCLTQLYAKDITPDEKQELDEALQREIQAAFRTDEIRRAPPTPQDEMRAGMSYFHETIWKGVPKFLRRVDTALKNIGINERLPYNAPIIQFSSWMGGDRDGNPRVTPEITRDVCLLARMMAANLYNAQIEDLMFELSMWRCSDELRVKVDELHRSSKKDTTKHYIEFWKQVPPSEPYRVILSDVRDKLYNTRERARHLLASGFSEIPEEATFTDVEQFLEPLELCYRSLCACGDRSVADGSLLDFLRQVSTFGLSLVRLDIRQESDRHTDVMDAITEYLGIGSYRKWTEEKRQEWLLSELNGKRPLFGPDLPKSDEIADVLDTFHVLAELPSDSFGAYVISMATAPSDVLAVELLQRECHVKKPLRVVPLFEKLADLEAAPAALARLFSVEWYRNRINGKQEVMIGYSDSGKDAGRFSAAWQLYKAQEELINVAKLYGVKLTMFHGRGGTVGRGGGPTHLAILSQPPETIHGSLRVTVQGEVIEQSFGEEHLCFRTLQRFTAATLEHGMHPPISPKPEWRALMDEMAIVATKEYRSIVFEEPRFVEYFRLATPEMEYGRMNIGSRPSKRKPSAGIESLRAIPWIFAWTQTRFHLPVWLGFGAAFKHVLDKDIRNLQTLQEMYNQWPFFRVTIDLVEMVFAKGDPGIAALYDKLLVSEDLWSFGKRLRANYEETKQLLLQVAGHKDLLEGDPYLKQRLRIRDSYITALNVCQAYMLKRIRDPGFQVNPGPHLSKDIMDMGKPASELVKLNTTSEYAPGLEDTLILTMKGIAAGMQNTG

SEQ ID NO: 2665 - protein, 380 aa, Petunia x hybrida
MASEAVHAPSPPVAVPTVCVTGAAGFIGSWLVMRLLERGYNVHATVRDPENKKKVKHLLELPKADTNLTLWKADLTVEGSFDEAIQGCQGVFHVATPMDFESKDPENEVIKPTVRGMLSIIESCAKANTVKRLVFTSSAGTLDVQEQQKLFYDQTSWSDLDFIYAKKMTGWMYFASKILAEKAAMEEAKKKNIDFISIIPPLVVGPFITPTFPPSLITALSLITGNEAHYCIIKQGQYVHLDDLCEAHIFLYEHPKADGRFICSSHHAIIYDVAKMVREKWPEYYVPTEFKGIDKDLPVVSFSSKKLTDMGFQFKYTLEDMYKGAIDTCRQKQLLPFSTRSAEDNGHNREAIAISAQNYASGKENAPVANHTEMLSNVEV

SEQ ID NO: 2666 - protein, 472 aa, Escherichia coli O157:H7 EDL933
  misc_feature (309)..(309): Xaa can be any naturally occurring amino acid
MTTHLVWFRQDLRLHDNLALAAACRNSSARLLALYIATPRQWAAHNMSPRQAELINAQLNGLQIALAEKGIPLLFREVDDFAASVEIVKQVCAENSVTHLFYNYQYEVNERARDVQVERTLRNVVCEGFDDSVILPPGAVMTGNHEMYKVFTPFKNAWLKRLREGMPECVAAPKVRSSGSIKPAPSITLNYPRQSFDTAHFPVEEKAAIAQLRQFCQNGAGEYEQQRDFPAVEGTSRLSASLATGGLSPRQCLHRLLAEQPQALDGGAGSVWLNELIWREFYRHLMTYYPSLCKHCPFIAWTDRVQWQXNPAHLQAWQEGKTGYPIVDAAMRQLNSTGWMHNRLRMITASFLVKDLLIDWREGERYFMSQLIDGDLAANNGGWQWAASTGTDAAPYFRIFNPTTQGEKFDREGEFIRQWLPELRNVPGKSVHEPWKWAEKAGVKLDYPQPIVEHKEARVQTLAAYEAARKGK

SEQ ID NO: 2667 - protein, 141 aa, Bordetella bronchiseptica RB50
MTVVCFNPSYTSNKNSGRMLHARAAQRNPRITIMSEQIKNVSDASFEADVLKSGQPVLVDYWAAWCGPCKMIAPILEEVASEYAGRLTVAKLNVDENQDTAAKYGVRGIPTLMLFKDGQAAATKVGALSKSQLTAFLDGAL

SEQ ID NO: 2668 - protein, 362 aa, Synechococcus sp. CC9605
MTAPRKRRVFPFTAVIGQEEMKLALLLNVIDPRIGGVMIMGDRGTGKSTTIRALADLLPDIDVVAGDPYNSSASDPDLQSSEVRERMQQGETLSTEPRQVPMVDLPLGATEDRLCGTIDIEKALSEGVRAFEPGLLAKANRGLLYVDEVNLLDDHLVDVLLDSAASGWNTVEREGVSVRHPARFVLIGSGNPEEGELRPQLLDRFGMSVEVRTVRDPELRVQVVDQRTSFDSDPDGFSTAVEGNQNALQQRVVEAQQRLDQVTIDEDLRLRISAVCGELDVDGLRGDIVTNRAARALAAFEGRTEVSEEDVARVASCCLRHRLRKDPLEQVDSGDRVVKVFCKVFERSESSDRADFELALAA

SEQ ID NO: 2669 - protein, 548 aa, Debaryomyces hansenii CBS767
MISRSIRLRVNKQLLQRSKVELKNFKSTISLTSTTTDYPTNHYDAKEPYLTPTFINNKFIKSDSQTWFDIHDPATNKVILKVPQSTSEELEEAIASAQSAFEEWKDYSIIKRQSIAFRFVELLKANQKRIAAIIVSEQGKTFPDAMGDVLRGLQVAEAACNIPNDMMAQSLEVARDMETKMVREPLGVVGSICPFNFPAMVPLWSLPLVLVTGNTAVIKPSERVPGAAMILAELCEQAGVPPGVVNMVHGKHDTVNKIIEDPRIKAITFVGGDKAGKYIYEKGTKLGKRVQANLGAKNHLIVLPDADKNQFINAVSGASFGAAGQRCMAISVLVTVGKETAAWVEDVAKDAAALKVGSGFDSTSDLGPLINPESLTKAKEIIEDSVKQGAKIILDGRNFKHDDAKFHKGNFLGPTILTNVKPGVRAYDEEIFAPVLSVVNVDTFDEAISLVNANKYGNGVSLFTTSGPAAQKFAKNIACGQVGVNVPIPVPLPMFSFTGNKGSFLGDLNFYGKAGITFLTQPKTITSLWKTTPFDDVLKPSTSMPTHD

SEQ ID NO: 2670 - protein, 373 aa, Acholeplasma laidlawii
MVFGFNDEFNQKPVIKVIGVGGGGNSAVNRMIENDVRGVSYVALNTDAQALKVSKADERIQLGKKLTRGLGAGAKPAIGKQAALESEDDIREVLSDADMVFITAGMGGGTGTGAAPVVARIAKELGVLTIGIVTKPFVFEGPLRMQHAITGLEELKPNVDTLIVIPNERLFSIADRDMQLLDAFRESDKVLRQGVQGIAEIIAVPGMINVDFADVRTVMENKGTALMGIGMASGENRAIEAARKAIHSKLLEVSIDGATDAIVNISSGAEVTLFEIEAALTEIRNATESDLNVIYGHTVSVDLEDEMIVTIVATGYELRAKGNEVEKIAGDIFRNNSTQQVKITDTGLEPLNNKEASGEDTKKRTLPSWLHRK

SEQ ID NO: 2671 - protein, 509 aa, Candida albicans SC5314
MDQQEAPIYYGRSVNKVYNQEFIIDSRFKIVKELGHGAYGIVCSAKYDNGSKKVPDSNNGNASSSANASFVAIKKITNIFSKNILCKRALRELKLLQFFRGHKNITCLYDLDIIPNPMTGEFNEIYLYEELMECDMHQIIRSGQPLSDQHYQSFIYQVLCGLNFIHSADVLHRDLKPGNLLVNADCELKICDFGLARGFSENPDENAGFMTEYVATRWYRAPEIMLSFTNYTKAIDIWSVGCILAELLGGKPLFRGKDYVDQLNQILMILGTPPESTLQRIGSHRAQNYVRSLPITRKASYEELFPDANPLALDLLERMLTLDPRERITVRDALNHKYLELWHDPKEEIECQVKFDFKSFETVDGLDEMKQLIMDEVQKFREFVRKPIEEQQRIQMQLHMQKREEQRQEEEEKELLEQQRQFPAQESMDISQTPYNNLETNIGTPQVEDDYPRPQELDEFTFSNLESSSSMNLFQDMAKPSGEEYIKLEEELGFGLDGAMFNNYCNDHQ

SEQ ID NO: 2672 - protein, 544 aa, Arabidopsis thaliana
MASLQLYGVKTPGLALSSKRLEFASKGACFSVTLPSSSAVFRDVEHSCRNIGLRVSCEALRVDLLQRKEPETCDSSGTGKELTCVMKFGGSSVESAERMKEVANLILSFPDERPVIVLSAMGKTTNKLLKAGEKAVTCGVTNVESIEELSFIKELHLRTAHELGVETTVIEKHLEGLHQLLKGISMMKELTLRTRDYLVSFGECMSTRLFSAYLNKIGHKARQYDAFEIGFITTDDFTNADILEATYPAVSKTLVGDWSKENAVPVVTGYLGKGWRSCAITTLGRGGSDLTATTIGKALGLREIQVWKDVDGVLTCDPNIYPGAQSVPYLTFDEAAELAYFGAQVLHPLSMRPARDGDIPVRVKNSYNPTAPGTVITRSRDMSKAVLTSIVLKRNVTMLDIASTRMLGQYGFLAKVFTTFEDLGISVDVVATSEVSISLTLDPAKLWGRELIQRVNELDNLVEELEKIAVVKLLQRRSIISLIGNVQKSSLILEKVFQVFRSNGVNVQMISQGASKVNISLIVNDEEAEQCVRALHSAFFETDP

SEQ ID NO: 2673 - protein, 583 aa, Arabidopsis thaliana
MASALECWTTRNAAGGCADDDFVDQVLMSSEDRSESLTAPPPSDQTSSAMQKRFQRLGRNVSDAIASLKNSLNLDSSRDNQNAATGGGRKLVWATVVRNLAKMYPGSQLPDKLVSNLRKHYDSLPLSYSQTGFDMKDVFVHIKLIEQAFGDDNPVFVIQEVCDEEADDQGSVFKLTFACTCSLPWSTISGSLDGALICCKKVQIFEKKGLTLGVVLLLVESGQEKMFKVKVVNALRSAVRKPKSTSVKLPFGLCGCEEQNAGVGEFGDVDVESIDQCYRHELDDLNTRIQLQMPPPSSSFSVSVDEWQTIQSGGDDIRKWLLNSDDLEFSGQLGPNSFKGVYRGTKVAIEKLKGCEKGNSYEFAIRKDFLELMTCGHKSILQFYGVCIDENHGLCVVTKLMQGGSLRELVLKKKKLQTKLIFQIAVDIAEGMKFINDHGVAYRDLNTQRILLDKQCNACLGDLGIVTACKSVNEAMEYETDGYRWLAPEIIAGDPEKTRESWMSNAYSFGMVLWEMVTGEEAYGSCSPVQAAVGIAACGLRPDIPKECPQVLKYLMIKCWNTCPSTRLNFSQIHCILLRAISR

SEQ ID NO: 2674 - protein, 337 aa, Ehrlichia canis str. Jake
MSKIAVVLFNLGGPQSLSEVRSFLFNLFYDKNIINLANPLRFILATLISFFRKKKAIGIYKHLNGQSPILKETKIQASSLENILNDNNDNQYQVFIFMRYSQPSAKDTVESVCQYNPDKIILLPLYPHYSTTTTLSAIQHWNYYMNKSNLQFSTSTVCCYYNNTNYIKAQCQLIIEKYQEAQKYGLPRVLFSAHSLPISIMQQGDPYQHQIEKNVLLITKFLNIPELDYKICYQSKVGPVKWLEPSTISEIKQAKQDNVPIVLVPISFVSENSETLVELDIDYKAIISKENMFFRVPTLSNNGYYIKCLKEICMQDHKNTCPTKCKMCFRYLTNSYL

SEQ ID NO: 2675 - protein, 785 aa, Aspergillus oryzae
MATTHAPAEPPKRRRIGVLTSGGDAPGMNGAVRAVVRMAIYSGCEAYAVYEGYEGLVHGGDMIRQVHWEDVRGWLSRGGTLIGSARSMAFRERAGRLKAAKNMIVRGIDALVVCGGDGSLTGADLFRSEWPGLLEELVKTGELTEEQIVPYKVLNIVGLVGSIDNDMSGTDATIGCYSSLTRICDAVDDVFDTAYSHQRGFVIEVMGRHCGWLALMSAISTGADWLFIPEMPPREGWEDDMCDIITKNRQERGKRRTIVIVAEGAHDRQLNKITSSKIKDILTNRLDLDTRVTVLGHTQRGGAACAYDRTLSTLQGVEAVRAVLDMTPESPSPVITVRENKLLRTPLMDAVKATKEVADLIHERKFDEAMHLRDSEFKEYHFAYKNTATPDHPKLILPENKRMRIAIIHVGAPAGGMNQATRAAVAYCQTRGHTALAVHNGFPGLCRHHADTPVSSVREVSWEEQDTWVNEGGSDIGTNRSLPSEDFETTAKCFEKFKFDGLFVVGGFEAFTAVSQLRQAREKYPAFKIPMVVLPATISNNVPGTEYSLGSDTCLNTLIDFCDAIRQSASSSRRRVFVVETQGGKSGYVATTAGLAVGASAVYIPEEGIDIKMLARDIDFLRNNFAHDKGANRAGKIILRNETASSTYTTQVIADMIKEEAKGRFESRAAVPGHFQQGGKPSPMDRIRALRMAIRCMQHIETFSGKSADEIAADELSATVIGVKGSQVLFSQMGGPNGLEATETDWARRRPKDEFWLDLQSTVNILSGRASFGEGKTGWSCYENC

SEQ ID NO: 2676 - protein, 775 aa, Aspergillus oryzae
MTNTILDTYSSRRKPRRIGILTSGGDAPGMNGAIRAVVRTAIQNGCEAWAIHEGYEGLIQGGAMMHPLYWEDVRGFLSRGGTLIGSVRCDRFREREGRLQAARNMVLFGIDALVVCGGDGSLTGADLFRSEWPELLNELVSTGVLTVAQVAPHQNLNIVGLLGSIDNDFSGTDATIGCYSALTRICEAVDAVFDTASSHRRGFVVEVMGRHCGWLALMAAIATGADWLFIPERPPRDGWEDDMCSIITKNRNRGKRRTIVILAEGAQDSNLDRISSSAVKDVLSKRLGLDTRVTVLGHIQRGGSPCAYDRWLSTLQGIHAVKAVLSMTPESPSPVVIIQENRIRTSSLAETVALTKEANASMHAKEFEKAATLRDPEFMEYHSAYRHLNTSDHPKMVLPEDKRMRVAIIHVGAPAAGMNPATRAVVAYCLTRGHTPIAIHNGFPGLCRHHDDTPGSVREMHWLESGDWINDGGSDIGTNAGLPLDDIETTAQCFERYKFDALFVIGGFEAFTAVSQLRKARKQYLAFRIPLVLLPASMSNNVPGTEYSLGSDTSLNTLVYFCDVVRQSASSSGHSVFVVEAQGAEYQATAAALAAGAMTVYTPERGITLQSLSNDIEYLRQQFSKDHGANRSGKLIIRNDQTSTIYSTTEIANIIKHEAKNRFDAQGVVPGHFQQGGKVSPIDRIRAFRLAVKCMEHLETFAGQSPEEIMNDENSATVISIKQSRILLLPMGGPTGVEATDTDWKRQRPKTQNWLEIQEAVDSLSGRSSLYAIPN

SEQ ID NO: 2677 - protein, 220 aa, Yersinia pestis biovar Medievalis str. 91001
MLVECKGFLFDLDGTLVDSLPVVERAWIGWAQRRGVNPSEVLDFIHGKQAITSLRHFMPGASEAEIQDEFLALEQIEANDTEGVTALPGAVALLTRLNELAIPWAIVTSGSIPVASARRAAGCLPEPKVFVTAELVKQGKPAPDAYLLGAERLGLAPADCIVVEDAPAGILSGLAAGCQVIAVNAPTDTPKLDQVDLVLHSLEQLVVDATSHGAVVRLLP

SEQ ID NO: 2678 - protein, 514 aa, Burkholderia sp. 383
MTDKLIIFDTTLRDGEQSPGASMTKEEKIRIAKHLERMKVDVIEAGFAASSNGDFDAIHTIAGLIKDSTICSLARANDKDIQRAADALKPAESFRIHTFIATSPLHMEKKLRMTPDQVFEQARLAVRFARKFTDNVEFSPEDGSRSDMDFLCRVLEAVIAEGATTINIADTVGYGVPELYGNLVKTLRERIPNSDKAIFSVHCHNDLGMAVANSLAGVKIGGARQIECTINGLGERAGNTSLEEIVMAVKTRKDYFGLDVGIDTSQIVPTSKLVSQITGFVVQPNKAVVGANAFAHASGIHQDGVLKARDTYEIMRAEDVGWTANKIVLGKLSGRNAFKQRLQELGVSLDSESELNAAFMRFKDLADRKAEIFDEDIIAIVSEESALAHEQEHFKFVSLSQHSETGEQPHAKVVFGVEGKEVTGEARGNGPVDATFNAIESEVGSGSELLLYSVNAITTGTQAQGEVTVRLSKSGRIVNGVGTDPDIVAASAKAYISALNKLHSKDDKVNPQRS

SEQ ID NO: 2679 - protein, 467 aa, Yersinia pestis CO92
MKNDSSTLKRGLSARHIRFMALGSAIGTGLFYGSAEAIRLAGPAVLLAYLIGGAAVFMVMRALGEMAVHDPVAGSFGHYASRYLGPLAGFLTGWTYTFEMVVVALADVTAFGIYMGLWFPDAPQWVWVLSIIFFIGALNLCSVKVFGEMEFWLSLLKVAAIIAMIAAGLGIMMFGFGAGHDSTGVSNLWAHQGFMPNGITGVIASFAVVMFAFGGIEIIGVTASEAKDPGKVLPRAINTVPIRILLFYVLTLFVLMAIYPWNSIGQNGSPFVEIFSSLGINSAANILNLVVITAAISAINSDIYGAGRMMYGLAQEGLAPKSFSRLTRNGVPYMTILVMAITLLCGVVLNYLIPKNVFLVIASIATFATVWVWLMILVSQVAMRRSMSKAQVARLAFPVPFWPLAPILTILFMAFIIAVLGYFPATRIAMYVGLAWVALMTLAWWIWLRKAPSCVIQERAKSSEMPS

SEQ ID NO: 2680 - protein, 379 aa, Thiobacillus denitrificans ATCC 25259
MKFEVRVPTLSDSVASGTLLPWRKAVGDTVARDETLVDLETDKVILEIPAPASGTLVEVRAVGGAEVRADEVIALIETGEAAAAGARENATPAAPAPAPPAATAPARAAAPAESPSVAAPPPRVATATAPQPRVAPPPARAAAQPGESRREPMSRLRQRVAERLVAAQHTAAMLTTFNEVNMQPVNELRQRFKADFEVRHGVKLGYMSFFVRAVCRALEAFPIVNARIDGNDIVWHGDADIGIAISSPRGLVVPILRRAQQLSSDEIERAIADFARRARDSKLALEELAGGTFSITNGGVFGSLLSTPILNPPQSAILGMHTIQERPVAEHGQVVIRPMMYLALTYDHRLIDGRDAVQFLVAVKAALEAPDAPLPEYRA

SEQ ID NO: 2681 - protein, 872 aa, Actinobacillus pleuropneumoniae serovar 1 str. 4074
MRNNIHMLGDFLGETIREAQGNEILELIESIRVLSRDSRAGDEKAREQLLDKLANISTENVLPVARAFSQFLNLTNIAEQYQTISRHHQDESLGNRSLSALFARLKAQGTPVETVIKTVEKLSIELVLTAHPTEVTRRSLVHKHVEINKCLGQLEHDDLTEAEQTKLKRRLMQLIALAWHTNEIRAARPTPVDEAKWGMAIIENSLWKAVPDFCRELNFQLEKHFDVQYEVALSPVRFSSWMGGDRDGNPFVTAEITQKVLRMNRWKAAELFLNDVSDLVEELSIVQCTPEFREKYGDHIEPYRVVVKGLRSKLQKTLTYFGELIEAKPTTVDPSEIITCDNDLWEPLYDCYQSLHACGMRIIANGSLLDCLRRIRCFGLGLSRLDIRQESSRHETAIAEITRYIGLGDYAQWTEDDKQAFLVRELSSRRPLVPTNWTPSPETQEILDTCKVVAQQPEGTISAYVISMAREASDVLAVHLLLKEAGCNYTLPVAPLFETLDDLDHSEKVMTDLFNIGWYRGVINNYQMVMIGYSDSAKDAGMLAASWAQYRAQEALVNLAEKYHIELVLFHGRGGTVGRGGAPAHAALLSQPPRSLKSGLRVTEQGEMIRFKLGLPAVAVETLNLYASAILEANLLPPPEPKQKWRDIMDKGAAISCEIYRGVVRGEPDFVPYFRSATPEQELGKLPLGSRPSKRNPNGGVESLRAIPWIFAWMQNRLMLPAWLGAGAALRQMIEQGEESTLKEMCNEWPFFSTRIGMLEMVFSKADLWLAEHYDQRLVAKELHRLGKTLRAQLSADIQTVLTLAHDGQLMADLPWIAESIALRNVYTDPLNLLQVELLQRLRSQGEVRDPQLEQALMITITGIAAGMRNTG

SEQ ID NO: 2682 - protein, 411 aa, Mycobacterium tuberculosis CDC1551
MASSTTFVIVGGGLAGAKAVEALRRSDFGGRIILFGDEEHLPYDRPPLSKEFLAGKKSLSDFTIQTSDWYRDHDVDVRLGVRVSSLDRSAHTVELPDGAAVRYDKLLLATGSAPRRPPIPGSDAAGVHYLRSYNDAVALNSVLVQGSSLAVVGAGWIGLEVAASARQRGVDVTVVETAIQPLLAALGEAVGKVFADLHRDQGVDLRLQTQLEEITAADGKATGLKMRDGSTVAADAVLVAVGAKPNVELAQQAGLAMGEGGVLVDASLRTSDPDIYAVGDIAAAEHPLLGTRVRTEHWANALKQPAVAAAGMLGRPGEYAELPYLFTDQYDLGMEYVGHAPSCDRVVFRGNVAGREFLSFWLDGDSRVLAGMNVNVWDVVDDVKGLIRSGNPVDVDRLVDPQWPLADLTTN

SEQ ID NO: 2683 - protein, 246 aa, Helianthus niveus
ANYGGDKQYGRETRQTGDYENPIHSTGGQYEQDVRQTDEYGNPVRRTDEYGNPVHSTTGGTMGDYGSTGLGQGTGGIGTGGYGTTGHQGLGTGVGHTTGGTGTDYTSGGRFTGQTGYQGLGTESEFGGTTGTFQNQPSATPMGGTGLGSGTGAGFGGTGTGTGTGILHRSGSSSSSSSEDDGQGGRRKKKGVMQKIKEKLPGGHSQEGQYQSQTTTTTTAGGAGYGETHEKKGMMEKIKEKLPGHH

SEQ ID NO: 2684 - protein, 240 aa, Helianthus tuberosus
ANYGGDKQYGRETRHTGDYENPIHSTGGQYDQDVRQTDEYGNPVRRTDEYGNPVHTATGGTMGDYGSTGLGQGTGGIGTGGYGTTGHQGLGTGVGHTTGTGTDYTPGGRSTGQTGYQGLGTESEFGGTTGTFQNQPSATPIGGTGLSSGTGAGFGGTGTGTGTGILHRSGSGSSSSSEDDGQGGRRKKKGVMQKIKEKLPGGHSQEEQYQSQTTTTTGYGETHEKKGMMEKIKEKLPGHH

SEQ ID NO: 2685 - protein, 328 aa, Pseudomonas putida
MELLIQPKNRIIPFSAGANLLEVLRENGVAISYSCLSGRCGTCRCRVIDGSVIDSGAENGQSNLTDKQYVLACQSVLTGNCAIEVPEADEIVTHPARIIKGTVVAVESPTHDIRRLRVRLSKPFEFSPGQYATLQFSPEHARPYSMAGLPDDQEMEFHIRKVPGGRVTEYVFEHVREGTSIKLSGPLGTAYLRQKHTGPMLCVGGGTGLAPVLSIVRGALKSGMTNPILLYFGVRSQQDLYDAERLHKLAADHPQLTVHTVIATGPINEGQRAGLITDVIEKDILSLAGWRAYLCGAPAMVEALCTVTKHLGISPEHIYADAFYPGGI

SEQ ID NO: 2686 - protein, 417 aa, Streptomyces hygroscopicus
MTPQQRSAVLSRAAALLESRAEEFSALITSESGVCRKETLREVSRAAGNLKVAAAEAERIRGESIPLPDGTRLAVTLPEPVGVVLGITPFNRPLNQVVVKAAPALAAGCPLLLKPSEKTPLTALAFAELLIEAGCAKDMLGVVTGEPGELGPLLASHPDVAMVTFTGSVATGHSVAALAAGKRQLLELGGNDPLFVLPDADLPHAARLAAGGACATAGQSCRGIKRIFVWEEVADEFTDLLSTEVAGKQAGDPRRSDTDLGPLISEEAALVVERRIADAVRDGARLVTGGERDGALVHPAVLDRVPADTELVREETFGPVAPVIRVRGADEAVRLSNSTAYGLQAGVLTRDSARFWDLAARLRVGAVNLGEGPHFDSPHIPFGGVKACGIGREGIRYAIAEMTVTKTVTLPGPYGTG

SEQ ID NO: 2687 - protein, 228 aa, Helianthus maximiliani
ANYGGDKQYGRETRHTGDYENPIHSTGGQYEQDVRQTDEYGNPVRRTDEYGNPVHSATGGTMGDYGSTGLGQGTGGIGTGGYGTTGGTGTDYTSGGHSTGQTGYQGLGTESGFGGTTGTFQNQPSATPMGGTGLGSGTGAGFGGTGTGTGTGILHRSGSGSPSSSEDDRQGGRRKKKGVMQKIKEKLPGGRSQEEQYQSQTTTTTGYGETHEKKGMMEKIKEKLPGHH

SEQ ID NO: 2688 - protein, 246 aa, Helianthus neglectus
ANYGGDKQYGRETRQTGDYENPIHSTGGQYEQDVRQTDEYGNSVRRTDEYGNPVHSTTGGTMGDYGSTGLGRGTGGIGTGGYGTTGHQGLGTGIGHTTGGTGTDYTSGGRSTGQTGYQGLGTESEFGGTTGTFQNQPSATPIGGTGLGGGTGAGFGGTGTGTRTGILHRSGSSSSSSSEDDGQGGRRKKKGVMQKIKEKLPGGHSQEGQYQSQTTTTTTAGGAGYGETHEKKGMMEKIKEKLPGHH

SEQ ID NO: 2689 - protein, 294 aa, Xanthomonas campestris pv. campestris str. ATCC 33913
MTAPAPAALAPARLLDGRRIAEELLDGLKLRVDARLAAGKTRPGLAVVLVGGDPASSVYVRNKRRAAEKVGIEAFDYDLPQGTTEAELAALIDQLNTDPKIHGILIQLPLPGIPDANRLIQRIDPRKDVDGFHPQNVGHLALREFGLRPCTPRGIVTLLAHTDQPVRGRNATIVGVSNHVGRPMGLELLIAGCTVTSCHKFTPPDVLEASVRNADILVVAVGRPGLIPGEWVKPGAVVIDVGINRLDDGRLVGDVGFEAAAQRAGWITPVPGGVGPMTVATLMQNTLEAADAAG

SEQ ID NO: 2690 - protein, 398 aa, Vetiveria zizanioides
SADLVFTAHPTQSARRSLLQKNARIRNCLTQLKAKDITEDDKQELDEALQREIQAAFRTDEIRRAQPTPQDEMRYGMSYIHETVWKGVPKFLRRVDTALKNIGIKERLPYSVPLIRFCSWMGGDRDGNPRVTPEVTRDVCLLSRMMAANLYIDAIEDLMFELSMWRCDDELRARAEEVLSTPSAKKVTKYYIEFWKQIPPNEPYRVILAAVRDKLYNTRERARHLLATGVSEIPEDAVFTNVDEFLEPLELCYKSLCDSGDKAIAEGSLLDLLRQIFTFGLALVKLDIRQESERHTDVVDAITTHLGIGSYRSWPEEKRFDWLLSELRGKRPLLPADLPMTEEIADVVGAMRVLAELPPDSFGPYIISMCTAPSDVLAVELLQRECGIRQPLPVVPLF

SEQ ID NO: 2691 - protein, 237 aa, Helianthus petiolaris
ANYGGDKQYGRETRHTDEYGNPIHSTGGHQTDEYGNPVRRTDEYGNPVHSTTGGTMGDYGSTGLGQGTGGIGTGGYGTSGYQGLGTGLGHTTGGTGTDYASGGRSTGQTGYQGLGTESEFGGTTGTFQNQPSATPMGGTGLGGGTGAGFGGTGTGTGTGTGILHRSGSSSSSSSEDDGQGGRRKKKGVMQKTKEKLPGGHSQEGQYQSQTTTTTTAGGTHEKKGMMEKIKEKLPGHH

SEQ ID NO: 2692 - protein, 398 aa, Ischaemum koleostachys
SVDLVFTAHPTQSARRSLLQKNARIRNCLTLLSAKDVAPEDKKELDEALQREIQAAFRTDEIRRAQPTPQDEMRYGMSYIHETVWKGVPKFLRRVDTALKNIGINERLPYNVPLIKFCSWMGGDRDGNPRATPEVTRDVCLLSRMMAANLYIDQVEDLMFELSMWRCNEELRVRAEELHSTPASKKVTKYYIEFWKQIPPNEPYRVILGAVRDKLYNTRERARHLLATGFSEISEESVFTNIDEFLEPLELCYKSLCDCGDKAIADGSLLDLLRQVFTFGLSLVKLDIRQESERHTDVLDAITTHLGIGSYRSWPEDKRMEWLVMELRGKRPLLPPDLPMTEEIADVIGAMRVIAELPSDSFGPYIISMCTAPSDVLAVELLQRECGIRQTLPVVPLF

SEQ ID NO: 2693 - protein, 337 aa, Schizophyllum commune
MAVKVGINGFGRIGRIVLRNALQLGNIEVVAINDPFIALDYMVYMFKYDTVHGRYKGTVEVKDGKLVVDGHAITVFAEKNPADIKWGSAGADYIVESTGVFTTVEKASLHLQGGAKKVVISAPSADAPMFVVGVNLDKYDSKYQVISNASCTTNCLAPLAKVIHDKYGIAEGLMTTVHATTATQKTVDGPSHKDWRGGRSVNNNIIPSSTGAAKAVGKVIPSLNGRLTGLAFRVPTLDVSVVDLVVRLEKEASYDEIVATVKEASEGPLKGILGFTDESVVSTDFTGANESSIFDSKAGIAISKSFVKLIAWYDNEWGYSRRVCDLLVYAAKQDGAL

SEQ ID NO: 2694 - protein, 398 aa, Sorghum arundinaceum
SVDLVFTAHPMQSARRSLLQKNARIRNCLTQLSAKDVTVEDKKELDEALHREIQAAFRTDEIRRAQPTPQDEMRYGMSYIHETVWNGVPKFLRRVDTALKNIGINERLPYDVPLIKFCSWMGGDRDGNPRVTPEMTRDVCLLSRMMAANLYINQVEDLMFELSMWRCNDELRARAEEVQSTPASKKVTKYYIEFWKQIPPNEPYRVILGAVRDKLYNTRERARHLLATGFSEISEDAVFTKIEEFLEPLELCYKSLCECGDKAIADGSLLDLLRQVFAFGLSLVKLDIRQESERHTDVIDAITTHLGIGSYRSWPEDKRMEWLVSELKGKRPLLPPDLPLTEEIADVIGAMRVLAELPIDSFGPYIISMCTAPSDVLAVELLQRECGIRQTLPVVPLF

SEQ ID NO: 2695 - protein, 577 aa, Arabidopsis thaliana
MCGILAVLGCVDNSQAKRSRIIELSRRLRHRGPDWSGLHCYEDCYLAHERLAIVDPTSGDQPLYNEDKTIAVTVNGEIYNHKALRENLKSHQFRTGSDCEVIAHLVKHGEEFVDMLDGMFAFVLLDTRDKSFIAARDAIGITPLYIGWGLDGSVWFASEMKALSDDCEQFMCFPPGHIYSSKQGGLRRWYNPPWFSEVVPSTPYDPLVVRNTFEKAVIKRLMTDVPFGVLLSGGLDSSLVASVALRHLEKSEAACQWGSKLHTFCIGLKGSPDLKAGREVADYLGTRHHELHFTVQDGIDAIEEVIYHVETYDVTTIRASTPMFLMSRKIKSLGVKMVLSGEGSDEIFGGYLYFHKAPNKKEFHEETCRKIKALHQYDCLRANKSTSAWGVEARVPFLDKEFINVAMSIDPEWKMIRPDLGRIEKWVLRNAFDDEKNPYLPKHILYRQKEQFSDGVGYSWIDGLKDHANKHVSETMLMNASFVFPDNTPLTKEAYYYRTIFEKFFPKSAARATVPGGPSVACSTAKAVEWDAAWSQNLDPSGRAALGVHVSAYGEDKTEDSRPEKLQKLAEKTPAIV

SEQ ID NO: 2696 - protein, 398 aa, Eulalia aurea
SVDLVFTAHPTQSARRSLLQKNARIRNCLTQLKAPDITEDDKQELDEALQREIQAAFRTDEIRRAQPTPQDEMRYGMSYIHETVWKGVPKFLRRVDTALKNIGITERLPYDVPLIKFCSWMGGDRDGNPRVTPEVTRDVCLLSRMMAANLYIDQIEDLMFELSMWRCNDELRARAEELLKTPDAKKVTKYYIEFWKQIPPNEPYRVILGAVRDKLYNTRERARHLLATGYSDIPEDAIFTKVEQILEPLELCYKSLIDCGDKVIAEGSLLDVLRQVYTFGLSLVKLDIRQESERHTDVIDAITTHLGIGSYRSWPEEKRVEWLVGELKGKRPLLPPDLPMTEEIADVVGAMHVLAELPSDSFGPYIISMCTAPSDVLAVELLQRECGIKQTLPVVPLF

SEQ ID NO: 2697 - protein, 967 aa, Glycine max
MANRNLEKMASIDAQLRLLVPAKVSEDDKLVEYDALLLDRFLDILQDLHGEDLKETVQEVYELSAEYEGKHDPKKLEELGNLITSLDAGDSIVVAKSFSHMLNLANLAEEVQIAHSRRNKLKKGDFADENNATTESDIEETLKKLVVDMKKSPQEVFDALKNQTVDLVLTAHPTQSVRRSLLQKHGRIRNNLTQLYAKDITPDDKQELDEALQREIQAAFRTDEIRRTPPTPQDEMRAGMSYFHETIWKGVPTFLRRVDTALKNIGINERVPYNAPLIQFSSWMGGDRDGNPRVTPEVTRDVCLLARMMAANLYYSQIEDLMFELSMWRCNDELRVRADELNRSSKKNSVAKHYIEFWKAIPPNEPYRVLLGEVRNRLYQTRERSRHLLAHGYSDIPEEETFTNVEEFLEPLELCYRSLCACGDRAIADGSLLDFLRQVSTFGLSLVRLDIRQESDRHTDVLDAITKHLEIGSYQEWSEEKRQQWLLSELSGKRPLFGPDLPQTEEIRDVLETFHVIAELPLDNFGAYIISMATAPSDVLAVELLQRECHVKHPLRVVPLFEKLADLEAAPAALARLFSVDWYRNRINGKQEVMIGYSDSGKDAGRFSAAWQLYKAQEELIMVAKQYGVKLTMFHGRGGTVGRGGGPTHLAILSQPPETIHGSLRVTVQGEVIEQSFGEQHLCFRTLQRFTAATLEHGMHPPISPKPEWRALMDEMAVIATEEYRSIVFKEPRFVEYFRLATPELEYGRMNIGSRPAKRRPSGGIETLRAIPWIFAWTQTRFHLPVWLGFGAAFKHVIEKDVRNIHVLQEMYNQWPFFRVTIDLVEMVFAKGDPGIAALYDRLLVSEDLWSFGEQLRTMYEETKELLLQVAGHRDLLEGDPYLKQRLRLRDSYITTLNVCQAYTLKRIRDPNYNVKLRPHISKESIEISKPADELITLNPTSEYAPGLEDTLILTMKGIAAGLQNTG

SEQ ID NO: 2698 - protein, 674 aa, Synechococcus sp. CC9605
MCGIGGVFNADRQQTVDRQLLVNMAAIQAHRGPDGFGVEVLDQAGVGFCHARLSIIDLNESRARQPFLTDDGEVLMAHNGEFYDFQRIRADLTAQGVRFSSKSDSEILLRLYQRQGLEATLPLLRGEFAFALFDRSEDCLYLVRDRFGIKPQYWAITPEGLVFGSELKVLFAHPAVERRFTSEGLFHQLMQTMVPGTTAFAGVHQVKPGHVLKVQRVNGHLEVSESTYWDVDFPRKDERDPKRTEADYIAAVRAALLEAVELRMVADVPVGCYLSGGIDSCSILGLASAVSQAPVKAFTIGFDDARYDESPIAREMAEATGAEQDLMRLSGQELYGHMERTIWHAERTIYNTLAVAKFLMSRHVNDVDYKVVMTGEGSDELFGGYPAFRRDMFLHGLDDLPQEERASWESLLQQSNALVKGAMLAENQVDDPDLDAVVGFTPSCLQPWLACAPLVPELLAESHAAALEGYSPGKAIAEQLDADQLDGRHALDKAQYVWIKTMLEGQILTWGGDRVDMANSMEARPAFLDHHLAAVAVQVPPELRIKGKTEKYVLREAMAGLLPEVLYRREKFAFMAPPAHTEPEKWGQMKQLADDYLSDEAIDSAGLLSKAGVLALFERHEDPATTDAERVQMDAVINHLLGVQMLHRMFVAEDVPALARREADRLGWRVLMPV

SEQ ID NO: 2699 - protein, 521 aa, Pseudoalteromonas tunicata D2
MLDAKIKTQLQAHLNNITKPIQLVINLDESKKSIELQSLANELSELNSLVSVSTTQNTAIRAPQLSVLGEQSEINFAGVPMGHEFTSLILALLHTGGHATKASAEEIEQISTLTAPLNFEIYISLSCQTCPAVVQALNLMAAINPAIKTTMIDGALFQNEVQQRNILSVPAVYLNGQPFSHGAISLADILAKLDKNHAGKVAKQLNEKEQYDVLIVGGGPAGAAAAVYAARKGLRTGLVAERFGGQVSDTLGIENFLSVKSTQGPQLVAQLEEHVKEYDVDLITAQKAKQLNTENGFAIELESGAQLQAKSVILATGARWREMNVPGEQQYRGKGVAYCPHCDGPLFKNKKVAVIGGGNSGIEAAIDLANIVEHVTVLEFAQSLRADAVLIKKARSMGNITIITQAQTTEVVGDGNKVIGLNYRDHANNEEHHLALAGIFVQIGLLPNTDWLKGTVELSQRGEIITNSHGATSIAGVFAAGDVTNTPYKQIIIAIGSGATASLGAFDYLIRHDQAQTEFAA

SEQ ID NO: 2700 - protein, 360 aa, Arabidopsis thaliana
MATMITNLRRDLIEEIISRVPLRSMKAVRLTCKSWNNISKSEIFTKMQIDKATTREGKTMMISVMPHNLSLMSVAVDDVDPSVEFKDHTRVVVWNPYSGQTRWVKLRYPHPPSPSKWDWFRYALGYEDKGSCRSVKFLRFLDYLPEEPENQNVCYEIYDFDSDLWTTLDVTSHSWICYSSCGVFLKGNAYWPVVKSSSEANIDHIIYFDFTRESFGPPLPLPFGATDRGYSYVNLSCVKEEKLAAFFQHYISYKYEFEIWVTTKIEAEMVSWSKFLRMDLGPNIDIPITFFIDEEKKVFMGFEHREYPKRFINIIGEAKYLRKLDLQVPQGQYCCPPLCSYVPSSIQIKKPALRQKDRAK

SEQ ID NO: 2701 - protein, 855 aa, Aspergillus nidulans FGSC A4
MAKNKTKTSVLFLANSEHGQTNIVLAIIHELLVRGGIDIHLASFPVLEKRLNKLLHDNETAYDAEYSTRIHFHPVRGPSNTEIFIRTGKRGAFHPPGYTGSVLGFKSLCEDIWGWTEEEYVDIYESCVEIINAIKPSLCAIDFFFLQGRDAAYNAGQTTVLLNTTSLSHIVLGLQKNAKWAWKYPMPGTGFPYPLPPHLIPLNTMAVLKTAKMYHGSGRRREIRDWRIKHKIHGRFPFADSWMPNRLHLSPALKELDWPFDVPDNVVPCGPILLPVAPVKTQDPEMFAWLHRGPTVLINLGTLYAPNPSVVLEIATGVKTFLASCSDRKIQVLWKLPKHPHDQEEIYTQSVTPLQKEMEADQVRIRSWFEVEPLAMLQTGQIVCSVHHGGANSWYEAIQNGVPHVVLPAWQDCYENAARAEWLGIGAYGNKSRAPDIGGKELSKALIKVLGNKSYLEKASKLQKLCQKKEGRLEAADRIADLAARPDKSMIAVPEVDENDPRVVTVTNGKGETLQTVNSVDEGAVNKSILRRLLEIITVAFISNTWFLLPLLGYSLLLVPHNGFRILVLSYILHIKFFSNAHKTSAPKPSKWLRSSLMWKLHASYFPIRLYRSASLSPRRKYVIGAHPHGIACHGIAGAFTADATGFETLFPGIVNRFLVKDGMFTAPLLREYLFARGQSGVSKDSCIQHLTRGGYDLRGMGKAITISVGGSREYNIARPGTMGIVVKLRKGFIRLAVETGADLVPVLVFGENDLFAPIQFSRYSIKGLIAWAWEKAAGHKVAFSLGRFCMFIPFRRPLHVVVGRPISVKQQRFDVSEKYVEELQGQYIDELNRIWADWRNVFEEDASVKFEIVE

SEQ ID NO: 2702 - protein, 212 aa, Candida albicans SC5314
MQAFIEKEAKEKAKEIKLKADEEYEIEKASIVRSETAAIDSTYEQKLKKASLAQQITKSTIGNKTRLRILSTKDEVLHEIFDEAEAELKKITKDKKQYKPVLVGLIEEGVLALMEPKVSIKVREQDVDVAKEAITEAAKNFEEKAKFKVEISIDDKNFLAKDIAGGIVVVNGSGKIEVDNTLEERLKILSEEALPAIRLELFGPSTTRKFFD

SEQ ID NO: 2703 - protein, 972 aa, Triticum aestivum
MALSAPGGGSGKIERLSSIDAQLRLLVPAKVSEDDKLIEYDALLLDRFLDVLQGLHGDDLREMVQECYEVAAEYETKHDLEKLDELGEMITSLDPGDSIVIAKAFSHMLNLANLAEEVQIAYRRRVKLKKGDFADENSAITESDIEETLKRLVFDMKKSPAEVFDALKNQTVDLVLTAHPTQSVRRSLLQKHSRIRNCLVQLYSKDITPDDKQELDEALQREIQAAFRTDEIRRLSPTPQDHMRAGMSDFHETIWKGVPKFLRRVDTALKNIGINERVPYNAPLIQFSSWMGGDRDGNPRVTPEVTRDVCLLARMMAANLYCAQIEDLMFELSMWRCNDELRSRADELHRSSKKDAKHYIEFWKKVPPNEPYRVILGDVRDNLYNTRERSRELLSSGHSDIPEEATLTNLEQLLEPLELCYRSLCACGDRVIADGTLLDFLRQVSTFGLSLVKLDIRQESDRHTDALDAITSYLGIGSYREWSEEHRQEWLLSELNGKRPLFGADLPMTEEVADVMGAFQVIAELPGDNFGAYVISMATSPSDVLAVELLQRECHIKTPLRVVPLFEKLADLEAAPAALARLFSIDWYRERINGKQEVMIGYSDSGKDAGRLSAAWQMYKAQEDLVKVAKQFGVKLTMFHGRGGTVGRGGGPTHLAILSQPPDTINGSLRVTVQGEVIEQSFGEEHLCFRTLQRFTAATLEHGMRPPISPKPEWRALLDEMAVVATEEYRSIVFQEPRFVEYFRLATPETEYGRMNIGSRPSKRKPSGGIESLRAIPWIFAWTQTRFHLPVWLGFGGAFKHILKKDIRNFHMLQEMYNEWPFFRVTIDLVEMVFAKGNPGIAALYDRLLVSEGLQPLGEKLRANYEETQKLLLQVAGHKDLLEGDPYLKQRLRLRDAYITTMNVCQAYTLKRIRDPDYHVALRPHLSKEVMDTSKPAAELVTLNPASEYAPGLEDTLILTMKGIAAGLQNTG

SEQ ID NO: 2704 - protein, 413 aa, Podospora anserina
MGDLQGRKVFKVFNQDFIVDERYTVTKELGQGAYGIVCAAVNNQTNEGVAIKKVTNVFSKKILAKRALREIKLLQHFRGHRNITCLYDMDIPRPDSFNETYLYEELMECDLAAIIRSGQPLTDAHFQSFIYQILCGLKYIHSANVLHRDLKPGNLLVNADCELKICDFGLARGFSVDPEENAGYMTEYVATRWYRAPEIMLSFQNYTKAIDVWSVGCILAELLGGRPFFKGRDYVDQLNQILHILGTPNEETLSRIGSPRAQEYVRNLPFMAKKSFPSLFPNANPDALDLLDRMLAFDPSRRISVEEALEHPYLAIWHDASDEPDCPTTFNFDFEVIDDVNEMRKMILSEVVNFRAQVRTVPGQAGSAGNIQQAPSNVPIPAGGPGQQWTAEDPRPMEYGNQMQGLEAELGGR

SEQ ID NO: 2705 - protein, 776 aa, Arabidopsis thaliana
MAMTPVASSSPVSTCRLFRCNLLPDLLPKPLFLSLPKRNRIASCRFTVRASANATVESPNGVPASTSDTDTETDTTSYGRQFFPLAAVVGQEGIKTALLLGAVDREIGGIAISGRRGTAKTVMARGLHEILPPIEVVVGSISNADPACPDEWEDDLDERIEYNADNTIKTEIVKSPFIQIPLGVTEDRLIGSVDVEESVKRGTTVFQPGLLAEAHRGVLYVDEINLLDEGISNLLLNVLTDGVNIVEREGISFRHPCKPLLIATYNPEEGAVREHLLDRVAINLSADLPMSFEDRVAAVGIATQFQERCNEVFRMVNEETETAKTQIILAREYLKDVKISREQLKYLVLEAVRGGVQGHRAELYAARVAKCLAAIEGREKVTIDDLRKAVELVILPRSSLDETPPEQQNQPPPPPPPPQNSESGEEENEEEQEEEEEVSGCSTHYSLVEHTFKDESNEENENEQQQDQIPEEFIFDAEGGLVDEKLLFFAQQAQKRRGKAGRAKNVIFSEDRGRYIKPMLPKGPVKRLAVDATLRAAAPYQKLRREKDISGTRKVFVEKTDMRAKRMARKAGALVIFVVDASGSMALNRMQNAKGAALKLLAESYTSRDQVSIIPFRGDAAEVLLPPSRSIAMARNRLERLPCGGGSPLAHGLTTAVRVGLNAEKSGDVGRIMIVAITDGRANITLKRSTDPESIAPDAPRPTSKELKDEILEVAGKIYKAGMSLLVIDTENKFVSTGFAKEIARVAQGKYYYLPNASDAVISATTRDALSDLKNS

SEQ ID NO: 2706 - protein, 968 aa, Hydrilla verticillata
MAARNSNHVERMASVDAQLRMLAPSKVSEDDNLVEYDALLLDRFLDILQDLHGEDLRETVQSCYELSAEYESTLNPEKLEELGKMLTSLDPGDSIVVASSFSHMLNLGNLAEEVQIAFRRRIKLKKGDFADENSATTESDIEETLRKMVVQLKKSPQEVFDALKNQTVDLVLTAHPTQSIRRSLLQKHSRIRNCLAQLYAKDVTPDDKQELDEALQREIQAAFRTDEIRRTPPTPQDEMRAGMSYFHETIWKGVPKFLRRVDTALRNIGINERVPYNAPLIQFSSWMGGDRDGNPRVTPEVTRDVCLLARMMAANLYYSQIEDLMFELSMWRCSDELRVRATEIHGSSKSVAKHYIEFWKQIPPHEPYRVVLGEVRDKLYKTRERARQLLANGFSDIPEETTFTNIEQFLEPLELCYRSLCSCGDQPIADGSLLDFLRQVSTFGLSLVKLDIRQESERHTDVMDAITNHLGIGSYRAWSEEKRQEWLLSELRGKRPLFGPDLPKTEEIADVLDAMHVIAELPFDNFGAYIISMATAPSDVLAVELLQRECHVKKPLRVVPLFEKLADLETAPASVARLFSIDWYLNRIDGKQEVMIGYSDSGKDAGRLSAAWQLYKAQEELIQVAKKYGVKLTMFHGRGGTVGRGGGPTHLAILSQPPETINGSIRVTVQGEVIEQSFGEERLCFRTLQRFTAATLEHGMRPPISPKPEWRALMDEMAVVATDEYRSIVFKDPRFVEYFRSATPELEYGRMNIGSRPSKRKPSGGIESLRAIPWIFAWTQTKFHLPVWLGFGSAFKHVIGKDPKNLQMLQEMYNEWPFFRVTIDLVEMVFAKGDPVIAAMYDKLLVSKDLQPFGECLREKYTETKDLLLKVAGHKDLLEGDPYLKQRLQLRDSYITALNACQAYTLKRIRDPGYNVQARPHLSKDMVNNGKSAAELVKLNPGSEYAPGLEDTLILTMKGIAAGMQNTG

SEQ ID NO: 2707 - protein, 497 aa, Kluyveromyces lactis NRRL Y-1140
MAGITGITPEFKNSDLIRKGAFVDGQWLETASETFNVTDPATLEVIATLPDQSIEVIHEAIDSAAEAFRLFKKTTPKTRSTWLRNLYNLMMENVDDLAKIITWENGKALSEAQGEVKYAASYFEWYAEEAVRMYGTTIQPNNGSNRAFTVRQPVGVCGIICPWNFPSAMITRKAGAALAAGCTVVVKPDSQTPLSALALAHLAEKAGFPKGVFNVVLTATRTPEFGLALCESPKVKKISFTGSTNVGKILMKQSASTMKKLSFELGGNAPVIVFDDADLEQAVTQTILSKFRGLGQTCVCANRIYVQRTIIDSFAEKLAKQVNEFVIGHGLDSKTTHGCLINENAIKKVEAHVKDALEKGAKTVVAGGRLPELGPNFYAPTVLSHVPSTAVVNKDETFGPLCALIPFDTMEEVVGYANDTELGLASYVFSKNIDTVYTVAEALETGMVSCNTGLFSECTIPFGGVKESGFGREGSLHGIEDYTVIKTITIGNLPAPL

SEQ ID NO: 2708 - protein, 467 aa, Streptomyces coelicolor A3(2)
MPLDAAPVDPASRGPVSAFEPPSSHGADDDDDHRTNASKELFGLKRRVVITGVGVRAPGGNGTRQFWELLTSGRTATRRISFFDPSPYRSQVAAEADFDPVAEGFGPRELDRMDRASQFAVACAREAFAASGLDPDTLDPARVGVSLGSAVAAATSLEREYLLLSDSGRDWEVDAAWLSRHMFDYLVPSVMPAEVAWAVGAEGPVTMVSTGCTSGLDSVGNAVRAIEEGSADVMFAGAADTPITPIVVACFDAIRATTARNDDPEHASRPFDGTRDGFVLAEGAAMFVLEDYDSALARGARIHAEISGYATRCNAYHMTGLKADGREMAETIRVALDESRTDATDIDYINAHGSGTRQNDRHETAAYKRALGEHARRTPVSSIKSMVGHSLGAIGSLEIAACVLALEHGVVPPTANLRTSDPECDLDYVPLEARERKLRSVLTVGSGFGGFQSAMVLRDAETAGAAA

SEQ ID NO: 2709 - protein, 642 aa, Caulobacter crescentus CB15
MGKRLDTKAGARIEAAAADWFFQNSLDMFVVLRDSRIIRANPAWSQLTGWAAEDTLGREIRDFFHLHDTEVLTAAGHTLKTVGHAHSENRLARKGGGWLWVRTQSTILEGGGQLIVFQDISEDRAREAARLQAERSNELLRNAAGVYVWRFNPRRGVYAFDQDIPTPSAPEGGARTMTVAEMTQSIHPEDSARVWQAFSRTLQTGEHVEIDYRYLDPGADDWIHLHVAWRGVRGSSPDTYDVIGITQNVTELVAARDAALAAAETKSQFLANMSHEIRTPMNGVLGVLHLLKTEKLSDDGRRLLTEALSCGEMLSALLNDIIDFSKIEAGKLELSAEPVCPAELLRGVADMLRAQAETKGLYLRVEASDDLGWVATDPLRLRQALFNLIGNAVKFTLEGGVVARLSGRRIDSPDGARLRLRFEIDDTGVGIGEEAGARLFERFRQGDGSTTRRFGGSGLGLAICRRLAELMGGEVGFESQLGKGSTFWLEVETQACARPDTQETLADGPLFDGLHVLLVEDNATNRLIATRMLEALGARVTTAEDGAQGVAAARQGFDLILMDIQMPVMDGVEATHRIRAFNSPAGAAPILAMTANAMAHQQASYLAAGMDGAIAKPLSPLALTQAIAAALTLDPSRQRKAS

SEQ ID NO: 2710 - protein, 970 aa, Hydrilla verticillata
MASTARNPNHLERMASVDAQLRMLAPSKVSEDDNLVEYDALLLDRFLEILQDLHGEDLRETVQSCYELSAEYESTLDPQKLEELGNMLTSLDPGDSIVVASSFSHMLNLGNLAEEVQIAFRRRIKLKKGDFADENSAATESDIEETLKKLVVQLKKSPQEVFDALKNQTVDLVLTAHPTQSIRRSLLQKHSRIRNSLAQLYAKDVTPDDKQELDEALQREIQAAFRTDEIRRTPPTPQDEMRAGMSYFHETIWKGVPKFLRRVDTALRNIGINERVPYNAPLIQFSSWMGGDRDGNPRVTPEVTRDVCLLARMMAANLYYSQIEDLMFELSMWRCSDELRVRATALHRSSRSVAKHYIEFWKQIPPNEPYRVILGEVRDKLYKTRERARQLLSNGFSDIPEESTFTNIEEFLEPLELCYRSLCSCGDQPIADGSLLDFLRQVSTFGLSIVKLDIRQESDRHTDVLDAITNHLGIGSYRDWSEEKRQEWLLSELRGKRPLFGPDLPKTDEIADVLDTMHVIAELPFDNFGAYIISMATAPSDVLAVELLQRECHVKKPLRVVPLFEKLADLETAPAAVARLFSIDWYLNRINGKQEVMIGYSDSGKDAGRLSAAWQLYKAQEELIKVAKQYGVKLTMFHGRGGTVGRGGGPTHLAILSQPPDTINGSIRVTVQGEVIEQSFGEERLCFRTLQRFTAATLEHGMHPPLSPKPEWRALMDEMAVVATDEYRSIVFKDPRFVEYFRSATPELEYGRMNIGSRPSKRRPSGGIESLRAIPWVFAWTQTKFHLPVWLGFGSAFKHVIDKDPKNLQMLQEMYNEWPFFRVTIDLVEMVFAKGDPGIAAMYDKLLVSKDLLPFGERLREKYTETKNLLLKVAGHKDLLEGDPYLRQRLRLRDSYITTLNACQAYTLKRIRDPGYNVQLRPHLSKEMVDSSKSAAELVKLNPGSEYAPGLEDTLILTMKGIAAGMQNTG

SEQ ID NO: 2711 - protein, 240 aa, Helianthus petiolaris
ANYGGDKQYGRETRHTDEYGNPIHSTGGHQTDEYGNPVRRTDEYGNPVHSTTGGTMGDYGSTGLGQGTGGIGTGGYGTSGHQGLGTGVGHTTGGTGTDYASGGRSTGQTGYQGLGTESEFGGTTGTFQNQPSATPMGGTGLGGGTGAGFGGTGSGTGTGILHRSGSSSSSSSEDDGQGGRRKKKGVMQKIKEKLPGGHSQEGQYQSQTTTTTTAGGAGYGETHEKKGMMEKIKEKLPGHH

SEQ ID NO: 2712 - protein, 246 aa, Helianthus praecox
ANYGGDKQYGRETRQTGDYDNPIHSTGGQYEQDVRQTDEYGNPVRRTDEYANPVHSTTGGTMGDYGSTGLGRGTGGIGTGGYGTTGHQGLGTGVGHTTGGTETDYISGGRSTGQTGYQGLGTESEFGGTTGTFQNQPSATPIGGTGLGGGTGAGFGGTGTGTGTGILHRSGSSSSSSSEDDGQGGRRKKKGVMQKIKEKLPGGHSQEGQYQSQTTTTTTAGGAGYGETHEKKGMMEKIKEKLPGHH

SEQ ID NO: 2713 - protein, 304 aa, Exiguobacterium sibiricum 255-15
MSIWVNESTKVIIQGITGNQGMFHGEQMIDYGTNLVGGVTPGKGGTEVLGVPVFDTVAQAVEKTGANASIIYVPPAFAADAIMEAADANIALIICITEGIPVLDMVKVKRYLDGKPVRLIGPNCPGVITPGVAKLGIMPGYIHTPGHVGIVSRSGTLTYEAVHQLTTAGIGQSTAVGIGGDPVNGTDFIDTLKAFNEDPETKAVIMLGEIGGTAEEEAAEWVKANMTKPVIGFIGGQTAPEGKRMGHAGAIISGGKGTAAEKIKTLRANGIEVAETPAIIGETLIRVIKEAGIYDECVTGSTVN

SEQ ID NO: 2714 - protein, 549 aa, Sulfolobus solfataricus P2
MPSVAEVIIRVLEDNGIQRIYGIPGDSIDPLVDAIRKSKVKYVQVRHEEGAALAASVEAKITGKPSACMGTSGPGSIHLLNGLYDAKMDHAPVIALTGQVESDMIGHDYFQEVNLTKLFDDVAVYNQILINPENAEYIIRRAIREAISKRGVAHINLPVDILRKSSEYKGSKNTEVGKVKYSIDFSRAKELIKESEKPVLLIGGGTRGLGKEINRFAEKIGAPIIYTLNGKGILPDLDPKVMGGIGLLGTKPSIEAMDKADLLIMLGASFPYVNFLNKSAKVIQVDIDNSNIGKRLDVNLSYPIPVAEFLNIDIEEKSDKYYEELKGKKEDWLDSISKQENSLDKPMKPQRVAYIVSQKCKKDAVIVTDTGNVTMWTARHFRASGEQTFIFSAWLGSMGIGVPGSVGASFAVENKRQVISFVGDGGFTMTMMEMITAKKYDLPVKIIVYNNSKLGMIKFEQEVMGYPEWGVDLYNPDFTKIAESIGFKGFRLEEPKEAEEIIEDFLNTKGQALLDAIVDPNERPMPPKLTFKQAGEYVLSIFREKLEGI

SEQ ID NO: 2715 - protein, 236 aa, Helianthus annuus
ANYGGDKQYGRETRHTGDYENPIHSTGGQYEQEVLQTDEYGNPVRRTGQTDEYGNPVRRTDEYGNPVHSTAGGTMGDYGSTGLGQGTGGIGTGGYGTTGHHGLGTGIGHTTGGTGTDYTSGGRSTGQTGYQGLGTESEFRGKTGTGVGGTGTGTGILHRSGSSGSSSSEDDGQGGRRKKKGVMQKIKEKLPGGHRQEEQYQSQTTTTTTGGGAGYGETHEKKGMMEKIKEKLPGHH

SEQ ID NO: 2716 - protein, 398 aa, Heteropogon contortus
SVDLVFTAHPTQSARRSLLQKNARIRNCLTQLSAKDTTPEDKKELDEALAREIQAAFRTDEIRRAQPTPQDEMRYGMSYIHETVWKGVPKFLRRVDTALKDIGINERLPYNVPLIKFCSWMGGDRDGNPRVTPEVTRDVCLLSRMMAANLYIDQVEDLMFELSMWRSNAELRARADELLSTPASKKVTKYYIEFWKQIPPNEPYRVILGAVRDKLYNTRERARHILATGVSEIPEESVFTSIEQIIEPLELCYKSLVDCGDKAIAEGSLLDLLRQVFIFGLSLVKLDIRQESERHTDVIDAITTHLGIGSYRSWPEDKRVEWLVSELKGKRPLLPADLPMTEEIADVIGAMKVIAELPSDSFGPYIISMCTAPSDVLAVELLQRECGIKQTLPVVPLF

SEQ ID NO: 2717 - protein, 438 aa, Oryza sativa (japonica cultivar-group)
MTAESARDPRGPYMSGCHVGRPASPSTGAVDEPCRCGNAHRLRPRLQKPHQKPSPRSRSPLDPAPRRWRRLRRWELVVGLRELYGVRDVFGVAAGYRGFYGPDADHARLDLAAVDDWHKKGGTVLKTTRGGFDLNKIVDGIVARGYTQCLTSNTFYHDYILLKVYAIGGDGTMRGAVAIFNEFKRRGLNISITGIPKTVDNDIGIIDRSFGFQTAVEIAQQAIDAAHVEAVSAVNGIGLVKLMGRSTGHIALHATLSSRDVDCCLIPEVDFYLEGKGGLFEFLYERIKQKGHAVVVVAEGAGQELIPRTDDQKREQDESGNIVFLDVGPWLKSELGKWWKREHPSELFTVKYIDPTYMIRAVPANATDNLYCTLLAHSAIHGIMAGYTGFVPGPINGNYSYIPLEDVAVAKNPVDVNDHKWAWVRSVTNQPDFMKPKY

SEQ ID NO: 2718 - protein, 398 aa, Pogonatherum paniceum
SVDLVFTAHPTQSARRSLLQNNARIRNCLTLLSAKDTTPEDKKELDEALQREIQSAFRTDEIRRAQPTPQDEMRYGMSYIHETVWKGVPKFLRRVDTALKNIGINERLPYDVPLIKFCSWMGGDRDGNPRVTPEVTRDVCLLSRMMAANLYIDQVEDLMFELSMWRSNEELRVRAEELLSTPASKKVTKYYIEFWKQIPPNEPYRVILGAVRDKLYNTRERARHLLATGFSDISEDAIFTNIEEILEPLELCYKSLVDVGDKTIADGSLLDLLRQVFIFGLSLVKLDIRQESERHTDVLDAITTHLGIGSYRSWPEDKRVEWLVSELSGKRPLLPPDLPMTEEIADVIGAMKVIAELPSDSFGPYIISMCTAPSDVFAVELLQRECGIKKTLPVVPLF

SEQ ID NO: 2719 - protein, 579 aa, Arabidopsis thaliana
MCGILAVLGCIDNSQAKRSRIIELSRRLRHRGPDWSGLHCYEDCYLAHERLAIIDPTSGDQPLYNEDKTVAVTVNGEIYNHKILREKLKSHQFRTGSDCEVIAHLYEEHGEEFIDMLDGMFAFVLLDTRDKSFIAARDAIGITPLYIGWGLDGSVWFASEMKALSDDCEQFMSFPPGHIYSSKQGGLRRWYNPPWYNEQVPSTPYDPLVLRNAFEKAVIKRLMTDVPFGVLLSGGLDSSLVAAVALRHLEKSEAARQWGSQLHTFCIGLQGSPDLKAGREVADYLGTRHHEFQFTVQDGIDAIEEVIYHIETYDVTTIRASTPMFLMSRKIKSLGVKMVLSGEGSDEILGGYLYFHKAPNKKEFHEETCRKIKALHQFDCLRANKSTSAWGVEARVPFLDKEFLNVAMSIDPEWKLIKPDLGRIEKWVLRNAFDDEERPYLPKHILYRQKEQFSDGVGYSWIDGLKDHANKHVSDTMLSNASFVFPDNTPLTKEAYYYRTIFEKFFPKQSAARATVPGGPSIACSTAKAVEWDATWSKNLDPSGRAALGVHVAAYEEDKAAAAAKAGSDLVDPLPKNGT

SEQ ID NO: 2720 - protein, 462 aa, Streptococcus suis 89/1591
MSLFRKKQAVGRHSQMRRHLGLVDLIFLGIGSMVGTGIFTVTGLAAAQYAGPALIISIVIAAISVGLTALFYAEFASRIPTNGGAYGYLYSVFGEFPAWIAGWLTIMEFLTAVSSVASGWGAYLKGLLANFGIAMPTALNGTFNPAAGTYVDLLPVLVLIFVVGVVLLNSKAALRFNSALVVLKFSALALFILVGLFFIKPENWSNFSPFGFGAIYGGQAGIMAGASLMFFAFLGFESISLAIDEVKKPEKNVPKGIVLSLSIVTILYIVVTLVLTGMVHYTKLNVADAVAFALREVGLDWAASYISIVAILTLITVCISMTYALSRMVYSISRDGLLPKSLSRLTQTSKVPKNATILVGIFAAICAGIFPLASIASFLNICTLAYLIMLALGIIRLRQVEGLPKDGQFKTPLVPLLPILSIIICLSFMFQYSLDTWLAFGVSVVIGILIYFCYGYRHSEAK

SEQ ID NO: 2721 - protein, 395 aa, Erwinia chrysanthemi
MLDQQTIATIKSTIPLLAETGPALTAHFYQRMFHHNPELKDIFNMSNQRNGDQREALFNAICAYATHIENLPALLPAVERIAQKHASFNIQPEQYQIVGTHLLATLEEMFQPGQAVLDAWGKRYGVLANVFIQRESDIYQQSAGQNGGWHGIRPFRIVAKQPQSSLITSFTLEPVDGGPIAAFRPGQYLAVYIRDKRFEYQEIRQYSLTNEPNGRYYRIAVKRETMGSVSGYLHDVAREGDVIELAAPHGDFYLEVTPETPVALISAGVGQTPMLSMLHSLKNQQHQADIFWLHAAENTEVHAFADEIADVAATLPQLQSYVWYREASSEAARSAHAFHGLMALKDLPTPLPMTNLHCYLCGPVAFMQFAARQLLELGITESQIHYECFGPHKVI

SEQ ID NO: 2722 - protein, 166 aa, Pseudomonas aeruginosa UCBPP-PA14
MRKEYVMSAFHDLTLLGLDGQDLPLSPFKGKVLLVVNVASKCGLTPQYAGLENLYQTYRERGFAVLGVPCNQFAGQEPGSEADIQSFCSLNYGVSFPMSAKVEVNGSARHPLYRLLAGEGAEFPGDITWNFEKFLLGPDGRVLARFSPRTAPDDPALVQAIEKALG

SEQ ID NO: 2723 - protein, 375 aa, Coix lacryma-jobi
RRSLLQKNARIRNCLTQLSAKDITADDKKELDEALQIGIQAAFRTDEIRRAQPTPQDEMRYGMSYIHETVWKGVPKFLRRVDTALKNIGINERLPYNVPLIKFCSWMGGDRDGNPRVTPEVTRDVCLLARMMAANLYIDQVEELMFELSMWRCNEELRCRAEELQSTPASKKVTKYYIEFWKQIPPNEPYRVILGAVRDKLYNTRERARHLVATGYSEIGEESVFTNVDEFLEPLELCYKSLCACGDKAIADGSLLDLLRQVFTFGLSLVKLDIRQESERHTDVIDAITTYLGIGSYRDWPEEQRMEWLVSELQGKRPLLPPDLPQTEEIADVIGAMRVLAELPSDSFGPYIISMCTAPSDVLAVELLQRECGIR

SEQ ID NO: 2724 - protein, 523 aa, Medicago truncatula
MGNCCSGGTEDPEDKGENNQQNNDANGDSSATTPPPWSKPSPQPSKPSKPSAIGPVLGRPMEDVKATYSMGKELGRGQFGVTHLCTHKTTGKQYACKTIAKRKLANKEDIEDVRREVQIMHHLTGQPNIVELIGAFEDKQSVHLVMELCAGGELFDRIIAKGHYTERAAASLLRTIVQIVHTCHSMGVIHRDLKPENFLLLSKDENSPLKATDFGLSVFYKQGDQFKDIVGSAYYIAPDVLKRKYGPEVDIWSVGVMLYILLCGVPPFWAESENGIFNAILRGHVDFSSDPWPSISPSAKDLVRKMLNSDPKQRITAYEVLNHPWIKEDGEAPDTPLDNAVLNRLKQFRAMNQFKKVALKVIASCLSEEEIMGLKQMFKGMDTDNSGTITIEELKQGLAKQGTRLSETEVKQLMEAADADGNGIIDYDEFITATMHMNRLNREEHVYTAFQFFDKDNSGYITIEELEQALHEYNMHDGRDIKEIISEVDADNDGRINYDEFVAMMGKGNPEANTKKRRDSTLY

SEQ ID NO: 2725 - protein, 182 aa, Saccharomyces cerevisiae
MSSRKKNILKVIILGDSGVGKTSLMHRYVNDKYSQQYKATIGADFLTKEVTVDGDKVATMQVWDTAGQERFQSLGVAFYRGADCCVLVYDVTNASSFENIKSWRDEFLVHANVNSPETFPFVILGNKIDAEESKKIVSEKSAQELAKSLGDIPLFLTSAKNAINVDTAFEEIARSALQQNQA

SEQ ID NO: 2726 - protein, 590 aa, Arabidopsis thaliana
MSAPKFGYVLLLIVLINISNNGVDAFHKVFKKLQSKSTSLESVSPLHRTAYHFQPPRHWINDPNAPMLYKGVYHLFYQYNPKGAVWGNIVWAHSVSKDLINWEALEPAIYPSKWFDINGTWSGSATHVPGKGPVILYTGITENQTQIQNYAIPQDLSDPYLKTWIKPDDNPIVKPDNGENGSAFRDPTTAWFNKKDGYWRMLVGSKRKNRGIAYMYKSRDFKKWVKSKRPIHSRKKTGMWECPDFFPVSVTDKKNGLDFSYDGPNAKHVLKVSLDLTRYEYYTLGTYDTKKDRYRPDGYTPDDWDGLRFDYGNYYASKTFFDDKTNRRILWGWANESDTVQDDTVKGWAGIQLIPRTILLDSSGKQLVFWPIEEIESMRGKNVQMTNQKMEMGQRFEVQGITPAQVDVDVTFNVGSLEKAEKFDESFATKPLELCNLKGSNVNGGVGPFGLITLATSDLEEYTPVFFRVFKDAASNKPKVLMCSDAKPSSLKKDTGTDAKERMYKPSFAGFVDVGLLDGKISLRSLIDHSVVESFGAKGKTVITSRVYPTKAVGEKAHLFVFNNGSQPVTVESLNAWNMQKPLKMNQGAK

SEQ ID NO: 2727 - protein, 387 aa, Hyparrhenia rufa
FTAHPTQSARRSLLQKNARIRNCLTQLSAKDTTPEDKKELDEALQREIQAAFRTDEIRRAQPTPQDEMRYGMSYIHETVWKGVPKFLRRVDTALKNIGINERLPYNVPLIKFCSWMGGDRDGNPRVTPEVTRDVCLLSRMMAANLYIDQVEDLMFELSMWRANEELRARADELLSTPASKKVTKYYIEFWKQIPPNEPYRVILGAVRDKLYNTRERARHLLATGFSDISVDSIFTSIEQILEPLELCYKSLVDCGDKTIADGSLLDLLRQVYTFGLSLVKLDIRQESERHTDVIDAITTHLGIGSYRSWPEDKRVEFLVTELKGKRPLLPADLPMTEEIADVIGAMKVIAELPSDSFGPYIISMCTAPSDVLAVELLQRECGIKQTL

SEQ ID NO: 2728 - protein, 648 aa, Aspergillus nidulans FGSC A4
MRWIPSPGGSMLVSRGLLHKIRPSPSAQLPLSVFPSSSFVFGSRCHSGAAVTQKSRMARFPSQQSRPVHATPHVNHNGPIEQNYDTANPAYIRKYLRTYGLTPPRPESYETQKTRCLAQLALKQTPIDKFLYLSTLRKNNVHLFYRLVTDHLRELTPLIYTPVVGEACQRWSEIYQQPEGMYLSWEDRGNLASVIANWPQPNVEITCITDGSRILGLGDLGINGMGIPIGKLALYTTCAGIRPEATLPLTLDLGTSNKALREDPLYLGSRRDKITPDEEREFLDELMAALTERWPGIVIQFEDFKNPFPALERYQDVYTCFNDDIQGTGAVILGGVINAVKRSGVPCKDQRAVFFGAGSAGVGVAKQIVAFFMREGMTEDEARSCFWLVDTKGLVTADRGDKLAEHKVYFARTDNAGQQFKTLEEVVDHVKPSILMGLSTQGGVFTPEILRKMAEWNTNPMIFPLSNPSSKSECDFETAVTNTDGRVLFASGSPFPTMSFTNSAGETKMYYPGQGNNMYVFPGIGLGTILSKAVKVTDSMIYASGEALSKALTAEEIERGLLYPDLTRIRKVSVVVARNVIRAAQEAKVDRETTLRTMDDETLDAWIKSRMYDPHTEVQSLEREVGSILSTLGAPQQFVNGSSDEAKL

SEQ ID NO: 2729 - protein, 383 aa, Themeda quadrivalvis
FTAHPTQSARRSLLQKNARIRNCLTQLSAKDTTPEDKKELDEALQREIQAAFRTDEIRRAQPTPQDEMRYGMSYIHETVWKGVPKFLRRVDTALKNIGVNERLPYNVPLIKFCSWMGGDRDGNPRVTPEVTRDVCLLSRMMAANLYIDQVEDLMFELSMWRSNAELRAKADELLSTPASKKVTKYYIEFWKQIPENEPYRVILGAVRDKLYNTRERARHLLATGFSDISEDSVFTSIEQLLEPLELCYKSLIDCGDKAIADGSLLDLLRQVFIFGLSLVKLDIRQESERHTDVIDAITTHLGIGSYRSWPEDKRVEFLVSELKGKRPLLPPDLPMTEEIADVIGAMKVIAELPSDSFGPYIISMCTAPSDVLAVELLQRECGI

SEQ ID NO: 2730 - protein, 138 aa, Dipterocarpus palembanicus
EKNIPVLLGLLSIWNVSFLGYPARAILPYSQALEKFAPHIQQVSMESNGKGVSIDGVPLPFEAGEIDFGEPGTNGQHSFYQLIHQGRVIPCDFIGSAKSQQPIHLKGEMVSNHDELMSNFFAQPDALAFGKTPEELHK

SEQ ID NO: 2731 - protein, 216 aa, Shigella flexneri 2a str. 301
MRCKGFLFDLDGTLVDSLPAVERAWSNWARRHGLAPEEVLAFIHGKQAITSLRHFMAGKSEADIAAEFTRLEQIEATETEGITALPGAIALLNHLNKAGIPWAIVTSGSMPVARARHKIAGLPAPEVFVTAERVKRGKPEPDAYLLGAQLLGLAPQECVVVEDAPAGVLSGLAAGCHVIAVNAPADTPRLNEVDLVLHSLEQITVTKQPNGDVIIQ

SEQ ID NO: 2732 - protein, 489 aa, Archaeoglobus fulgidus
MQVKILDTTLRDGEQTPGVSLSVEQKVMIAEALDNLGVDIIEAGTAIASEGDFQAIKEISQRGLNAEICSFARIKREDIDAAADAGAESIFMVAPSSDIHINAKFPGKDRDYVIEKSVEAIEYAKERGLIVEFGAEDASRADLDFVIQLFKRAEEAKADRITFADTVGVLSPEKMEEIVRKIKAKVKLPLAIHCHDDFGLATANTIFGIKAGAEEFHGTINGLGERAGNAAIEEVVIALEYLYGIKTKIKKERLYNTSKLVEKLSRVVVPPNKPIVGDNAFTHESGIHTSALFRDAKSYEPISPEVVGRKRVIVLGKHAGRASVEAIMNELGYKATPEQMKEILARIKEIGDKGKRVTDADVRTIIETVLQIKREKKVKLEDLAIFSGKNVMPMASVKLKIDGQERIEAAVGLGPVDAAINAIRRAIKEFADIKLVSYHVDAITGGTDALVDVVVQLKKDNKIVTARGARTDIIMASVEAFIEGINMLF

SEQ ID NO: 2733 - protein, 745 aa, Oryza sativa (japonica cultivar-group)
MAMATTALSASLPRLLPPRRRRFPTPSSSSPSAASTSTSRVVRLRAAAASAPSEVLDSTNGAIPSGKGGGGQQYGREYFPLAAVVGQDAIKTALLLGAIDREIGGIAISGKRGTAKTVMARGLHAMLPPIEVVVGSIANADPNYPEEWEEGLANQVQYDADGNLKTEIIKTPFVQIPLGITEDRLIGSVDVEASVKSGTTVFQPGLLAEAHRGVLYVDEINLLDEGVSNLLLNVLTEGVNIVEREGISFRHPCKPLLIATYNPEEGSVREHLLDRIAINLSADLPMSFDDRVAAVDIATQFQESSKEVFKMVEEETEVAKTQIILAREYLKDVAISTEQLKYLVMEAIRGGCQGHRAELYAARVAKCLAAMEGREKVELVILPRSILSDNPQEQQDQQPPPPPPPPPPQDQDSQEDQDEDEEEDQEDDDEENEQQDQQIPEEFIFDAEGGIVDEKLLFFAQQAQRRRGKAGRAKNLIFSSDRGRYIGSMLPKGPIRRLAVDATLRAAAPYQKLRREKDRDKTRKVFVEKTDMRAKRMARKAGALVIFVVDASGSMALNRMQNAKGAALKLLAESYTSRDQVSIIPFRGDFAEVLLPPSRSIAMARNRLEKLPCGGGSPLAHGLSTAVRVGLNAEKSGDVGRIMIVAITDGRANVSLKKSTDPEATSDAPRPSSQELKDEILEVAGKIYKAGISLLVIDTENKFVSTGFAKEIARVAQGKYYYLPNASDAVISAATKTALSDLKSS

SEQ ID NO: 2734 - protein, 503 aa, Archaeoglobus fulgidus
MSAVMTTIRVFDTTLRDGEQMPGVSLPLEYKIRIAKQLDKLGVDVIEAGFPSATKGEFESVKEISSLSLNAEICGLARIVKEDIDAAINANVDMVHIFVPTSRIQIEHTVKMSKEEIIEKSVECVEYIKSHGVKCMFSAMDATRTEVEYLKQIFKAVENAKVDIVNVPDTVGVATPFKFYELIKQLREHLKVPIDVHCHNDFGLAVANTYAAVMAGANEVQVTVNGIGERAGNADLAQVVMILHAIEGIKTNIKTEHLFETSKLVERLTGVKMPPNHPIVGENAFSHESGIHAHGVLKEYSTFEPGVVTPEMVGHKRRIVIGKHAGRYQIKKILEEAGYHLDDEKLNQIFEKVKEMGDKGKRVTDLDLFAIAEVVIGELKREEKAILVDEVTVLTGNKITPTAVLNAEVFGHRKVTSAIGVGPVDASLKAVTSLVGESIRITEFRMDAITGGSDALAEVYVTVEDDEGHSFTSRGAAQDIVMASIDAVINAVNYLLRMKRRKS

SEQ ID NO: 2735 - protein, 138 aa, Shorea roxburghii
EKNLPVLLGLLSIWNVSFLGYPARAILPYSQALEKFAPHIQQVSMESNGKGVSIDGVPLPFEAGEIDFGEPGTNGQHSFYQLIHQGRVIPCDFIGSAKSQQPIHLKGEVVGNHDELMSNFFAQPDALAFGKTPEELHR

SEQ ID NO: 2736 - protein, 138 aa, Shorea roxburghii
EKNLPVLLGLLSIWNVSFLGYPARAILPYSQALEKFAPHIQQVSMESNGKGVSIDGVPLPFEAGEIDFGEPGTNGQHSFYQLIHQGRVIPCDFIGSAKSQQPIHLKGEVVSNHDELMSNFFAQPDALAFGKTPEELHR

SEQ ID NO: 2737 - protein, 570 aa, Malus x domestica
RTLALEECALWMPTRTGLELQLSYTLRQQNPVGYTVPIHLPVVNQVFSSNCAVKISPNSPVARLRQLAGKHIPGEVVAVRVPLLHLSNFQINDWPELSTKRYALMVLMLPSDSARQWHVHELELVEVVADQVAVALSHAAILEESMRARDLLMEQNIALDLARREAETAIRARNDFLAVMNHEMRTPMHAIIALSSLLQETELTAEQRLMVETILRSSNLLATLINDVLDLSRLEDGSLQLEIATFNLHSVFREVHNMIKPVASIKRLSVTLNIAADLPMYAIGDEKRLMQTILNVVGNAVKFSKEGSISITAFVAKSESLRDFRAPDFFPVQSDNHFYLRVQVKDSGSGINPQDIPKLFTKFAQTQALATRNSGGSGLGLAICKRFVNLMEGHIWIESEGLGKGCTATFIVKLEFPERSNESKLPFAPKLQANHVQTNFPGLKVLVMDDNGVSRSVTKGLLAHLGCDVTAVSLIDELLHVISQEHKVVFMDVSMPGIDGYELAVRIHEKFTKRHERPVLVALTGSIDKTTKENCMRVGVDGVILKPVSVDKMRSVLSELLEHRVLFEAM

SEQ ID NO: 2738 - protein, 154 aa, Brassica napus
  misc_feature (149)..(149): Xaa can be any naturally occurring amino acid
RTRGAASLQLYGVQTPGLALSSKRLEFGTKGICNFSVTPTSSSAIFRTVEHSCRNTPLRVSCEAARVDLIERKQTETRSVSGTGKELTCVMKFGGSSVESAERMKEVANLILSFPDERPVIVLSAMGKTTNKLLKAGEKAVTCGVTNVXSIEEL

SEQ ID NO: 2739 - protein, 634 aa, Ustilago maydis 521
MCGILGCIHHPDAPAYRGKMLNMSRCIRHRGPDWSGCVVTQEEGSKGSILCHERLAIVGISTGAQPLVSTDGKLILAVNGEIYNHRQLRKNLKDQNAEFKTESDCEVILHLYREHGSDFVKMLDGMFSFILLDTTTTPHRVIAARDPIGITTLYQGASYKYPGAIYFSSELKAIHEECDRIRSFPPGHFYDSSLPEGKETVRYYTPSWLDGDAEGATIPTNPTDLKQIREALEKAVRKRLMSEVPYGVLLSGGLDSSLIASIAARETDKMADLQRKQWEERQARRSRGLTTPAGDANGAKLPVGLDEDADNEVENLAAWPRLHSFSIGLPGSPDLIAARKAAQFLGTVHHEYTFTVQEGLDAIADVIFHLETYDVTTVRASTPMYLLSRKIKAMGVKMVLSGEGSDEIFGGYLYFHAAPDKTSFHQECVRRVKNLHTADCLRANKSTMAWGLEARVPFLDKAFLDVAMNTDAADKMFSKGSLQQVDADGRPRMEKYILRKAFDVIPDDIEAGGDGSGSMLSASAPRKPYLPEDILWRQKEQFSDGVGYSWIDGIKDHAEKTVSDEKFQERAKRYPNDTPDTKEAYMIREIFESWFPSEAAASTAVRWIPRADWGCAADPSGRAVNIHESAYSTE

SEQ ID NO: 2740 - protein, 1025 aa, Candida albicans SC5314
MTHRKNYTDTAYTRLKNFVMLFLKKEQLFFFFLFSFFSLSIPPAMLRLRPTIRSLSRNFHRSCINLDAVVVSGTKLANTIRANVAEKVINYNKEHFGDNNKSFENFRFQPSLTILQVGSRPDSSAYVKSKLKAAASSNIKSKLIKLDESISQEDLVEVIERLNKDPKVHGILVQLPLPKHIDESVITNSVATDKDVDGFDHYNVGQLSKRGGTPYFKPCTPNGIMELIKTTGIPLRGKTAVVIGRSDIVGTPVATMLRNEDCTVTVCHRYTQNLPEIVRQADIVVAAVGIAEYVKADWVKDGAIVIDVGINYKDDPTAKRGRRLVGDVDYEEVAKKASFITPVPGGVGPMTVAMLCSNVYDAALIHAKKAHEHGFKPLELNIKDPVPSDIEISRNQKPKKITRVAQELGILDAELEPYGHFKAKVDPKSVIERLDEQAEGSAQDKGNYVLVAGITPTPLGEGKSTTTMGLTQALGAHLGYNAIANVRQPSMGPTFGVKGGAAGGGYAQVIPMDEFNMHLTGDIHAISAAQNLLCAAVDTRMFHESTSKTTSGFYKRLVPIKKGKRSFTPSMLKRLEKLGITKTNPDDLTAEEIEKFAVLNIDPDSITIKRVVDCNDRFVREITIGEGKNEASKYPPRKTGMDITVASELMAILALSNSLKDLRQRVGKLVVGTQRKTGEAITAEDIGCAGAITALLKDAIKPNLMQSLEGTPVFVHAGPFANISIGASSVIADKLALKLTSPSNPINNGETGFVVTEAGFDFTMGGERFFNIKCRASGLKPDAVVLVATSRALKLHGGATDVKPGQPLPAEYVNENLEYLEKGCANLAKQIANIKQYNVPVVVAINQFETDTDAEIKLIQSLALKAGADFAVPSNHWAKGGAGAVELASSVVKAVELAPLEQQKYLYDVNDTVENKLLAITTKMYGASGIELSPLAKKQIETYTKQGYDKLPICIAKTQYSLSHDSSLKGVPTGFTVPIREVRCSAGAGYLYALAAEIMTIPGLPTHAGFMNVEVNDEGEIEGLF

SEQ ID NO: 2741 - protein, 134 aa, Polaromonas sp. JS666
MGNKLYVGNLPYTVRDEDLQQSFGAFGSITSAKVMMERDTGRSKGFGFVEMGSDAEAQAAIAGMNGQSLGGRSITVNEARPMEARPPRTGGFGGGGGYGGGGDRSGGGGYGGGGGGRSGGGGYGGGSGGGRGGY

SEQ ID NO: 2742 - protein, 427 aa, Neorickettsia sennetsu str. Miyayama
MKKVLVPRMGESIAEASVVKIIKNIGESVREDELLFELETDKAAVEVSAPVSGILSKINVEIGQAVKVDDVLGLIDENVVAPGGGNPISSGVGDRNIVPPSVAIAGGVALGASAEKNISSIKSSELIYAKQDAPSARILMEEKFLSPCDIVGTGKDNRIRKVDVLSRLFYGDPEQEKDSESEQRAVAGSSSVSPGFPERVVPMSKLRQRIASRLKESQNTAAILTTFNEVDMGNVIQIRKRYKDSFEKVHGLKLGFMSFFVQAVICGLEAFPEINAEIRGKDIVYKDYYNIGVAVGTKNGLVVPVIKNAQNLSFAEVERQILEYGKKARDGKIEPDDMQGGTFTISNGGIYGSLMSTPIINPPQSGILGMHAIKERPIVIDGAIVVRPMMYLALSYDHRIVDGREAVSFLVRVKECLENPERLLLKV

SEQ ID NO: 2743 - protein, 749 aa, Saccharomyces cerevisiae
MTSKPSTSDGRAHSISHVPGTHMRGTSASHSPRPFRPCADCTCSPGLLSRQGRRASLFLRQLENSRRSSSMLLNELKGAGGGSSAGNGSVYSCDSLCAVNREVNTTDRLLKLRQEMKKHDLCCYIVPSCDEHQSEYVSLRDQRRAFISGFSGSAGVACITRDLLNFNDDHPDGKSILSTDGRYFNQARQELDYNWTLLRQNEDPITWQEWCVREALEMAKGLGNKEGMVLKIGIDPKLITFNDYVSFRKMIDTKYDAKGKVELVPVEENLVDSIWPDFETLPERPCNDLLLLKYEFHGEEFKDKKEKLLKKLNDKASSATTGRNTFIVVALDEICWLLNLRGSDIDYNPVFFSYVAINEDETILFTNNPFNDDISEYFKINGIEVRPYEQIWEHLTKITSQASSAEHEFLIPDSASWQMVRCLNTSTNANGAIAKKMTAQNFAIIHSPIDVLKSIKNDIEIKNAHKAQVKDAVCLVQYFAWLEQQLVGREALIDEYRAAEKLTEIRKTQRNFMGNSFETISSTGSNAAIIHYSPPVENSSMIDPTKIYLCDSGSQFLEGTTDITRTIHLTKPTKEEMDNYTLVLKGGLALERLIFPENTPGFNIDAIARQFLWSRGLDYKHGTGHGIGSFLNVHEGPMGVGFRPHLMNFPLRAGNIISNEPGYYKDGEYGIRIESDMLIKKATEKGNFLKFENMTVVPYCRKLINTKLLNEEEKTQINEYHARVWRTIVHFLQPQSISYKWLKRETSPL

SEQ ID NO: 2744 - protein, 663 aa, Lagenaria siceraria
MAITSLYLTLLHSIHSPFLLLCLFLTYFFICLPYPFFPRSLSFLFYCRYFPPHHSGPFLLCSLFPLSLFFLLLLVSLLTLVSYHTPSPDATNLPENTQSPPPFRLARGVAEGVSAKSNPYFSDSVDSFNWTNAMFSWQRTFFHFQPEGNWMNDPNGPLYHKGWYHLFYQYNPESAVWGNISWGHAVSRDLITLAYISAYAMVPDQPYDVNGVWTGSATILPDGRIIMLYTGDTIDGVQVQNLAYPANLSDPLLLNWVKYPGNPVLVPPPGIGPKDFRDPTTAWLGHDGKWRITIGSRVGTTLGVSLVYTTNDFIKYELVDRFLHAVPGTGMWECVDFYPVSVHGSKGLDTSVNGHGVKHVLKASLDDTKMDHYAIGTYFSNNDTWVPDNPEEDVGIGLKLDYGRYYASKTFYDQNKERRILWGWINETDTEANDLAKGWASVQTIPRTVLFDHKTGSNIIQWPVEEVESLRLGSTEFNDVLVEPGSVVELEVGTATQLDILTEFELEALGSEKATISEEGCGGGAAERSSLGPFGLLVLAHQSLSELTPIYFNVANSSKGSREAYFCADEKRSSKAPDVFKQVYGSKIPVLEGENFSMRVLVDHSIVESFGQGGRRVITSRIYPTEAIYGAAKLFLFNNATSANVKATVKVWRLNSAFIQPFS

SEQ ID NO: 2745 - protein, 345 aa, Pyrococcus abyssi GE5
MLLNIHQESYVEVVKMFSLGGLGKSRVDESKVWDVIIIGAGPAGYTAAIYAARFGLDTIIITKDLGGNMAITDLIENYPGFPEGISGSELAKRMYEHVKKYGVDVIFDEVVRIDPAECAYYEGPCQFEVKTANGKEYKGKTIIIAVGAEPRKLHVPGEKEFTGRGVSYCATCDGPLFVGKEVIVVGGGNTALQEALYLHSIGVKVTLVHRRDKFRADKILQDRLKQAGIPTILNTVVTEIRGTNKVESVVLKNVKTGETFEKKVDGVFIFIGYEPKTDFVKHLGITDEYGYIKVDMYMRTKVPGIFAAGDITNVFKQIAVAVGQGAIAANSAKEFIESWNGKSIE

SEQ ID NO: 2746 - protein, 396 aa, Caulobacter crescentus CB15
MAKEKFERTKPHCNIGTIGHVDHGKTTLTAAITMTLAKSGGATAKKYDEIDAAPEEKARGITINTAHVEYETANRHYAHVDCPGHADYVKNMITGAAQMDGAILVVSAADGPMPQTREHILLARQVGVPALVVFMNKVDMVDDEELLELVEMEVRELLSSYQFPGDDIPITKGSALAAVEGRDPQIGEEKILELMASVDAYIPQPERPVDMPFLMPVEDVFSISGRGTVVTGRVERGIVKVGEEVEIVGIRPVQKTTCTGVEMFRKLLDQGQAGDNVGVLLRGTKREDVERGQVLCKPGSITPHTKFVAEAYILTKEEGGRHTPFFTNYRPQFYFRTTDVTGIIKLREGVEMIMPGDNAELDVELITPIAMEEKLRFAIREGGRTVGAGVVAKIVE

SEQ ID NO: 2747 - protein, 280 aa, Bradyrhizobium japonicum USDA 110
MSTTQSSGHKRARRRSMRSDYETIATERRDNHVLLVTLNRPEASNAMNTQMGLDLMELFEGLSVDLEQLRAVVLTGSGTKAFCAGGDLKQRNGMTDEAWQAQHLVFERMLRAIIGCPIPVVAAVNGAAYGGGCEIAAAVDFVYASRNARFALTEVTLGIMPGAGGTQNLPRAVGERRAKELILSGLPFTAEEAERWGLVNRVLEQDQLLDATLAIADRIAGNGPLSVRQAKQSIHRGLQMSLADGLAFEIEAYNRLVPTADRREGVLAFNERRKPTFQGK

SEQ ID NO: 2748 - protein, 632 aa, Taraxacum officinale
MASSTTAATPLILHNDSTPRRRLSLAKLLSGIPVAVLVIFALVTVILNQSQHTSATGNIDFHGGDKPSSDTTFTEMVPEELKQVLIKLESNAGVEWERSAYHFQPDKNFISDPDGPMYHMGWYHLFYQYNPESAIWGNITWGHSISRDMINWFHLPFAMVPDHWYDIEGVMTGSATMLPDGQIIMLYTGNAYDLAQLQCLAYAVNSSDPLLLEWKKYEGNPILFPPPGVGYKDFRDPSTLWRGPDGDWIMIMGSKHNQTIGCALVYRTSNFTHFELSEEPLHAVPHTGMWECVDLYPVSTTHTNGLDMMDNGPNVKYILKQSGDEDRHDWYAIGSFDPINDKWYPDDPENDVGIGLRYDYGKFYASKTFYDQHKSRRVLWGYVGETDPPKDDLLKGWANMLNIPRTIVLDTVTGTNLIQWPIDEVENLRSKKYDEFKDVELRPGSIIPLEIGSATQLDIMATFEIDEKMLESTLEADVLFNCTTSEGSVGRGVLGPFGIVVLADAKRSEQLPVYFYIAKNTDGSSKTYFCADESRSSMDKSVGKWVYGDSVPVLEGEKHNMRLLVDHSIVEGFAQGGRTVVTSRVYPTKAIYGAAKLFLFNNATGISVKASLKIWKMAEAQLDPFPLSGWSS

SEQ ID NO: 2749 - protein, 106 aa, Eulalia aurea
VETQQLLLQIAGHKEILEGDLYLKQGLRLRNPYITTLNVFQAYTLKRIRDPSFKVTPQPPLSKEFADENKPAGLVKLNPASEYPPGLEDTLILTMKGIAAGMQNTG

SEQ ID NO: 2750 - protein, 130 aa, Brassica napus
  misc_feature (9)..(9): Xaa can be any naturally occurring amino acid
MTSVWKTKXLPGLNKIFDKDGKKAAAAEFLKSFNKEEIDKEIGDKKTELEPKLVETIEASPPEIKGLIKDKKTSKIKKNSVAVTKFLDDLAKIDFPGAKLVSDAVAKSGTTPLSPAIVFILDKVAPFVPA

SEQ ID NO: 2751 - protein, 150 aa, Bradyrhizobium sp. BTAi1
MRYLHTMLRVRNLDAALKFYSDALGLKEVRRIDNDKGRFTLVFLCAPEDEHLLKSLPPTRGAPLVELTYNWDEESYGEDRFFGHLAYEVDDIYATCDRLMKLGITINRPPRDGNMAFVRSPDLHSIELLQKGEPKAPAEPWLSMPNTGHW

SEQ ID NO: 2752 - protein, 106 aa, Vetiveria zizanioides
VETLQLLLQIAGHKDILEGDPYLKQGLRLRNPYITTLNVFQAYTLKRIRDPSFKVTPQPPLSKEFADEKEPAGLVKLNPASEYPPGLEDTLILTMKGIAAGMQNTG

SEQ ID NO: 2753 - protein, 343 aa, Oryza sativa (indica cultivar-group)
MASPCSPPPPCHSRGGGLSDFSGLRSSSSLPLRRDATSDNFMNPVSFRTHAVGTNGGARRAPTEAKLKVAINGFGRFGRNFLRCWHGRGDDSPLNIIPINDTGGVKQASHRLKYNSTLGIFDADVKPVGENPLSVEGEVIKVVSDRNPSNLPWGELGIELLIEGTGLFFNANGAGKHIQAGAKKVLITAPGKGDIPTYVVGVNADQYSPDEPIISNASCTTNCLAPFVKILDQKFGIIKGTMTTTHSYTGDQRVFDGSHRDLRRARAAALNIVPTSTGAAKAVALVLPNLKGKLNGIALRVPTPNVSVVDLVVQVSKKTLAEEVNQAFRDSAANELKASSRER

SEQ ID NO: 2754 - protein, 396 aa, Paspalidium geminatum
TVELVFTAHPTQSIRRSLLQKHARIRNCLTQLYAKDISEDDKKELDEALQREIQACFRTDEIRRAQPTPQDEMRYGMSYFHETIWKGVPKFLRRVDTALKNIGIDERLPYNVPLIKFSSWMGGDRDGNPRVTPEVTRDVCLLARMMAANMYFSQIEELMFELSMWRCNDELRARAGELYASSQKISKHYIEFWRQIPANEPYRVVLGYVRDKLYNTRERSRHLLTSGFSDIPEDSAFTSVEQFLEPLELCYKSLCDSGDKTIADGSLLDFMRQVSTFGLSLVKLDIRQESERHTDVIDAITTHLGIGSYREWSEEKRQEWLISELKGKRPLLSPDMPQTEEIADVLGCFQVLAELPRGSFGPYIISMATAPSDVFAVELLQRECHVKQPLPVVPLF

SEQ ID NO: 2755 - protein, 313 aa, Corynebacterium efficiens YS-314
MSEEQSKIHDVAIIGSGPAGYTAAIYAARADLKPIMFEGYEYGGSLMTTTDVENFPGFQDGIMGPELMENMRAQAERFGTDLRMELVDRVDLTGDIKKIWVGDDEYQARAVILSMGSAPRYLGIPGEKELLGRGVSACATCDGFFFRDQDIAVIGGGDSAMEEATFLTKFARSVTIVHRREEFRASAIMLERAQKNEKIRFVTNKTVEEVIENDGKVAGLKLKDTVTGELSDLDVTAMFVAIGHDPRSEMLVGQVELDSSNYVVAEHPSTRTNVPGVFAAGDLVDSHYQQAITAAGSGCRAAIDAENYLANQI

SEQ ID NO: 2756 - protein, 107 aa, Corynebacterium efficiens YS-314
MSNVIAVTEQTFKSTVVESDKPVLVDFWAEWCGPCKKLSPIIEEIAGEYGDKIVVASVDVDAERTLGAMFQIMSIPSVLIFKGGQKVDEFVGLRPKTEIVAKLEQHL

SEQ ID NO: 2757 - protein, 521 aa, Escherichia coli K12
MLDTNMKTQLKAYLEKLTKPVELIATLDDSAKSAEIKELLAEIAELSDKVTFKEDNSLPVRKPSFLITNPGSNQGPRFAGSPLGHEFTSLVLALLWTGGHPSKEAQSLLEQIRHIDGDFEFETYYSLSCHNCPDVVQALNLMSVLNPRIKHTAIDGGTFQNEITDRNVMGVPAVFVNGKEFGQGRMTLTEIVAKIDTGAEKRAAEELNKRDAYDVLIVGSGPAGAAAAIYSARKGIRTGLMGERFGGQILDTVDIENYISVPKTEGQKLAGALKVHVDEYDVDVIDSQSASKLIPAAVEGGLHQIETASGAVLKARSIIVATGAKWRNMNVPGEDQYRTKGVTYCPHCDGPLFKGKRVAVIGGGNSGVEAAIDLAGIVEHVTLLEFAPEMKADQVLQDKLRSLKNVDIILNAQTTEVKGDGSKVVGLEYRDRVSGDIHNIELAGIFVQIGLLPNTNWLEGAVERNRMGEIIIDAKCETNVKGVFAAGDCTTVPYKQIIIATGEGAKASLSAFDYLIRTKTA

SEQ ID NO: 2758 - protein, 396 aa, Melinis repens
TVDLVLTAHPTQSLRRSLLKKHTKIRNCLTQLYAKDISEDDKKELDEALQREIQAAFRTDEIRRAQPTPQDEMRYGMNYIHETIWKGVPNFLRRVDTALKKIGIDERLPYDVPLIKFSSWMGGDRDGNLRVTPEVTRDVCLLARMMAANLYISQIEELMFELSMWRCNDELRAKAEELHDASKKVVKYYTEFWKEIPINEPYRVVLASVRNKLHNTRERSRDLLANGFSEIPESAAFTNVKEFLEPLELCYKSLCDSGDKTIADGSLLDFMRQVATFGLSLTKLDIRQESDRHTEVIDTITTHLGIGSYRSWPEEKRVEWLVSELQGKRPLLSPDLPQSEEVADALGTFRALAELPRDSFGPYIISMATAPSDVLAAELLQRECKIADPLPVVPLF

SEQ ID NO: 2759 - protein, 393 aa, Kluyveromyces lactis NRRL Y-1140
MSVNSNPYAPSPNDLLSNVCNFQLIESTLREGEQFASAFFSTEKKIEIAKALDDFGVDYIELTSPVASEQSRSDCEAICKLGLKAKILTHIRCHMDDARVAVETGVDGVDVVIGTSKFLREYSHGKDMNYIAKSAIEVIEFVKSKGLEIRFSSEDSFRSDIVDLLNIYKTVDKIGVNRVGIADTVGCANPRQVYELVRTLKSVVSCDIECHFHDDTGCAIGNSYSALEAGARLIDVSVLGIGERNGITSLGGLMARMIVSAPEYVKSKYKLHKLRDLENLVADAVSVNVPFNNPITGFCAFTHKAGIHAKAILANPSTYEILNPEDFGMKRYIHFANRLTGWNAIKSRVEQLNLHLSDDQIKEVTSKIKQIGDVRQLSIEDVDTIIKDYHSEL

SEQ ID NO: 2760 - protein, 396 aa, Panicum maximum
TVDLVLTAHPTQSLRRSLLKKHTRIRNCLTQLYAKDITEDDKKELEEALQREIQAAFRTDEIRRAQPAPQDEMRYGMNYIHETIWKGVPKFLRRVDTALKNIGIDERLPYDAPLIKFSSWMGGDRDGNPRVTPEVTRDVCLLARMMAANLYISQIEELMFELSMWRCNDELRARADELDGASRKVVKHYTEFWRQIPTNEPYRVVLADVRDKLYNTRERMRHLLATGFSEIPEDATVTDVAKFLEPLELCYKSLCDSGDKTIADGSLLDLMRQVSTFGLSLTKLDIRQESDRHTEVIDTITTHLGIGSYRSWPEEKRQEWLLSELQGKRPLLSPDLPQSEEVADALGTFRVLAELPRDSFGPYIISMATAPSDVLAVELLQRECKVADPLPVVPLF

SEQ ID NO: 2761 - protein, 460 aa, Synechococcus sp. CC9605
MGKAGTDHIENLVIVGSGPAGYTAAIYAARANLQPLLVTGFQRGGIPGGQLMTTTHVENFPGFPDGVLGPDLMDLMKSQAVRWGTHLLEADADSIDLSSKPYRVEVEGQIVRTHALVIATGASANRLQLPSEQTFWSKGISACAICDGATPQFRNEELAVVGGGDSACEEAVYLTKYGSHVHLVVRSDKLRASAAMADRVLANDLITVHWNSEIDDVSGDDWMQSMTLRNRIEGSSSTIAVKGLFYAIGHTPNTDLLQGQIDLNEKGYLTTQPGRPETSMEGVFAAGDVADAEWRQGITAAGNGCKAALAAERWLSHHNLATRVQREQVEPAVAERPVNVDVTTEATYDPQGLWQKGSFALRKLYHDSAKPLLVIYTSPTCGPCHVLKPQLQRVIQELGGSAQAVVIDIEADQEIAEQAGVNGTPTVQLFHNKAMVKQWRGVKQRSEFKAAIEGCLQAAA

SEQ ID NO: 2762 - protein, 138 aa, Shorea bracteolata
EKNIPVLLGLLSIWNVSFLGYPARAILPYSQALEKFAPHIQQVSMESNGKGVSIDGVPLPFEAGEIDFGEPGTNGQHSFYQLIHQGRVISCDFIGSAKSQQPIHLKGEVVSNHDELMSNFFAQPDALAFGKTPEELHK

SEQ ID NO: 2763 - protein, 307 aa, Aspergillus oryzae
MPGLAFNPDNDIPDLSGKVIFITGGTAGLGAQSVAQMAKHSPARIYISGRNATSAEKIIKEIAETGSNTPVSFVECDLTSLDSVKRAADEIIAKESRLDVLMCNAGIMALPPGLTKDGYEVQFGTNHLGHALLIQKLLPLLQRTAERGADVRVIILTSKGYQLHPYGGIIFDDLKTTQDYGFLGSWRRYGQSKLANILYTRELARRYPAITVVSVHPGVITTGLVENLGWAHRWFIYATTYNQMVTLEEGAYNQLWAATTSKDGLETGQYYIPVGVASNDKLTKTGRDDVLAGQLWEWTDKALEDYL

SEQ ID NO: 2764 - protein, 438 aa, Methanococcus maripaludis S2
MNGELSFKYDNVMEENLGNLGISNGKLESFNNESSKIIEILKEKELNGEFGFLDVLNDNLDKYYELNEYSKNFENILIIGIGGSNLGLRAAETGILGSFTSRYEIPRIYYMDNSDPEKTHDILSNIDLEKTLVFVISKSGNTVETLANFFIVRNLMKKKNIDLEKHVVSITSGGELEKITKKENYIHFEVPENVGGRFSVLSSVGIAPLSCTSVDIKKLIDGAKSIEKSCKCEDIFKNPALMNAVIHKLMYNRGKTVSVMMPYIERLRSFGMWYGQLWAESLGKNGFGQTPVIAVGATSQHSQLQLYMDGPNDKIATFLKVNKYRNDLKIEYEYDHHLSGHNLSEVITSELVGTENSMKHNNIPNVKITLSKLNEITMGKLFLMYEMQTAISGELYGINAFDQPAVEYGKKIAHECLTGSKVDSENKYINGKYIITSK

SEQ ID NO: 2765 - protein, 535 aa, Debaryomyces hansenii CBS767
MVNSPTLSALSYNSVLDFKKVNKASNWIIQKFGGTSVGKFPENIVDDIAKVFSQQNRVAVVCSARSSNTKSEGTTSRLIKSADLALEDGDFHALLKVIEEDHVENAKSRISDTKIQEELIENTMKELERANELLKACQVIGEISARTLDSIMSVGEKLSCLFMAALMNDRGLKATYVDLSDIIPLDYDFTSGFDEKFYKFLSSELGKKVLSLDSDVVPVLTGYFGVVPGGLLNGVGRGYTDLCAALIAVGTQAEELQIWKEVDGIFTADPRKVPNARLLDSVTPEEAAELTYYGSEVIHPFTMEQVIKAKIPIRIKNVKNPWGSGTIIFPDNLGRRGEETPPHPPAAYETLSSSYIATHKKKSATAITAKQDIVVINVHSNKKTLSHGFLAHIFTTLDNFKLVVDLISTSEVHVSMALQIQPDQELHLKNALKELRKMGTVDVTREMTIVSLVGKQMVNFIGIAGNMFKVLADERINIEMISQGANEINISAVIDAKDTLRALQSIHAKLLEGSYDLLGKTESAVDTRLEGLKLQ

SEQ ID NO: 2766 - protein, 622 aa, Oryza sativa
MGSVAMDSDYGVPRELSALQKARALYRPDLPPCLQGTTVKVEYGDAAIAADVAGAHVISHAFPHTYGQPLAHFLRKTAAVPDATVITEHPVVRVGVVFSGRQSPGGHNVIWGLHDAIKAHNANSKLIGFLGGTDGLFAQKTLEISDEVLSSYKNQGGYDLLGRTRDQIRTTEQVNAAMTACQALKLDALVIIGGVTSNTDAAQLAETFAESKCSTKVVGVPVTLNGDLKNQFVETTVGFDTICKVNSQLISNVCTDALSAEKYYYFVRLMGRKASHVALECALQSHPNMVILGEEVAASKLTIFDITKQICDAVQARAEKDKNHGVVLIPEGLVESIPELYALLQEIHGLHDKGVSVENISSHLSPWASALFEFLPPFIRKQLLLHPESDDSAQLSQIETEKLLAQLVEAEMNKRLKEGTYKGKKFNAICHFFGYQARGALPSKFDCDYAYVLGHVCYHILAAGLNGYMATVTNLRSPVNKWKCGAAPITSMMTVKRWSRGPAASQIGKPAVHMASIDLKGKPYELLRQNSSSFLMEDIYRNPGPLQFEGPGGETKPISLCVEDRDYMGRIKQLQEYLEKVKSIVKPGCSQDVLKAALSAMASVTEMLTIMSSPSFSGQATI

SEQ ID NO: 2767 - protein, 430 aa, Neorickettsia sennetsu str. Miyayama
MAVKQKQVFVNDRPHLNIGTIGHVDHGKTTLTAAITKFCSEEGGGYEADFRAYDNIDKAPEERQRGITISTAHVEYKTPERHYAHVDCPGHADYIKNMITGAAQMDGAILVVAGTDGAMQQTKEHILLAKQVGVGSIVVYINKCDSSELDEELLELVESDIKDLLISHGFDLPEDEEDGSNPAIIRGSALLALNGEESELGKGSIRKLLAACDKYIALPERAVDGDFLMSIEDVFSISGRGTVVTGKIERGCIKVGDGVEIVGIRDTQKTTCTGVEMFNKLVEQGEAGFNVGILLRGSKREDVCRGQVLCKPGSITPHRKLRARIVTLTKEEGGRRTGFVSGYKPQFYFRTTDVTGTAYLPVDGAEIVMPGDDLEIFVELLNPIAMEKGSRFAIREGGVTVGAGQVLEIMDSKTDAEIAKMFKIVRAVKN

SEQ ID NO: 2768 - protein, 255 aa, Zea mays
MISPDAARNVVGIIGNVISFGLFLSPVLTFWRIYKAKDVEEFKPDPYLATLLNCMLWVFYGIPVVHPNSILVVTINGIGLVIEAVYLTIFFLYSDSQKRKKAFAILAVEILFMVAVVLGVILGAHTHEKRSMIVGILCVIFGSMMYASPLTIMSRVIKTKSVEYMPFLLSLVSFLNGCCWTAYALIRFDLYVTIPNALGAFFGLIGHRRVPGRLPPRHRLRQRQADAVRQLHRLQAPRQRVETVARSTHGHASAC

SEQ ID NO: 2769 - protein, 223 aa, Ralstonia eutropha JMP134
MPSLSHESDSITLAADADERPLALRIAQALDAMREGRPVVLLDDDDRENEADLILAAECLTPSNMAMMIRECSGIVCLCLTTDKVRQLGLRPMVENNRSQYGTAFTVSIEAREGVTTGVSAVDRITTIRAAIAKDAGTDAVVSPGHVFPLVAVDGGVLVRRGHTEGSVELARMAGLSPAAVLCELMNPDGTMARRPEALSFAEMYRLPILTIADLVAWREIHG

SEQ ID NO: 2770 - protein, 212 aa, Catharanthus roseus
ELLELVEMELRELLSFYKFPGDEIPIIRGSALSALQGTNEEIGRKAIPKLMDAVDEYIPDPVRQLDKPFLMPIEDVFSIQGRGTVATGRVEQGMVKVGDDVEILGLMQGNLKSTVTGVEMFKKILDHGQAGDNVGLLLRGLRREDIQRGQVIAKPGTVKTYKRFEAEIYVLTKDEGGRHTAFFSNYRPQFYMRTADITGKVELPENVKMVMP

SEQ ID NO: 2771 - protein, 106 aa, Glycine max
  misc_feature (23)..(23): Xaa can be any naturally occurring amino acid
LPRVDAAISGDAVVGSLGSCCVXVRQGGIGPPSCCRGVRNLRGMAQISPDRQQACKCVRSFTKSVGGLSRNLASGLPGKCGVSLPYRISISMNCGNVKLSGTHISS

SEQ ID NO: 2772 - protein, 399 aa, Yersinia pestis biovar Medievalis str. 91001
MGIVSSIGNNQQEVLASLQEGRSGITFAQEFKDAGMRSHVWGDVKLQSEPKDLIDRKVLRFMSDASIYAYLAMQEAIADSGLSDSQVSNFRSGLVVGSGGGSPRNQVAGSDAMRTPRGLKGVGPYMVTKAMASGVSACLATPFKIKGVNYSISSACATSAHCIGHALELIQLGKQDIVFAGGGEELCWEMACEFDAMGALSTKYNDTPAKASRTYDQDRDGFVIAGGGGMVVVEELEHALARGAHIYAEIVGYGATSDGADMVAPSGEGAVRCMQMAMAGVDTPIDYMNVHGTSTPVGDVKELGAIREVFGNNTPAISSTKAMTGHSLGAAGVHEAIFSLLMVEHGFIAPSINIDNLDEQAQGMNIITETTQRELTTVMSNSFGFGGTNATLVMRKYQK

SEQ ID NO: 2773 - protein, 497 aa, Rubrivivax gelatinosus PM1
MDKASGKTLDAALVWCRRDLRAHDHAALYHALRAARRVWVAFVFDTEILDPLPRTDRRVEFIRDSLVDLDAQLHTLGRSHGTEGVGLIVRHGRARDEIPRLAAALHVQAVYANTDYEPAAVARDAQVRGALAQTGIAFHPAKDQVVFDTDEVLTGAGTPYGVFTPYKNAWLKKLEPFYLQAYPVGRHAGALAPRPAGEAAGVPTLAAIGFEPTNLAALKLAPGTAGGRALLEDFGDERIDRYDQTRDFPAVKGPSYLSVHLRFGTLSIRELARLAWDRARAGSRGAEVWLSELIWRDFYHQVLHHHPQVVERSFKPEYDKIKWEHGKHADALFAAWCEGRTGYPLVDAAMLQINQTGYMHNRLRMVVASFLCKDLGLDWRRGERYFAEKLNDYDLAANNGGWQWASSSGCDAQPYFRIFNPVSQSQKFDAQGKFIRRYLPQLAALPDAALHAPWDAKPLDLVAAGLVLGRDYPEPIVRHELARERTLARYAVVKGAR

SEQ ID NO: 2774 - protein, 219 aa, Sulfolobus solfataricus P2
MDFLSLRKDLESGIPILIYDFDGREEETDMVFYAGAISWKSIYTLRKEAGGLICYATAINEAKTLGLNFIAEELKQHETYSKLVKKPSYGDYPAFSVWVNHVNTKTGISDYDRYITISELHKIILKTKTNPEEARREFYENFMTPGHVPILIARDIRERRGHTELSITLLQKLGLERSAVIAEILDEKSSMNKDKAKMIAKNFGLHFIEGKDIFKEVII

SEQ ID NO: 2775 - protein, 149 aa, Blastopirellula marina DSM 3645
MGKKLYVGNLPYGYGSSELENLFGQYGQVASASVINDRETGRSRGFGFVEMASDGDALAATEALNGFDVDGRKLVVNEARERERSGGGGGGGGYGGGGGGGRSGGGGYGGGGGGRSGGGGYGGGGGGGGGGGRGGDRGGRGGDRGGDRW

SEQ ID NO: 2776 - protein, 290 aa, Xylella fastidiosa 9a5c
MSVLVNKNTKVIVQGFTGQQGTFHATQMVEYGTQVVGGVTPGKGGNTHIDLPVFNTVREAVQNTGADASVIYVPPPFAADAILEAAAAGIKVIVAITEGIPVLDMLRVKNVLKASPEITLIGPNCPGVITPGECKIGIMPGHIHKPGHIGIVSRSGTLTYEAVKQTTDVGLGQSTCIGIGGDPINGLNFVDALKLFNNDPQTKGIIMVGEIGGDAEEAGAEYIKHHVKKPVVGFIAGASAPKGKRMGHAGAIASGGSGTAEGKFAAMEKAGIKTVRSPGDLGAAIASLVK

SEQ ID NO: 2777 - protein, 487 aa, Brucella suis 1330
MKAQPKASHFIGGAFVEDKAGKPLPVIYPATDEEIASLYSATPGIIEAAYAAALKAQGEWAALKPVERGRILRRTAEILREKNRKLSKLETLDTGKALQETLVADAASAADALEFFGGIISGFNGEFVELGGSFAYTRREALGICVGIGAWNYPIQIAAWKSAPALAMGNAFIFKPSENTPLSALALAEAYKEAGLPDGLFNVVQGYGDVGAALVNHRLTAKVSLTGSVPTGRRIMAQAGEQLKHVTMELGGKSPLIVFDDADLESAIGGAMLGNFYSTGQVCSNGTRVFVHKNIRERFIERLVERTRKIRIGDPFDEATQMGPLISAAQRDKVLSYIKKGKAEGATLACGGGVPKLQGFDKGFFIEPTVFADVTDTMTIAREEIFGPVMSVLEFSDEDEVIARANDSEFGLAAGVFTADLSRGHHVIGQIKAGTCWINAYNLTPVEVPFGGYKQSGIGRENGIAALAHYSQIKTVYVEMGKVDSPY

SEQ ID NO: 2778 - protein, 933 aa, Yersinia pestis KIM
MTKYSLRARMMILILAPTLLLGLLLSTSFMVNRYNELQNQIVSAGTNIIEPLAVASEYGMSFRNRDTVRQLINLLHRRHSNIVRSISVFDVDNKLFVTSNYNYNSSQLRLPPGEPVPDSLMLSYRGDSLILRMPIVSESNLSSEQASGQGESDQILGYIAIDLDLQSVRLKQYKEIFISTLLLLFCMCVAILFAYRLMRDVTGPIRNMVNTVDRIRRGQLDSRVEGHMLGELDILKNGINSMAMSLAAYHEEMQQNIDQATSDLRETLEQMEIQNVELGLAKKRAQEASRIKSEFLANMSHELRTPLNGVIGFTRQTLKTSLTPTQTDYLQTIQRSANNLLCIINDVLDFSKLEADKLILEHIPFSLRETLDEVIILLAHTAHEKGLELTLHINNDVPDQVLGDAMRLQQIVTNLLGNAIKFTEEGNIDILVVVKAIASQQVTLMVEIHDTGIGISESQQAQLFQAFRQADASTSRRHGGTGLGLVITERLVKEMGGNISFQSQMSCGSIFRFHLTLELNESIPYRQPDMAHLEGKQLAYIERNSTAARATINILNTTPLQVTHRQSLAQLPEQHYDFLLVGVPIPFRNNMAIHQDKLLTALKIADHVILALPSQSQVEAEQLKQIGAKDCLLKPISSIRLIPLLLAEDTHSKVPSEEQPRKQPKLPFRVMAVDDNPANLKLIGTLLEEQIEETVLCDSGAMAITYAREHTLDIILMDIQMPEIDGIRASEIIHQIPHHQETPIIAVTAHAVKGQQEQLLRLGMADYLAKPIDEARLLQVLSRYQSDNPPLSTASTASTASTASTASTAESLPLPVPKGAGVIDWAQAVRQAANKEDLARDLLTMLLEFMPQITARVQAILAGADDGDILNLVHKFHGSCACSGVPRLRQLCMTIELQLRQQVNLQDLEPEWLELLDEIENVSEAAKTYLRTE

SEQ ID NO: 2779 - protein, 316 aa, Pseudomonas aeruginosa UCBPP-PA14
MPDTLRHARVIILGSGPAGYSAAVYAARANLKPLLITGMQAGGQLTTTTEVDNWPGDPHGLTGPALMQRMQEHAERFETEIVFDHIHAVDLAGKPFTLRGDNGTYTCDALIVATGASARYLGLPSEQAFMGKGVSACATCDGFFYRNREVAVIGGGNTAVEEALYLANIASRVTLVHRRETFRAEKILQDKLQARVAEGKIVLKLNAEVDEVLGDTMGVTGVRLKNRDGGSEEIAVDGMFVAIGHTPNTSLFEGQLALKDGYLVVNGGREGNATATNVPGVFAAGDVADHVYRQAITSAGAGCMAALDVERYLDSL

SEQ ID NO: 2780 - protein, 629 aa, Coccidioides immitis RS
MVSPSFVKPSAPSLRLLRFLRSQSDICCFKQNVDHPRPRVSHGNYGFYRNFRLTSDQLGCGGLKSSAVRCPSTLEASLLSFIRPKPRKYSSLLKVSSARPPHLRGGAIRHPASQQISWFSGTSKRNRNFLRRLLGLQVPRPPAHLKPDDLPSSGAFEDGQECNPFTTGRKLALKASNEPRLRCTEFDENGNVTLISEEFKKSELIAKYGLLPRDLRKIDSSVIPHILVRHSAILLSLLHLRVLIKANRVLVFDAYGSADTYTQSLFMYDLEGKLRQKEPASSRQAAALGALPYEFRALEAVLVSVTSGLEAEFEGVREPVVRVLRALEEDIDRDKLRHLLIYSKRLGTFEQKARLVRDAIEDLLEADDDLTAMYLSERSGGVRRDEHDHQEIEMLLESYHKVCDEIVQASGNLVTNIRNTEEIVKAILDANRNSLMLLELKVSIGTLGLAVGTLLSALYGMNLKNFIEESDLGFGAVSAVCFASSAFVCIYGLLKLRRVQRVKMWGEGGIQDPYMGGLGLRGSTPLPSRGNWRSDAIDPAWTGLPVEGRAQRMRRVRGAIGTAASQPSVSLSSHAAAKPKLSGKTSPVNAPQSGNVSNKNQTQKQRQSEPEKDEFEDPTMGGAALGASR

SEQ ID NO: 2781 - protein, 420 aa, Streptococcus pyogenes MGAS315
MTKEKLVAFSQAHAEPAWLQERRLAALEAIPELELPTIERVKFHRWNLGDGTLTENESLASVPDFIAIGDNPKLVQVGTQTVLEQLPMALIDKGVVFSDFYTALEEIPEVIEAHFGQALAFDEDKLAAYHTAYFNSAAVLYVPDHLEITTPIEAIFLQDSDSDVPFNKHVLVIAGKESKFTYLERFESIGNATQKISANISVEVIAQAGSQIKFSAIDRLGPSVTTYISRRGRLEKDVNIDWALAVMNEGNVIADFDSDLIGQGSQADLKVVAASSGRQVQGIDTRVTNYGQRTVGHILQHGVILERGTLTFNGIGHILKGAKGADAQQESRVLMLSDQARADANPILLIDENEVTAGHAASIGQVDPEDMYYLMSRGLDQETAERLVIRGFLGAVIAEIPIPSVRQEIIKVLDEKLLNR

SEQ ID NO: 2782 - protein, 382 aa, Paspalum paniculatum
HPTQSVRRSLLQKNAKIRNSLKQLYAKDITADEKQELDEALQRQIQAAFRTDEIRRTQPTPQDEMRYGMSYFHETIWKGVPRFLRRVDTALKSIGINERLPYNAPLIRFSSWMGGDRDGNPRVTPEVTRDVVLLARMMAANLYISQIEDLMFELSMWRCTDELRARAEEWYHVSSKIEKHYIEFWKQIPLDEPYRVILGYVRDKLYATRERSRQLLIDGFSNIPESSAFTNVEEFLEPLELCYRSLCASGDKAITDGSLLDFLRQVSTFGLSLGKLDIRQKSERHTDVIDAITTHLGIGSYREWDEDKRIEWLLSELRGKRPLLAPDMPQTDEIADVLGALRVIAELPSDSFGPYIISMATATSDVLTVHLLQRECRVPKPD

SEQ ID NO: 2783 - protein, 298 aa, Kluyveromyces lactis NRRL Y-1140
MSSIFKTLSRKDKDGKKNKNNAANSDSNEKQFMNKQRTLLITSRGVTYRHRHLVQDLNSLLPHSRKEPKLDTKKDLGQLNEIAELYNCNNIIFFEARKHQDLYLWLSKPPNGPTIKFYLQNLHTMDELNFTGNCLKGSRPILSFDGRFDSEPHYRLIKELFIHNFGVPPQARKSKPFIDHIMSFSIVDEKIWVRTYEISHEARNNVEYEDKEEDETSLVEIGPRFVMTPILILEGSFGGPKIYENRQYVSPNFVRSQIKQQAAKEAKTRAEAAVERKLKKRESVLAVDPLSNDALFKD

SEQ ID NO: 2784 - protein, 381 aa, Aristida mauritiana
QSVRRSLLQKHARIRSCLTQLDAKDITEDDKKELDEALQREIQAAFRTDEIRRAQPTPQDEMRYGMSYFHETIWKGVPKFLRRVDTALKNIGIDERFPYRAPLIKFSSWMGGDRDGNPRVTPDVTRDVVLLARMMAADLYYSQIEDLMFELSMWRCNDELRARAEELYGASKKAATKHYIEFWKQIPPSEPYRVVLGDVRDKLYYTRERSRHLLTSGSSEIPEDATFTDVEQFLEPLELCYRSLVACGDKPIADGSLLDFLRQVATFGLSLVKLDIRQESERHTDVIDAITTHLGIGSYRSWSEEKRQEWLLSELSGKRPLLAPDMPQSDEVADAIGTFRVLAELPADSFGPYIISMATAPSDVLAVELLQRECQIRKPLP

SEQ ID NO: 2785 - protein, 288 aa, Streptococcus thermophilus CNRZ1066
MENTMAIIMDGKALAVNMQEQLQEKVARLKEKEWIVPGLVVIMVGENPASQVYVRNKERAAKKAGFHSKTVNLSESISEEELIEVIEKYNQNPLFHGILVQLPLPNHINEMRILLAIDPKKDVDGFHPMNTGNLWNGRPQMVPCTPAGIMEILREYNVELEGKTAVIIGRSNIVGKPMAQLLLEKNATVTLTHSRTPHLAKVCNKADVLIVAIGRAKFVTEEFVKEGAVVIDVGINRDEEGKLCGDVDFDQVKEKVSMITPVPGGVGPMTITMLMEQTYQAALRSLKG

SEQ ID NO: 2786 - protein, 214 aa, Medicago truncatula
MDAAGEIFRSNLTELMEESPSGAGELHVLAVDDSLVDRKVIERLLKISSCKVTVVESARRALQFLGLDGENSDVAFDAVKVNLIMTDYSMPGMTGYELLKKIKESSVFREIPVVIMSSENVLTRIDRCLEEGAEDFLLKPVKLSDVRRLKDFIMRGEVKDGEKCSLKRMRSSDDCSPCPSLSTTFSPMRHSCDPPSSVFSPLSPSTLSSKKSRL

SEQ ID NO: 2787 - protein, 395 aa, Chloris barbata
TVELVLTAHPTQSLRRSLLQKHTKIRNCLTQLYAKDITDDEKKELDEALQAEIHAAFRTDEIRRSQPTPQDEMRYGMSYFHETIWKGVPKFLRRVDTALKSIGISERLPYDVPVIKFSSWMGGDRDGNPRVTPEVTRDVCLLARMMAANLYVSSIEDLMFELSMRRCNDELRARADEHLASRETKKHYIEFWRAIPATEPYRVLLGYVRDKLYNTRERALHMLTKGYSEIKEESTITTVEEFMEPLEVCYKSLCDCGDKTIADGLLLDFMRQVNTFGLSLAKLDIRQESERHTDAVDAITTHLGIGSYKEWPEEKRQEWLLSELQGKRPLLVPDMPVSEEVEAVLGCFKVLAELPRDSFGPYIISMATAPSDVLAVELLQRECGVRQPLPVVPLF

SEQ ID NO: 2788 - protein, 154 aa, Sesbania rostrata
QKKTKNMGFTDKQEALVNTSYEAFKKNLPGHSVLFYSFILEKEPAAKGLFSFLKDSDGVPQNNPSLQAHAEKVFGLVHDAAAQLRATGVVVLADASLGSVHVQKGVTDPHFVVVKEALLKTLKEAAGATWSDEVSIAWEVAYDGLAAAIKKAMS

SEQ ID NO: 2789 - protein, 292 aa, Rickettsia rickettsii
MAILINKKTQVICQGFTGLQGTFHSEQAIAYGTNMVGGVTPGKGGHTHLDLPVYNTVHEAKAKTGANASVIYVPPGFAADSILEAIDAEIEVVVCITEGIPVLDMVKVKRALVGSKTRLIGPNCPGVITPGECKIGIMPGHIHKRGTIGIVSRSGTLTYEAVAQTTAVGLGQSTCVGIGGDPVNGTNFVDCIEMFLKDDETKAVIMIGEIGGNAEEDAAEFIKQSKIKKPIVSFIAGITAPPGKRMGHAGAIIVGRTGSAEDKLEALQSAGVVITRSPADIGKTMLDLLNKG

SEQ ID NO: 2790 - protein, 396 aa, Eragrostis tenuifolia
TVELVLTAHPTQSLRRSLLQKHTKIRNYLTQLYAKDITEDEKKELDEALQAEIQAAFRTDEVRRAQPTPQDEMRYGMSYFQENIWKGVPKSLRRVDTALKSIGIDERLPYDAPLIKFSSWMGGDRDGNPRVTPEVTRDVCLLARMIAANLYISEIEDLMFELSMWRCNDELRARADELLSAPKKASKHYIEFWRAIPSTEPYRVLLGDLRDKLYNTSERWRDLLATGFSEVPEKPTIKSIQEFLEPLEVCYRSLVEVGDKTIADGVLLDFMRQVSTFGLTLAKLDIRQESERHTDAIDAITTHLGIGSYREWPEEKRQEWLLSELQGKRPLLVADLPVSEEVADVLGCFRVLAELPSDSFGPYIISMATAPSDVLAVELLQRECGIRNPLPVVPLF

SEQ ID NO: 2791 - protein, 148 aa, Sesbania rostrata
GAFTESQEALVTSSYETFKQNASDLSVLFYTFILEKAPGAKNLFSFLKDSDGVPKDNPNLKAHAAKVFELVVDSAVQLRTKGAVVIADANLGPVHVQKGVTDAHFVVVKEALLKTVKEATGAKWSDELSNAWEVAYDELAAAIKKAMG

SEQ ID NO: 2792 - protein, 386 aa, Eleusine indica
VLTAHPTQSLRRSLLQKHTKIRNCLTQLYAKDITEDEKKELDEALQAEIQAAFRTDEIRRAQPTPQDEMRYGMSYFHETIWKGVPKFLRRVDTALKSIGINERLPYNAPLIKFSSWMGGDRDGNPRVTPDVTRDVCMLARMIAANLYVAQIEDVMFELSMWRCNDELRAEAEKHLATRETKKHYIEFWRQIPATEPYRVLLGHVRDKLYNTRERALHMLTKGFSEIPLDTTIRSVEEFMAPLELCYKSLCDCGDKTIADGVLLDFMRQVSTFGLSLAKLDIRQESERHTDAIDAITTHLGIGSYKEWPEEKRQEWLLSELQGKRPLMVPDMPVSDEVADVLGCFKVLAELPSDSFGPYIISMATAPSDVLAVELLQRECKVRNPLP

SEQ ID NO: 2793 - protein, 138 aa, Shorea henryana
EKNIPVLLGLLSIWNVSFLGYPARAILPYSQALEKFAPHIQQVSMESNGKGVSIDGVPLAFETGEIDFGEPGTNGQHSFYQLIHQGRVIPCDFIGSAKSQQPIHLKGEVVSNHDELMSNFFAQPDALAFGKTPEELHK

SEQ ID NO: 2794 - protein, 191 aa, Aspergillus oryzae
MAPLTFSAAYSNNFIAPWSHLANNIRKPVIAAVSGYALGGGCELALMCDIIYCTSNATFGQPEIKLGVIPGAGGSQRLTRAVGKSKAMELILTGKNFSGKEAGEWGVAAKVVEGGKDELLEEALKTAETIAGYSRVAVVAGKEVVNKSQELSLREGVEYERRLFHALFGSKDQKIGMTAFAEKKKPEWSNE

SEQ ID NO: 2795 - protein, 503 aa, Silicibacter pomeroyi DSS-3
MGGPTNSRRRHAMLDAATDLKSLLKTPDLLATKAYIGGQWVDGDNGTFAVTNPARGDVIAEVADLSRAQVAGAIAQAEAAQKEWAKYTGKERAVILRRWYDLMMEHAQDLGRILTAEQGKPLAEAVGEVAYGASFIEFFAEEAKRIYGETIPGHQRDKRITVLKQPIGVAASITPWNFPNAMITRKAGPALAAGCAFVARPAAETPLSALVLAVLAEKAGIPAGVFNVVPSSRSSEIGKEFCENPGVRKLTFTGSTEVGRILLKQAADQVMKCSMELGGNAPFIVFDDADLDAAVEGAMLCKFRNNGQTCVCANRIYVQAGVYDAFAEKLAAAVAKLNVGDGLSDGVTTGPLINAEAVEKVLEHLGDVTAKGGAVLTGGKPHALGGTFFEPTVVTGVTQEMKVAKEETFGPLAPLFKFDDVDEVIAMANDTIFGLAAYFYAKDLSRVYKVAEALEYGIVGVNTGIISTEVAPFGGIKQSGLGREGSHHGIEDYLEMKYICMSV

SEQ ID NO: 2796 - protein, 224 aa, Physcomitrella patens subsp. patens
METLAKRVVFVALLVQAALLPMLSMAADADPIQDFCVADASNTLTINGLVCKTAADVKVNDFLFRGLDKPGNTNGPTANAVTPVAAAQLPGLNTLGISLARLDFAKGGINVPHIHPRATEVLALLQGELYVGFVSTTNNTLFATTLYAGDVFVFPRGLVHFQLNVGKGAAVAIAALSSQNPGVQQVAPALFAANPPINDEVLEKAFNLNQKQVQHIKASFTTRA

SEQ ID NO: 2797 - protein, 106 aa, Silicibacter pomeroyi DSS-3
MSTVAVTDATFDAEVKNSDIPVVVDFWAEWCGPCKQIGPALEELATEYAGKVKIAKVDVDSNPNAAAAMGVRGIPALFIFKDGQVVSNRAGAAPKAALQNWIDSSI

SEQ ID NO: 2798 - protein, 372 aa, Neorickettsia sennetsu str. Miyayama
MTLRLSVPLEQNQRQSLLCPKIAVIGVGGAGGNAINNMINSGLRGVKFIAANTDAQALEHSLADVKIQLGANLTKGLGAGSIPEIGRQAAEESINELAEAIEDTDMLFITAGMGGGTGTGAATVIARLAMERKVLVVAVVTKPFYFEGARRAKVAEVGLEALRRVVDTYIVINNQNLFRIANEKTTFADAFKEVDKILYFHVREISSLMVNPGYINLDFADVRSVMSKMGKALMGTSEASGENRAVKAAENSIANPLLDNLSVQDAKGILINITGGPDMTLFEVDAAANCVREKASENVNIIFGSTCSESMSNVVRVSVVATGISPDHSELSETGDLDEEGFSGWREEKSDEQKKMELLEIPAFIRRVKKKS

SEQ ID NO: 2799 - protein, 486 aa, Pseudomonas fluorescens Pf-5
MIKHWINGREVESREVFTNYNPATGEAIGEVASGGAEEIAQAVAAAKDAFPKWANTPASVRARLMRRLGALIEENVPHLAELETLDTGLPIHQTRNVLIPRASHNFDFFAEVCTRMDGHSYPVDDQMLNYTLYQPVGVCALVSPWNVPFMTATWKTAPCLALGNTAVLKMSELSPLTANELGRLAVEAGIPAGVLNIVQGYGATAGDALVRHPDVRAISFTGGTATGKKIMQTAGLKKYSMELGGKSPVLIFEDADLERALDAALFTIFSLNGERCTAGSRIFIQESVYPQFVKEFAARARRLIVGDPQDPKTQVGSMITQAHYDKVTGYIRIGLEEGATLLAGGLERPANLPAHLARGQFIQPTVFADVDNQMRIAQEEIFGPVVCLIPFKDEAQALQLANDTEYGLASYIWTQDIGKAHRLARGIEAGMVFINSQNVRDLRQPFGGIKGSGTGREGGEYSFEVFAEIKNVCLSMGSHHIPRWGV

SEQ ID NO: 2800 - protein, 363 aa, Chlorobaculum tepidum
MITSTTSVVDFDKALLDFRYLLDCFIEVLENLGQEALARHIGGDSKTPIREFDCAERAIQAWSIVFQLLNMAEENSAAQYRRRIESSEGVESLSGLWGEALRHLKNLGVTEAEIAAELPQIEVEPTLTAHPTEAKRRTVLEQHRELYLLLVKRENRMWTPAERDKIRTDIKVVLERLWRTGEILLQKPEVSAERQNVLHYLHTIFPDILPILDNRLEKAWAVAGFDPAITADPRNLPRLSFGSWVGGDRDGHPLVTAETTQETLQEMRRHAIELVHRQLERLASMLSLSGRLQSPSRAMEERMETLRHKLGKAGALAFERNLHEPWRQFVNLMIAALPAGTTENEHYCYRRHTELLKDLELLM

SEQ ID NO: 2801 - protein, 549 aa, Desulfotalea psychrophila LSv54
MALPSEGKNSFWGERMFASYKSIQETCAFEKLSELAQSPYDLTQPGALQADNRLQRYQVAGQAFKLFYATEQVDDRVLAGLQAVADECQLVSQYRAMRTGAVMNKIDGFVSENRRVLHTATRDLFSGEPAEASMNSRAKRELEKLSHFLDALDAGEIVNEAGEAFTTIVQVGIGGSDLGPRAVYEALKSYTIVGRRAAFISNVDPDDVSMALADLDLGKTIFNIVSKSGSTLETVTNEAFVRRALLENGYDSARHCISITGEGSPMDDPDSYLASFYLYDCIGGRYSTTSMVGCVLLGFTLGFEQVMAFLRGAANMDNSADEVDILKNIPLLMALIGIWNRNFLDLSSLAIIPYSQALYRFPAHLQQCDMESNGKSVDRQGRAVQGKTGPIIWGETGSNSQHAFFQHIYQGTSPVPIEFIGFSESQRGKDIEVQGCTSQQKLLANLFAQMVALACGKKDQNLNKFFAGNRPSCLLFAKKLTPYVMGSLLACYEAKIVFQGFAWNINSFDQEGVQLGKELAKRFLREIGGEEEGFHGIESAFLNEVQRGV

SEQ ID NO: 2802 - protein, 603 aa, Zea mays
  misc_feature (196)..(196): Xaa can be any naturally occurring amino acid
  misc_feature (262)..(262): Xaa can be any naturally occurring amino acid
  misc_feature (285)..(285): Xaa can be any naturally occurring amino acid
  misc_feature (302)..(302): Xaa can be any naturally occurring amino acid
  misc_feature (314)..(314): Xaa can be any naturally occurring amino acid
  misc_feature (424)..(424): Xaa can be any naturally occurring amino acid
  misc_feature (443)..(443): Xaa can be any naturally occurring amino acid
  misc_feature (468)..(468): Xaa can be any naturally occurring amino acid
NKMLHKKRIPALFLKLDIKKAFDSVCWAFLLEILQHLGFGQVWCNLILNLLMTSSTQILVDGVPGQPISHKIRLRQGDPLSPLLSILVMDVLNSLFTKADECGLLHPLAGRNISQRVSMFIDDVAVFVKPVSEDLEVVREILRGFGVASGLQTNLQKSFSYPIWCDNERVELAVQTLGCASKNFSTTYPGLSLRSXKLSAGDLAPWIEKIAAKLPGWKAELLNLAGRITLIKSVLSAIPVYLFIALNAPKWVIKVIDKIRRXFLWKGIKEAREAKACLNLGIKYXAFDLSGLVIPNLLSPLXNGLCNARLWLQXTAPSKPWSGLDLKISSQARALCPVAVSTTIGNGTSTFFWKDKWIHGCYIEDLAPLIAAAVPKKIRKVRTVQQALTSYYWVHDIQGNLSLAAIEQYLQLWEVLETFQLQNXTINIGAASFEPWKRIWKSXAAPKCKVFVWLAINNKCWTTKRLKXRGLDYPEHCVLCDQEDETVHHILSNCVFTRQFWYNILTPIGLSILAPKRRDSCFAEWWRKASARIPKSKRKGFNSVVILGAWSLWKQRNRCIFDGARPCLSTLEDGFKDKMQLWFLQEPRTCALFLILVRGRKVF

SEQ ID NO: 2803 - protein, 247 aa, Rubrivivax gelatinosus PM1
MTQLVLIRHGESTWNLENRFTGWTDVELTPTGVAQAQQAGRLLKQAGIDFDTVYTSVLKRAIWTAWHCLDGMDRTWLPVIKDWRLNERHYGGLQGLNKADMAKQFGDEQVLLWRRSYDVPPPPLEANDPRSERSDVRYAKLAANQVPLTECLKDTVARVLPLWYGTLAPAIAAGQRLVIVAHGNSIRALVKHLNNISDADIVGVNIPNGIPLVYDLDANLKPTSKYYLGGADAAAQAASVSALQADG

SEQ ID NO: 2804 - protein, 448 aa, Xanthomonas oryzae pv. oryzae KACC10331
MCRMPHATCAVLRRRRSGEVARAPNTHEFEPTHAWLCATAPSHVVTATSHCAAGNQPRAMLSSADSRFPIPAMRAAPDILSRVSRVIGCRHSVKECRRVSSLYFRSPRSCHRNYMSIEQLAETAQAMVAPGKGIIAIDESTSTIAKRFASVGIENIEENRRAYRELLLTTPKLSDYISGAILFDETIRQKTKDGVPFAEYMTAHGIIPGIKVDKGAQPLAGMPGELVTEGLDGLRARLEEYYTLGARFAKWRAVITIGEDIPSGTCIEANSHALARYAALCQEQGLVPMVEPEVIMDGSHDIETCYEVTEATLRSLFGALYEQNVVLEGTILKASMVISGKSCEEQASIEEVAESTVMCLKSTVPAILPGIVFLSGGQTDEQSTAHLNEMHQLGTLPWPLSFSYGRAMQQAALKLWAKDMTVNFAKAQQVIYERAKENGLAALGKWKG

SEQ ID NO: 2805 - protein, 240 aa, Coccidioides immitis RS
MSQSHALSDDQVAGELRKMTAFIKQEALEKAREIQIKADEEFAIEKSKLVRRETAAIDTLYEKKFKQAAMSQQITRSTLANKSRLRVLSAKQAVLDELFERARESLSVVLEEGQRNKAKEKERKEYGEVLKGLVLEGLYALNENKIQVRARKKDYDAVKKAGKEAAKEFEEKVGKEVSVELDESEPLPEASAGGVIIVGGGGKIEIINTFEERLRLLESDALPVVRELLFGKNENRKFYD

SEQ ID NO: 2806 - protein, 401 aa, Borrelia burgdorferi B31
MKFRRLVMAKEVFQRTKPHMNVGTIGHVDHGKTTLTAAISIYCSKLNKDAKALKYEDIDNAPEEKARGITINARHIEYETANRHYAHVDCPGHADYIKNMITGAAQMDAAILLVAADSGAEPQTKEHLLLAQRMGIKKIIVFLNKLDLADPELVELVEVEVLELVEKYGFSADTPIIKGSAFGAMSNPEDPESTKCVKELLESMDNYFDLPERDIDKPFLLAVEDVFSISGRGTVATGRIERGIIKVGQEVEIVGIKETRKTTVTGVEMFQKILEQGQAGDNVGLLLRGVDKKDIERGQVLSAPGTITPHKKFKASIYCLTKEEGGRHKPFFPGYRPQFFFRTTDVTGVVALEGKEMVMPGDNVDIIVELISSIAMDKNVEFAVREGGRTVASGRILEILE

SEQ ID NO: 2807 - protein, 558 aa, Rhodospirillum rubrum ATCC 11170
MMIDPSKKYRPFPPVALADRTWPSATITKAPIWCAVDLRDGNQALVEPMGADRKVRMFQLLCELGYKEIEVGFPSASQTDFDFLRQLIERDMIPADVTIQVLTQAREDLISRTFQALEGASSAIVHLYNSTSTLQRRVVFALDRAGITDLAVRGAEMVREGAAKASASTKLRFQYSPESFTGTELDYAVEICEAVMGVFEPTAEAPLILNLPSTVEMATPNVYADQIEWFCRALPHRDRVLISLHPHNDRGTAVAAAELALMAGADRIEGTLFGNGERTGNVDLVTLGMNMFTQGIDPGIDFSNIDHIREIAEECNRLPVHPRHPYAGDLVFTAFSGSHQDAINKGLHAMEKTNQDVWEVPYLPIDPKDIGRSYEAVIRVNSQSGKGGVAHILERDYGIRMPRGLQVEFSKVVQAITDTTGEEITSRGLWKTFEETYLGAGSPYSFLEHHTRPDPAGKDQRILTATVKAGGKVRDIDGRGTGPIEALVDALRKDSGLAITIEDYEEHTLRPGSDAQAVAFIKASLPDGRAHYGVGIDANFVVASLKAVLCAANHLSDK

SEQ ID NO: 2808 - protein, 335 aa, Pyrococcus abyssi GE5
MKAKDIVLKKSEEIEGLAIEGPWLDEVESLEGVISYYEKIGFQATHLGKAVKIWRKVEEKRKGGEEVRVFLGYTSNIVSSGLREIIAWLVKERKVDVIVTTAGGIEEDFIKTLKPFILGDWEVNDAELREKGINRIGNIFVPNDRYIEFEKYMVPFFERILDIERKLKRPLTASEFIYEMGRYMDEVLGKEKEKSIIYWAYKRDVPIFCPAITDGSIGDMLYFFKEERHDSKLVIDIANDIVKLNNLAITAKETASIILGGSLPKHAIINANLFRGGTDYAIYISTAVPWDGSLSGAPPSEGVSWGKIKAKADYVEIWADATLVFPILVWMVMKA

SEQ ID NO: 2809 - protein, 297 aa, Oryza sativa
MQGLCIQDHGRLSAGLSSKNPSPRAAAAAAPPRTRRSPPASSRRFATMKFNIANPTTGCQKKLEIDDDQKLRAFFDKRISQEVSGDALGEEFKGYVFKIMGGCDKQGFPMKQGVLTAGRVRLLLHRGTPCFRGYGRRDGERRRKSVRGCIVSQDLSVINLVIVKKGENDLPGLTDTEKPRMRGPKRASKIRKLFNLSKDDDVRKYVNTYRRTFTTKNGKKVSKAPKIQRLVTPLTLQRKRARIADKKKRIAKKKSEAAEYQKLLAQRLKEQRERRSESLAKRRSKLSSAAKAAATTA

SEQ ID NO: 2810 - protein, 518 aa, Arabidopsis thaliana
  misc_feature (288)..(288): Xaa can be any naturally occurring amino acid
MGVVSISSSAARSPLGLGNDLLTHRSSLKKPSIVAFKADDSSNSALIIPPREQVLIPAEKHNEKKREVTRRKPCKTPKKPLSLEHNSAPSCSLGVDYNEAAARLESIYKLSPATTTLVEDDVEDGGSKAKVSRRRKRKESGEEKKVVVRNNVKKEKRMSLDKRIALKRNVQEKPVVASVDKKVTKRQQEEEKIERLVRDYSASNDIVSLDWKKMKIPPVLSSTEHAWLFKLMQPMKALLEVKDVLQKSLGREPREAEIAGEINMTAGEVKKKIEIGRAARNKLIKHNXLRLVLFVMNKYFHEFTNGPKFQDLCQAGMRGLITAIDRFEPKRKFRLSTYGLFWIRHAIIRSMTTSNFTRVPFGLESVRVEIYKAKTELWFEMGRPPTEDEVVERLKITPERYREVLRAAKPVLSLNSKHSVTQEEFINGITDVDGVGANNSRQPALLRLALDDVLDSLKPKESLVIRQRYGLDGKGDRTLGEIAGNLNISREMVRKHEVKALMKLKHQARVDYLRQYIV

SEQ ID NO: 2811 - protein, 75 aa, Arabidopsis thaliana
  misc_feature (29)..(29): Xaa can be any naturally occurring amino acid
  misc_feature (62)..(62): Xaa can be any naturally occurring amino acid
MASSMLSSIGVVTSPAQATMVVPFTGLKXSVSFPAARKGNRGLTSIKGNGGRVSCLKVGPPXWKAQILQTRARLP

SEQ ID NO: 2812 - protein, 514 aa, Bacillus cereus ATCC 14579
MGFEEATPIQAETIPHALQGKDIIGQAQTGTGKTAAFGLPLLDKVDTHKESVQGIVIAPTRELAIQVGEELYKIGKHKRVRILPIYGGQDINRQIRALKKHPHIIVGTPGRILDHINRKTLRLQNVETVVLDEADEMLNMGFIEDIEAILTDVPETHQTLLFSATMPDPIRRIAERFMTEPQHIKVKAKEVTMPNIQQFYLEVQEKKKFDVLTRLLDIQSPELAIVFGRTKRRVDELSEALNLRGYAAEGIHGDLTQAKRMSVLRKFKEGSIEVLVATDVAARGLDISGVTHVYNFDIPQDPESYVHRIGRTGRAGKKGIAMLFVTPRESGQLKNIERTTKRKMDRMDAPTLDEALEGQQRLIAEKLQSTIENENLAYYKRIAEEMLEENDSVTVVAAALKMMTKEPDTTPIALTSEPPVVSRGGGSKKRGGNGGGYRDGNRNRSRDGRGGGDGRNRDRNRDGRNRDGNRDRNRDGNRDRNRDGGSRGRRGEGQGRPGSSNGRGERKHHSRPQA

SEQ ID NO: 2813 - protein, 292 aa, Rickettsia montanensis
MAILINKKTQVICQGFTGSQGTFHSEQAIAYGTNMVGGVTPGKGGHTHLDLPVYNTVHEAKAKTGANASVIYVPPGFAADSILEAIDAEIEVVVCITEGIPVLDMVKVKRALVGSKTRLIGPNCPGVITPGECKIGIMPGHIHKRGTIGIVSRSGTLTYEAVAQTTTVGLGQSTCVGIGGDPVNGTNFVDCIEMFLKDDETKAIIMIGEIGGNAEEDAAEFIKQSKIKKPIVSFIAGITAPPGKRMGHAGAIIAGGTGSAEDKIEALQSAGVTITRSPADIGKTMLDLLNKG

SEQ ID NO: 2814 - protein, 236 aa, Eremothecium gossypii
MPRSKRSKLVTLAQTEKKGRENKERIFDEVRQALDTYRYVWVLRLEDVRTPVLQEIRSAWAGSKLIMGRRKVLEKALGGTRETEYKENVSGLVKQCEGMCGLLFTDETPETVTAYFREYRKADYSRAKSRAPLRVEIPAGVVYSRGGQVPAEDDVPMVHSLEPTLRNKFKMPTRIQNGKITLEQPYLVCEAGETLDVRQALILKQFGVAAAEFRVKLAAYYDGEAAAVEEVRINME

SEQ ID NO: 2815 - protein, 325 aa, Cicer arietinum
MTMYEKWLVKHQKMYNGLGEKDTRFQIFKDNLRFIDEHNAQNYSYKVGLNKFADINNEEYRDMYLGTKSDAKRRVMKTKITGHRITYNSVIVTVKVDWRLKGAVTHIKDQGSCGSCWAFSTIATVEAINKIVTGKFVSLSEQELVDCDRAFNEGCNGGLMDYAFEFIIRNGGIDTDQDYPYNGFERKCDPTKKNAKVVSIDGYEDVPSYMNALKKAVAHQPVSVAIAGLGRALQLYQSGVFTGKCGTDLDHGVVVVGYGSENGVDYWLVRNSWGTNWGEDGYFKIASRNVKSLYRKCGIAMEASYPVKYGQNTNSAAPQLYVTSA

SEQ ID NO: 2816 - protein, 636 aa, Zea mays
MLSTRTAAVAASASPASPWKLGGRSEGGASCDGCRTYRNTLRRRAAPAKVRALPPRRVDAVAMVSNAETETEKEQEEAAAASEELPVMPWATSVASGYTLLRDPHHNKGLAFTEEERDGHYLRGLLPPAVLSQELQIKKFMNTLRQYQTPLQRYIAMMNLQETDERLFYKLLIDNVVELLPFVYTPTVGEACQKYGSIFGRPQGLYVSLKDKGKVLEVLRNWPHRNIQVICVTDGERILGLGDLGCQGMGIPVGKLALYTALGGVDPSVCLPITIDVGTNNEFLLNDEFYIGLRQKRATGEEYDELIEEFMSAVKQFYGEKVLIQFEDFANHNAFDLLEKYSKSHLVFNDDIQGTASVVLAGLLAALKMVGGTLAEQTYLFLGAGEAGTGIAELIALEISKQTNAPIEECRKKVWLVDSKGLIVDSRKGSLQPFKKPWAHEHEPLKTLYDAVQSIKPTVLIGTSGVGRTFTKEIIEAMSSFNERPIIFSLSNPTSHSECTAEQAYTWSQGRSIFASGSPFAPVEYEGKTFVPGQSNNAYIFPGLGLGLVISGAVRVHEDMLLAASKALADQATQDNFEKGSIFPPFTSIRKISAHIAAAVAAKAYELGLATRLPPPSDLVKYAENCMYTPVYRNYR

SEQ ID NO: 2817 - protein, 606 aa, Oryza sativa
MLFGCQDSRAVCCLHLVLMLRIEALLYYPVTRPRWKINASQDATQETGLIDAEINSYAYSERKNRKYNGAYIDKDGVSRTFDRKKISRKRGGAMRGRGWKYGSGFVDGVFPVLSPMAQDILEFVQKGTDVAKIWESLDNIPSTHNLFDDLVNVAVQFRMNKKWDLIIPVCEGCLCSRYRSSFRPDIICYNLLIESYGKKRQLNKAESIYMALLEAQCVPTEDTYALLLRAYCNAGSLHRAEGVISEMREHGIPPNATVYNAYLDGLLKARCTEKAVEVYQRMKRERCRANTETFTLMINVYGKAKQPMSSMKVFNEMKSIGCKPNICTYTALVNAFAREGLCEKAEEVFEEMQQAGHEPDVYAYNALMEAYSRAGLPQGASEIFSLMQHMGCEPDRASYNILVDAYGRAGLHEDAEAVFEELKQRGMSPTMKSHMLLLAAHARSGNATRCEEVMAQLHKSGLTPDTFALNAMLNAYARAGRLDDMERLFAAMERRGDADVGTYNVAVNAYGRAGYVGRMEAAFAAVAARGLAADVVTWTARMGAYARRKEYGRCVGMVEEMVDAGCYPDAGTARVLLAACSDERQVEQVTAIVRSMHKKPKTLFTI

SEQ ID NO: 2818 - protein, 223 aa, Physcomitrella patens subsp. patens
METLAKRVVFVALLVQAALLPMLSMAADADPIQDFCVADASSTLTINGLVCKPAADVKVNDFLFRGLDKPGNTGGPTANAVTPVAAAQLPGLNTLGISLARLDFAKGGINVPHIHPRATEVLALLQGELYVGFVSTTNNTLFATTLYAGDVFVFPRGLVHFQLNVGKGAAVAIAALSSQNPGVQQVAPALFAANPPINDEVLEKAFHLNQNQVQHIKASFVKA

SEQ ID NO: 2819 - protein, 426 aa, Aspergillus nidulans FGSC A4
MLKNVLRRGALRLVRQRASYATSALTPQQKQIVKATIPALEQHGVTITTLFYKEMLERHPELNNIFNSSHQATGVQPAALAHAVWAYASNIDHPEALATAVSRIGHKHASLGVRSEHYPIVGEHLLRAIKKVLGDAVTPPVADAWTAAYQQLADIFISFEDDLYKQATQTPGGWTGWRKFVIADKVHESEEIISFQLVPQDNGRLPTYKPGQFVSVRCFVPELGVYQPRQYSLSDIPNQRYFQISVKKEFASGARPAGRISNVLHESLPKGSEVEISMPFGDFVLDTNATTPVVLMSGGVGLTPMMSMLKTVTNNSKSRPAVFVHAVRNGRVHAMKETLANIMTDNPQVKRAIFYEQVEEGDKQGVDYDYVGRVDVSKIKDLVFLPDADYYICGPSPFMKAQSEALETLGVRPDRIHMEVFGSPTP

SEQ ID NO: 2820 - protein, 413 aa, Shigella flexneri 2a str. 301
MKRAVITGLGIVSSIGNNQQEVLASLREGRSGITFSQELKDSGMRSHVWGNIKLDTTGLIDRKVVRFMSDASIYAFLSMEQAIADAGLSPEAYQNNPRVGLIAGSGGGSPRFQVFGADAMRGPRGLKAVGPYVVTKAMASGVSACLATPFKIHGVNYSISSACATSAHCIGNAVEQIQLGKQDIVFAGGGEELCWEMACEFDAMGALSTKYNDTPEKASRTYDAHRDGFVIAGGGGMVVVEELEHALARGAYIYAEIVGYGATSDGADMVAPSGEGAVRCMQMAMHGVDTPIDYLNSHGTSTPVGDVKELAAIREVFGDKSPAISATKAMTGHSLGAAGVQEAIYSLLMLEHGFIAPSINIEELDEQAAGLNIVTETTDRELTTVMSNSFGFGGTNATLVMRKLKRLIRSRPE

SEQ ID NO: 2821 - protein, 138 aa, Hopea dryobalanoides
EKNLPVLLGLLSIWNVSFLGYPARAILPYSQALEKFAPHIQQVSMESNGKGVSIDGVPLPFEAGEIDFGEPGTNGQHSFYQLIHQGRVIPCDFIGSAKSQQPIHLKGEVVSNHDELMSNFFAQPDALAFGKTPEELHK

SEQ ID NO: 2822 - protein, 305 aa, Arabidopsis thaliana
  misc_feature (137)..(137): Xaa can be any naturally occurring amino acid
  misc_feature (154)..(154): Xaa can be any naturally occurring amino acid
LKWHKIRCLDKAAVVIEGDLTPEGPPADKWRLCSVQEVEEVKCLIRIVPIWSAGIISLAAMTTQGTFTVSQALKMDRNLGPKFEIPAGSLSVISLLTIGIFLPFYDRVFVPFMRRITGHKSGITLLQRIGTGDRFRXIFSMIVAGIVERMRRHXRSINAGDPTGMTPMSVFWLSPQLILMGLCEAFNIIGQIEFFNSQFPEHMRSIANSLFSLSFAGSSYLSSFLVTVVHKFSGGHDRPDWLNKNLNAGKLDYFYYLIAVLGVVNLVYFWYCARGYRYKVGLPIEDFEEDKSSDDVEMTSKKSMK

SEQ ID NO: 2823 - protein, 217 aa, Physcomitrella patens subsp. patens
MAKLFAILVVVASLVALASASDADPINDYCVADLASKVTINGLACKAASSAMSEDFAFRGFRKDGDTNNPLGIALAPGFAGINYPGLNTLGFALAKFNYAKGGLVPPHTHPRAAEVIYVVKGEVHVGFVDTAGKLFATSLKRGDFFVFPKGLVHFQLNVGSGHAVTISVLNGQNPGVQFSTAVFAAQPSIDTSVLARAFQLKDMDVMDLQTKFKPAA

SEQ ID NO: 2824 - protein, 217 aa, Physcomitrella patens subsp. patens
MAKVLVIFVVVASLVALASASDADPINDYCVADLASKITINGLACKPASSAMSEDFAFRGFRKDGDTNNPLGIALAPGFAGINYPGLNTLGFALAKFNYAKGGLVPPHTHPRAAEVIYVVKGEVHVGFVDTAGKLFATSLKRGDFFVFPKGLVHFQLNVGSGHAVTISVLNGQNPGVQFSTAVFAAQPSIDTSVLARAFQLKDMDVMDLQTKFKPAA

SEQ ID NO: 2825 - protein, 308 aa, Gibberella zeae PH-1
MSDYKTYSFNPAQDIPSLDGKVILITGANTGLGKATALELAKHNPAHIYITARNSTKGNTALEEVKGVASEGTQVSLLELDLSSFDSIKAAAKDFLDREVRLDVLLLNAGVMGAPPVLTKDGYEMHIGTNHLGHALLLKLLTPVLDKTPNARVVHLFSAGFRHVGPNGIEFDTLKSATSPTPLPLRYAQSKLACLLYAREAAKRYNFTNIAINPGEVQTELFSRKAGDEMMKHLQENVAPKMAGPISEGVKNHLWAATSTEIKNGEFYEPVGKTGGLEGAGLDEEMANKLWDWTEEQLEGLRVSEIDR

SEQ ID NO: 2826 - protein, 646 aa, Oryza sativa
  misc_feature (261)..(261): Xaa can be any naturally occurring amino acid
  misc_feature (281)..(281): Xaa can be any naturally occurring amino acid
MAIPGSFCHPTALQVFVSVQFVFAVLVPHAAGRHHRHGCAPFSCGHLSDVSPPFRRRGDPPECGVASYELTCTDDKPATIQIDNGTYLVMDIKYKDSTFWVIDANISDSRNNCPLPRWNRDFGYYDQMLYERHGEDSRRRSIQAELMPPYQSTTATFVTCSQEILKSNGKYRPVACMSTNSSFVYVLTGMNSDSIGSLEPSCGYLAMTPLGAGDRPLVLENASYADVVKLMRGGFAIRFPYTSRFYVYSSKIKQCIAQSFXVQLIVGVIPLAMWTLKWIAXFILVPLVILTFLARNYWKIRITTDAVEKFLRMQLMNGPTRYAYTDLIAITGHFREKLGQGGYGSVYKGVLLPGNAHVAVKVLGNSNCNGEEFISEVSTIGRIHHINVVHLVGFCSEEIRRALVYEYMPRGSLDKYIFSSERSFSWDKLNEIALGIARGINYLHQGCDMQILHFDIKPHNILLDVNFVPKVADFGLAKLCPRDQSFVPLSALRGTIGYIAPEMISRSFGIISSKSDVYSFGMLLLEMAGGRRNSDMYAENSNQTYFPSWVYDQLTEQQVGVGEIPAGTVANMHELERKLCIIGLHCIQMKSHDRPTMSEVIEMLEGGVVGLQMPPRPFFCDDEPVSLAVNSHQFSSELSEILEEDE

SEQ ID NO: 2827 - protein, 193 aa, Streptomyces coelicolor A3(2)
MRARPRDPGKIQTAPPSILCMTSAPNTRNDDNLPLDVEIGALQGGAADLSQYAGRVVLVVNVASKCGLTPQYAGLERLHERYAEQGFTVLGVPCNQFMGQEPGSADEIAEFCSATYGVTFPMTGKAEVNGEGRHPLYDRLTGFADAEGHSGDIRWNFEKFLIGRDGKVAARFSPQTEPEAAEVVAAVEERLAG

SEQ ID NO: 2828 - protein, 181 aa, Cicer arietinum
MASSMISSSAVTTVKRASSVPSGAVAPFVGLKSMAGFPVRKVNNDITSIASNGGRVHCMQVWPPIGKKKFETLSYLPPLTEEQLLKEVEYLLRKGWVPCLEFELEKGFVYREHNNSPGYYDGRYWTMWKLPLFGCTEAVQVLKELQEVVKAYPNAFVRIIGFDNVRQVQCISFIAHTPKEF

SEQ ID NO: 2829 - protein, 261 aa, Polaromonas sp. JS666
MLIEAERRGQHVVLTLNRPEKLNALSYELIDELMDRLDALERDESVRCLVLTGRGDKAFSAGADIAGFAPDVAASPETAARRFVARGQAMTRRVENYPKPIIAAVNGIAFGGGCETMEACSLAIAAEHATFAKPEIRLGFPPPFGGTQRLPRHIGRKRANEMILTGEAISAEEALLIGLINHVVPASDLLPACLRMADLIAANSAVAVTASLRAVTRGLNVSIDEGLAIEAAQFMIAAASPDAKEGTAAFVEKRQPVFCHR

SEQ ID NO: 2830 - protein, 234 aa, Triticum aestivum
IGPRAGGTESSIDALSIAGFSRLRALSTKYNSLPQASSRPFDCGRDGFVIGEGCGVMVLEALDHAMERGAKIYAEVRGYGMSGDAHHITQPQNDGRGAILAMERALEQSGLQADQIDYLNAHATSTPLGDAVEATAIKSVFGHHATSGGLALSSTKGAIGHLLGAAGSVEAIFTVLAIHHGVAPPTLNLEQPDLLFEGAFMPLTAAKKMPIRAAISNSFGFGGTNASLLFSCPP

SEQ ID NO: 2831 - protein, 138 aa, Zea mays
MAASVMLSSVTLKPAGFTVEKMSARGLPSLTRTSFKIVASGVKKIKTDKPFGVNGSMDLRDGVDASGRKGKGYGVYKFVDKYGANVDGYSPIYNEEEWSPGGDVYKGGVTGLAIWAVTLAGILAGGALLVYNTSALAQ

SEQ ID NO: 2832 - protein, 140 aa, Desulfitobacterium hafniense Y51
MTKILVPVDGSPNSDKAIHYALTLARCKDDLLIFLNVQPNYNTPNIKRFATQEQIKVMQEETSKEVLDHSLEIAKDSIAPIRTLLRTGDPGREICKEAQESAVDSIVMGYRGLGAVKRAILGSVATHVLHETSCPVTIVP

SEQ ID NO: 2833 - protein, 374 aa, Streptomyces antibioticus
MTPRRVVITGIGVLAPGGIGVKNFWSLLSEGRTATRGITFFDPAQFRSRVAAEIDFDPEEHGLNPQETRRMDRAAQLAVVATREAVADSGIELTGIDPYRVGVTVGSAVGATMGLDQEYRVVSNGGLLDLVDHTYAVPHLYNHMVPSSFAAEVAWQVGAEGPSTVVSTGCTSGLDSVGHAVELIREGSADVMIAGSSDAPISPITMACFDAIKATTPRNDDPEHASRPFDGTRNGFVLGEGSAFFVLEELESARARGAHVYAEIAGYATRSNAYHMTGLRPDGAEMAEAIRVALDEARINGDEIDYINAHGSGTKQNDRHETAAFKKSLGDHAYRTPVSSIKSMVGHSLGAIGSIEIAASALAMVLARPERSVA

SEQ ID NO: 2834 - protein, 396 aa, Zea mays
MAAAASSALHAVGAVASAKPRSVVPAVATRRSVRVAPAAKRGPGSGGGRLVARSAVAAKADEAAAAAGSKSGGHELLMFEALREALIEEMNLDPTVCVMGEDVGHYGGSYKVTKGLAEMFGDLRVLDTPIAENSFTGMGVGAAMKGLRPVVEGMNMGFLLLAYNQISNNCGMLHYTSGGQFKIPVVIRGPGGVGRQLGAEHSQRLESYFQSIPGLQMVACSTPYNAKGLMKAAIRSENPVVLFEHVLLYNLKEKIPDEEYICCLEEAEMVRPGEHVTILTYSRMRYHVMQAAKTLVNKGYDPEVIDIRSLKPFDLHTIGNSIKKTHRVLIVEECMRTGGIGASLRSAIIDNFWDYLDAPIMCLSSQDVPTPYAATLEDATVVQPAQIVAAVEQICQ

SEQ ID NO: 2835 - protein, 311 aa, Desulfotalea psychrophila LSv54
MEQTTHYELVILGGGPAGLSAGLYAARARLNHVLIERGAHGGQVLLTDWIDNYPGFPDGISGFDLIEKMSAQAKRFDLNSLMAEVLSVNLDDPKKKSLKLDNGQTITFDTLVICTGARANSLKVPGEEEMRGKGVSYCGTCDAPFYRNMEVAVVGGGNTAIQEAEYLTKFASKVTVIHRREELRATKVLQESALANEKLEFIWNSQVTAIEGENGVERIQLIDKDGNKSTLNAHGIFIFVGITPLNSCLPLEKLQADKWGFIPVDIETRTSVPGVMAAGDIISKDVRQVINAAGEGAVAVLAAEEYLNNLK

SEQ ID NO: 2836 - protein, 334 aa, Helicobacter pylori 26695
MDLINEKLNNLENNATKSPKEAVILLNMGGPNSLYEVGVFLKNMFDDPFILTIKNNFMRKMVGKMIVNSRIEKSKKIYEKLGGKSPLTPITFALTERLNKLDPSRFYTYAMRYTPPYASMVLQDLALKEVESLVFFSMYPQYSSTTTLSSFNDAFNALKSLETFRPKVRVIERFYASKKLNKIILNTILNTLNNRKSQDFVLIFSVHGLPKSVIDAGDTYQQECEHHVSLLKELMQQKNTPFKEVLLSYQSKLGPMKWLEPSTEELIEKHRKSHIIIYPLAFTIDNSETLYELDMQYRLMAERLAVKEYLVCPCLNDSIEFAQFIIERVKNLKE

SEQ ID NO: 2837 - protein, 108 aa, Desulfotalea psychrophila LSv54
MASEKVQQVNDGDFDTLISSGQPTLVDFWAPWCGPCKAIGPVIEDLANEFDGKVTIAKMNVDDNPNTPGKYGIRAIPTIILFKDGEAIDQLTGAVGKTQLVDLCNKAL

SEQ ID NO: 2838 - protein, 225 aa, Triticum aestivum
  misc_feature (180)..(180): Xaa can be any naturally occurring amino acid
  misc_feature (186)..(186): Xaa can be any naturally occurring amino acid
MDSEHWISRLAAAKRFYAAQLGHADRAGMDELDMDGDENAGRPDFACPYCYEDHDVASLVAHLEEDHPFEPHAAPCPICSEKVSKDMLNHITMQHGYLFKNRRRLRRFAVPGSQSLSLLSRDLREAHLQVLLGGGGHRSSNNNATNISADPLLSSFGLSFPTLDAEETSKLSTPAQSDVXVLKETXARPWRSSIDSSLTREEREQASVRAMFVQDLLLSTLFRDQ

SEQ ID NO: 2839 - protein, 371 aa, Kluyveromyces lactis NRRL Y-1140
MGKRIVFNISSEFQLQSLLGEGAYGVVCSAKHKPSGEIVAIKKIEPFEKPLFSIRTLREIKILKHFQHENIISIFDVQKPSSFEQFNEVYIIQELMQTDLHRVIVTQELSEDHVQYFVYQTLRALKVLHGSNVIHRDLKPSNLLLNSNCDLKICDFGLARIVSERATDGDAHVDADDTDDNSPSSAANDGDPAISGMTEYVATRWYRAPEVMLTAAQYSKSMDVWSCGCILAELLGKQPLFPGKDYRDQLILIFQTLGTPTEQELVELVENRRAREYIRSLPKHPKINWRRRFPNASAAALDLLDRMLQFDPRLRITATEALSHPYLVSYHDPDDEPEGTPIPSSFFQFDQWKSRLNTKDLKRLLWNEIVS

SEQ ID NO: 2840 - protein, 404 aa, Oceanobacter sp. RED65
MENINSAVETLISSSNTFFILLGAIMVLFMHAGFAFLEVGTVRHKNQVNALVKIITDFGISTIAYFFVGYSIAYGADFFASASDLTGNNGYELVKFFFLLTFAAAIPAIVSGGIAERAKFYPFLIASALIVAFVYPFFEGMIWNGNYGYQDWLETTFGAQFHDFAGSIVVHGVGGWLALAAILILGARNGRYRNGRPVAFAPSSIPFLALGAWILTVGWFGFNVMSAQTLDGISGLVAVNSLMAMVGGTIVAMLMGRVDPGFIHNGPLAGLVAVCAGSDLFHPMGALVVGGIAGGLFVYTFTLFQNKVPRIDDVLGVWPLHGLCGAWGAIAVGIFGTEAFGGLGGVSFMSQLIGTLTGIAVALIGGFIVYGLVNAVSGLRLSEEEEFDGADLAIHKIAATSEDK

SEQ ID NO: 2841 - protein, 298 aa, Zea diploperennis
SSEVQVCVTGGAGFIGSYLVKKLLEKGYTVHATLRNTEDEEKTGLLRRLVPGAAERLRLFEADLFDAATFAPAIAGCQFVFLVATPYGLEAAGSKYKSTAEAAVAAVRVILRQCEESKTVKRVIHTASISTASPLKDKEAEGSGNGFKDFISESCWTPLNVDYHLRSAHFDKYILAKLRSEQELLSYNGGESPAFEVVTLPLGLVAGDTVLGHAPETLEHAVSPVSREELSFKFLRLLQSLLGSEPLVHVDDACEALLFCMERPSIAGRFFCAAAYPSIHDITDHYASKFPHLDVPRA

SEQ ID NO: 2842 - protein, 448 aa, Helicobacter pylori 26695
MYVEKILQSLQKKYPYQKEFHQAVYEAITSLKPLLDSDKSYEKHAILERLIEPEREIFFRVCWLDDNNQIQVNRGCRVEFNSAIGPYKGGLRFHPSVNESVIKFLGFEQVLKNSLTTLAMGGAKGGSDFDPKGKSEHEIMRFCQAFMNELYRHIGATTDVPAGDIGVGEREIGYLFGQYKKLVNRFEGVLTGKGLTYGGSLCRKEATGYGCVYFAEEMLQERNSSLEGKVCSVSGSGNVAIYTIEKLLQIGAKPVTASDSNGMIYDKDGIDLELLKEIKEVRRGRIKEYALEKKSAEYTPTENYPKGGNAVWHVPCFAAFPSATENELSVLDAKTLLSNGCKCVAEGANMPSSNEAIGLFLQAKISYGIGKAANAGGVSVSGLEMAQNASMHPWSFEVVDAKLHHIMKEIYKNVSQTAKEFKDPTNFVLGANIAGFRKVASAMIAQGV

SEQ ID NO: 2843 - protein, 426 aa, Rubrivivax gelatinosus PM1
MAIIEVKVPQLSESVAEATLLQWKKKPGEAVAIDEILIEIETDKVVLEVPAPAAGVLAQLVKNDGESCVSDEVIAKIDTEGKEAVSPLEVKPVPEVKPAPGAASDTAGAKGDVAMPAAAKLLAENQLGAGQVAGSGKDGRVTKGDVQAALQTGAKAAAPAVAAPAAAAVSVPVAPSVAKALPAVTVPAALNLGDRPEQRVPMSRLRARVAERLLQSQATNAILTTFNEVNMAPVMEMRKRFQEKFEKEHGVKIGFMSFFVKAAVAALKRYPVINASVDGNDIVYHGYFDIGIAVGSPRGLVVPILRNADQMSFADIEKKIAEFGQKARDGKLSLEDLTGGTFSISNGGTFGSMLSTPIINPPQSAILGVHATKDRAVVENGQIVIRPMNYLAMSYDHRIIDGREAVLGLVAMKEALEDPARLLFDI

SEQ ID NO: 2844 - protein, 555 aa, Pisum sativum
MAISSIFLLSLFSLIYVIPIEATHHVYQTLETLSSHHSSKSNHQPYRTAYHFQPLKNWINDPNGPMRYGGFYHLFYQYNPKGAVWGNIVWAHSVSKDLVNWTPLDHAIHPSQPSDIKGCWSGSATILPGGKPAILYTGIDPNNHQVQNIAIPKNMSDPLLREWKKSPKNPLMEPTIANKINSSSFRDPTTSWLGKDGFWRVLIGSKIDTKGMAILYKSKNFVDWVEAKHPLHSAEGTGMWECPDFYPVLDKNLLRTGVDTSRNGDDDVRHVLKVSLDDTKHDHYLIGSYDVVKDVFVPENGFEDNGFVLRYDYGKYYASKTFFDDGKNRRILLGWVNESSSVADDVKKGWSGIHTIPREIWLHESGKQLVQWPVKEIENLRMNPVNWPTKVIKGGERISITGVDSVQADVEISFEISDLGKVESLRKWIDPQLLCSQKGAGVKGGVGPFGLLVFASQGLKEYTAVFFRIFKYQDKNLVLMCSDQSRSSLNKDNDMTSYGTFVDVDPLHEKLSLRTLIDHSVVESFGGEGRACVTARVYPTLAIHDKAMLKLTSEY

SEQ ID NO: 2845 - protein, 446 aa, Pyrococcus abyssi GE5
MSETLTLTDARSIIENQIEELAKRNKEPEWMTKIRYRALEEFMRAPLGDPIISEEKLLNFIAKPEIEGIPDKIESLDDLPPEMKALLDRLGISEVEQKYIAGLAVQTDTGVIYNQFLQEWAKKGLIVLPTEEAIRKYPDIMKQHFLKLFKAGENKLTAYHTAVWNGGIFLYVKENLKVPFPLHLFFLIQESSLAQAPHIIIIAEKNSEVHLIEGCTAPILVRHSLHLDMTEAYIHDGAKVRLTVLQNWPEYVHTRPMTRAKVGKNAEFLNTTVSLGAGKSNIANPKYWVEEGGHVELNGVILGQKDWYIDLGGEMYLQGKGASGLNSSKAVIMDKSSVITRGKIIAEAKKTKGHISCDALLLSDKARMETYPGLVSLVDEAELSHEAAIGKIREEELFYLMSRGLTEEKATQLIVKGFVEPMLKDIPIEFVVEIKKIIELAVSGGL

SEQ ID NO: 2846 - protein, 315 aa, Mycoplasma genitalium G37
MLKVNADFLTKDQVIYDLVIVGAGPAGIASAIYGKRANLNLAIIEGNTPGGKIVKTNIVENYPGFKTITGPELGLEMYNHLLAFEPVVFYNNLIKIDHLNDTFILYLDNKTTVFSKTVIYATGMEERKLGIEKEDYFYGKGISYCAICDAALYKGKTVGVVGGGNSAIQEAIYLSSIAKTVHLIHRREVFRSDALLVEKLKKISNVVFHLNATVKQLIGQEKLQTVKLASTVDKSESEIAIDCLFPYIGFESNNKPVLDLKLNLDQNGFILGDENMQTNIKGFYVAGDCRSKSFRQIATAISDGVTAVLKVRDDI

SEQ ID NO: 2847 - protein, 566 aa, Bacillus subtilis subsp. subtilis str. 168
MKQFRVTNEGDIQTTLRGLEVLSVPFLNKGVAFTEEERKELGLKGFLPPKVLTIDDQAKRAYEQYSAQPDDLSKNVYLTALHDRNETLFYRLLNDHLGEMLPIVYTPTVGTAIQRYSHEYRKPRGLYLSIDDPDGMKEAFKQYKDQSDTIDLIVATDAEGILGIGDWGVGGIAISIGKLAVYTAAAGIDPSRVLAVVLDAGTNQESLLNDPLYVGNQHSRVRGERYDQFIDDYVALARETFPNALLHWEDFGAKNARSILKRYKDKVCTFNDDIQGTGAVSLAAVLSCAKASKVPLRDHRVVIFGAGTAGIGIAEQLREALVREGLSEEESYKRFWCIDRNGLLTDDMDQLLDFQKPYARSADEVKDYQRNGDGGGIDLLEVVRQAKPTILIGTSTVSGAFTEEIVKEMASHVKRPAILPMSNPTTLSEAKPEDLIEWTEGRALITTGSPFPPVEYNGVTYHIGQANNALVFPGLGLGTIVTKSKLITDGMFEACARAIAGMVNVGVPGAPMLPKVEDLRTVSATVAVEVAKTAMKEGVATEEPEDIIQAVQDAMWYPVYKPIRAI

SEQ ID NO: 2848 - protein, 298 aa, Zea diploperennis
SSEVQVCVTGGAGFIGSYLVKKLLEKGYTVHATLRNTEDEEKTGLLRRLVPGAAERLRLFEADLFDAATFAPAIAGCQFVFLVATPYGLEAAGSKYKSTAEAAVAAVRVILRQCEESKTVKRVIHTASISTASPLKDKEAEGSGDGFKDFISESCWTPLNVDYHLRSAHFDKYILAKLRSEQELLSYNGGESPAFEVVTLPLGLVAGDTVLGHAPETLEHAVSPVSREELSFKFLRLLQSLLGSEPLVHVDDACEALLFCMERPSIAGRFFCAAAYPSIHDITDHYASKFPHLDVPRA

SEQ ID NO: 2849 - protein, 462 aa, Nicotiana sylvestris
MVASPDNNAADGRTVKNKRPIDEWLPITSSRNGQNGGYSAFHNVTAMVGAGVLGLPYAMSELGWGPGVTVMVVSWVITLYTLWQMVECKKCPGMLAGTCIDDHKLAVSNVFGNKLGLWIVVPQQLVVEVGIDIVYMVTGGKSFQKSIVLVCKDNCKDIKLTYYIMIFASVHFVLSHLPNFNAISGVSLVAAIMSLSYCTIAWGASIVLGVQPDVEYEYRAENTGEGIFNFFSGLGEVAFAYAGHNVVLEIQATIPSTPEKPSKGPMWKGVLVAYIIVALCYFPVAIIGYWIFGNSVSNNILISLEKPTWLIVLANAFVVITLLGAYQLYAIPVFDMLETYLVRKLKFKPTWYLRFMTRNLYVAFTMFVGIIFPFLWGLLGFLGGFAFAPTTYFLPCIMWLSIYKPKRWGLSWTSNWICIIVGVMLTVLAPIGGLRTIIIQAKDYNFFYWDSLSGSLAFGKKG

SEQ ID NO: 2850 - protein, 338 aa, Arabidopsis thaliana
MRETKKEEEEVEEEEAMNALAATNRNFKLAARLLGLDSKLEKSLLIPFREIKVECTIPKDDGTLASFVGFRVQHDNARGPMKGGIRYHPEVDPDEVNALAQLMTWKTAVAKIPYGGAKGGIGCDPSKLSISELERLTRVFTQKIHDLIGIHTDVPAPDMGTGPQTMAWILDEYSKFHGYSPAVVTGKPIDLGGSLGRDAATGRGVMFGTEALLNEHGKTISGQRFVIQGFGNVGSWAAKLISEKGGKIVAVSDITGAIKNKDGIDIPALLKHTKEHRGVKGFDGADPIDPNSILVEDCDILVPAALGGVINRENANEIKAKFIIEAEIIQLIRTRMRS

SEQ ID NO: 2851 - protein, 1088 aa, Gibberella zeae PH-1
MTATIQKRIVVVGLGMVGIAFIEKLLKYDAKSKEYTITVVGEEPYLAYNRVGLTTFFEHRKVEELYMNPSEWYLESEASLNYHINTKATHIDTDNKLIECANGESYPYDILVLATGSEAILPRTLKGWDSNGVFVYRTIDDLNKLIKFSGDKQGTNGVVVGGGLLGLEAAKAMLDLECYNKIDLIERSPWVLSRQVDETAGKMVADQVQQLGVNINLGKGVSSLKTDENNNLTGVVFDDDSEVDCSTLCFAIGVKPRDDLARAANLEVGQRGGIVVNDDLRTSMPDIYAIGECASWRGMAYGLIGPGVAMAEVVAFNLTQAKLHSPQTFKTPDMSTKLKLLGVNVASFGDCFADRDGPITLPRKYAKNLVNGDAKSPKSVQALTYRDPFSNVYKKYIFTKDGKYLLGGMMIGDVCDYVKLLPMVKSQKELDVSPSELILGAKKGEEDSDDLDDDAQVCSCHNVTKGDIVKVIKDGTCKDIASIKKCTKAGTGCGGCVPLVTTIFNKTMASMGQEVTNYLCSHFSYSRADLFNIVMVKRLKSMNEVMREVGNDKNAVGCELCKPAVASIMASLWNRHVMDKTTHGLQDTNDRFLGNIQRDGTYSVVPRVSGGEITPDKLVVIGEVAQKYNLYTKITGGQRIDLFGAQKQDLLDIWGQLVAGGMESGHAYAKSLRTVKSCVGSTWCRFGLSDSVGLAVRLEERYKSIRAPHKIKGGVSGCVRECAEAQSKDFGLIATEKGWNIFVGGNGGANPRHAELLAKDVPPTDVVTILDRYLMFYMRTADKLQRTARWIENLPGGIKYLQEVILEDKLGINASLEAQMEELVDSFFDEWAEAIKTPAIANKFKQFANTSDTTRNMELEDDRGQKRPAFWPNDAAAKDDFQGLKDKWSMTAWEPIIESSYFDGADELPNGISATIKRGDTQLAIWRIKGVYYATQQMCPHKRAFILSDGLIGQEGHKTEQNGDKAGAAPWVSCPHHKRNFDLENGACKTDESMSIATFPTEARPDGMLYLKLPPVDELDSALGTKKWMVKKGEAGEAPLAKLDSKIKFVGIRGKKPYVKPTGQSKMTTKPMDLMMASNGCGGGAPEW

SEQ ID NO: 2852 - protein, 367 aa, Arabidopsis thaliana
MTKRNIVDLPEDLVMEILARVPTVTLVRLQSTSKRWNVLIEDKRFAEQHFTNAPRHSLLIMLMTFRVYLVSVDLHTIHNNKVNIISQLRLKDPLSNFLEEVDICNVFHCDGFLLCTTVDNRLVVSNPCSRDTKWIQPRNFYKKFDIFALGKSSCNKYKIMRMDQFYPDRPEFMNYEIYDFNSNSWRVVGKITDWFIPRCMDRGMSVNGNTYWLASTNKDLTSSSFLLGFDFSTERFVRVSLPGDHLSDPVFALAVTREDPKICVAIIQELHIDVWIATTIESTGAASWSKFLSVELANLYERICLDSWMNFLVDQKNKVLVYRDGNYWISNVFLHVVGEDKCIQVDHHDSVSRCSLVVNYVPTLVHI

SEQ ID NO: 2853 - protein, 131 aa, Rhodobacter sphaeroides 2.4.1
MAKMIHSMIRVQDEARSLAFYREAFGLEVAERLDFESFTLLYLSNAESEFELELTVNKGRAEPYALGDGYGHLAVSVADVAAEHARLTEAGLNPRKIVDFAPGGEVIARFFFIADPDGYQIEVLERGGRYK

SEQ ID NO: 2854 - protein, 353 aa, Oryza sativa
EEEGSGRKEREKKRQRAHSASSEMGIFWSKAEPPPPMVLVPPLFDYPPIAARTRMSVPAYELMFGKLSLQNLFEDYFDHAGNMTSRVMLKPLEDPHVDLITTVSAAADKIDGTQVKGDALFRWQKDLDDPHTFVDLLVSTSNPMLQVRSCAYHPKYRVGAFGTFPLLMGNRIREISFFRVRSEDYGVMGVRYGSENLSFGSSFVPFPGSAELPSGAWLVGRKGSLSAGVQYKPLSGNKHLMPYTDWKNWNCAISYGVGLTSPLSPSFIFSLELARSTELLHSLHRSINTWLFKEGLKTLLKMIRLLESQTTLILGLNWLQGLIKINHQRVPTIPCFSLQQVGKLIRTSYSRES

SEQ ID NO: 2855 - protein, 318 aa, Dendrobium crumenatum
MELLEGSRRSDAMAVLRDACENWGFFELLNHGISHEPNEQSETVNKEHYREHYRRFREQRFKEFAAKTLDSGENVDGDNLDWESTFFLRHLPTSNISQVPDLDEDCGSTMKEFALGLEKLAERLLDLLCENLGLEKGYLKRVFCGGSDGLPTFGTKVSNYPPCPKPELIKGLRAHTDAGGIILLFQDDTVSGLQLLKDEEWIDVPPMRHSIVVNIGDQLEVITNGKYKSVMHRVVAQTNGNRMSIASFYNPGSDAVIFPAPELVEKEAAEKKKETYPKFVFEDYMKLYVRQKFEAKEPRFEAMKTMDAVISSQPIPTA

SEQ ID NO: 2856 - protein, 409 aa, Streptococcus suis 89/1591
MAFSFEAAASHGAVIKVIGVGGGGGNAINRMIEEGVAGVEFIAANTDVQALSSSKAETVIQLGPKLTRGLGAGGQPEVGRKAAEESEEALTNVLTGADMVFITAGMGGGSGTGAAPVIARIAKNLGALTVAVVTRPFGFEGNKRGNFAIEGIEGLREQVDTLLIISNNNLLEIVDKKTPLLEALSEADNVLRQGVQGITDLITNPGLINLDFADVKTVMENKGNALMGIGIGTGEDRVIEAARKAIYSPLLETTIDGAEDVIVNVTGGYDMTLTEAEDASEIVNQAAGQGVNIWLGTSIDETMKDEIRVTVVATGVRQDTADKPARHRMEAVSPRPSQRFDHSVASAPTRGAAQQTEAPKASAFGEWDLRRENLIRPTDTEPTSTVSVEKFTMDHDEDELDTPPFFRNR

SEQ ID NO: 2857 - protein, 1342 aa, Yersinia pseudotuberculosis IP 32953
MHTPIIWCNSLRTTFLLRARFLLRARFSLRSWFFLRTVLCCLLLISGQLHASLMTGRQGCDTGQPLTIHSIANSYNDDLLLTPATDTRQSSRRTVKVGVVMDANTPFVVNRDDNAIEGIVADYLKIISDASQLSFQMIGYCDYGLVLNALENGQIDLMAGTPMLAQPGLIASHAFFTNRHVEVRSKNWDPTKRTHPETVAIVNNEPLSPEFLFNYHADRIVAYPNQLQGLLAVAYGNADVFVANATSANYLIDQLQLLTLQIRNFAPYHPAPYSFLARESNQKLIDYLNQILELLPTRATGDIQQRWFGSKHHYNIDAKLLLTEQEISWIQHHPVVTYIAPLDLAPLIFRDRRTGEMAGFSVDLIDIIARRTGIKFDPVYTKDTGEGVRSFKAGKVDLLPIVAVRNGQYGNNLYSSSIAQSLWGIMTREDRMDINNVGDLAGKRVGIQAGSASSSIIGNPLLAQRITFVEAPDTMTLVRWLQQGKVDAVVKNMMTANYLSAQNFSPNIKTVAVAGEEPLMMAFAIRPDLPELKTIIDKVIESIPPEEFDNLTSEWSTFKPKPISFDESSLDNELLMIALKISSGLLLVFGLYLCYLVFNKRRQAKLLHARLLQQESIINALPFAVFIRTASGELAVYNSHFADVHSDKLYDMLNQTHEPAHWPMTSPLDREIDKYCRSVLLNRKPQLVDLSVEIKGEIRDIFLWIIPLNNAEQGLLGGWLDISQRKTVERQLEAARVEAESANRTKSTFLATISHELRTPMYAIMGLLELEIRSNRPVEKDTLVTVSKSAQSLMLLLDDIIDSAKIEAGQLSIHPTAVDFHQEMERMFTLYQPIANERGLRFSGWLDDHIPPLLMADMLRVRQVMGNLLGNALKFTEQGSVSVDITWEPSDEQHGVMNIDITDTGIGISPAAQATLFQPFSQANEGKSPRFGGSGLGLWICHQLIHKMGGKIALESQLGKGTSLLITLPLNIATADDLAQDAAITHVDDERLNQLRNLRILVVDDLPANRQLLQQQLAFIGIEQVVTAENGAKACQILQHNNFDVVITDCSMPVMDGYELAAHIRQDPALKDLIVIGCTADAREESAARCIDAGMNACMIKPVAIDTLQATLLRKDIVSQIANTNHSHSTEDNDRGGNQHNLSEKDTAQQENAPAIHSTTITSSVNRLAAAQNKLRTLSGGNPAVELQLLQSLLESNLQDAVTLTQLYRQLCVEDEDVVETVDTAETVDTAETADTVEDGETRGPGSTVGRHSTTGSDHIPHADIYKQMASLVHRIKGSVQLIDAQELVASCVKFESQLHAQNKQAAMTHGADCLALFIESNQLLVTLISQYPKAATEDSPQ

SEQ ID NO: 2858 - protein, 348 aa, Shewanella sp. MR-4
MLACRGIWLIKGTTLTSPSPAFGVLLVNLGTPDEPTPKAVKRFLKQFLSDPRVVDLSPWLWQPILQGIILNTRPAKVAKLYQSVWTEQGSPLMVISEQQAQKLATDLSATFNQTIPVELGMSYGNPSIDSGFAKLKAQGAERIVVLPLYPQYSCSTVASVFDAVAQYFTQVRDIPELRFSKQYFDHDAYIAALAHSVKRHWKTHGQADKLILSFHGIPLRYATEGDPYPEQCRSTAKLLAQALELTDGQWQVCFQSRFGKEEWLTPYADELLADLPRQGVKSVDVICPAFATDCLETLEEISIGGKETFLHAGGEAYHFIPCLNDDELHIELLRQLVQEQAQPWICAE

SEQ ID NO: 2859 - protein, 130 aa, Triticum aestivum
  misc_feature (92)..(92): Xaa can be any naturally occurring amino acid
  misc_feature (101)..(101): Xaa can be any naturally occurring amino acid
MARLNSKAVVSAVVLAAVVLMMAGREATALSCGQVDSKLAPCVSYVTGKAPSISKECCSGVQGLNGLARNNPDRKDTVQVLKSLATNIKSIXNMDKVSGVXPGKCGVKRGPSPSRMFNQLETMFKLSLLK

SEQ ID NO: 2860 - protein, 173 aa, Pseudomonas fluorescens Pf-5
MSLNELNTFPGVTAQPDAATARFVFNHTMLRVKDITRSLDFYTRVLGFSLVEKRDFPEAEFSLYFLALVDKAQIPADAGARTEWMKSIPGILELTHNHGTENDPAFAYHNGNSDPRGFGHICISVPDIVAACERFEALGCDFQKRLNDGRMKSLAFIKDPDGYWVEIIQPAPL

SEQ ID NO: 2861 - protein, 335 aa, Pseudomonas oleovorans
MALSKEVPEFDIDDDLLLMETGIVLETDVVSDEPAVSSVRTRAKSGSSLKQHKYIDYSRALDATQLYLNEIGFSPLLSPEEEVHFARLSQKGDPAGRKRMIESNLRLVVKIARRYVNRGLSLLDLIEEGNLGLIRAVEKFDPERGFRFSTYATWWIRQTIERAIMSQTRTIRLPFHVVKELNVYLRAARELTQKLDHEPSPEEIATLLEKPVAEVKRMLGLNERVSSVDVSLGPDSDKTLLDTLTDDRPTDPCELLQDDDLSQSIDQWLGELTDKQREVVVRRFGLRGHESSTLEDVGLEIGLTRERVRQIQVEGLERLREILEKNGLSSESLFQ

SEQ ID NO: 2862 - protein, 521 aa, Pseudomonas fluorescens Pf-5
MLDANLKAQLKSYLERVTQPIEIVASLDDGAKSQEMLALLKDIVSLSNQITLLDNGSDARKPSFSLNRPGSDISLRFAGIPMGHEFTSLVLALLQVGGHPSKASAEVIEQIRSLKGEFNFETYFSLSCQNCPDVVQALNLMAVLNPNIRHVAIDGALFQAEVDERKVMAVPSVYLNGVNFGQGRMGLEEILAKLDTGAVEKQAQKLNAKEAFDVLVVGGGPAGASAAIYAARKGIRTGVAAERFGGQVLDTMAIENFISVQATEGPKLAAALEEHVKQYDVDIMNLQRASALVPAKEVGGLHEIQFESGASLKAKSVILATGARWREMGVPGEQEYKAKGVCFCPHCDGPLFKGKRVAVIGGGNSGVEAAIDLAGIVSHVTLLEFDSKLRADAVLQRKLFSLPNVKVITSALTSEVKGDGQKVTGLAYKDRDSGEFHTVDLEGIFVQIGLLPNTDWLKGTVELSPRGEIIVDARGETSLPGVFAAGDVTTVPYKQIVIAVGEGAKASLSAFDHLIRTSAPA

SEQ ID NO: 2863 - protein, 100 aa, Mycoplasma gallisepticum
MKHITNKAELDQLLTTNKKVVVDFYANWCGPCKILGPIFEEVAQDKKDWTFVKVDVDQANEISSEYEIRSIPTIIFFQDGKMADKRIGFIPKNELKELLK

SEQ ID NO: 2864 - protein, 168 aa, Triticum aestivum
  misc_feature (112)..(112): Xaa can be any naturally occurring amino acid
MAALPLATAEACDANSHMITSGELRALQPVFRMYGGRRLFAGPVVTVKVFEDNVLVRGILEEKGEGRVLVVDGGGSLRRALLGGNIAMLAQNNGWAGIVINGCVRDVDEITXCDIGVRALGSHPMKSDKRGVGEKRVPVTVAGARICDGEWLYADADGILVSRTELSV

SEQ ID NO: 2865 - protein, 171 aa, Arabidopsis thaliana
  misc_feature (105)..(105): Xaa can be any naturally occurring amino acid
  misc_feature (128)..(128): Xaa can be any naturally occurring amino acid
SNCNNNVYTLEMCMTGLDREKAAVFYKDEADKTGSMTDNSGIRKILPKSEICDFEFEPCGYSMNSIEGDAISTIHVTPEDGFSYASFEAVGYDFNTLDLSQLVTXGLSCFEPKQFSVAVHSSVGANSXSPEITVDLEDYGCRKRKFESSRKESGTVMYQTFEKLGKYCGSP

SEQ ID NO: 2866 - protein, 363 aa, Desulfitobacterium hafniense Y51
MADNTREIVNYPGYVNTSGPELMEDFKRHAKSFGVEFLKDEVVSADLSQDLKKIMTKKKKEVYGKAVIVAVGTQPRLLNIPGEKELRGNGVAYCATCDAEFFEGEDVVVVGSGDQAIEEGMFITKFARKVTVIVLHDKGVLDCNKVSAEKAFQSEKMDFVWNSTLEAVLGDENVEGVKVKNLKTGTSSILPCQGVFFFVGMIPATEFLKDSGIEMDHRGYISVNDLMETNLSGVYAVGDNRIKYLRQVVSAAGDGATAAVAAERYIEELEAFQKNILNSEKKVLLVFFNAADTQSLEYSSLVEELHKEHSEEYTLVKVDMATKKSLAEKYGVINAPAVVVLDKGEKVKDMECSKDKATLAGQL

SEQ ID NO: 2867 - protein, 502 aa, Treponema denticola ATCC 35405
MADSIVDFDDVSFSYGTQTEGSLKHINLKIEEGECIVLTGQSGCGKTTIMRLINGLIPHFFEGSLTGCVKILGKDTKTTSVGELGRNIASIFQNPRSQFFTTNTTAEAAFACENYGIERAEMIKGVDNAFYDFDAKCLMNRDMFSLSSGEKQKIAIIAAKTLNPNIYVFDEPSANLDIHAIMQLQEMIRKLKEAGHTVIVSEHRLFYLKNLCDRCFIMSNGNIVKELCKSDIENMNTADLTNYKLRTFNIEEIGLNRENKTEYERSDNIKLEIKKLSFSYNHSKKLLDNINITAYAGETIAIIGQNGEGKTTLGKIIAGLLKSAHGRFFLDGKQVKQKELYKSVYFVMQESDYQLYSDSVLSELYVSSGLSSKRNTQKIECIMKLLHIFAYKEKHPWALSGGQKQRVTIAAAMASNKSILIFDEPTSGLDYENMKAVSKAINILSRQGTVNFVISHDLEFLSRVATRAVFIANGTIGGSISLKNNRDFRTVKDFLLRNGVAK

SEQ ID NO: 2868 - protein, 138 aa, Pyrococcus abyssi GE5
MGDKTKVQVSKLKPGRYIIIDDEPCRIVNITVSSPGKHGSAKARIEAVGIFDGKVRSIVKPTSAEVDVPIIDKKTAQVIAITPDTVQIMDMETYEMFEVPIDTGVAEEIRDQLKEGINVEYWETLGRVKIMRIKGEGE

SEQ ID NO: 2869 - protein, 397 aa, Bacillus cereus G9241
MFHRIEEALEDLKQGKVVIVCDDENRENEGDFIALAEYITPETINFMITHGRGLVCVPITEGYAERLQLEPMVAHNTDSHHTAFTVSIDHVSTTTGISAHERATTIQELLNPASKGADFNRPGHIFPLIAKEGGVLRRAGHTEAAVDLAQLCGAEPAGVICEIINEDGTMARVPDLIQCAKQFDIKMITIEDLIAYRRHHETLVTREVEITLPTDFGTFHAIGYSNSLDTKEHIALVKGDISTGDPVLVRVHSECLTGDVFGSCRCDCGPQLHAALTQIEREGKGVLLYMRQEGRGIGLLNKLRAYKLQEEGFDTVEANEKLGFPADLRDYGIGAQILKDLGLQHLRLLTNNPRKIAGLQGYDLEVIERVPLQMPAKEENKTYLQTKVNKLGHLLNL

SEQ ID NO: 2870 - protein, 213 aa, Buchnera aphidicola str. Sg (Schizaphis graminum)
MNQTLLSEFGNPIERVKKAISALQLGEGIIILDDEKRENEGDLVFSSETMTVEQMALTIRYGSGIVCLCITESKRKKLNLPMMVKHNTSTYRTGFTVTIEASKGVSTGVSAKDRLTTIKTATADDAQPSDLNRPGHVFPLRANGGGILARAGHTEAAIEIVSLAGFKPYGVICELTNKDGSMSRTPEIIKFSKSKKMKILTIKDLILYVQNKK

SEQ ID NO: 2871 - protein, 249 aa, Nostoc sp. PCC 7120; identical to SEQ ID NO: 601

SEQ ID NO: 2872 - protein, 252 aa, Nostoc punctiforme
MKPFLFVTDLDDTLVYRTTGDDSALPELNQLLKRHRQEYGTKIVYSTGRSPVLYKELQAQKNLLQPDALVLSVGTEIYLNGADTPDSDWSEILSPGWEREVVLSITRKYRELVRQPDSEQRAFKVSFFLEQEASANVLPQLEAELQKSKLNVKLIYSSGIDLDIVPHSSDKGQAMQFLRQKWKFAAEQTVVCGDSGNDIALFAVGNERGIIVGNARKELLQWHNEHPAEHRYLASCFCAGGIIEGLNYFGLL

SEQ ID NO: 2873 - protein, 257 aa, Nostoc punctiforme
MKLLLVIELDNTLVGNNRAIAALNQRLEAIRNQIYLVYVTGRSYASSRRVIAQEQLLKPDYLIASVGTEIYQQGVLLEKDWANQISKDWDWDAVWTIASYFPALIPQPDSEQTPYKLSFWLDMDAPLEVIHDLQDLLTFTGLQSEVIFSNGRDVDIIPKNSNKGEAAAYLQELLQAQLDATVICGGSGNDISLFQQPSAGIIVGNAQTELLWWYYKTHYPWHFLAHYPGAAGILEGLIYFNILPFPNSWKAMGYAPP

SEQ ID NO: 2874 - protein, 510 aa, Oryza sativa
MAIALRLAAAPLRLRLVSPAPPAIGGAGDGGRRGGGGAARIGVLGRARCRRRRGGGGRLEVAAAAADDSARCRAKGVGAAAAAAETLGGIGVGGGDQLSVVMKFGGSSVSSAARMREVAGLILAFPEERPVVVLSAMGKTTNLLLLAGEKAVGCGVIRVSEIEEWNLIKDLHIKTVEELALPRSVIHTMLDELEQLLKGIAMMKELTLRTTDYLVSFGECMSTRIFAAYLNKIGVKARQYDAFDIGFITTDDFGNADILEATYPAVAKRLHGDWIRDPAIPIVTGFLGKGWKSGAVTTLGRGGSDLTATTIGKALGLREIQVWKDVDGVLTCDPNIYPNATTVPYLTFEEAAELAYFGAQVLHPQSMRPAREGDIPVRVKNSYNPKAPGTLITKQREMDKVVLTSIVLKSNVTMLDIVSTRMLGQFGFLAKELDHVVEELEKIAVVHLLQQRAIISLIGNVRRSSLILEKVNMSLIVHDSEAKQCIKALHQAFFEDDVLTEVEEEALHMS

SEQ ID NO: 2875 - protein, 488 aa, Medicago truncatula
MNTFLKLINRKDQNFQHWYSEVVFSAKLIEHYDISGLYILRPSAVEIWETLQAFFDSEIKKMNVENCYFPMFVLDSHLKKEEAHNSGFKQEVAWVTKSGQSDLEAHLALRPSSETIMYPYYSKWIRGHRDLPLKLNQWCNAVRWVVGDPTPFIRSREFLWQEGHGAFATEDEAHAEALEILELYRRIYEEYLAVPVIKGTKSEMETFGGAIYTNTVEAFIPNTGCGIQGATTHCLGQKFAEKFEVKFEDKKGEKAMVWQNSWGYSTRTIGAMVMVHGDDKGLVLPPKVASTQVIVIPVPYKDVDTQGIYDTCKATVNMLCEAKIRAELDSRDSYSPEKKYSEWEMKGVPLRIEIRPMDLENKQVCVVRRDNGAKIHIANADLVEEIRKFLNNIQQNMFDVAKQKRDECIQVIHTWEEFKEALNQRKMILAPWCDEKDVELDVKRKTENEMGPAKTLCSPFDQPELPEGTKCFKSGKPAKKWTYWGRSY

SEQ ID NO: 2876 - protein, 292 aa, Arthrobacter globiformis
MTASLLSGKPLAKLIQQQAQTEAKVLAEEGTCPTLAVVVATEDSSTHWYVRSIERAAEAAGINCRIIDVGHDATEQVLIAVLKDLSAELSVNGIILQTPLPPGVRTQELVKYIAPEKDIDGANPLSLGLLAVGERAFAPATARAVVEILDHFEIPVAGRNVVVVGRSTVVGKPLSLLLLQKDATTTVCHSKSGALGTYTKTADVVVVAAGRTGLLTGADVSEHSVVIDVGTNVLSDGSLTGDVDEASVRPVAAALTPVPGGVGSVTTALLLLHTAEAAREQSRATSAPVLTR

SEQ ID NO: 2877 - protein, 538 aa, Sinorhizobium meliloti
MTRERIYLFDTTLRDGQQTPGIDFSVEDKIAIASLLDQFGMDYVEGGYPGANPTDTEFFKCRRTDKASFVAFGMTKRAGVSASNDPGLSALLSAKSDAICLVAKSWDYHVEVALGCTNEENLDNIRASVEAVVASGREAMVDCEHFFDGYKANSAYALACAKTAFEAGARWVVLCDTNGGTQPPEIREIVSAVIAEGVPGANLGIHAHNDTGQAVANSLAAVEAGVRQIQGTLNGIGERCGNANLVTLIATLALKETYSSRFETGIDAERLQELTKLAHAFDELLNRSPDPQAPYVGASAFATKAGIHASALLKDPRTYEHVAPESVGNLRKVMVSDQGGKANFINALKRRGITVSKDDPRLDKLISIVKEREATGYAYEGADASFALLASRILGTVPDFFRVESFRVMVERRFDANGKLKTVSEAVVRVIVDGETMMSVAEGHGPVNALDLALRKDLGKYQSEIADLELADYKVRILNGGTEAVTRVLIESTDRSGARWWTVGVSDNIIDASFQALMDSIVYKLLKNRDQVGSIAAE

SEQ ID NO: 2878 - protein, 576 aa, Bordetella bronchiseptica RB50
MRASKYHLNTLKEAPAEAEIASHQLMTRAGMIRKLAGGIYTYMPLGLKVIRKIEGIVREEMNAAGAIELLMPVVQPAELWMESGRWEQYGAELLRIKDRHQRDFVLQPTSEEVITDIARNEIQSYRQLPLNFYHIQTKFRDERRPRFGLMRGREFTMKDAYSFDRDEAGAQRSYDIMYAAYQRIFQRLGLEFRAVAADTGSIGGSRSHEFQVIADTGEDLIVYNPESDYAANIELAEAPALLATRAAPGQDLEAVPTPGAAKCEDVAKLLDLPLARTIKSIVLAVDQPEGPAQVWLLLLRGDHELNEIKAGKLPGLAGFRFATETEILDHFGCKPGYLGPIKTARPVHVVADRTVANMADFVCGANREDYHYQGANWARDLPEPELVADLRNVVEGDPSPDGKGALSIQRGIEVGHVFFLGTKYSEALKATFLDDNGKPAVLQMGCYGIGVTRIVGAAIEQNHDARGIIWPRAIAPYEVVICPVGWGKSETVRDTALALYEALRARGVDVMLDDRDSRPGVMFAEWELIGVPLRVTVGERGLNEGVVELQARREAEAAKVPVDQALAQTLAKLDLL

SEQ ID NO: 2879 - protein, 385 aa, Synechococcus sp. RS9917
MHPQLNGSAATMEMMGAHQSPHADSTGILPSQSARIEVIGVGGGGSNAVNRMIQSDLEGVAYRVLNTDAQALLQSAADHRVQLGQTLTRGLGAGGNPSIGQKAAEESRADLQQALQGADLVFIAAGMGGGTGTGAAPVVAEVAKESGALTVGIVTKPFSFEGRRRMRQADEGIARLAEHVDTLIVIPNDRLRDAIAGAPLQEAFRSADDVLRMGVKGISDIITCPGLVNVDFADVRSVMTEAGTALLGIGVGSGRSRAVEAAQTAINSPLLEAARIDGAKGCVINISGGRDMTLEDMTTASEVIYDVVDPEANIIVGAVVDERLEGEIHVTVIATGFENGQPYRSERATARSESTPYTPSSSQDSGANIPQFLRQRQLRRESTND

SEQ ID NO: 2880 - protein, 138 aa, Hopea bilitonensis
EKNIPVLLGLLSIWNVSFLGYPARAILPYSQALEKLAPHIQQVSMESNGKGVSIDGVPLPFEAGEIDFGEPGTNGQHSFYQLIHQGRVIPCDFIGSAKSQQPIHLKGEMVSNHDELMSNFFAQPDALAFGKTPEELHK

SEQ ID NO: 2881 - protein, 204 aa, Physcomitrella patens subsp. patens
MKMARVMFAAVVTLALLVAAQASDPELTSDFFVAPGVDKATLTGDYFTSQVFRDGVNVVAPAKIGVKRITSDSFTVLTGLGVSSAMIKYLPGGINPHHTHPRGTEVLLVLEGELSVGLVDTTNKLFTKTLYQGDVFVFPKGLVHYQINMSSRPACVYVAFSSSNPGTVSIPVTLFGSGIPDNVHTAAFKVNNQVVDKLQAPFNK

SEQ ID NO: 2882 - protein, 112 aa, Silicibacter pomeroyi DSS-3
MKKIEAIIKPFKLDEVKEALQDIGVQGLSVVEVKGFGRQKGHTELYRGAEYVVDFLPKVKLEVVLDDDQVDAAIEAIVSAAKTDKIGDGKIFVSTVEQAIRIRTGETGSDAL

SEQ ID NO: 2883 - protein, 138 aa, Hopea helferi
EKNIPVLLGLLSIWNVSFLGYPARAILPYSQALEKFAPHIQQVSMESNGKGVSIDGVPLPFEAGEIDFGEPGTNGQHSFYQLIHQGRVIPCDFIGSAKSQQPIHLKGEVVSNHDELMSNFFAQPDALAFGKTPEELHK

SEQ ID NO: 2884 - protein, 490 aa, Sulfolobus tokodaii str. 7
MLLEEVQKNYGKLKLYIDGQRVESKTEIWGNVYNPAKDEIIAQVPFSTKDETKEAIQSAQEAFEKWRELPITDRLQYLFRIKFKLEEYYETLSRIITQNHGKTIQEARGELRRTIESVESAISVAYTLAKGEHMDQVSQDIDEVSIREPLGVFGIITPFNFPAMVPFWFIPYAIVLGNTVVVKPSEITPVTMDYVIKIFEEVKLPKGVINIVHGAKDVVDEFLENKFIKGVTFVGSTKVGRYVYEKAGLNGKRAIVQAGAKNFIVVMPDADLNKVIPSILSAFFGNAGQRCLAAANLVIVGDVYDEVKRKFVEAARGLKLGYGLDESVDMGPVVTRDAKKRILGYIEKGVEEGAKLILDGRNFRVEDYPNGYFVGPTIFDEVTPEMVIAKEEIFGPVASIIRAKSLDEAIDMINKSNYGNAASIFTTSGYYARKFRREVSAGNIGINVGVAQPMAFFPFGGKKDSFFGVLHGQIDSIDFFTDRKVVIERW

SEQ ID NO: 2885 - protein, 509 aa, Mycobacterium avium subsp. paratuberculosis K-10
MTLPTAAELRARAADALRSLGAHVELGAPDAHGLPASTPITGEVLFTVAPTTSDQAEHTITQATQAFSEWRRTPAPVRGALVARLGELLRAHRDELAALVTLEVGKITSEAAGEVQEMIDICQFAVGLSRQLYGRTIASERPGHRLSETWHPLGVVGVITAFNFPVAVWAWNAALALVCGDTVVWKPSELTPLTALATQALIARAAADVGAPPGVSAVVLGDRELGELLVDDERVALVSATGSVRMGRAVGPRVAARFGRVLLELGGNNAAVVTPSADLDLAVRAVVFAAAGTAGQRCTTLRRLIVHRSVADEVVARVVSALRRLPIGDPFEPGTLVGPLIHETAYRDMVGALESARADGGEVIDGDRRHPFAVEHPSSYYVAPAVVRMPAQTPIVATETFAPILYVLTYDRLDDAIALNNAVPQGLSSAIFTTDLREAERFLDESDCGIANVNIGTSGAEIGGAFGGEKQTGGGRESGSDSWKAYMRQSTNTVNYSGALPLAQGVEFG

SEQ ID NO: 2886 - protein, 235 aa, Debaryomyces hansenii CBS767
MTFEVNTSVLSRVDGSAELSVGTTKVITSVTGPIEPKIRQELPNLASLEIIVRPSLGVSTTREKALEDKLRSILQSIIIRYKYPRQLIQIVVQFLITENNINDNGSNQHNKDFTLTELNAAINCCYFALIDANIALYNSFSSTSICIPLDTKKENYIFNPNMNDLIVSESHHVICFSIKDSKAANLLLLESHGKFSEDQLLLAIRKAGDECESIHNTYQRKCIANKVENDFIWKS

SEQ ID NO: 2887 - protein, 203 aa, Physcomitrella patens subsp. patens
MAARFALVMLATMAMVYAAQAGDPELTTDFFAPMGTNKADLNGDYFTSMVFRGEPAVPEGAKIGVKRITSDSFPVLTGLGVSSAQIKYLPGGINPPHTHPRGTELLIVQKGILTVGLVDTTNKFYTKELQAGDVFVFPRGLVHYQINLSHKPVIAYVGFSSSNPGTVSLPATLFGSGIPDNVHMAAFRVNQHVVDKLQAPFKM

SEQ ID NO: 2888 - protein, 481 aa, Treponema denticola ATCC 35405
MGIVEARIKNFTYENDESPTLHAIDLSIEEGELVVLTGFSGCGKTTLTRILNGLIPYHYGGILDGEVRILGKNILDYKKGELAKYIGNVFQNPSDQFFATIAEEEVAFAGENLGMDSQTLCEKTDAAFQTMQIESLKGAKLSELSGGQKQKVAIASTLIYDTKLLFFDEPSSNLDYEGIVQFQAMIRDLKAMGKTIIIAEHRLFFLNELYDKLIYMKDGTIEKIFLKGELTTEDCRRYGLRAIRYDSLVCENPSVPKQAVTHIEGLSVSIGRRELIKNLSFDVHAGEITAVIGKNGIGKTTLGKALGGLLSCKGQIGYGKRRRQRLRNAYYMMQDVDYQIFFDTVENELIPSSKRKDESYLQQAAEYLRTIDLWEKRLDHPQELSGGQKQRLALATAFLSGRRIIILDEPTSGLDYKRMDEIAKLILHCAQEVSVLIITHDLELLFKVCNTALLLGENAYKKIPVNGNEGEIIGFMGKLSI

SEQ ID NO: 2889 - protein, 203 aa, Physcomitrella patens subsp. patens
MAPRPALVMMITMAVVFTAQATDLELTTDFFVSVGTNKANLTGDYFTSMDFRCEPQIPEGARVAVKKITSDTFPVLTGLGLSSAQIKYLPGGINPPHTHPRGTELLLVQKGTLTVGLVDTTNKFYTQVLRKGDVFVFPKGLVHYQINLGHKPVIAYVAFSSSNPGTVSLPATLFGSGIPDNVHMTAFKVDGGVVDSLQRPFGK

SEQ ID NO: 2890 - protein, 287 aa, Yarrowia lipolytica CLIB122
MSRQELVQWVNELLQTEISKVEECGKGAIYCQIMDSIYGDVPMSKVKFNVKAEYEFLNNYKVLQGVFNRHKIDRQIPVEKLVKCRFQDNLEFLQYCKKHWDANWSGQEYDAVGRRAGRVATVPSTAPGSTPNATSGRTSVQSQTSGRSSVVRSRPSVASGAAGSVGVGAGAGAGTGAGSLSGASGRASVSRRPGASGSSQASSAALAKAQQQIATLEADAVEYQQVLEGLETERNFYFNKLREIEVLVQENAEQMDTVQVEGMIREIQTILYSTEEGFQVPEEEEVF

SEQ ID NO: 2891 - protein, 406 aa, Desulfitobacterium hafniense Y51
MSNSYDLIIIGGGPAGLAAGIYGGRAKLRTLIINKGTIGGMVDTTREIVNYPGYIHTSGPDLMSDFKKHAESFGVEFLKDEVVSTELSQDLKKVTTKKKKEFYGKAVIIAAGTQPRLLNIPGEKELRGSGVAYCATCDAEFFQDEDVVVVGSGDQAIEEGMFITKFARKVTVIVLHDEGILDCNKVSAEKAFQNEKMEFVWNSTLEAVLGEENVEGVQVKNLKTGGSSLLPCQGVFFFVGMIPATEFLQNSGIEMDRRGYIPVNDLMETNLPGIYAVGDNRVKYLRQVVSAAGDGATAAVAAERYIEELEAFQKNILHSEKKVLLAFFNAANTASLEFTVVMEELIQEHSDMYKLVKVDMATKKSLAEKYGVTNVPAVVMLDKGEKIKELECSLDKEILAEQLGKE

SEQ ID NO: 2892 - protein, 233 aa, Prochlorococcus marinus str. NATL2A
MTTQIEKNEKAEVTEYFNGTGFDRWNRIYSESDDVNKVQKNIRIGHQKTVDDVISWLKEYDNIKDKSFCDAGCGVGSLSIPLAKLGAKSIHLSDISEAMINETKSRAKEEGLDFNKLNFRTSDLENLKGSFNTVICLDVFIHYPQQEAEAMVKHLCELSDERLIVSFAPYTPLLALLKGIGQLFPGPSKTTRAYTLRESGIIEAAKQSGFKVVKSKLNQAPFYFSKLIEFVKS

SEQ ID NO: 2893 - protein, 282 aa, Beta vulgaris
MCESFKRQYQLCDEIGRGRFGVVFRCFSPSSHTSFAVKSIDKRLLLDDETDRECLDKEPKILQILSPHPNILQIHDIFDSDSHLLIVTDLCQESTLYDRVVSAGPFSETDACSVFTQLIDALAHCHRNYICHRDVKPDNILFDSRNRVKLCDFGSAEWFGGVEGRERMNGIVGTPYYVAPEVLAGREYNEKIDVWSAGVILYIMLGGVPPFYGDTVEDTFAAVLRGNLRFPTKIFRSISPEAKDLMRKMLSKDVSRRFSAEQVLRHPWVTSGGMTSTMNDMS

SEQ ID NO: 2894 - protein, 591 aa, Streptococcus pneumoniae
MTQGKITASAAMLNVLKTWGVDTIYGIPSGTLSSLMDALAEDKDIRFLQVRHEETGALAAVMQAKFGGSIGVAVGSGGPGATHLINGVYDAAMDNTPFLAILGSRPVNELNMDAFQELNQNPMYNGIAVYNKRVAYAEQLPKVIDEACRAAISKKGPAVVEIPVNFGFQEIDENSYYGSGSYERSFIAPALNEVEIDKAVEILNNAERPVIYAGFGGVKAGEVITELSRKIKAPIITTGKNFEAFEWNYEGLTGSAYRVGWKPANEVVFEADTVLFLGSNFTFAEVYEAFKNTEKFIQVDIDPYKLGKRHALDASILGDAGQAAKAILDKVNPVESTPWWRANVKNNQNWRDYMNKLEGKTEGELQLYQVYNAINKHADQDAIYSIDVGNTTQTSTRHLHMTPKNMWRTSPLFATMGIALPGGIAAKKDNPDRQVWNIMGDGAFNMCYPDVITNVQYDLPVINLVFSNAEYGFIKNKYEDTNKHLFGVDFTNADYAKIAEAQGAVGFTVDRIEDIDAVVAEAVKLNKEGKTVVIDARITQHRPLPVEVLELDPKLHSEEAIKAFKEKYEAEELVPFRLFLEEEGLQSRAIK

SEQ ID NO: 2895 - protein, 326 aa, Borrelia burgdorferi B31
MLEFETIDINLTKKKNLSQKEVDFIEDVIIVGSGPAGLTAGIYSVMSNYKAAILEGPEPGGQLTTTTEVYNYPGFKNGISGRNLMLNMREQVVNLGAKTFPETVFSIKRKGNIFYLYTENYIYKSKAVIIAVGSKPKKLETLKNSGLFWNKGISVCAICDGHLFKGKRVAVIGGGNTALSESIYLSKLVDKVYLIVRKNNLRAIAMLRDSVAKLPNIEILYNSEAIEVDGKSSVSSVKIFNKKDNVVYELEVSAVFMAVGYKPNTEFLKGFLDLDEEGFIVTKDVVKTSVDGVFSCGDVSNKLYAQAITAAAEGFIASVELGNFLK

SEQ ID NO: 2896 - protein, 955 aa, Bradyrhizobium japonicum USDA 110
MMTAHRKSNGDTTNFARRHIGPSARDVAAMLETVGAKSVDALMAETLPASIRQAAPLDLGKPLSETEAIAHMGELAAQNQVFTSLIGQGYSGTILPAVIQRNILENPAWYTAYTPYQPEISQGRLEALFNFQTMICDLTGLDVANASLLDEATAAAEAMALAERHSRVEAKAFFVDKDVHPQTLAVMRTRAEPLGWNLIVGDPLTDLDKADVLGALLQYPGSSGALRDLRPAIAALKAKGALAIVAADLLALTLLASPGELGADIAIGSAQRFGVPMGYGGPHAAYMAVRDALKRSLPGRIVGLSVDSRGMPAYRLALQTREQHIRREKATSNICTAQVLLAVIAAMYAVYHGPEGLSQIARQVHRRAAVLAAGLRKLGFAPHSDSFFDTLSVDAGAKRAEIVARAAAEKINLGVGETALRIALDETTTPATVEAVWRAFGGQLAYAELDATTREALPEALKRTTAFLTHPVFHAHRSETEMLRYMRKLSDRDLALDRAMIPLGSCTMKLNATTEMMPLTWPEFGSLHPFAPREQAKGYHALFARLEKWLCDITGYDAISLQPNSGAQGEYAGLLAIRGYHAARGEAHRKICLIPSSAHGTNPASAAMVGMDVVVVACEKNGDVDVNDLRAKADKHANDLAAIMITYPSTHGVFEEHIREICDIVHGHGGQVYLDGANLNAQVGLSRPGDYGADVSHLNLHKTFCIPHGGGGPGMGPIGVKAHLAPFLPGHPATRGDAPVGPVSAAPFGSASILTISYIYILMMGGEGLKRATEIAILNANYIAARLDAHFPVLYKNARGRVAHECIVDPRALKTTSGVTVDDIAKRLIDYGFHAPTMSFPVPGTLMIEPTESESKAELDRFCDAMIAIRKEIGEVEAGRFKIEASPLRHAPHTVHDIADDAWARAYSRAEGCFPDGVSRTDKYWSPVGRVDNVYGDRNLVCSCPPVSDYAEAAE

SEQ ID NO: 2897 - protein, 288 aa, Bacillus cereus G9241
MKKAMLALAATSVIALSACGTSSSDKIVTSKAGDITKEEFYEQMKNSQTGKQTLNNMVMEKVLIKNYKVDDKEVDKKFDEMKKQLGDQFDTLLKQQGLKEETVKNGVRASLAQEKAIEKTITDKELKDYYKPEIKASHILVKDEATAKKVKEELGQGKSFEELAKQYSEDTGSKEKGGDLGFFGPGKMVKEFEDAAYKLKKDEVSEPVKSQFGYHIIKVTDIKEPEKSFEQSKADIKKEIVQKKMQDGQFMNDLMMKEIKKADVKVDDKDLKDLFEEKKTDAKKEEKK

SEQ ID NO: 2898 - protein, 100 aa, Mycoplasma gallisepticum
MKHITNKAELDQLLTTNKKVVVDFYANWCGPCKILGPIFEEVAQDKKDWTFVKVDVDQANEISSEYEIRSIPTIIFFQDGKMADKIIGFIPKNELKELLK

SEQ ID NO: 2899 - protein, 375 aa, Medicago truncatula
MKNEVETETGVRLINRKDQNFKDCAELIEHYDISGLYILRPSAVEIWETLQAFFDSEIKKMNVENCYFPMFVLDCHLKKEKAHNEGFKQVVAWVTKSGHSDLEAHLALRPSSETIMYPYYSKWIRGHRDLPLKLNQWCNVVRWVVGDPTPFIRSREFLWQEGHSAFATEDEAHAEAFIPNTGCGIQGATTHCLRQKFAEKFEVKFEDMKGEKAMVWQNSWGYSTRTIGAMVMVHGDDKGLVLPPKVASTQVIVIPVPYKDQKIRAELDSRDNCSPERKYSDWELKGVPLRIEIGPKDLVNKQVCVVLRDNGAKMDIANADLVEEIKKLLNIIQQNMFDVAKQKRDECIQVIHTWEEFKEALNQRKMILAPWCDEK

SEQ ID NO: 2900 - protein, 102 aa, Mycoplasma genitalium G37
MVTEIRSLKQLEEIFSAKKNVIVDFWAAWCGPCKLTSPEFQKAADEFSDAQFVKVNVDDHTDIAAAYNITSLPTIVVFENGVEKKRAIGFMPKTKIIDLFNN

SEQ ID NO: 2901 - protein, 370 aa, Xanthobacter autotrophicus Py2
MATHKLLLLAGDGIGPEVMAEVKRVAAWLDQAGLASFAIEEDLVGGCAYDAHGAAISEDAMVRAKAADAVLLGAVGGPKWASVPYEARPEAGLLRLRKDLQLFANLRPAICYPALADASSLKREVVEGLDILIVRELTGGVYFGEPKTIMDLGNGQKRAIDTQVYDTYEIERIAAVAFELARTRRNKVTSSEKHNVMKSGVLWKEVVTALHERAYKDVELEHNLADSLAMQLVRWPKQYDVIVTDNLFGDILSDIAAMLTGSLGMLPSASLGAADPVTGKRAALYEPVHGSAPDIAGKGIANPIAMIGSLAMALRYSFNQGEVADRIDQAIAGVLASGKRTGDIAGPGTETIGTQDMGKAIIAELDAATA

SEQ ID NO: 2902 - protein, 291 aa, Blastopirellula marina DSM 3645
MSILINKDTKVICQGITGRVGGFHTKGCLEYGTKMVGGVTPGKGGQQVEGLPVWDTVEEAVAATGCEATMIFVPPAGTADAILEALDAKIKVIIAITEGVPVLDMVPVYEKVRASDSVLIGPNCPGVITPEECKIGIMPGYIHKKGPVGVMSRSGTLTYEAVWQLTSLGLGQSTCVGLGGDPIVGTSFIDLLKMFQADGATEAIMMMGEIGGTAEEEAAEFIKANVDKPVAAFIAGRTAPPGKRMGHAGAIISGGKGTADEKFAALRAAGVEIAESPADMGTALKRAIEKK

SEQ ID NO: 2903 - protein, 531 aa, Gibberella zeae PH-1
MSIKEDTKGHLEHLEHSNSPDSIQEVNIDDLDSIEQTQTGKFSWLVSITAAIGGMLFGYDTGIISAVLVYIHQDLGKTLTSQEKELVTSVTSGGAFIGAIFAGATADRYGRKVAIYVGCLLFTVGAIIQAASFSVAQMTVGRVVVGFGVGSAAMIVPLYIAECSPSKYRGRMIGLDNMSITGGQLVSYGVGAAFAHVSSGWRWMVGIGAFPAIILACLLPFCPESPRQLIFHGKPDEAAAVIRRIFPNGTEQQVQDKIQHLTYHVNEAKALNAGKSGWWVFKQLYVIPANFRALVSACGLMAISQLSGFNSLMYYSPLLFSLVGFSNPVAVGTIIAGTNFIFTWVNLMLVDRAGRRRILLCTVPFMGIFLVIAAVCFKFIPINHDLSLASDAKIGWPAIVVLISMVFFVGFYSSGIGNTAWLSSEFFPMEVRAMGTMMLTMTCWGSNIIVASTFLTQMENTTPSGAFGFYAAICILGWVCIYFCYPEVKGMTLEDIRDIFQHGFGVQRAREVQKQMKMANKAITSEVLTRA

SEQ ID NO: 2904 - protein, 63 aa, Brassica napus
MDVSNTMLLVAIAAAYWLWFKRISRWLKGPRVWPILGSLPGLIEQRDRMHDWITENLRACGGT

SEQ ID NO: 2905 - protein, 671 aa, Oryza sativa
MHPLSTTMQAFVFIFAVLALLAGDVEGRQGCYPFSCGHLQNISHPFRRRGDPQRCGVPSYELDCRDSKATIRINTGTYYVTSINYTTSVFWVVDASLKDTNSSCPLPRSDQLPFVSGGIQGSHGGWDLALDPGPGATWVSFVNCSQAVRNNSVYVPVDCLSTSSSFVYVFGSWIMPPSVFPIIGNLETSCRYLAMIPLGGWDSPLPHNASFSDIVRSMRNGFAVHFPIIHRWSRIGHIKDCLMGSIRILWRIHCTICFVCFQVDCWYFYDSVFLIIQYIITTAPFQCLKTHLLKVITVYVKLFFYAVLCRFVIAPLTLLTFLAFKYWKTRIKIDAVEKFLQMQLMLGPTRYAYTDIIAMTSHFRDKLGQGGYGSVFKGVILPGDVHVAIKMLSNYNCNGEEFISEVSTIGSIHHVNVVRLVGYCAEEMRSALVYEYMPHGSLDRFIFSPDKSLSWDKLNEIALGIARGINYLHQGCDMQILHFDIKPHNILLDSNFVPKVADFGLAKLYPRDNSFMPVSAARGTVGYIAPEMISRSFGIISSKSDVYSFGMLLLEMAGGRRNSKQNMSSSSQSYYPSWVYNQLVQQKMGEIANAFNMHELEKKLCVVGLHCIQMKSHDRPTMSEVIEMLEGDVGGLQLPSRPFFCDDEPLPLLVDSCRFSSELTEISEEDE

SEQ ID NO: 2906 - protein, 349 aa, Mycoplasma pulmonis
MMICKTNNYYFFKEILVIRIAINGFGRIGRLTFKRLVEKHKNEVEIVAVNDLTQSSTLMHLLKFDTAYGRFNSKVELTEKGFSVDSKEVLVFAERDPRNLPWGKLEIDLVLECTGMFASKEKSQVHLDAGAKRVLISAPSGSDVKTIVYGVNDSSLSSEDKIVSAASCTTNCLAPLVNALEKEYGILTGSMTTTHAYTADQRLQDAPHNDLRRARAAAQNMVPTSTGAAKAIGLVVPSAVGKLDGVAIRVPVITGSLVDLAVQLEKDPKSVEELNAAIKKYASESFEYSEDPLVSSDIIGSSYGSIFDSKLTKIIGSGENKLYKLYAWYDNEASFVSQFVRTALAFGKK

SEQ ID NO: 2907 - protein, 835 aa, Dechloromonas aromatica RCB
MAESPPAIYGQLSLRARFWLALIGCLAFIWLVTFYELDRRQMGDLHEVEHSTEFQAQAYAENTLSLIKRLNEILLDLRTRWDGDPASFAAAVQHRQDYMADIAFQVAVIDEHGWLAYSNLGAPKERLDLSQREHFRVHLDGRDRLFISKPLKGKVSGKWSIQFTRPIITKDGFKGVLVVSVSPDNFASFREKLAPDAVIIIVTDSGDIMARQPDNDMAMGKRISGTPYLQAQAPVSGSFSRQAQLDGVKRIYGFYRLPEYGLSFVVGHSVDRVLAPYRAHRVVIVSAASAISLAIVILLLLLFRALSLRADMEKRLQDSQAMLRSAVDTIGEAFVIYDQNDRLAYCNEQYRAYYPTSADLLVPGKTFEEIIRAGAERGQYPEAIGRIDAWVAERLAVHRSGNSDLIQALDDGRWLRIREHKTPEGFIVGFRIDITAVYAAKEAAEAANAAKSNFLAMMSHEIRTPMNGILGMAQLLLLPDLSKEEGNEYARTILNSGQTLLTLLNDILDFSKIEAGKLEFSAVAFDPAQLVRETVTLFTGAVREKGIVIDTDCQGTGGARYRADSTRLRQMLANLVSNAVKFTTQGFVRVDAREINRDRGTALLEFSVSDSGIGIPVDKQSLLFKPFSQADSSTTREYGGTGLGLSIVRRLAEMMGGEVGVESESGQGARFWFRIRAELIAAGAECREAERASVGDSRPRAASESPRRILVVDDNMVNLRVAQAMLRKLGIEANAAENGLEATQAATAAERPDLILMDVQMPLMDGLEATRKIRAWEQANNQPRLVIVALTAGAFAEDYEHCIAAGMDDFLAKPINHDQLQQLLGKWLGSERPGR

SEQ ID NO: 2908 - protein, 441 aa, Roseovarius nubinhibens ISM
MTHLTKFALPAALVLLPTLASAQEADTTPLNEDIGFIFTTFMFLVSGFLVFFMAAGFAMLEAGLVRGKNVTMQLTKNMALFSLASIFYYVLGYNLMYPGDGWSIDGLLGAFSITSLEPVGLEGAEPDLTYASVGSDFFFQLMFCAATASIVSGALAERIKLWPFLAFTIVLTAVIYPIQASWKWGGGFLDAAGFQDFAGSTVVHSVGGWAALVGAIILGPRIGKYAKDGRVTPFPGSNLALATLGTFILWLGWFGFNGGSQLYMDTAGNVADISRIFSNTNTAAAAGAVAALILTQLMYNKPDLTMILNGALAGLVSITAEPLAPSLIEATLIGAVGGVIVVFTVPLLDKLKIDDVVGAIPVHLFAGIWGTIAVAFTNSDANILTQLYAIVVVGVFVSAASAVVWLLLKAIMGLRVDEEAEINGLDTTELGMEAYPEFTRS

SEQ ID NO: 2909 - protein, 479 aa, Mycoplasma hyopneumoniae 232
MKKPEKITSRTANFAKWYVDVITQADLMNYGPIKGTIYFKPLGYKIWENIVKIVNAYFVKQKIENVYFPLLIPQDFIEKEKKHIEGFAPELLTITKVGDKNLVENIYIRPTSELLFADYFKAEIAKNNILPIKLNQWSQVLRWEKTTNPFLRNTEFLWQEGHTIHASKVEADQFAKKIARFYKYFLENYLAIPVISGQKTEREKFAGAVNTYTVEAMMQNFRALQSATAHFLGQNFAKNFEIFYKNKENKSQIPFQTSWGLSTRLIGAIVMVHSDDNGLIFPPKIAPIQVDILEFFSKKNQEVKIFAKKIAKILKNAKISYKIDDTDQQIGYKINNSEVHGAPIRIEIGPNEVKNNQICLVRRDNHQKFFFNIDLLKEKCRKILEQIQADLFKKAKIRLLENTVFVNSINEFEHAVKNNKFVIAPFSESPEREQEIQEKTGATARCILPKNSFFALPQTGNSIFSGEKTNKFVLFAKSY

SEQ ID NO: 2910 - protein, 138 aa, Hopea odorata
EKNIPVLLGLLSIWNVSFLGHPARAILPYSQALEKFAPHIQQVSMESNGKGVSIDGMPLPFEAGEIDFGEPGTNGQHSFYQLIHQGRVIPCDFIGSAKSQQPIHLKGEVVSNHDELMSNFFAQPDALAFGKTPEELHE

SEQ ID NO: 2911 - protein, 112 aa, Roseovarius nubinhibens ISM
MKLIIATIKPFKLDEVREALTGVGVTGMSVTEIKGFGNQSGHTEIYRGAEYSVNYVPKIRLEIAVSDALADEVIQTIAKTARTGKIGDGKIFALDLQQAMRVRTGDLNDDAL

SEQ ID NO: 2912 - protein, 221 aa, Physcomitrella patens subsp. patens
MEALKGAVLLYLVVRSALSPVLVVANDPSPLQDICVADLSSPVKVNGYVCKDPDAVTVNDFIYHGLHNRGDTNNGNRQKTTQVFVTQLPGLNTLGAAFARLDFDVGGINVPHTHPRATEIFLVMEGALYMGFITTANKLFVTTLYKGDVFVFPRGLVHFQINVGSGPALAFAGFNSQAPGLLQIAPSLFNSTPPIDDSVLRNGFRTDQATVDQIRSNFRTA

SEQ ID NO: 2913 - protein, 1365 aa, Aspergillus nidulans FGSC A4
MGVYLFSSSLWATLLLAILIYRLVRITYNLYFHPLSGIPGPSAWAASRLPFVYALIRGTIIQDFQKLHEQYGPIIRIAPNEVTFAHPEAYTDIFQPRPEKSQGQFLKDPLWWARQPGHPDSLLSVINPERHAQMRRVLSPGFTARALRKQEPFVQKYVNLLVAQLQDLVSKSPSAHINMTPWFNYTTFDIFGDLGFGESFDCLQHSRYHPWIALLFDSVKAAGFVIATRYYPLIEAVLLKCVPPSMRKIQRDHYQQIVDKVQRRLGWELQRPDFMSYVIDERGGLRLDAGELYATFMILTTAGSETTATALTGTLNYLVNHSPESLQRLENEIRGAFSGLDAITLDAVRNLPFLNAVIQEGLRLCPPIPWVLPRLVPQGGSMICGTWLPGGTPVSIQAYTLNRDPTLFNRATSFLPERWLASSTSDSSSCFFNDQRQVVQPFSTGPRACLGQHLAWAEMRLILAKLVWVFDFGAIDGQGVNWEDLRTYLLVERKPINAVADVAHLWPGALEGVQACTVYWYPSSITESHPQKVHRECIDYLPALVLKPCVSFCLPYPIICSTSFTFTPSRKGEQRRGSHTSLGTRGTLSHHLQYQYHYRLYFPPLAKFPGSRIAAATGCHDPDFYNELYVTESKRRTNHYDVFCKGIEFEFDGSHLLTVDHTLHLKRRKPLEPFFSRKSIQKPQPTLAEVTLKFEQPLRASSGTGMVVQLDHACAAFSGDIIAKICLDDVAEGDRFLDHPEFAPYCGTMLADHDRIFSQTHNNSKPVTSLFPHVAQSDMPESDRSPERLAKEAQVLLGGGTASTARTIAFASFYIADSPDIRSSLRDELWETMAGWPERVPSGLSSRDLPICRPLLKSLSGIYCLYESPSTMMAIDPERAGTTEKAWTRFLQLAAHPRSRPLRTLEAYLPSRVIDAGELIWFGTLTFAMAISIRNEELELCLKLARPGYAAVSLTNDNYTWNKNCEEAQRLGIDYVYNAVWVIMQEQSVGEEEAKRVCAEQIRYYIKQYFQVVEQEKRCWWLSDDLKTYLEAVKATPATAREMGAQFSQFFPPHPTFTSENLSEQQGKVFLITGGTSGIGLELAKILYCHGGKVYITARSEEKAEKAIQEIQASAPNHHGELDFIILELDDLRSIKASVEAFKAQESKLDILWNNAGVSQPPLGSVSKQGHELQLAVNCFGPFLFTQMLLPLLDAAVASSVSPGSVRVIWTSSQVAELSSPDEGIIMSELTSPPKDNVRNYVNSKTGNWFLSAEFARRYGSRGIVSVALNPGAANTNLLKDARLMKILSYPLLHRAGLAAHTELYAGFSPAISLQNNGCYVIPFGRIHDQVADALLSAMKVAEDGGSGRAKEFWEFCEARTKDYL

SEQ ID NO: 2914 - protein, 316 aa, Bacteroides thetaiotaomicron VPI-5482
MAEIEKVKCLIIGSGPAGYTAAIYAGRANLCPVLYEGLQPGGQLTTTTDVENFPGYPEGISGPQLMEDLRAQASRFGTDVRFGIATAADLSKAPYQITIDGDKVIETEALIISTGATAKYLGLEDEKKYAGMGVSACATCDGFFYRKKVVAVVGGGDTACEEAIYLAGLASKVYLVVRKPYLRASKIMQERVQKHEKIEVLFEHNVVGLFGDNGVEGMNVVKRWGESDEERYSLPIDGFFLAIGHKPNSDIFKEYIDTDEVGYIITDGDSPRTKVPGVFAAGDVADPHYRQAITAAGSGCKAAIEAERYLSAKGII

SEQ ID NO: 2915 - protein, 623 aa, Brassica oleracea
MASSILRNPMLSSPTTITTPSLPSFSSKPSPLSFRFPPSHHRSSLRIKSLRLSCSLSDPSPPLRRCRPEYIPNRISDPNYVRVFDTTLRDGEQSPGATLTSKEKLDIARQLAKLGVDVIEAGFPAASKDDFEAVKTIAETVGNAVDGDGYVPVICGLSRCNKRDIETAWEAVKYAKRPRIHTFIATSDIHLEYKLKKSKDEVIEFARNMVKFARSLGCEDVEFSPEDAGRSEREFLYQILGEVIKAGATTLNIPDTVGITLPSEFGQLIADIKANTPGIENVIISTHCQNDLGLSTANTLSGAHSGARQVEVTINGIGERAGNASLEEVVMAIKCRGDHVLGGLYTGIDTRHIVMTSKMVEDYTGMQTQPHKAIVGANAFAHESGIHQDGMLKHKGTYEIICPEEIGLERSNDAGIVLGKLSGRHALKDRLTELGYVLDDEQLSSIFWRFKSVAERKKRVTDADIIALVSDEVFQPEALWKLLDIQITCGTLGLSTATVKLADADGKEHVACSMGTGPVDSAYKAVDLIVKEPATLLEYSMNAVTEGIDAIATTRVLIRGNNNYSTTNAITGEEVQRTFSGTGAGMDIVVSSVKAYVGALNKMLDFKENTTTKIPSQNNKVPA

SEQ ID NO: 2916 - protein, 516 aa, Triticum monococcum
MAMAMELLVSYPEVLLAIVSYLCLSLLRLILRCQKSGIPVKWPVVGMLPFLVRNRHHIHDKFAHALHEAGCNLMFTGPWFLDMDFFLSCDPATVNHCLSANFNNYPKGGEFAEMLDFLGNGIIVSDSESWEYQRHMAMHILGSRAYRTFSMSTITTKAGATLLPYLDGMARRGSEVELEGVFMRFLLDVTYTSAFATDLDGLSMSLPIPAFGQATKTAEEAVMFRHTVPRSLWKLLRALKVGSEKKMAGARVVIDRHIYQEIAKRKAHLLQGEEGDVLSMCIKWPMDPSMSEQHKTQFLRDTLLGFIFAAKDLTAVTLTWFFYMMCNHPHVEARIIEEITALLQLQSTTMPAGSLSVLDGDMLRQAVYLQAAFLETLRLFPASPFEEVEAVNDDALPNGTRLSKGTRIVFSLYAMGRLEGIWGKDCAEFRPERWLSKSGRLRHQPGYKFPAFNAGPRSCVGKDLALGSMKMIAASIIYNFKVQLVEGHAVMPGSSIVLHTRNGIMVSLKRREAAAA

SEQ ID NO: 2917 - protein, 236 aa, Burkholderia vietnamiensis G4
MSFKSVSSAPADAFADLPLLESEPVPPRIAAALDALRAGRAVVLQDDHDRENEADLIVAAERITPETMALLIRECSGIVCLCLTDDKVRALELPPMVQTNESRNGTAFTVSIEAREGVHTGVSAADRVTTIRAAIADDAKPYDIVRPGHVFPLRAQPGGVLARRGHTEGTIDLSILAGLRPAGVLCELMNPDGTMTRGDDVERFAQQHGLPMLTIAELVEFREALAAARERCCEPA

SEQ ID NO: 2918 - protein, 342 aa, Bacillus thuringiensis serovar konkukian str. 97-27
MTRVAINGFGRIGRMVFRQAIKESAFEIVAINASYPSETLAHLIKYDTVHGKFDGTVEAFEDHLLVDGKMIRLLNNRDPKELPWTDLGVEVVIEATGKFNSKEKAILHVEAGAKKVILTAPGKNEDVTIVVGVNEDQLDITKHTVISNASCTTNCLAPVVKVLDEQFGIENGLMTTVHAYTNDQKNIDNPHKDLRRARACGQSIIPTTTGAAKALAKVLPHLNGKLHGMALRVPTPNVSLVDLVVDVKRDVTVEAINDAFKTVANGALKGIVEFSEEPLVSIDFNTNTHSAIIDGLSTMVMGDRKVKVLAWYDNEWGYSRRVVDLVTLVVDELAKQENVQHI

SEQ ID NO: 2919 - protein, 366 aa, Nannochloropsis oculata
LTAAITSTLSLLGNAKARKYDEIDAAPEEKARGITINTAHVEYETESRHYAHVDCPGHADYVKNMITGAAQMDGAILVVSAADGPMPQTREHILLAKQVGVPHVVVFLNKADQVDDDELLELVELEVRELLSNYDFPVEEIPFVSGSALLALEAVTNATVTKRGENQWVDKIFDLMDAVDSYIPTPVRDVDKTFLMAVEDVFSITGRGTVATGRIERGTVKVGETIEIIGIVETKTTTVTGLEMFQKTLDEGFAGDNIGILLRGVQKGDIQRGMVLAKPGTIKPHKRFEAEVYILKKEEGGRHTPFLPGYRPQFYVRTTDVTGNITGFTADDGAAAEMVIPGDRIKMTAELISPIAIEAGMRFAIR

SEQ ID NO: 2920 - protein, 619 aa, Pyrococcus abyssi GE5
MDELVKALERAGYLLTPSAYYLLVDHFKEGKFSLVELVKFAKSKGVFIIDGDLAYEFLQFLGLGVPQEIKESYISTGEEAEKTVESQETRASELEEGGVSQVSSGELQELKEESPEISTTEEEIGGLELVQSSISTGSEVEYNNGENGESVVVLDKYGYPILYAPEEIGEEKEYSKYEDVVIEWNPSVTPVQIEKNYEVKFDVRQVKLRPPKVKNGSGKEGEIIVEAYASLFKSRLSKLKRILRENPEISNVVDIGKLNYVSGDEEVTIIGLVNSKRETNRGLIFEVEDKTGIVKVFLPKDSEDYREAFKVLPDAVVAFKGFYSKKGIFFANKFYLPDVPLYRKQKPPLEEKVYAILISDIHVGSREFCEKAFLKFLEWLNGHVESKEEEEIVSRVKYLIIAGDVVDGIGIYPGQYSDLVIPDIFDQYEALANLLANVPEHITMFIGPGNHDAARPAIPQPEFYKEYAKPIYKLKNAIIISNPAVIRLHGRDFLIAHGRGIEDVVSFVPGLTHHKPGLPMVELLKMRHLAPTFGGKVPIAPDPEDLLVIEEVPDLVQMGHVHVYDAVVYRGVQLVNSATWQAQTEFQKMVNIVPTPAKVPVVDVESARVVKVLDFSGWC

SEQ ID NO: 2921 - protein, 366 aa, Monodus sp. CCMP505
  misc_feature (194)..(194): Xaa can be any naturally occurring amino acid
LTAAITSTLSLLGNAKAKKYDEIDAAPEEKARGITINTAHVEYETEARHYAHVDCPGHADYVKNMITGAAQMDGAILVVSAADGPMPQTREHILLAKQVGVPHVVVFLNKADQVDDDELLELVELEVRELLSNYDFPGEEIPFVSGSALLALEAVSNATVTKRGENPWVDKIFDLMDAVDSYIPTPVRDVDKTXLMAVEDVFSITGRVTVATGRIERGTVKVGETIEIIGIVETKTTTVTGLEMFQKTLDEGFAGDNIGILLRGVQKGDIQRGMVLAKPGTIKPHKRFEAEVYILKKEEGGRHTPFLPGYRPQFYVRTTDVTGNITGFTADDGAAAEMVIPGDRIKMTAELISPIAIEAGMRFAIR

SEQ ID NO: 2922 - protein, 416 aa, Candida glabrata CBS 138
MSEEIKNEVIETPEEVIEKPEEVSQEVEGDNASQENDDDKPSVVPASATKGGRETSDRVLYVGNLDKSITEDLLKQYFQAGGPIQNVKIIEDMKNEYVNYAFVEYIRSHDANVALQTLNGVQLENKTLKINWAFETQQAAENDDTFNLFVGDLNVDVDDETLAGTFREFPTFIQAHVMWDMQTGRSRGYGFVSFSNQEEAQKAMDAMQGKDLSGRQIRINWATKRERNMGNNFGNNRGSRGGNFRPYGNQGHHNRNNRNMMPPAMGMPMDGLMPMQQGQQNGQQPNVQQQQPMVPPPVNPQAIEDMIRRAPPRVTTAYIGNIPHYATEADLIPLLQNFGFILDFTHYPEKGCCFIKYDTHEQAAVCIVALANFPFQGRNLRTGWGKERTNFMPPQGAPGQQMPVMMDPSQAPPAPQ

SEQ ID NO: 2923 - protein, 781 aa, Thiobacillus denitrificans ATCC 25259
MSPEGTSTTLRARLRRTSLITLAVALGIVAVIIMASSFAAGLISLASTNRVEARVLAENVSASLLFEDRTSAEELLHSLRHSRVVHGAAVYDNARRVFARYEHGSDRVPAILGPLSEGVDYGLRRVTVVQPVMLDGRQVGSVLLSVGLESLYAQIGWQALVTLLAAALAMLVANRLLGRLNESVVVPLARLSALMLRISSRNDYTVRAAGSEIAEMNTLARGFNDMLGQIQQRDQELAEHRARLEDQVAHRTVALKAAEAASQAKSDFLATMSHEIRTPMNGVLGMNELLLGSSLDPQQRMWAESVQHSGQHLLGVINDILDFSKIESGHLSLETVDFDLVELIDDTMRMFAHQAEHKGLELACRITPSQRTIGLRGDPFRLRQIVANLVGNAIKFTEHGAVVVHATVNDNGDAAAVGLCVEDTGIGIAPEAQARIFEHFSQADGSTTRRFGGTGLGLAICRRLANLMGSDITVASAPGQGARFCLDLRLARASADFERPDPAGEASGAGTSAPAFQGRGERVLLVEDNPVNQQVAQAMLAKLGLATTVASDGREAVDLVASRAFDAVLMDCQMPVMDGYEATRAIRRLPGARLPVIALTANALHGDRQKCLDSGMDDFLPKPYSLAQLQATLARWLRPTNPTPEAQAAAPQHGPDGEIASPQAPAINMKTLNALRELDPEGGMGLAHQIVRTFLESAQTWVDRVEQAVAGGDGDALRQSAHALKSSSANVGAERLSGLYRQMEKLGRERRLDEAREALGEVRGEYARAVSEMHAILTGGR

SEQ ID NO: 2924 - protein, 173 aa, Brassica napus
MQDQLVCHGCRNTLMYPRGATNVRCALCHIVNMVPLHPHPPPPHHAHAGMDMAHIVCGGCRTMLMYTRGASSVRCSCCQTVNLVPGPPPSNQVAHINCGNCRTTLMYPYGASSVKCAVCQFVTNVNMSNGRVPLASNRPNGTASPGTMPSTSTQSTPPSQTQTVVVENPMSVN

SEQ ID NO: 2925 - protein, 268 aa, Thermoanaerobacter tengcongensis MB4
MAIAFITGATDGIGREVAKRLAFHGYDVIIHGRNELKLEKVADEIRDLTGKSVFKIKADFSSLKDLKKLVKEIKDNFSKVDLLLNNAATFEKERKVTEEGFERTFMVNYLAPFYLTISLINEGVDIKYVLNVSSMAHASSIEFEDLQLEKGYDGYKAYSLSKLYITLFTYYLAEMLKGKIYVNCLHPGVINTKLLMENWGAIGASIEEGAKNVIDAIKYIEAHNVTGVYFDNGKPSKSKPITYDREVQRKLWEKTLKLLKINERDLKF

SEQ ID NO: 2926 - protein, 480 aa, Idiomarina baltica OS145
MSSLTKQDCFIEGHWVPTEKRFAVTNPANGEVITEVADADGDLTKRAINAAEVALAKWRATSTQERAALLRKWYQAIMDNKQALGELMSAEQGKPVPEAVGEVEYGASFVDWFAGEAERINGDILPITDNSKRVMVIKQPVGVCAAITPWNFPNAMITRKVAPALAAGCTIVVKPPQLTPLSSLALAQLASEVGIPDGVINILPTTDSKTVGEILATSKQVRKLSFTGSTGVGKILMKQCAENVKKISLELGGNAPFIVFDDADLDAAAEQLMACKFRNGGQTCISANRVLVQDSVKEEFIKKVVSKVKALNVGPGDKEDVDLGPLIDQDAVDKVQRLVISAKSDGAEIEEGGSVMTDLGDLFYAPTVISGVTQDMEITQEEIFGPVIAISSFETEEEAIQQANDTPFGLASYFAAKDTARIFRVSEGLEYGMVGVNTGGISHAYNPFGGIKESGIGREGSKYGIDEYLEIKTITLGGLE

SEQ ID NO: 2927 - protein, 283 aa, Idiomarina baltica OS145
MAQSNIVDITLQNFQQVLLEGSKERLVIIDFWADWCEPCKQLMPVLERIASQYPDDITLAKINCDEQQELAMQFGVRSLPTVAFFKDGQPVDSFAGVKSETEIMTMLEPHLPSPADSFIQNAQQALAEGNAAEAYTQAKQAFDIDNSNMTAIKLLAEAAVDHGRLAQAKELAATIPMVEQDSDYQRIMSKIELAEDSADSPEIKALQAQVEEEPDNSELKIKLALQLHQSHRDEEAISLLFEVMRKDPARTEAKKYALDVINQLPDGDPLASKARRTLYSMMY

SEQ ID NO: 2928 - protein, 102 aa, Arabidopsis thaliana
  misc_feature (12)..(12): Xaa can be any naturally occurring amino acid
  misc_feature (32)..(32): Xaa can be any naturally occurring amino acid
  misc_feature (38)..(38): Xaa can be any naturally occurring amino acid
  misc_feature (44)..(44): Xaa can be any naturally occurring amino acid
  misc_feature (47)..(47): Xaa can be any naturally occurring amino acid
  misc_feature (49)..(49): Xaa can be any naturally occurring amino acid
  misc_feature (61)..(63): Xaa can be any naturally occurring amino acid
  misc_feature (65)..(66): Xaa can be any naturally occurring amino acid
WLSSMLSSAAGXTSPAQATMVAPFTGLKSSAXFPVTRXTTKALXTPXAXNGGRVSCMKGVXXXIXXKKFETLSYLPGPAGQASRPFLQQGGFLGSGYLFTLF

SEQ ID NO: 2929 - protein, 182 aa, Arabidopsis thaliana
  misc_feature (112)..(112): Xaa can be any naturally occurring amino acid
TKTCLEFSEGETEWPPILLLVPLVLGLDRVNPRYIPSLIATFTFPQSLGILGGKPGASTYIVGVQEDKGFYLDPHDVQQVTVKEGNQDVGTSSYHCKALRYVPLESLDPSLXALGFYCQHKDDFDDFCIRATKLAGDSNGAPLFTVTQSHRRNDCGIAETSSSTETSTEISGEEHEDDWQLL

SEQ ID NO: 2930 - protein, 723 aa, Ustilago maydis 521
MGLRVSLFISFSTLITPPSSSIVPVAKRSAAGSLRRSNLHTSSSGVTLTKLSPTPFTSNRSSSRGSLLEASGNGVALRFSGPQQQSFGLQHLNPSRSASTSAFSASANDVDMGAIATGRVDTTQRVQLLRQLMSKHGVTAYVIPSGDEHASEYPAESDLRRGYITGFTGSAGSAVVTTNKALLFTDGRYFLQAGQQLDPSVWTLMKQGEPNVPTWQEYLSKNLPANSKIGMDASLISAEDAKDITAELTRIGSSLVPIRENLVDQVWADRPARPGQPIFVLKDEIAGRSSSDKIRELQEEIKKKSAQGFVANMLDEVAWLFNLRGTDVPYNPVFFSFAMVLLDKVLLYVNDNQLTEDVKNSLGSEVTLRPYAEFYNDLHKIGAELGEGHKILIGKSASLAVQEALGGASKVEIVRSIVGDQKSIKNEVELQGFRQSHIRDGAALCQYFAWLEEQLHAGNKVTESQGADKLSEYRQSLDHFRGESFTTISSTGPNGAIIHYSPDPSSCPAIDVNEIYLCDSGAQFTDGTTDVTRTWHFGKPAPEQIRAFTRVLQGHIAIDRAIFPKGTTGYLLDVLARRALWEDGLDYRHGTGHGVGHFLNVHEGPQGIGTRAVFNETSLKENMVISNEPGYYQDGKWGIRIENLVIVRPAQTPNNFGSKGYLTFEHLTMCPIQVSLVDPDLLTKEDKQWLNDYHQEVYDKVAPLLQKDKRALEWLHRQCAARV

SEQ ID NO: 2931 - protein, 233 aa, Thiocapsa roseopersicina
MANGSYQERREEIETYFDRTAADAWRKLTSDVKVSRIRATVRAGRDDMRATLLDWLPADLSGKRLLDAGCGTGALALEAARRGAEVVAIDVAPTLIQIAKERTPNDLGPGSVHFEAGDMLDPAHGRFDHVVAMDSLIHYVPSDVVKVLAGLAGRTSGSIIFTFAPKTPVLAVMHAVGQLFPRGNRSPAIVPVGPDRLRTLLAADPALAGWRAQRTKRIAVGFYTSQALELVPV

SEQ ID NO: 2932 - protein, 532 aa, Desulfovibrio vulgaris subsp. vulgaris str. Hildenborough
MESVESFKDLPLEEELLKAIEELGFTEPSPIQSIAIPRLLEGRDVIGQAQTGTGKTAAFGLPLLQRIDAADRSVQALVLCPTRELALQVANGLTALAKHLRGVRILSVYGGQPIEPQASALRRGAQVVVGTPGRILDHINRGTLQLGVVRMTVLDEADEMLDMGFREDIERILSEMPEWVQSAFFSATMPDGILELARRFLREPELLRVTRRQLTVANTEQAWFEVRPFRRVDAVCRIFDAYIPRKAIVFRATKQGVDELAAALQQRGILADALHGDLNQTQRERVMSRFRAGGISVLVATDVAARGLDVDDVDTVINFDLPNDPETYVHRIGRTGRAGRTGRAFSFAAGRDVYKLRDIQRVTGSRIDRRAMPTAADASRARTGQLLEEVAAGLASAETSACLPVVEKLIAEGADPTQLAATLLRMIMQRDRIDLPGARQTDDIGTGRVRLFFNVGRRMRITPRDLVGAIAGETGISGRSIGSIEIHDRFSFVEVDASIAPEVVSVMHGNQIRGFRLAVEQASPREGQDRAA

SEQ ID NO: 2933 - protein, 1012 aa, Desulfovibrio gigas
  misc_feature (193)..(193): Xaa can be any naturally occurring amino acid
MLIKRRAFLKLTAAGATLSAFGGLGVDLAPAKAQAATMALKTVDAKQTTSVCCYCSVGCGLIVHTDKKTNRAINVEGDPDHPINEGSLCAKGASTWQLAENERRPANPLYRAPGSDQWEEKSWDWMLDTIAERVAKTREATFVTKNAKGQVVNRCDGIASVGSAAMDNEECWIYQAWLRSLGLFYIEHQARIXHSATVAALAESYGRGAMTNHWIDLKNSDVILMMGSNPAENHPISFKWVMRAKDKGATLIHVDPRYTRTSTKCDLYAPLRSGSDIAFLNGMTKYILEKELYFKDYVVNYTNASFIVGEGFAFEEGLFAGYNKETRKYDKSKWGFERDENGNPKRDETLKHPRCVFQIMKKHYERYDLDKISAICGTPKELILKVYDAYCATGKPDKAGTIMYAMGWTQHTVGVQNIRAMSINQLLLGNIGVAGGGVNALRGEANVQGSTDHGLLMHIYPGYLGTARASIPTYEEYTKKFTPVSKDPQSANWWSNFPKYSASYIKSMWPDADLNEAYGYLPKGEDGKDYSWLTLFDDMFQGKIKGFFAWGQNPACSGANSNKTREALTKLDWMVNVNIFDNETGSFWRGPDMDPKKIKTEVFFLPCAVAIEKEGSISNSGRWMQWRYVGPEPRKNAIPDGDLIVELAKRVQKLLAKTPGKLAAPVTKLKTDYWVNDHGHFDPHKIAKLINGFALKDFKVGDVEYKAGQQIATFGHLQADGSTTSGCWIYTGSYTEKGNMAARRDKTQTDMQAKIGLYPGWTWAWPVNRRIIYNRASVDLNGKPYAPEKAVVEWNAAEKKWVGDVPDGPWPPQADKEKGKRAFIMKPEGYAYLYGPGREDGPLPEYYEPMECPVIEHPFSKTLHNPTALHFATEEKAVCDPRYPFICSTYRVTEHWQTGLMTRNTPWLLEAEPQMFCEMSEELATLRGIKNGDKVILESVRGKLWAKAIITKRIKPFAIQGQQVHMVGIPWHYGWSFPKNGGDAANILTPSVGDPNTGIPETKAFMVNVTKA

SEQ ID NO: 2934 - protein, 496 aa, Shewanella sp. MR-4
MLTMTHYVNGEHSAASTRSQEIFEPATGECRGQVSLASRDEVSAAIAIAKSAFDTWSQVTPLNRARVLFKFKALVEQHMDELARLITLEHGKVLDDARGELIRGLEVVEFACGIPHLLKGEHTEQVGGGVDAWSVNQALGVVAGIAPFNFPVMVPMWMFPIAIACGNTFIMKPSEKDPSAIMRIAELLTEAGLPAGVFNVVNGDKEAVDTLLSHEDIQAVSFVGSTPIAEYIYSTASKHGKRVQALGGAKNHMLLMPDADLDQAVSALMGAAYGSAGERCMAISVVLAVGDVGDKLVDRLLPQIQQLKVGNGLTPEMEMGPLISRQHLAKVTEFVDAGVQEGATLVVDGRQLSVADHQQGYFLGACLFDNVTPEMRIYREEIFGPVLSIVRVKDYASALALINQHEFGNGTAIFTQSGEAARHFCHHVQVGMVGVNVPIPVPMAFHSFGGWKRSLFGPLHMHGPDGVRFYTKRKAITARWPVGKQTQAEFVMPTMK

SEQ ID NO: 2935 - protein, 333 aa, Rhodobacter sphaeroides 2.4.1
MTIRVAINGFGRIGRNVLRAIVESGRTDIEVVAINDLGQVETNAHLLRFDSVHGRFPAKVTSGDDWIDVGRGPIKVTAIRNPAELPWAGVDMAMECTGIFTTKEKAAAHLQNGAKRVLVSAPCDGADRTIVYGVNHATLTADDLVVSNASCTTNCLSPVAKVLHDAIGIAKGFMTTIHSYTGDQPTLDTMHKDLYRARAAALSMIPTSTGAAKAVGLVLPELKGRLDGVSIRVPTPNVSVVDLVFEAARDTTVEEVNAAIEAAACGPLKGVLGFTTEPNVSSDFNHDPHSSVFHMDQTKVMEGRMVRILSWYDNEWGFSNRMADTAVAMGRLL

SEQ ID NO: 2936 - protein, 447 aa, Magnaporthe grisea 70-15
MSAVRDKQQPDAAPAAAAAGNKPAPSITPEQVAVVKSTAPVLKEHGVTITTVFYKNMIDAHPELHNVFSTTSQATGAQPRALASAVLAYATHIDDLARLSHAVSRIAHKHVSLHITPDQYDIVGKYLIEAIGQVLGDAATPEIVAAWIAAYGVLADVFIGVEGKMYQEHSDWLGFRKFRVLRKEAEAESITSFYLAPSDGKTPLPRFLPGQYVSVQLFVPELGYLQSRQYSLSEGYRKGGEHYRISVKREEGVEVGAPGIISNMLHDKISVGDEVEVSHPQGEFFVDPADATKAGAPLVLLSAGVGATPLLSILESVTVADGGVPAPAATRPVSWIHASRSRAQRPFETRVAEIQKTVGEERLRSRLFLGKIDAEKDVANQHFHFGGGRMDLDKLDADRDLHTSDARAEYYLCGPEAWMLDTREKLEQMGVAHERIHLELFATGDVQ

SEQ ID NO: 2937 - protein, 327 aa, Pseudomonas fluorescens PfO-1
MLFAISALASTLAAQATSRTEPKPDWSTQDMPSQNGRIVLVTGGTSGMGYEDALALTRAGAEVIIAARNAERGREAIANIRQAVPEARVQFETLDLANLQSVRDLANRLQGRLPRLDVLINNAAIMSPPVRGVSADGYEMQLATNYLGHFALTGLLMPLLRKSDDGRVVSLSSIAAGRAVLNFDDLQAERAYDPFTTYSQSKLAVLKWSIELQQRSDAAGWGIRSIAAHPGVAVTELIARGPGLDSEFGKQWAVERDMYHSAAQGALPTLYAATAPEAVGGAYYGPTGDNEKRGPLGFAKMPPAAADRSNSDALWQLSERLTGVTYR

SEQ ID NO: 2938 - protein, 682 aa, Pisum sativum
MSSGGCSIVWFRRDLRVEDNPALAAGVRAGAVVGVFIWAPEEEGQYYPGRVSRWWLKNSLSQLDSSLRNLGTPLVTKRSTDSISSLLEVVKSTGATQIFFNHLYDPLSLVRDHRAKEILTAQGITVRSYNSDLLYEPWDVNDEHGQPFTTFDSFWERCLSMPYDPQAPLLPPKRIIPGDVSRCPSDTLVFEDELEKSSNALLARAWSPGWSNANKALTTFINGPLIEYSVNRRKADSATTSFLSPHLHFGEVSVKKVFHLVRIKQVFWANEGNKAGEESVNLFLKSIGLREYSRYISFNHPYSHERPLLGHLKFFPWVVDEGYFKAWRQGRTGYPLVDAGMRELWATGWLHDRIRVVVSSFFVKVLQLPWRWGMKYFWDTLLDADLESDALGWQYISGTLPDGREFDRIDNPQFEGYKCDPNGEYVRRWLPELARLPTEWIHHPWNAPESVLQAAGIELGSNYPLPIVEIDAATVRLEEALIQMWQLEAASRTAAENGTEEGLGDSTESAPIAFPQDIQMEERHEPVRNNPPHGTRRYQDQMVPSMTYSRVRVEDEETSSVRNSAGDSRAEVPTNANTQQNGREPMDQGMLQNVNRNTRQRRNNTTTTFWLRNAAEDSTAESSSSTRRERDGGVVPEWSPQASNFSDQFVDDENGIGATSPYLQRHPQTHQMMSWTRLPQTG

SEQ ID NO: 2939 - protein, 1390 aa, Cryptococcus neoformans var. neoformans B-3501A
MSLPDAYPPVIATEGSTAFQSHILSLLSVISQHPSPDYPFPSSGDSTLQDNASVTAKKNATLSTFPGKKTPAEDAIERAIIALGDRVWTSERTQAHLVKDVKRDVPAQPGSDLLTPDWTPPVPTLNDSSPDPVCPTCTRPVSSSETSSFTPQQIASFYHPFTAALSTPPPPLPEQMFFPQSVLAAYVSATSDSESAGDSGMSAEKELELLKAQVQDIARVCKAVATGDLTQKIIVPVKGQTMTELKNIINAMVDRLQTFAVEVERVSLEVGTEGKLGGQAVVPNVEGTWKVLTAVVNKLAANLTNQVRSIAKVTKAVAKGDLSETIDVEASGEIAELKTTVNGMVMSLRTLADEVSRVSLEVGSQGKLGGQANVPDVEGVWKDLTVNVNRMCESLTTQVRSIGSVTTAVARGDLSKMIEIEAEGEMAVLKNTVNSMVRQLTVFAKEVTRVALEVGTHGQLGGQAVVPGVEGVWDDLTTNVNKMARNLTDQVREIAMVTKAVARGDLSKTVNADVQGEILDLKCTVNEMLTNMPCKVAQLTVFAAEVTRVSLEVGTEGKLGGQAVVPNVEGTWMVLTDNVNLMALNLTTQVRSVAEVTTAVAAGDLSKKINVAAFGEILELKNTVNNMVDSLRSFSSEVTRVAREVGTDGRLGGQAKVPGVAGTWKDLTDCVNIMAANLTEQVRTIAHATTAVARGDLTQKVVGVKVSGEILDLVNTINNMIDQLAIFAAEVTRVAREVGTEGKLGVQAEVENIEGTWQEITSNVNTMASNLTSQVRAFAQISAAATDGDFTRFITVEASGEMDSLKTKINQMVYNLRESIEKNTKARQEAEMANRSKSEFLANMSHEIRTPMNGIIGMTVLTLESELTRQQRENLMIVSSLAGSLLTIIDDILDISKIEAGRMTMEQIPFSLRVAVFSVLKTLCVKAAQNKLDLIFDVDPTMPDQLIGDPLRLRQVITNLIGNAVKFTTKGQVALSCRVKRYVTVADAVELEFCVADTGIGIKQDKLDVIFDTFAQADGSTTRKYGGTGLGLTISKRLVNLMSGDLWVESEYGQGSRFYFTTVAEMTSVPRDQIIERLSPWSGRSVLFIDTLGDQTGIVEMLQELGLKPIVIHSVNDVYLLQDQGLTVFDTMIVDSLKAAGELRGIEYLRYIPIVLLAPSNKPSGPSNPSFISLPESRRRLLALPSASEQLLSPIPVKDCLEMGINTYYTTPLSLQELSNAIVPALESHQIQPGDTVKDTILSVLLAEDNLVNQKLAVKLMEVAGHKIEVADNGEIALEKYKRRQLARTPFDVILMDVSMPVMGGMEATGLIREFEANEGVPRTPIIALTAHAMIGDKERCLAAGMDEYVTKPLRRGDLLASIAKVLAPKQSASGLEMPTVPIPANIYGR

SEQ ID NO: 2940 - protein, 369 aa, Lactobacillus pentosus
MADYTKLQQVRQWTQDNHVDVTYISNFHTISYLTGFESNPYERTLGLFVFADAEPFLFAPALEVEAIKEMGWPYKVFGYLDHEDPYALIATHIQEQLTDPKSWALEAGNLTLDRFNALKAQFPAAHFDKDLSPYIQQLRLVKTADELEKLNIAGKWADFAFEQGFAAVKAGRTEQQIAAELQYALMKKGIMEMSFDTLVQAGEHAANPHGATNETQVKPNELVLFDLGVMYEGYASDASRTIAYGQPTDKQKEIFDVCLEANLTAQAAIKPGMAAEDVDKIARDIITKAGYGEYFIHRLGHGIGQTDHEFPSIMAGNHMPLVEGMCFSVEPGIYIPGVAGVRIEDCGVVTKEGFKPFTHTPKEMKILDL

SEQ ID NO: 2941 - protein, 682 aa, Pisum sativum
MSSGGCSIVWFRRDLRVEDNPALAAGVRAGAVVGVFIWAPEEEGQYYPGRVSRWWLKNSLSQLDSSLRNLGTPLVTKRSTDSISSLLEVVKSTGATQIFFNHLYDPLSLVRDHRAKEILTAQGITVRSYNSDLLYEPWDVNDEHGQPFTTFDSFWERCLSMPYDPQAPLLPPKRIIPGDVSRCPSDTLVFEDELEKSSNALLARAWSPGWSNANKALTTFINGPLIEYSVNRRKADSATTSFLSPHLHFEEVSVKKVFHLVRIKQVFWANEGNKAGEESVNLFLKSIGLREYSRYISFNHPYSHERPLLGHLKFFPWVVDEGYFKAWRQGRTGYPLVDAGMRELWATGWLHDRIRVVVSSFFVKVLQLPWRWGMKYFWDTLLDADLESDALGWQYISGTLPDGREFDRIDNPQFEGYKCDPNGEYVRRWLPELARLPTEWIHHPWNAPESVLQAAGIELGSNYPLPIVEIDAATVRLEEALIQMWQLEAASRTAAENGTEEGLGDSTESAPIAFPQDIQMEERHEPVRNNPPHGTRRYQDQMVPSMTYSRVRVEDEETSSVRNSAGDSRAEVPTNANTQQNGREPMDQGMLQNVNRNTRQRRNNTTTTFWLRNAAEDSTAESSSSTRRERDGGVVPEWSPQASNFSDQFVDDENGIGATSPYLQRHPQTHQMMSWTRLPQTG

SEQ ID NO: 2942 - protein, 411 aa, Nicotiana plumbaginifolia
MNALAATNRNFRQAARILGLDSKLEKSLLIPFREIKVECTIPKDDGTLVSYVGFRVQHDNARGPMKGGIRYHPEVDLDEVNALAQLMTWKTAVADIPYGGAKGGIGCKPKDLSKSELERLTRVFTQKIHDLIGINTDVPAPDMGTNAQTMAWILDEYSKFHGHSPAIVTGKPIDLGGSLGREAATGRGVVYATEALLAEYGKNIKDLTFAIQGFGNVGAWAAKLIHERGGKVIAVSDITGAVKNPNGLDIPALLNHKEATGKLIDFSGGDVMNSDEVLTHECDVLIPCALGGVLNRENADNVKAKFIIEAANHPTDPEADEILCKKGIVILPDIYANAGGVTVSYFEWVQNIQGFMWDEEKVNRELRKYMTKAFHNLKNMCQSHNCSLRMGAFTLGVNRVARATTLRGWEA

SEQ ID NO: 2943 - protein, 366 aa, Eustigmatos magnus
LTAAITSVLSLLGNAKAKKYDEIDAAPEEKARGITINTAHVEYETEARHYAHVDCPGHADYVKNMITGAAQMDGAILVVSAADGPMPQTREHILLAKQVGVPHIVVFLNKADQVDDQELLELVELEVRELLSTYDFPGEDIPFISGSALLALEAVTTNSVNQRGENEWVDKIFELMDAVDSYIPTPERDVDKTFLMAVEDVFSITGRGTVATGRIERGKVKVGETIEIVGIQETRSTTVTGLEMFQKTLDEGFAGDNVGILLRGVQKTDIQRGMVLAKPGTIKPHRKFEAEVYVLKKEEGGRHTPFLAGYRPQFYVRTTDVTGNITGFTSDDGAEAEMVIPGDRIKMTAELISPIAIEAGMRFAIR

SEQ ID NO: 2944 - protein, 503 aa, Zea mays
MEGAGRDANPLGGYRIGKTLGIGSFGKVKIAEHILTGHKVAIKILNRRKIRSMEMEEKVKREIKILRLFMHPHIIRLYEVIDTPADIYVVMEYVKSGELFDYIVEKGRLHEEEARRFFQQIISGVEYCHRNMVAHRDLKPENLLLDSKCNIKIADFGLSNVMRDGHFLKTSCGSPNYAAPEVISGKLYAGPEVDVWSCGVILYALLCGTLPFDDENILNLFKKIKGGIYTLPSHLSPSARDLIPRMLVVDPMKRITIREIREHVWFKIQLPRYLAVPPPDTAQQVKKLDEETLNDVIKMGFDKNQLIESLHNRLQNEATVAYYLLMDNRLRTTSGYLGSEFQESMDPSFSQVHAETPTSATEHRQHVFTESPGSGLRQHFASERKWALGLQSRAHPREIISEVLKALQELNVYWKKIGHYNMKCRWSPGCLESMMHNCDGFSAESAIIETDDLIAKSTRIVKFEIQLYKTRDEKYLLDLQRVSGPQLLFLDLCSAFLTQLRVL

SEQ ID NO: 2945 - protein, 366 aa, Ophiocytium majus
LTAAITSVLSLLGNAKAKKYDEIDAAPEEKARGITINTAHVEYETEARHYAHVDCPGHADYVKNMITGAAQMDGAILVVSAADGPMPQTREHILLAKQVGVPHIVVFLNKADQVDDQELLELVELEVRELLSAYDFPGDDIPFISGSALLALEAVTTNSVNQRGENEWVDKIFELMDAVDKYIPTPERDVDKTFLMAVEDVFSITGRGTVATGRIERGKVKVGETIEIVGIQETRSVTVTGLEMFQKTLDEGFAGDNVGILLRGVQKTDIQRGMVLAKPGTIKPHRKFEAEVYVLKKEEGGRHTPFLAGYRPQFYVRTTDVTGSITGFTSDDGAEAEMVIPGDRIKMTAELISPIAIEAGMRFAIR

SEQ ID NO: 2946 - protein, 482 aa, Treponema denticola ATCC 35405
MSELIFEKSVKGHKFAEAKLTVPEYKLDSKYLRASDAKLPEVSELEFVRHYMELSKRTHGVDNGFYPLGSCTMKYNPKLNEEVADLPNFTNIHPLQPEHTMKGCIEAMGDLGKKLGEITGMDAFSLQPSAGAHGEFTALLVIRAYHEKRGDHARNKILVPDSAHGTNPASAAMVGCEIVNIPSDKDGNVDIEELKKTVGNDTAALMLTNPNTLGLFETHIKEIAEIVHKAGGLLYYDGANLNAIMGRLRPGDMGYDIVHLNLHKTFSTPHGGGGPGSGPIGCKKFLEEFLPVPVVTGSDGSYKLDYNRPDSIGRVRNFYGNFLVFLRAYAYILTLGSEGIRESSGYAVLNANYLKKKLEKEYDVAFDRICMHEFVLTLEKIKEETGVSALDIAKGLIDDGIHPPTMYFPLIVHEALMFEPTETESKSTLDFTAEVMIKLKKEAYSNPEKLHGYPYTRPIGRVDETKAAREPVLRYKACCCCK

SEQ ID NO: 2947 - protein, 629 aa, Mycobacterium sp. KMS
MGVTFDPIRLSRSRESQHMAVSVQMPALGESVTEGTVTRWLKQEGDTVEQDEPLLEVSTDKVDTEIPSPASGVLQKIVAQEDDTVEVGGELAVIGEGGEDSGDSSDDSSSDEDEDEEPAEEAESETTSEESDSSEETDSSEETESEPEPEPEPKKESKPKPKSSGSATPVTMPELGESVTEGTVTRWLKKVGDSVEVDEPLLEVSTDKVDTEIPSPVAGTLLEIIAEEDDTVEVGGELAKIGDADQAEAEEPEPEPEPEPEPEPEPEPEPEPKQESKPEPKPEPKQESKQEAKPEPKKEPEPQQDAEPSDGSGPYVTPLVRKLAAEHDVDLAAVKGTGVGGRIRKQDVLAAAEADKKAKSGPEDAAEAPGKAPAAATASANASDAPLAHLRGTKQKANRIRQLTAKKTRESLQATAQLTQTHEVDMTKIVALRAKAKNDFAEREGVNLTYLPFIARAVIDALKQHPNVNASYNEDTKEITYYDAEHLGFAVDTDQGLLSPVIKNAGDLSLAGLARAIADIAARARSGDLKPDELSGGTFTITNIGSQGALFDTPILVPPQAAMLGTGAIVKRPRVIVDEFGNESIGVRSICYLPLTYDHRLIDGADAGRFLTTIKRRLEEGSFEADLGL

SEQ ID NO: 2948 - protein, 434 aa, Treponema denticola ATCC 35405
MSNYIPHSAEETKEMLDLIGVKSIDDLYSFDNKGCKKVDIGEGKTQAEVEKFFQNLSSENTVFKSILRGAGAYNHYAPAAVRHMASREEFLTAYTPYQPEMNQGELQAGFEYQSMICELTGMDVSNASVYDGGTAVADAIVMSLGRKQNKVLISECVEPSSIEIAKTYLKHSGVEFVMIPRDGYKTDVSKIKGLLDESVGAVVMQQPNRFGTIEDCEAVGKLVEGTKTQFVMSCNPISLAILKTPKECGASIALGEGQALGLPLGAGGPYLGFLSTIEANMRKIPGRIIGQSTDHDGRRAFVLTLQAREQHIRREKASSSICSNQALCALRASMFMTAYGKEGLKTVAKVSVSNAHYLADELKKIGLTVKNNGEFFHEFVTDGKGKADAILSNLEKNNILGGLKICDDSILWCATDVLCKCELDKAVKIIKEVL

SEQ ID NO: 2949 - protein, 367 aa, Mischococcus sphaerocephalus
LTAAITATLSLGGGSSVAKKYDEIDAAPEERARGITINTAHVEYETEERHYAHVDCPGHADYVKNMITGAAQMDGAILVVSAADGPMPQTREHILLAKQVGVPDIVVFLNKEDQVDDEELLELVQLEVRELLYNYEFPGDTIPICPGSALQALEAISNNPKLVRGEDKWVDKIFALMDAVDKYIPTPVRDVEKAFLMAVEDVFSITGRGTVATGRIERGVVTVGETIEIVGIQDTRSTTVTGVEMFQKTLEKGLAGDNVGILLRGVQKDDIQRGMVLAKPGSITPHTKFEGEVYILTKEEGGRHTPFFAGYRPQFYVRTTDVTGQILTFTADDGSNVEMVMPGDRIKMNAALISPIAIEEGSRFAIR

SEQ ID NO: 2950 - protein, 480 aa, Arabidopsis thaliana
  misc_feature (176)..(176): Xaa can be any naturally occurring amino acid
MTFREKMPTSPKSPLRRRRSSWTGTWLNHQTTSFKQAVSAVIQAQSPRSRFKSLSSDFSDVDRTLSLSDSLLLKILEKLPESQNEDVSLVCKRWLSVQGRRLRSMKVFDWEFLLSGRLVSRFPKLTSVDLVNACFNPSSNSGILRCHTSISFHVSTDSSLNLNFVEESLLDNEMVXDKGLRVLGRGSFDLIKLVVINATELGLRSLAEDCSDLQELELHKCSDKLVRGIAACENLRGLRLVGSVDGLYSSSVSDIGLTILAQGCKRLVKLELSGCEGSFDGIKAIGQCCEVLEELSICDHRMDDGWIAALSYFESLKTLLISSCRKIDSSPGPGKLLGSCPALESLQLRRCCLNDKEGMRALFKVCDGVTKVNIQDCWGLDDDSFSLAKAFRRVRFLSLEGCSILTTSGLESVILHWEELESMRVVSCKNIKDSEISAALSSLFSLLKELTWRPDTRSHLSSSLEGTGIGKRGSKFFKKR

SEQ ID NO: 2951 - protein, 366 aa, Tribonema aequale
LTAAITMALAARGGGKGRKYDDIDSAPEEKARGITINTAHVEYETNDRHYAHVDCPGHADYVKNMITGAAQMDGAILVVSGADGPMPQTKEHILLAKQVGVPNIVVFLNKEDQVDDQELLELVELEVRETLENYEFPGDDIPVIAGSALLALEALTENPQIKDGDNKWVDKIYALMEQVDNYIPTPERDTEKPFLMAVEDVFSITGRGTVATGRVERGAVKVGETVELVGLETTRSTTVTGLEMFQKTLDESVAGDNVGVLLRGIQKNDIQRGMVLAKPGTITPHTKFEAQVYVLNKEEGGRHTPFFPGYRPQFYVRTTDVTGKIESFKADDGSATQMVMPGDRIKMVVELIQPIAIEKGMRFAIR

SEQ ID NO: 2952 - protein, 165 aa, Candida glabrata CBS 138
MDSQSSFYDLSPHDKDNNEFPFSNLKGQVVLIVNVASKCNFTPQYNDLQYLHEKYSYRGLKIIGFPCNQFGQQEPENDEVIQKFCLSNYGVSFKILKKIKVNGPNADPVYTYLKNEMPSQIGLKVIRWNFEKFLVDKHGRVRHRYSSLTSPKSLQRTIDQLLDDK

SEQ ID NO: 2953 - protein, 239 aa, Oryza sativa (japonica cultivar-group)
MESRKPPPSALVDNHVVPGDVVLDLTEMTNQTIKLGAGLRQDCDTIQATSAGRLRLSKPNKYWVESSQKRYIPSVEDTVLGVVVDTKPDNFLVDIKGPNLAFLPVLAFEGGTRRNIPKFEIGTLIYARVVKANSIMNPELSCMDATGKAAEFGQLKDGYMFDTSTGLSRMLLSSPTCPVLEALGKKLSFEIAVGLNGRVWVNAPSPSNVIVVSNAIIKSESLSGIGQRSMVESLLERLS

SEQ ID NO: 2954 - protein, 367 aa, Undaria pinnatifida
LTAAITAVLSLSGDANNAKKYEDIDAAPEERARGITINTAHVEYETASRHYAHVDCPGHADYVKNMITGAAQMDGAILVVSAADGPMPQTREHILLSKQVGVPHIVVFLNKEDQVDDLELVELVELEVRELLSNYDFPGDDIPILTGSALQALDAINNEPNLVQGDNKWVDKIYNLMESVDSYIPTPIRDVDKPFLMAIEDVFSITGRGTVATGKIDRGVVKVGETVDLVGLGDTKSTTVTGVEMFQKTLDEGVAGDNVGILLRGLQKGDIERGMVLSKPGTITPHNTFESELYILTKEEGGRHTPFFPGYRPQFYVRTTDVTGEILSFITDEGEKTLMVMPGDRVKMTAKLISLIAIEEGMRFAIR

SEQ ID NO: 2955 - protein, 482 aa, Ralstonia metallidurans CH34
MTETYRNYIDGEWCDSASGRTVDNVNPADTRDIVSRHAASDARDAAAAVAAAAAAFDGWKKTPIGKRAKILNDAAAHLEANADTIATELTREEGKALNLARDEVMRSAQTLRFYAVEGQTFSGESYPNDDPDMLVYSLREPLGVVTVISPWNFPVSIPARKIAPALITGNTVVFKPSSDAPLSGYRLAEAFVRAGIPKGVLNFLTGSAAEVGPTIVESREVRAVSFTGSTSAGEQIHKSVPMTTRTQMELGGKNPLIVMEDADLDRAVDLAVKGGLSLSGQACTGTSRILVMRDVKQAFTEKLVAKVKALKIGSGMTAGMDLGPLATRKQLETVLSYIAIGKQEATLLCGGEQLSDGDFAHGYYVAPTVFTDVTQSMRIAREEIFGPVLAIIEVDSYADAIAQANDTEYGLSAAIATRNPRYMHDFTRDIESGTVKINRTTTGNLVNAPFGGLKRSSTSTFRESGRAGLEFYTQIKTVYQGI

SEQ ID NO: 2956 - protein, 407 aa, Buchnera aphidicola str. Sg (Schizaphis graminum)
MKRVVITGFGIISSIGNNKKEVLNSLYNGISGITFSEEMKESGMRSQVWGNIKLENKKFFKKNKISRFMNNGSIYAFLSMEQAIKDANLQTKQYQKNPRIGIIAGSGGGFPKYHIQGIDAIRSNRGLNSVSPYIAIKAMNSGISACLSTLFKIYGVNYSISSACATSGHCIGNAFELIKFGKQDLIFAGGGEEVSWELAYEFDAMKALSSNFNKNPTKSSRVYDVNRDGFVISGGGGIIVIEELNCALSRSAHIYAEIIGYAATSDGKDMVVPSGDGAVRCMNLAKKQNKMLFIDYLNVHGTSTKIGDLIELEAIKKSFFHEKKPMISATKSMTGHALGVSGVHEIIYTLLMMKYNFIAPSINIETIEPSADNMNIVQKTFHKKIKTALSNSFGFGGTNVSLILKKY

SEQ ID NO: 2957 - protein, 161 aa, Candida glabrata CBS 138
MSPFHQLRPVDGQGNIYPFEMLKGKVVLIVNTASNCGFTPQYIELENMYQKYKNEGFEILGFPCNQFGHQEPGSDAEIQKFCSSKYKVTFPIMKKIDVNGPYEDPVFKYIKEQKPGMLGLKGIKWNFEKFLIDRQGNVVLRASSLTKPSTLNETIEKLLKN

SEQ ID NO: 2958 - protein, 269 aa, Oryza sativa
MSAAVCGKRASSFFEDLPHSPSSPPSKRACFRGGSSPSRPLADPALVAQIRPRFPSVGLEVIENALEECENDFDSAIKFLFNLHVGPTECNVDPIYQSPSGMSTELQVADEGILAGNEAAVPIGNAPCADNFPSSSTQWVEILVNEMTNASNMDDAKARASRVLEVFEKSMTAHVGAMGSFQKESSVYKEQFEAITRENTILKKAVAIQHERQKEHDGRNQEIQQLKQLVAQYQEQIRSLEVNNYALSMHLRQAQQANSIPGHFHRDIF

SEQ ID NO: 2959 - protein, 217 aa, Frankia sp. CeD
LFASEKLAVATKKTSPQMRRDLEAIERDGQIAKRKLVEANLRLVVSIAKRYVGRGMLFLDLIQEGNLGLIRAVEKFDYTKGYKFSTYATWWIRQAITRAIADQARTIRIPVHMVETINKLIRIQRQLLQDLGREPSPEEIAKEMDLTPDKVREILKVSQEPVSLETPIGEEEDSHLGDFIEDCDAVVPVDAASFILLQEQLDSVLHTLSDREKKVIQ

SEQ ID NO: 2960 - protein, 70 aa, Arabidopsis thaliana
  misc_feature (12)..(12): Xaa can be any naturally occurring amino acid
  misc_feature (33)..(33): Xaa can be any naturally occurring amino acid
  misc_feature (36)..(36): Xaa can be any naturally occurring amino acid
  misc_feature (52)..(52): Xaa can be any naturally occurring amino acid
TITSSILSSATXISSPPQPTMVSPFNRLKSSPXFPXTLNANNNITSITSNRXRVHCLHVSPPIVKTTSNT

SEQ ID NO: 2961 - protein, 750 aa, Nicotiana sylvestris
IQAAFRTDEIRRTPPTPQDEMRAGMSYFHETIWKGVPKFLRRVDTALKNIGIDERVPYNAPLIQFSSWMGGDRDGNPRVTPEVTRDVCLLARMMAANLYYSQIEDLMFALSMWRCNDDCRVRSDEVLHSSSRRDAKHYIEFWKQVPPNEPYRVILGDVRDKLYQTPERARQLLAHGYSEIPEEATYTNIEQFLEPLELCYRSLCACGDRSIADGSLLDFLRQVSTFGLSLVRLDIRQESDRHTDVLDAITQHLEIGSYREWSEERKQEWLLSELSGKRPLFGPDLPKTEEIADVLDTFHVIAELPADCFGAYIISMATAPSDVLAVELLQRECRVKQPLRVVPLFEKLADLDAAPAAVARLFSVEWYRNRINGKQEVMIGYSDSGKDAGRLSAAWQLYKAQEELVKVAKEYGVKLTMFHGRGGTVGRGGGPTHLAILSQPPDTIHGNLRVTVQGEVIEQCFGEEHLCFRTLQRFTAATLEHGMHPPVSPKPEWRALMDEIAVVATEKYRSIVFKEPRFVEYFRLATPELEYGRMNIGSRPSKRKPSGGIESLRAIPWIFAWTQTRFHLPVWLGFGAAFKYAINKDIKNLRMLQEMYNAWPFFRVTIDLVEMVFAKGNPSIAALYDKLLVSEDLWSFGEQLRSNYEETKSLLLQIAGHKDLLEGDPYLRQRLRLRDSYITTLNVCQAYTLKRIRDPNYSVTPRPHISKEYMESKPAAELVKLNPTSEYAPGLEDTLILTMKGIAAGMQNTG

SEQ ID NO: 2962 - protein, 1738 aa, Magnaporthe grisea 70-15
MSDKLTRIAIVNSDKCKPKKCRQECKKSCPVVRSGKLCIEVSPDSRIAYLSETLCIGCGICPKKCPFDAITIINLPTNLESQVTHRYSANSFKLHRLPMPRPGNVLGLVGTNGIGKSTALKILSGKLKPNLGKFDNPPDWEEGFIADYFTKLLEDDLKAVVKPQYVDQIPKALRPGAEKSVKYLIESRKSLDNLDQVLDVLELRHIYDRDINLLSGGELQRFAIGTVCVQKADVYMFDEPSSYLDVKQRLAAASIIRSLLRPDDYVIVVEHDLSVLDYLSDYICVLYGKPAVYGVVTLPHSVREGINVFLDGHIPTENLRFRDESLTFRIAEAADEFNIDRSRAFNYPAMEKTLGNFKLRIDPGDFEDSEIIVMMGENGTGKTTFCRLLAGALKPDSAKKVPEMKISMKPQTITPKFEGTVRQLFFKKIRPAFLSPQFQTDVVKPLKLDDFIDQEVKNLSGGELQRVAIVLALGMPADIYLIDEPSAYLDSEQRIIAARVIKRYIMHTKKTAFIVEHDFIMATYLADRVIVFDGKPGIDAHANKPESLLTGCNSFLKNLDVTFRRDPTNYRPRINKANSQLDQEQKLSGNFGTPEDSPFNRNNDHNASASGVLGVQKRGQSGGRDTAGLEEETSGEDDDPDITSLPTASIKLHVKSIENWVALAKPRQAGCSHMSSSKPPSSDLRPPSLQRRTSLAKGSHPTPTAVTWKASADSVPSFAARSARHPKAAREVDSSTDQSTDATTQAIQKAPGLAMEDLLRPTISIKPHPPNLQTKPVQLQPLMLLPRECLSLAYIDLAAPYGELPSCRFFESRIRIMELESRLGSNVLVARSDLNRHTTYAIERHTNGHYVVCRLGDWVHMEELAQQATVCCRERLSKTGLLSKTPAVVAKPAGPTLHVPQLYKASNRKRQAIEDLQSLCRKRPRSPSAVGPSSQDQATACHLPTPIDDGLYGTHEHGYPAASQPSEAAPTVVSQMVNPSRQVSELPVTTDAPKTAEEIFANIKNHYFEALYHSKGNLAYFPKGPLSRARAAFNLNIDGILEMPDLIDFLKSMVLTTVSIDKKYLSTIPNTLDQMKRFVDSSDDGGEKVKKKKSKKFKLGKNGLYSNEDEDVKKWWIATKPELKDDEVSVEPQHMRYHISCLRRRETLLQMILIMEILALEAARPPENPADVQLPGLDPMPTAVVSETSGHKKKRNKHNYPVLLDVHADRLCIWESITLDEVKALAESQTHEDEAEVSDKPLRDFCTDIIVPFFSARLPEICESLNRKLGGPVKQSPRKPKREKPVSSASTKTKISSKPGAVTKRTGTGKSATSKSSARSLERVLSNDKLRRSVSRGPCDALAHLRHATVAHVPGLKRESSESRSFSESRSLKDAVDSLQDDQSSATGGSKEKQVPQLMHSRSSSFTNADDARAKKKAMVDAELRNAISALKKPNRLLAGKVMVEETEKRLFGGPTYVSNTRKLAQSPVNHVQVKATPANVRFRDVLDVADEGALQYGKGFKLSRGRSVTQPAAAMASLLEEPAQVGATPRHVANTPSPSQTPRQRDAVPNSSPLQARKVAPRPQMQQSSEWRQKTKSQPAPFARDLLQPTGMSDLVPASSPHQPLLTAPGLTGVNDDPLVVAVATTPSGKDRMSTTQRQHPRSGSLLETPVKKARNMLIDESPSPCQPALLMSGGRAGIKPHQPAHLVFLSPARRRISADASVGLAKETEGPAAGGSTKPKSIYQQLGWDDDLDELL

SEQ ID NO: 2963 - protein, 217 aa, Frankia sp. ARgP5ag
LFASEKLAVATKKTSPQMRRDLEAIERDGQIAKRKLVEANLRLVVSIAKRYVGRGMLFLDLIQEGNLGLIRAVEKFDYTKGYKFSTYATWWIRQAITRAIADQARTIRIPVHMVETINKLIRIQRQLLQDLGREPSPEVIAKEMDLTPDKVREILKVSQEPVSLETPIGEEEDSHLGDFIEDCDAVVPVDAASFILLQEQLDSVLHTLSDREKKVIQ

SEQ ID NO: 2964 - protein, 147 aa, Bradyrhizobium japonicum USDA 110
MSETRQIVCGHCGRTNRLPAERTPEGARCGACHQPMFTGHPIEVDEEAFGRHVVNSDIPVLVDVWAPWCGPCRAMAPMFERAAQQLEPQIRLLKLNSDNAPALSSRLNITGIPTLLLMRGGREIARHAGAMDARSIVAWTQASLTRS

SEQ ID NO: 2965 - protein, 311 aa, Bacillus cereus G9241
MKKKIGLLVMAYGTPYKEEDIERYYTHIRRGRKPSPEMLEDLTERYRAIGGISPLATITLEQAKKLEKRLNEVQDEVEYHMYLGLKHIEPFIEDAVKDMHNDGIQDAIALVLAPHYSTFSVKSYVGRAQEEAEKLGNLTIHGIDSWYKEPKFIQYWVDAVKGIYNGMSDAEREKAVLIVSAHSLPEKIIAMGDPYPDQLNETADYIARGAEVANYAVGWQSAGNTPDPWIGPDVQDLTRELNEKHGYTSFVYAPVGFVAEHLEVLYDNDFECKVVTDEIGAKYYRPEMPNASDAFIDCLTDVVLKKKESVL

SEQ ID NO: 2966 - protein, 541 aa, Sinorhizobium meliloti
MKALVENLKATARETDATDIRAAFAADPNRFSRFSTAFDDLLFDYSKCAVNDRIIDGLEALAKAAKVEEKRDAMFRGDIINITEERAVLHTALRNRSNRPVLVDGKDVMPDVNAVLEAMGKFADDIRSGALKGATGKKITDVVNIGIGGSDLGPVMATLALAPFHDGPRLHFVSNVDGAHIADTLTLLDPETSLFIVASKTFTTIETMTNAATARAFIAGKLGEAAVGHHFAAVSTALDKVGAFGIDAARVFGFWDWVGGRYSIWSAIGLPLMIAIGKENFGRFLDGGHAIDEHFRSAPLRQNIPMLLGLIGFYNRNVLGYPSRAILPYDQRLTRFPAYLQQLDMESNGKGVTLDSQPVEFSTGPVVWGEPGTNGQHAFYQLIHQGTDVIPAEFMIAANGHEKDLRHQHQLLMANCLAQSEALMKGRTLAEAKAQLTSKGMDDAKADKIAPHRVFTGNRPSLTIVYDQLDPFALGRLIALYEHRVFVEGALFNINSFDQWGVELGKELATGLLPVIEGKESAEGHDSSTAGLVAALLKAAR

SEQ ID NO: 2967 - protein, 426 aa, Rubrivivax gelatinosus PM1
MALIVHKYGGTSMGSTERIRNVAKRVAKWARAGHQMVVVPSAMSGETNRLLGLAKELSPASHTPQLARELDMIAATGEQVSVGLLAIALQAEGLQAVSYTGWQVPVRTDSAYTKARIESIDDVRVRADLAAGKVVVITGFQGIDGDGHITTLGRGGSDTSAVAVAAAMKAAECLIYTDVDGVYTTDPRVVPEARRLSAISFEEMLEMASLGSKVLQIRSVEFAGKYRVPLRVLSSFTPWDIPLDEEAKSGTLITFEEDENMEQAVVSGIAFNRDEAKITVMGVPDKPGIAFQILGPVAEANIDIDVIIQNVSHDGKTDFSFTVHRNDYARTMELLKGTVQPVINAAQVLGDPKICKVSIVGIGMRSHVGVASRMFRVLSEEGINIQMISTSEIKTSVVIDEKYMELAVRALHKAFDLDAPAAVPAA

SEQ ID NO: 2968 - protein, 176 aa, Oryza sativa
MVVLVVATASGPASIGPAAAFLAMPGWSPGPPIPEGMESFTNGDVRLLKHERSIIAEDDLDNRWQAATGEAVSEVIFLSKHTAVSNRPALTVHPIGVPHLREDETPPQGGRPGWAALPNPRIGPWLRLMQKIAVDQGLVPEFEITLEATHHGPVTNTPTMFVEIGIDLLPCLYSLY

SEQ ID NO: 2969 - protein, 351 aa, Arabidopsis thaliana
MLKYSNVKQKQKRDYRRELSLTIEFIEEALSLSQNLFFSVLEQWGMLLSKKNHRLRCLKVSGAVDGRVEGDFVGNAEFRWQRVLLMRSSAYYPKYGIGAFAVYPLISKITGKSSEEYRIMGLRYGSTNLSVGATVTPFSANNELPKHAWLVSKMGSLTVGVQYEPLHGSKDLAKYTDPRNWSCAAGYGVGSQSPLTPSFNIGIELARSSQFSTSLAQYEIDLMDLEQVQNPFEENQVVGITNYIDFGFELQSRFFIAGGCVLAGQQELFAEATTNHRTGNVQCGFGLRVDNLREASYQRADPNFVMLTPNKEHLAEGIVWKMGKRPMYQADVDAENFSELPKELRPSQKIL

SEQ ID NO: 2970 - protein, 807 aa, Bacillus halodurans C-125
MKEKLVVVGNGMAGIRTVEELFERGGHERYEVTVVGEEPHVNYNRILLSSVLASEANMEDIELNSLDWYRENDVTLYRSEKVTKLDRKKKVVLTDKGQKIAYDKVILATGSHPFMLPLPGSDLEGVIAFRNIEDCETMIETAKNYKKAVVIGGGLLGIEAARGLLNLGMEVEVVHIFDYLMERQLDRTAANILRTELENQGMKFLLEKHTEAIIGKGRVERVKFKDGTETRADLVVMAVGIRPNHEVASASGIEVNRGIVVDDYMQTSDPDVYAVGECAEHRGMVYGLVAPLWEQGKILANALMDNKDEKYEGSVLYSKLKVSGVQVFSVGEFQEQDDAKSVSMLDEFAGIYKKIVTRGDKIVGSILVGDTSESTILLNQIIKGVPFEGSPMQLLRSHVGSADDGVSAVSMLSNEDQVCGCNGVSKGAIIDAIKTQGCASVADVGACTTAGRSCGTCKPMIADLLAEELGETANEKETMCGCTDLSHEEVVAAIREKGLTHTREVMNVLGWKEEHGCSKCRPAINYYLAMVHPLEHEDERESRFVNERLHANIQKDGTYSVVPRMYGGVTNPDELRRIADVAEKFNVPLLKITGGQRIDLLGVKKEDVPSVWKELDMPSGYAYGKALRTVKTCVGEDFCRFGTQDSIGLGIAIEKKFERLNTPHKVKMAVSACPRNCAESGIKDVGIVGVEGAWEIYVGGNGGASLRLGDLMCRVKTSEEVLEIIGAFLQLYREEARYLERTSHWVERVGLDYIKETLLEHPENRKVLNERMDEALSVLTDPWEEINNDPSLKETLFEEKVAVVTSE

SEQ ID NO: 2971 - protein, 743 aa, Bacillus halodurans C-125
MEEMIQFFREKQKQQGKEARYDTRCPFCSVQCSMTLTEEKLVATSRFKAIPNKQDPTSEGRLCIKGVHAHQHTVHRERIRQPLVKTGGAFVETSWEVALGLIAERFKRLQKSYGQDAVGVFGGGSLTNEEAYLLGKFARLALGTRYIDYNGRYCMSSAAAAANLTFGVDRGLTNELREVEDAECIVLAGTNLAECQPTLMPYLRRAKKNGAFIIVLDPRETGTTKIANLHLKPKPGTDGAIAAGMLKVLIEEELIDRTFIEARTNGFEQVESELQEIALAELALAAGVPEEQIREAAIRFGEAQTGMIFTARGVEQQATGTADVRQFLHILLATGKIGRYACGYGAVTGQGNGQGGREHGQKADQLPGYRSIESPEDRAYIASVWNVEEKDIPRKGVSAFELFQKIDQQDVRGMFIMGSNPVLSSPHENLVKRALSRLDVLVVVDMFISETAEYADIILPTTSYLEDEGTMTNFEGRVVHRPGSKPPFGKAKHDWQILCELAEALDRSHGFQFSSPEEIFNELCLASKGGKADYSGLSYEKIKGEGVLWPCPTKEHEGTGRLFEDRFYTEDGRAQFGSVHCPVDSENDEYPILLTTGRVLTQYLSGTQTRRSDALLFKEPEPFVLLHPETASSYQIQDEDWVMVRSPYGEAKLKARQSEGIREDTVFVPFHWAGSVSINHVVAPELDPTSRMPAFKRTKVKLKKIIEEKGESWYSGQKNDRQESENTDDILDPVHSGGVAKNR

SEQ ID NO: 2972 - protein, 175 aa, Triticum aestivum
MAPTVMVSSATSVAPFQGLKSTAGLPVSRRSNGASLGSVSNGGRIRCMQVWPIEGIKKFETLSYLPPVSTEALLKQVDYLIRSKWVPCLEFSKVGFIFREHNASPGYYDGRYWTMWKLPMFGCTDATQVINEVEEVKKEYPDAYVRIIGFDNMRQVQCVSFIAFKPPGCEESGKA

SEQ ID NO: 2973 - protein, 421 aa, Sinorhizobium meliloti
MRRVVITGTGMVSPLGCGTEVSWARLLTGDNAARKVTEFEVEDLPAKIACRIPFGDGSDGTFNADDWMEPKEQRKVDPFIVYAMAAADMALADAGWKPESDEDQISTGVLIGSGIGGLEGIVDAGYTLRDKGPRRISPFFIPGRLINLAAGQVSIRHKLRGPNHSVVTACSTGAHAIGDASRLIALGDADVMVAGGTESPICRISLAGFAACKALSTQHNDNPEKASRPYDADRDGFVMGEGAGIVVLEELEHARARGAKIYAEVIGYGLSGDAFHITAPSEDGEGAYRCMQMALKRAGVTAADIDYINAHGTSTMADTIELGAVERLVGDSASRISMSSTKSAIGHLLGAAGAVEAIFSALAIRDNIAPPTLNLDNPSVETKIDLVPHVARKREINVALSNSFGFGGTNASLILRRYTGH

SEQ ID NO: 2974 - protein, 482 aa, Shewanella sp. MR-4
MLLKDPSLLRQQCYINGQWCDAQSKETVAIANPATGVVIASVPVMGQAETQAAIAAAEVALPAWRALTAKERGAKLRRWFELLNENSDDLALMMTSEQGKPLAEAKGEVTYAASFIEWFAEEAKRVYGDTIPGHQGDKRIMVIKQPVGVTAAITPWNFPAAMITRKAAPALAAGCTMVVKPAPQTPFTALALAVLAERAGIPAGVFSVITGDAIGIGNEMCSNPTVRKLSFTGSTQVGIKLMEQCAPTLKKLSLELGGNAPFIVFDDANIDAAVEGAMIAKYRNAGQTCVCANRIYVQAGVYDEFARKLSIAVGKLKVGEGITEGVTTGPLINRAAVEKVQSHLEDALSKGASVVAGGKPHSLGGNFFEPTVLTHVDSSMRVAREETFGPLAPLFKFTDVDDVIKQANDTEFGLAAYFYGRDISLVWKVAEALEYGMVGVNTGLISTEVAPFGGMKSSGLGREGSKFGIEEYLEIKYICMSV

SEQ ID NO: 2975 - protein, 112 aa, Shewanella sp. MR-7
MKLITAIIKPFKIDDVREALTQLGIQGMTVTEVRGFGRQKGHTELYRGAEYAVDFLPKMKLEIAIHSEQEDAVIEAIVAAAHTGKVGDGKIFVTPLEQVIRVRTSEEGSDAI

SEQ ID NO: 2976 - protein, 438 aa, Pseudomonas fluorescens PfO-1
MMTLPSKTSLRRAVTGPMLFLFILGDVLGAGVYALAGTIAGEVGGAIWMPLLIALFFAMLTAGSYAELVTKYPHAGAASVFAEKAFGSPLISFLVGFCMLSAAVTSAAGLSLAFAGDYLAAFIHVPPHISALLFLLVIALLNARGIKESLGANLVMTVIELSGLLLVVVAAAWYFRTGDADLGRSLEFKPGVSPVLAVLGAALIAFYSFVGFETSANLAEEIRDVRKVYPRALFGALLTAGVLYMAVGVAASSVLPMEKLVATSAPLLEVVRASGLNIPPRVFAFIALVAVANGALLTMIMASRLTYGMACLGLLPNALSKVLPQRRTPWIAVIATTLVAIGLTLTGTLATLAETVVLLLLFVFLSTNLSVLILRRDEVAQDHFRVPTWVPLLAIVSCLVLLSQQSLETWMRGGALILTGMLLFACARVALPAPVEPG

SEQ ID NO: 2977 - protein, 138 aa, Shorea xanthophylla
EKNIPVLLGLLSIWNVSFLGYPARAILPYSQALEKFAPHIQQVNMESNGKGVSIDGVPLPYEAGEIDFGEPGTNGQHSFYQLIHQGRVIPCDFIGSAKSQQPIHLKGEVVSNHDELMSNFFAQPDALAFGKTPEELHK

SEQ ID NO: 2978 - protein, 407 aa, Zea mays
MAAALQATPLKTLSISRRRVGGAGARPRPMAASFRCSAAARSDNITLLPGDGIGPEVVAVAKDVLSLAGALEGVELRFQEKLVGGSALDATGVPLPDETLDAAKGSDAVLLGAIGGYKWDNNEKHLKPETGLLQLRAGLGVFANLRPAAVLPQLVDASTLKKEVAEGVDIMVVRELTGGIYFGKPRGFGTNDNGDDIGFNTEVYSASEIDRIARVAFEVARKRRGRLCSVDKANVLEASMLWRKRVTALASEFPDIELSHMYVDNAAMQLVRNPKQFDTIVTNNIFGDILSDEASMITGSIGMLPSASVGESGPGLFEPIHGSAPDIAGQDKANPLATILSAAMLLRYGLGEENAANRIEAAVTETLNHGFRTGDIYSPGTTLVGCKRMGEEVLKTVNSLKEVAAVN

SEQ ID NO: 2979 - protein, 494 aa, Brassica juncea
MVLSRAATESGENVCSTFGSRYVRTALPKHKIGESSIPKEAAYQIIKDELMLDGNPRLNLASFVTTWMEPECDKLIMESINKNYVDMDEYPVTTELQNRCVNMIARLFNAPLEETETAMGVGTVGSSEAIMLAGLAFKRNWQNKRKAEGKPYDKPNIVTGANVQVCWEKFARYFEVELKEVKLSEGYYVMDPDKAAEMVDENTICVAAILGSTLNGEFEDVKRLNDLLVKKNEETGWNTPIHVDAASGGFIAPFIYPELEWDFRLPLVKSINVSGHKYGLVYAGIGWVVWRTQQDLPDELIFHINYLGADQPTFTLNFSKGSSQIIAQYYQLIRLGFEGYKNVMENCRENMVVLREGIEKTERFNIVSKEVGVPLVAFSLKDHSFHNEFEISEMLRRFGWIVPAYTMPADAQHITVLRVVIREDFSRTLAERLVADIVKVLHELDTLPSKISKKMGAEDFGNVKGKKVDRDVLMEVIVGWRKFVKDRKKMNGVC

SEQ ID NO: 2980 - protein, 138 aa, Shorea biawak
EENIPVLLGLLSIWNVSFLGYPARAILPYSQALEKFAPHIQQVSMESNGKGVSIDGVPLPYEAGEIDFGEPGTNGQHSFYQLIHQGRVIPCDFIGSAKNQQPIHLKGEVVSNHDELMSNFFAQPDALAFGKTPEELHK

SEQ ID NO: 2981 - protein, 207 aa, Sulfitobacter sp. EE-36
MVATGVQYRKLPIPRLEEFEGVGVYYAATEMEARFCRNSEAIVVGGGNSAGQAAMFLSRAAAHVHLLVRSGSLAASMSDYLSSRLEADPRITIHYQAEISDLHGDDKLSAVTVKNKADSTHHRYDSRTVFIMAGAAPNTDWLAGHVALDDKGFVLTGTENGGRSPFETSTHGIFAVGDVRSGSVKRVASSVGEGSVVMSEVWNHLNS

SEQ ID NO: 2982 - protein, 326 aa, Mycoplasma pulmonis
MIKKIAILTSGGDSPGMNNAIRAIIKTARLYDIETYLVYEGFLGLYNGWIKPSEGIDEDSYINKGGTFIFSARFVEFAQEKYRQVAKENLLKLGIEALVVIGGDGSYKGAQKLHEMGIKTIALPGTIDNDITSSDFTIGYDTALNTIVEAVDKIRDTASSHKRCIMVEVMGHGASDLALYSGMATGSEIIVSNDYKLSVEEMAKIVKKQFEKPNKRSVIITVSEFVFKDLQQVAKQIEELTNITTKAVVLAHIQRGGYPSARERINATILGKHAVLRLKQGQSGIALGLIKNQVAATPILEALAMPQTRKDLLERRTKSYNDINQA

SEQ ID NO: 2983 - protein, 558 aa, Helicobacter hepaticus
MSYTKYQRGYFMPPTPSLEWSKKEYIAKAPIWCSVDLRDGNQALITPMSLEEKITFFKLLLKVGFKEIEVGFPAASETEYRFLRTLIEEDLIPDDVSVQVLTQAREHIIKKTFESLEGCKNAIVHVYNSTSYAQREQVFRKSKDEIKHIACEGAICLKESAAATKGNFRFEYSPESFSGTEVDYALEVCNAVIDIFEPTLEKKLIINLPVTVEMSLPHIYASQVEYMSKHLKNRENVLISLHPHNDRGCAIADAELGLLAGADRIEGTLFGNGERTGNVDIITLAMNMHSHGVDPKLDFSNIPSICDVYEKVTKMQVYERQPYSGKLVFAAFSGSHQDAIAKGMAYHKEHNLSTWSVPYLPIDPKDVGRVYESDVIRINSQSGKGGIAYILHHHYGVNLPPLFREEFSYYVKNISDKAHKELSPDEICEIFQNDFVNLNNTLCVQDFHFTHIDSKPSQEFNVKLHILYAKENSKTQQEITGKGNGRLDSIANALREHLNLDFEIIDYSEHSLKKGSTSQAVSYVQIESKGKKCFGVGIDNDIITASIYGLVSALNRII

SEQ ID NO: 2984 - protein, 181 aa, Arabidopsis thaliana
MDSIVSSSTILMRSYLTPPVRSCSPATSVSVKPLSSVQVTSVAANRHLLSLSSGARRTRKSSSSVIRCGGIKEIGESEFSSTVLESAQPVLVEFVATWCGPCKLIYPAMEALSQEYDKLTIVKIDHDANPKLIAEFKVYGLPHFILFKDGKEVPGSRREGAITKAKLKEYIDGLLNSISVA

SEQ ID NO: 2985 - protein, 185 aa, Dechloromonas aromatica RCB
MFSSLKRCFGIAALITVGVVPVAAAAECPPLLNHSFASLQDGKPMPLCQYAGKVILVVNTASYCGFTSQYDGLEKLYARLKDKGLVVLGFPSNDFGEQEPGSEKEIADFCRLTYGVEFPMVSKTVVKGKGAHPFYLKLAEITGSKPKWNFHKYLINRDATQVVAYTSFTKPDDKDLLKKIDEFLK

SEQ ID NO: 2986 - protein, 138 aa, Shorea laevis
EKNIHVLLGLLSMWNVSFLGYPARAILPYSQALEKFAPHIQQVSMESNGKGVSIDGVPLPYEAGEIDFGEPGTNGQHSFYQLIHQGRVIPCDFIGSAKSQQPIHLKGEVVSNHDELMSNFFAQPDALAFGKTPEELRK

SEQ ID NO: 2987 - protein, 332 aa, Ralstonia metallidurans CH34
MTIKIGINGFGRIGRMVFRAAAANFKDIEVVAINDLLEPDYLAYMLKYDSVHGRFDGEVSVEGNTLVVNGKKIRLTAVKDPSELKWGEVGADVVIESTGIFLTKEGAQKHIDAGAKKVIMSAPSKDDTPMFVFGVNHETYKGEAIISNASCTTNCLAPVAKVLNDKWGIKRGLMTTVHAATATQKTVDGPSNKDWRGGRGILENIIPSSTGAAKAVGVVIPQLNKKLTGMSFRVPTSDVSVVDLTVELENPAKYEEICAEMKAQSQGALKGVLGYTEDKVVATDFRGDARTSIFDAEAGIALDGTFIKVVSWYDNEWGYSNKCLEMARVVAK

SEQ ID NO: 2988 - protein, 348 aa, Frankia sp. CcI3
MTAQEDGQDVTGRSSQPDGDDDIRDVVIVGSGPAGYTAAVYTARANLRPLVFEGAVSAGGALMNTTEVENFPGFPDGIQGPELMENLRRQAERFGAELVADDVTELDLAANPKVVKIEDRTYLARTIIVATGSAYRMLGVEHEERLLGRGVSACATCDGFFFRDQDIAVVGGGDSAMEEATFLTRFARSVTVIHRRDKLRASAIMQERAFANEKIRFRWNAEVTELLGADKLTGVRLRDTVTGEAKDLPVTGLFVAIGHLPRTELVRGQLDLDDAGYISVAHPTTKTNLDGVFACGDVVDHTYRQAITAAGTGCAAALDAERFIAAGEGPGEVTTVAPRVVTPTPQPA

SEQ ID NO: 2989 - protein, 108 aa, Frankia sp. CcI3
MAGSTTPVTDSTFVTEVLESDKPVLVDFWAEWCGPCKMVAPVLEEIAKEHGEKLRVVKLNIDENPETARNYQIMSIPTMAVFVKGVIDKSIVGAKPKAALLRDLSVYI

SEQ ID NO: 2990 - protein, 633 aa, Arabidopsis thaliana
MASHSPPLDALVVPSEDYHQSEYVSARDKRREFVSGFSGSAGLALITKKEARLWTDGRYFLQALQQLSDEWTLMRMGEDPLVEVWMSDNLPEEANIGVDSWCVSVDTANRWGKSFAKKNQKLITTTTDLVDEVWKSRPPSEMSPVVVHPLEFAGRSVSHKFEDLRAKLKQEGARGLVIAALDEVAWLYNIRGTDVAYCPVVHAFAILTTDSAFLYVDKKKVSDEANSYFNGLGVEVREYTDVISDVALLASDRLISSFASKTVQHEAAKDMEIDSDQPDRLWVDPASCCYALYSKLDAEKVLLQPSPISLSKALKNPVELEGIKNAHVRDGAAVVQYLVWLDNQMQELYGASGYFLEAEASKKKPSETSKLTEVTVSDKLESRASKEHFRGLSFPTISSVGSNAAVIHYSPEPEACAEMDPDKIYLCDSGAQYLDGTTDITRTVHFGKPSAHEKECYTAVFKGHVALGNARFPKGTNGYTLDILARAPLWKYGLDYRHGTGHGVGSYLCVHEGPHQVSFRPSARNVPLQATMTVTDEPGYYEDGNFGIRLENVLVVNDAETEFNFGDKGYLQFEHITWAPYQVKLIDLDELTREEIDWLNTYHSKCKDILAPFMNQTEMEWLKKATEPVSVSA

SEQ ID NO: 2991 - protein, 422 aa, Pseudomonas fluorescens Pf-5
MSKRIVVTGMGAITPLGCGVEQVWRRLLAGQSGIRSLPEELIGELSTTIGGQVPDSLQDPEAGFDPDQLLAPKEQRKMDRFILFALAAAEEALAQAGWKPDTAEAQERTATIIASGVGGFPAIAEAVRTTDSKGPRRLSPFTIPSFLSNMAAGHVSIRHGLKGPLGAPVTACAAGVQAIGDAARMIRAGEIDIAVCGGAEAAIHRVSLGGFAAARALSSEFNDTPERASRPFDQARDGFVMGEGAGLLVIEELEHALARGARPIAELVGYGTSADAYHMTAGPEDGDGARRAMQQALRQAGIQASQVQHLNAHATSTPVGDKGELAAIRTVFGTDSGLAISATKSATGHLLGAAGGIEAIFTILALRDQIAPATLNLENPDSAAAGLDLVRGQARQLAMQYALSNGFGFGGVNASVLFKRWE

SEQ ID NO: 2992 - protein, 504 aa, Ralstonia solanacearum
MHPAFTSDADVGHYINGARLPGRSGRFQDVFNPAAGKAARRVALAEADEVNQAVAAAKAAFPAWADTPPIRRARVLHRFLQLMNEHRDALAAIITAEHGKVFSDAQGEVARGIDIIEFACGIPQLLKGDYTDQVSTGIDNWTMRQPLGVVAGITPFNFPCMVPCWMFPVAIAAGNTFVLKPSERDPSASLLIADLLMRAGLPAGVFNVVQGGKPVVDTLLDHPDVQAVSFVGSTPIAAYVQQRGVQAGKRVQALGGAKNHLVVMPDANLDQAVDALIGAAYGSAGERCMATSIAVLVGDVADRIVPALAERARTLVVGDGMMPDVEMGPIVTREALQRIEGYVEQGVAEGAKLVVDGRGLRVPGREQGFFTGGTLFDHVTPSMRIYQEEIFGPVLGCVRVKDFAEAVSLINAHEYGNGVACYTSDGGIAREFARRIQVGMVGINVPIPVPMAWHGFGGWKKSLFGDMHAYGEEGVRFYTRQKSVMQRWSSSIGKGAEFAMPTAK

SEQ ID NO: 2993 - protein, 661 aa, Arabidopsis thaliana
GSVRRSLVFRPSSDDDNQENQPPFPGVLADKITSCIRKSKIFIKPSFSPPPPANTVDMAPPISWRKGQLIGRGAFGTVYMGMNLDSGELLAVKQVLIAANFASKEKTQAHIQELEEEVKLLKNLSHPNIVRYLGTVREDDTLNILLEFVPGGSISSLLEKFGPFPESVVRTYTRQLLLGLEYLHNHAIMHRDIKGANILVDNKGCIKLADFGASKQVAELATMTGAKSMKGTPYWMAPEVILQTGHSFSADIWSVGCTVIEMVTGKAPWSQQYKEVAAIFFIGTTKSHPPIPDTLSSDAKDFLLKCLQEVPNLRPTASELLKHPFVMGKHKESASTDLGSVLNNLSTPLPLQINNTKSTPDSTCDDVGDMCNFGSLNYSLVDPVKSIQNKNLWQQNDNGGDEDDMCLIDDENFLTFDGEMSSTLEKDCHLKKSCDDISDMSIALKSKFDESPGNGEKESTMSMECDQPSYSEDDDELTESKIKAFLDEKAADLKKLQTPLYEEFYNSLITFSPSCMESNLSNSKREDTARGFLKLPPKSRSPSRGPLGGSPSRATDATSCSKSPGSGGSRELNINNGGDEASQDGVSARVTDWRGLVVDTKQELSQCVALSEIEKKWKEELDQELERKRQEIMRQAGLGSSPRDRGMSRQREKSRFASPGK

SEQ ID NO: 2994 - protein, 820 aa, Nicotiana sylvestris
RLVVALKKSPQEVFDALKNQTVDLVFTAHPTQSIRRSLLQKHARIRNCLAQLYAKDITPDDKQELDEALQREIQAAFRTDEIRRTPPTPQDEMRAGMSYFHETIWKGVPKFLRRVDTALKNIGINERVPYSAPLIQFSSWMGGDRDGNPRVTPEVTRDVCLLARMMAANLYYSQIDDLMFEMSMWRCNDELRVRADELHSSSKRDEKHYIEFWKQIPPSEPYRVILGDVRDKLYHTCERTRQLLSNGFSDIPEEATYTNIEQFLEPLELCYRSLCLVGIDPLLMEAFLHFLRQVSTFGLSLVRLDIRQESDRHTDVLDAITQHLEIGSYREWSEERRQEWLLSELSGKRPLFGPDLPKTEEIAEVLDTFHVISELPSDCFGAYIISMATAPSDVLAVELLQRECHVKRPLRVVPLFEKLDDLEAAPAAVARLFSIEWYKNRINGKQEVMIGYSDSGKDAGRMSAAWQLYKAQEELIKVSKQYGVKLTMFHGRGGTVGRGGGPSHLAILSQPPDTIQGSLRVTVQGEVIEQSFGEEHLCFRTLHGFTSATLEHGMNPPLSPKPEWRALLDEIAVIATEKYRSIVFKEPRFVEYFRLATPELEYGRMNIGSRPSKRKPSGGIESLRAIPWIFAWTQTRFHLPVWLGFGAAFKYALNKDVKNLHILQDMYNKWPFFRVTIDLVEMVFGKGDPGIAALYDKLLVSEDLWSFGELLRANYEETKSLLLQIAGHKDLLEGDPYLKQRLRLRDSYITTLNVCQAYTLKRVRDPNYLVTLRPHITKEYMESKPAAELVKLNPRSYAPGLEDTLILTMKGIAAGMQNTG

SEQ ID NO: 2995 - protein, 140 aa, Lotus corniculatus
NEVIKPTINGVLDIMKACQKAKTVRRLVFTSSAGTLNAVEHQKQMFDESCWGDVEFCRRVKMTGWMSLGSKTLAEQEAWKFAQEHDIDFITIIPSLVVGSFLMPTMPPSLTTALSPITGNEAHYSIIKQGQYVHFDDLCP

SEQ ID NO: 2996 - protein, 317 aa, Schizosaccharomyces pombe
MSSNKVTAAIIDYLKQAITTGSISEEEKESLEVAAQCIQDSFKIKPEEIKPKSGDRLVAAFEEYEKLHPVEEDSTAHVNKEEAEKLKLEGNNAIAAKDYQKALDLYTKAIEIDPTSPVYYSNRAAAYNQLGQFENAVEDALTCLSLDPHHARAFGRLGRAKLSLGDAAAAADAYKKGLDFDPNNEVLKRGLEAANKQLNQPSDSSATSGADQARTSAGAAPDLGSIFGGGMPDLGSLMNNPAVMNMARNLMQSGALNNIMNDPNIANMARNFQSGGGMPDLSSLANNPQLQNLARNFMNNNNNGNTDNNNQGNPPPQ

SEQ ID NO: 2997 - protein, 450 aa, Mycobacterium avium subsp. paratuberculosis K-10
MARGSRRGLLVGLTAASVGVIYGYDLSIIAGAQLFVTEDFGLSTRQQELLTTMAVIGQIGGALFAGVLANAIGRQRSVLLILSGYAVFALLAAFSVGLPMLLTARLLLGLTIGVTVVVVPVYVAESAPTAVRGALLTAYQLAIVSGLIVGYLSGYLLADTHSWRWMLGLACVPAVLLLPLVFRMPDTARWYLLKGRVDDARRALLRVEPVARVDDELAEIDRAVSEEAASLPAMLAEMVRSPYRRATVFVVVLGFLIQITGINAIIYYSPRIFEAMGFTGNFALLALPALVQVAGLVAVGTALLLVDRVGRRPILLCGTAMMIVADVVLVAVFGRGPGGVIAGFAGVLLFIFGYTMGFGSLGWVYASESFPSRLRSIGSSTMLTSNLVANAIVAAVFLTLLHSLGGAGTFAVFAVLAVVAFAFVHRYAPETKGRQLEDIRHFWENGGRWD

SEQ ID NO: 2998 - protein, 376 aa, Arabidopsis thaliana
MQDFFGSVRRSLVFRPSSDDDNQENQPPFPGVLADKITSCIRKSKIFIKPSFSPPPPANTVDMAPPISWRKGQLIGRGAFGTVYMGMNLDSGELLAVKQVLIAANFASKEKTQAHIQELEEEVKLLKNLSHPNIVRYLGTVREDDTLNILLEFVPGGSISSLLEKFGPFPESVVRTYTRQLLLGLEYLHNHAIMHRDIKGANILVDNKGCIKLADFGASKQVAELATMTGAKSMKGTPYWMAPEVILQTGHSFSADIWSVGCTVIEMVTGKAPWSQQYKEVAAIFFIGTTKSHPPIPDTLSSDAKDFLLKCLQEVPNLRPTASELLKHPFVMGKHKESASTDLGSVLNNLSTPLPLQINNTKSTPDSTCDDMMRIS

SEQ ID NO: 2999 - protein, 560 aa, Arabidopsis halleri subsp. gemmifera
MASSTASISDTEAWKDLKGHVEDIKKTHLRDLMTDANRCQSMMMEFDGLLLDYSRQRATVETVDKLLNLAKAAQLTEKISRMFNGEHINSTENRSVLHVALRAPKDAVIKADGKNVVPEVWNVLDKIKEFSEKIRSGSWVGATGKPLKDVIAIGIGGSFLGPLFVHTALQTDPEALESAKGRQLRFLANIDPVDVARNINGLNPETTLVVVVSKTFTTAETMLNARTLREWITAALGASAVAKHMVAVSTNLALVEKFGIDPNNAFAFWDWVGGRYSVCSAVGVLPLSLQYGFSVVEKFLKGASSIDQHFQSTPIEKNIPVLLGLLSVWNVSFLGYPARAILPYSQALEKFAPHIQQVSMESNGKGVSIDGLPLPFETGEIDFGEPGTNGQHSFYQLIHQGRVIPCDFIGIVKSQQPVYLKGEVVSNHDELMSNFFAQPDALAYGKTPEQLQKENVSENLIPHKTFSGNRPSLSLLLPELTAYNVGQLLAIYEHRVAVQGFVWGINSFDQWGVELGRVLATHVRKQLHSSRTQGTTLEGFNYSTTTLLIRYLETSSEPQM

SEQ ID NO: 3000 - protein, 693 aa, Mycobacterium sp. KMS
MPPLNTTQRRPRRGGGLETPDLYVPSCPTTAALGILGAVCGLLAFLKDPSAQSSPALVGAVSGAAELMRHRGPDEPGTWADDTDDPGIVLGFNRLSIIDIAHSHQPLRWGPPEAPLRYVLVFNGEIYNYLELREALRTEHGAEFATDGDGEAIVAAYHHWGPAALSRLRGMFAFALWDTVTGELFCARDPFGIKPLYIATGPGGTAVGSEKKCLMAVADQLGIDTGLDERAVQHYTVLQYVPEPETLHRGVRRLESGSYLRMRPGQAPVVTRYFTPRFDAVPFRAASAPGSAGGVDQARYDEITAVLEDSVAKHMRADVTVGAFLSGGIDSTAIAALAMRHNPRLITFTTGFEREGFSEVDVAVASAEAIGARHVTKVVSQAEFVEALPAIVWYLDEPVADPALVPLYFIAREARKHVKVVLSGEGADELFGGYTIYREPLSLRAFDYLPRPVRRSLRRASAPLPEGMRGKSLLHRGSQTLEERYYGNARSFSDEHLRAVLRRFSPDWTHTDVTAALYRESDGWDPVARMQHIDLFTWLRGDILVKADKMTMANSLELRVPFLDPEVFAVASRLPLEQKITRATTKFALRRALEPVVPAHVLNRPKLGFPVPIRHWLRAGELLEWAYETVAASQTGDLIDAEAVRTMLDEHRTGVSDHSRRLWTVLIFMLWHAIFVEGSVTPRIEEPHYPVQL

SEQ ID NO: 3001 - protein, 642 aa, Arabidopsis thaliana
RSLVFRSTTDDENQENHPPPFPSLLADKITSCIRKSMVFAKSQSPPNNSTVQIKPPIRWRKGQLIGRGAFGTVYMGMNLDSGELLAVKQALITSNCASKEKTQAHIQELEEEVKLLKNLSHPNIVRYLGTVREDETLNILLEFVPGGSISSLLEKFGAFPESVVRTYTNQLLLGLEYLHNHAIMHRDIKGANILVDNQGCIKLADFGASKQVAELATISGAKSMKGTPYWMAPEVILQTGHSFSADIWSVGCTVIEMVTGKAPWSQQYKEIAAIFHIGTTKSHPPIPDNISSDANDFLLKCLQQEPNLRPTASELLKHPFVTGKQKESASKDLTSFMDNSCSPLPSELTNITSYQTSTSDDVGDICNLGSLTCTLAFPEKSIQNNSLCLKSNNGYDDDDDNDMCLIDDENFLTYNGETGPSLDNNTDAKKSCDTMSEISDILKCKFDENSGNGETETKVSMEVDHPSYSEDENELTESKIKAFLDDKAAELKKLQTPLYEEFYNGMITCSPICMESNINNNKREEAPRGFLKLPPKSRSPSQGHIGRSPSRATDAACCSKSPESGNSSGAPKNSNASAGAEQESNSQSVALSEIERKWKEELDQELERKRREITRQAGMGSSPRDRSLSRHREKSRFASPGK

SEQ ID NO: 3002 - protein, 560 aa, Arabidopsis halleri subsp. gemmifera
MASSTALISDTEAWKDLKGHVEDIKKTHLRDLVTDANRCQSMMMEFDGLLLDYSRQRATVETVDKLLNLAKAAQLTEKISRMFNGEHINSTENRSVLHVALRAPKDAVIKADGKNVVPEVWNVLDKIKEFSEKIRSGSWVGATGKPLKDVIAIGIGGSFLGPLFVHTALQTDPEALESAKGRQLRFLANIDPVDVARNINGLNPETTLVVVVSKTFTTAETMLNARTLREWITAALGASAVAKHMVAVSTNLALVEKFGIDPNNAFAFWDWVGGRYSVCSAVGVLPLSLQYGFSVVEKFLKGASSIDQHFQSTPIEKNIPVLLGLLSVWNVSFLGYPARAILPYSQALEKFAPHIQQVSMESNGKGVSIDGLPLPFETGEIDFGEPGTNGQHSFYQLIHQGRVIPCDFIGIVKSQQPVYLKGEVVSNHDELMSNFFAQPDALAYGKTPEQLQKENVSENLIPHKTFSGNRPSLSLLLPELTAYNVGQLLAIYEHRVAVQGFVWGINSFDQWGVELGKVLATHVRKQLHSSRTQGTTLEGFNYSTTTLLKRYLETSSEPQM

SEQ ID NO: 3003 - protein, 723 aa, Mycoplasma gallisepticum R
MMDFQSVNNRLEDFKQILIKNNYSEASIKKFLSAFEFAKFWHADQKRKSGEPYIIHPLETSIKLAEWKMDDDTIIAGLLHDLLEDTSVDKRLISSTFNNNVLDLVKAVTKISSEAKKNREGLLLHKNELDYTIRVFSSISKDLRPIIIKIADRFHNLSTIQYLKSDRQKIIAQETFDIYAQIAGRLGMYWIKTQLLDITFKIINPTAFDDTQSLINAHKLINSLKWINFEQQIKKILDGNHLNYELTSRIKSVYSTYQKLNYRHNSQNIKNIHDIYALRIIVENEFDVYQVLGLVHLNFKYIPRLFKDYICAPKNNLYQSIHTTVLVDGTLIEVQIRTKSMDRNSNLGLASHWAYKLNIDISETDEYKTEVLNRFQVDIFNEKRARDLTLIKDLTKGSLIDVLVSNNNKNYSLSSSVTALELAYRVDPKQFIFLDKIMCSNDNILFDKLLEDGDVVSFEYSNEIKINESWLKRIKNPAIKKELIAIIEQLNQYEDSEKEFLEKLRKHLKKNVISQNDILERVKILGFKRLSDYVKYVNKTNFTDNEQYDFFSKNYNWKKILKKLKVHKPKWLFLNSYFKEIPGINFASIKISTCCSILPYIPSAGLIQKNILNVHSPNCKNINKLNNEKIIALHWSEEKLAARPRLFRSYVKLQGAWSGNVVNDILLIIINNNAKLFSLNVTKDKKNNTFMADLGIYVQDMRHLNFIMDEITLKDMSFNWNLL

SEQ ID NO: 3004 - protein, 255 aa, Frankia sp. ACN1ag
  misc_feature (214)..(214): Xaa can be any naturally occurring amino acid
AEEEVDLAKRIEAGLFASEKLAVATKKTSPQMRRDLEAIERDGQIAKRKLVEANLRLVVSIAKRYVGRGMLFLDLIQEGNLGLIRAVEKFDYTKGYKFSTYATWWIRQAITRAIADQARTIRIPVHMVETINKLIRIQRQLLQDLGREPSPEEIAKEMDLTPDKVREILKVSQEPVSLETPIGEEEDSHLGDFIEDCDAVVPVDAASFILLQEXLDSVLHTLSDREKKVIQLRFGLTDGHPRTLEEVGREFGVTR

SEQ ID NO: 3005 - protein, 939 aa, Thiobacillus denitrificans ATCC 25259
MNAPQNLLTDDDLRAQVKLLGTLLGQVLLQFAGEDVFEAVETLRRGFADLQQQEDQQRRSELMAMIDAMPAGKIELVVRAFSSYFMLVNVAEESFAHRNRRRMLSHGMTLWEGSFDHTLADLKAQGLSAGTLQGLINRLHFAPVFTAHPTEARRRAVMEAMRRIFLICDQLYSPSLGVNDQRELEAQLAAEIQIMWRTDELRSAKLEVRDEVRNGLYYVRESLFEAVPKAYSFFERALRKHYGVNGDGAAPISVPSFIRFGSWIGGDRDGNPFVTADVTEWTVHTQMQAALDEYRARVRELRQTLTHSSGWCTPSAPFLERLAEYEAEFGEQVFRGTAVQIYSREPYRRMAAMMLARLDANLSYVHQCLADVPSFTSHLAYEDAAAFLADLYLIRDSLISHGDRIIAMQDLQALIRLVESFGFHLLQLDIRQESTIHTRTVAAVLQQIDPDFDYKGADEAERLKRLSAWTGHIDPIEIDDSLLDDEARETVAVFRRMAKLKSEVGDEVFGTYIISMTHSASHVMEVMLLARLVGLCGHNGDAWFCRILVAPLFETVDDLQRSQAILDELLSNKVYRALVAADGNRQEVMLGYSDSCKDGGILASNWNLYQAQLSIIALTRRHGVECRLFHGRGGTVGRGGGPTHEAILSQPPGTVNGEIKFTEQGEMLYYKYSNPETANYEIGMGVTGLLKASATLLKKCEVRYPQDYLDWMRDIAAAGETTYRALIATPGFIDYFYENTPVTEIGTLNIGSRPSHRKKADRSLGSIRAIPWVFGWAQSRHTLPAWYGIGSALKSFVDQHPEGLAHLRAMYAEWPFFRGLLSNVQMALTKADMEIAEEYARLCDHPGTPDIYRAIADEFALTVAGVKQVAQIENLLEDNQPLALSISRRRPYIDPINHIQVRLLKRYRSESVWESEQDSWLTPLKRSINAIAAGMRNTG

SEQ ID NO: 3006 - protein, 150 aa, Brassica napus
ITVDAKEGITTGVSAKDRAKTVMTLASPYSKPEDFNRPGHIFPLKYRDGGVLKRAGHTEASVDLAVLAGLPPVGVLCEIVDEDGSMARLPKLRLFAEKNNLKIVSIADLIRYRRKRDRLIERASVARIPLRWGNVRAYCYRSVIDGIEHI

SEQ ID NO: 3007 - protein, 560 aa, Arabidopsis halleri subsp. gemmifera
MASSTALISDTEAWKDLKGHVEDIKKTHLRDLMTDANRCQSMMMEFDGLLLDYSRQRATVETVDKLLNLAKAAQLTEKISRMFNGEHINSTENRSVLHVALRAPKDAVIKADGKNVVPEVWNVLDKIKEFSEKIRSGSWVGATGKPLKDVIAIGIGGSFLGPLFVHTALQTDPEALESAKGRQLRFLANIDPVDVARNINGLNPETTLVVVVSKTFTTAETMLNARTLREWITAALGASAVAKHMVAVSTNLALVEKFGIDPNNAFAFWDWVGGRYSVCSAVGVLPLSLQYGFSVVEKFLKGASSIDQHFQSTPIEKNIPVLLGLLSVWNVSFLGYPARAILPHSQALEKFAPHIQQVSMESNGKGVSIDGLPLPFETGEIDFGEPGTNGQHSFYQLIHQGRVIPCDFIGIVKSQQPVYLKGEVVSNHDELMSNFFAQPDALAYGKTPEQLQKENVSENLIPHKTFSGNRPSLSLLLPELTAYNVGQLLAIYEHRVAVQGFVWGINSFDQWGVELGKVLATHVRKQLHSSRTQGTTLEGFNYSTTTLLKRYLETSSEPQM

SEQ ID NO: 3008 - protein, 150 aa, Brassica napus
  misc_feature (148)..(148): Xaa can be any naturally occurring amino acid
MNALAATNRNFKLASRLLGLDSKLEQSLLIPFREIKVECTIPKDDGTLASFVGFRVQHDNARGPMKGGIRYHPEVEPDEVNALAQLMTWKTAVAKIPYGGAKGGIGCDTSELSISELERLTRVFTQKIHDLIGIHTDVPAPDMGTGSXTM

SEQ ID NO: 3009 - protein, 460 aa, Photobacterium sp. SKA34
MISQLPKIGSGGVNITEVEDAEGEVSLLASELKKADECIYNTESKLQGLNRKLREQANDLSEAIKIKAEFMANMSHEIRTPMNGVLGFVQCLEERNLDQESQRQIGYIKESAYSLLVIINEILDYSKLESGNVELHMTSFNLKPFVHSCATPFIHQAKIKKIQLSTELGEGLADSYTADEGRLRQILINLIGNAVKFTHTGSVKLVVEKRDAPEQQCEELKKYNDKHIQWLRFKVKDTGIGIAEEKLAFIFDSYTQADGSISRQFGGTGLGLSISNSLCRLMSAKLQVESIIGNGTEFWFDIPLKQSDIQRKENDEDHALITNLSMYEDRKILVVEDSMVNQQLIKAFLTAFGLKNITIVNDGIQAVEYMIENTADVILMDCQMPNMGGLEATELIREMPSMSRPIIIALTANVMEEEKKRCLSVGMDDYVSKPIEKIMLYKSLQRAFDNEHGENWAANI

SEQ ID NO: 3010 - protein, 255 aa, Frankia sp. HRX401a
AEEEVDLAKRIEAGLFASEKLAVATKKTSPQMRRDLEAIERDGQIAKRKLVEANLRLVVSIAKRYVGRGMLFLHLIQEGNLGLIRAVEKFDYTKGYKFSTYATWWIRQAITRAIADQARTIRIPVHMVETINKLIRIQRQLLQDLGREPSPEEIAKEMDLTPDKVREILKVSQEPVSLETPIGEEEDSHLGDFIEDCDAVVPVDAASFILLQEQLDSVLHTLSDREKKVIQLRFGLTDGHPRTLEEVGREFGVTR

SEQ ID NO: 3011 - protein, 429 aa, Escherichia coli K12
MSDDKFDAIVVGAGVAGSVAALVMARAGLDVLVIERGDSAGCKNMTGGRLYAHTLEAIIPGFAVSAPVERKVTREKISFLTEESAVTLDFHREQPDVPQHASYTVLRNRLDPWLMEQAEQAGAQFIPGVRVDALVREGNKVTGVQAGDDILEANVVILADGVNSMLGRSLGMVPASDPHHYAVGVKEVIGLTPEQINDRFNITGEEGAAWLFAGSPSDGLMGGGFLYTNKDSISLGLVCGLGDIAHAQKSVPQMLEDFKQHPAIRPLISGGKLLEYSAHMVPEGGLAMVPQLVNEGVMIVGDAAGFCLNLGFTVRGMDLAIASAQAAATTVIAAKERADFSASSLAQYKRELEQSCVMRDMQHFRKIPALMENPRLFSQYPRMVADIMNEMFTIDGKPNQPVRKMIMGHAKKIGLINLLKDGIKGATAL

SEQ ID NO: 3012 - protein, 392 aa, Xanthobacter autotrophicus Py2
MSAPVVIVGAGQAAAQAVTSLKAEGYAGDIIVIGDEPYLPYQRPPLSKAYLGDEMTEDRLELKAPKFYADAGAELRLATRVARLLPSEKAVELADGSRLAYGALLIATGTRARALPVPGAELAGLFSIRSIDDVKHFRASAVPGAKLVIIGGGYIGLEVAAKAKKLGLEVTVVEGQPRLLARVACATISDFARTLHEGNGVTILTGMGVARLVGTERVTGVELADGRVLPADLVLSAVGAVPNAELASEAGLVLENGISVDEATRTSAPDIYAAGDVASFPSRLYGRRVRLESVQNAIDQAKAAAKAITGGGVVYDPIPWFWSDQYDVKLQIAGLLDGCERTETEGEVAAGRFCVRYFAGDRLLAVCSVNDPKSHMLARKALATPPPVPAPG

SEQ ID NO: 3013 - protein, 98 aa, Glycine max
AATHPPFSEEMEAQSCDARPHLKATFRLGSESYSVQANKGSLSEQLVSLKEESMTILKDFITKHNVPHDVPDEPLEASSDDDDIPEKPQGKSKKTKLT

SEQ ID NO: 3014 - protein, 255 aa, Frankia sp. Flec
AEEEVDLAKRIEAGLFASEKLAVATKKTSPQMRRDLEAIERDGQIAKRKLVEANLRLVVSIAKRYVGRGMLFLDLIQEGNLGLIRAVEKFDYTKGYKFSTYATWWIRQAITRAIADQARTIRIPVHMVETINKLIRIQRQLLQDLGREPSPEEIAKEMDLTPDKVREILKVSQEPVSLETPIGEEEDSHLGDFIEDCDAVVPVDAASFILLQEQLDSVLHTLSDREKKVIQLRFGLTDGHPRTLEEVGREFGVTR

SEQ ID NO: 3015 - protein, 308 aa, Saccharophagus degradans 2-40
MKKIRIATRKSELALWQANDVKAKLEALYPSLEVELFPLVSRGDKILDVPLAKVGGKGLFVKELEHALLADEADIAVHSMKDVPMEFPEGLELAVILEREDPRDAWVSAGYENLDALPAGGVVGTSSLRRQSQILARRPDITVKFLRGNVNTRLAKLDAGEYDAIILAAAGLKRLKFGDRIRSYLSPEESLPAGGQGAVGIECRSADSETLKLLQALHHTITAEQVLAERAMNRRLEGGCQVPIGCFAVHQNNQLWLRGLVADPDGSKVIYDEMTGAAADGEKMGVELAEKLLAAGADKILKAVYDNQ

SEQ ID NO: 3016 - protein, 493 aa, Brassica juncea
MVLSKTASESDVSIHSTFASRYVRTSLPRFEMPENSIPKEAAYQIINDELMLDGNPRLNLASFVTTWMEPECDKLMMESINKNYVDMDEYPVTTELQNRCVNMIARLFNAPLGDGEAAVGVGTVGSSEAIMLAGLAFKRQWQNKRKAQGLPYDKPNIVTGANVQVCWEKFARYFEVELKEVKLREGYYVMDPEKAVEMVDENTICVAAILGSTLTGEFEDVKLLNDLLVEKNKQTGWDTGIHVDAASGGFIAPFLYPELEWDFRLPLVKSINVSGHKYGLVYAGIGWVVWRTKSDLPDELIFHINYLGADQPTFTLNFSKGSSQVIAQYYQLIRLGFEGYRNVMDNCRENMMVLREGLEKTGRFNIVSKENGVPLVAFSLKDSSRHDEFEVAETLRRFGWIVPAYTMPADAQHVTVLRVVIREDFSRTLAERLVADFEKVLHELDTLPARVQAKMANGNANGVKKTEEETTREVTAYWKKFVEAKKSNKNRIC

SEQ ID NO: 3017 - protein, 543 aa, Magnetococcus sp. MC-1
MSIQTKITTPFDDQKPGTSGLRKKVKVFQQPNYLENFVQSIFDTLEEFQGKTLVLGGDGRYHNREAIHTILHMAAANGFGKVLVGRGGVLSTPAVSHLIRKYDAFGGIVLSASHNPAGPDGDFGIKYNVSNGGPAPESITNAIFTHSKAITQYRIWSDTEVDLDYLGDSEIGNMVVRVIDPVYDYAQLMEELFDFEAIRALLKGGFRILFDAMHAVTGPYAREILENRLGAPAGTVLNGVVKDDFGGGHPDPNLTYAADLVARMWADDAPDFGAASDGDGDRNMILGRKFFVTPSDSLAVLAENGTCAPGYARGIVGVARSMPTSQSVDRVAEKKNFACFETPTGWKFFGSLLDAGKATLCGEESFGTGSDHVREKDGLWAVLFWLNILAHRKTSVEAVVKDLWAIYGRTYYARHDYEDVDSAAASTLMSELRANFATLTGQVHEGLTIKLADEFGYTDPVNGESTIKQGVRILFVDGSRIVFRLSGTGTSGATLRIYLERFEPNPSLQHKDAQEALADLIRIADTLAGIKQHTGRQAPTVIT

SEQ ID NO: 3018 - protein, 134 aa, Helianthus annuus
GVGYSWIDGLKSHAEQHVTNKMMLNAERIFPHNTPVTKEAYYYRMIFERFFPQNSAKLTVPGGASVACSTAKAIEWEGFWSNNLDPSGRGALGVHNAAYKKKSGSISPAKLAPSIADNVPRMMDITGPEIVIRS

SEQ ID NO: 3019 - protein, 493 aa, Brassica juncea
MVLSKTASGTDVSVHSTFASRYVRNSLPRFEMPENSIPKEAAYQIINDELMLDGNPRLNLASFVTTWMEPECDKLMMESINKNYVDMDEYPVTTELQNRCVNMIARLFNAPLGDGEAAVGVGTVGSSEAIMLAGLAFKRQWQNKRKAQGLPYDKPNIVTGANVQVCWEKFARYFEVELKEVKLREGYYVMDPEKAVEMVDENTICVAAILGSTLTGEFEDVKLLNDLLVEKNKQTGWDTGNHVDAASGGFIAPFLYPELEWDFRLPLVKSINVSGHKYGLVYAGIGWVVWRTKSDLPDELIFHINYLGADQPTFTLNFSKGSSQVIAQYYQLIRLGFEGYRNVMDNCRENMMVLREGLEKTGRFNIVSKENGVPLVAFSLKDSSRHNEFEVAETLRRFGWIVPAYTVPADAEHVTVLRVVIREDFSRTLAERLVADFEKVLHELDTLPARVRAKMANGKAKVVKQTEEETTREVTAYWKKFVETKKTNQNKIC

SEQ ID NO: 3020 - protein, 568 aa, Bordetella bronchiseptica RB50
MMLANPATKYVPFQPFARDFAERTWPSRRITQPPIWMSTDLRDGNQSLIEPMSVERKVRFFEQLVKIGFKEIEVGFPSASQTDFDFVRKLIDEKRIPDDVTIIVLTQSREDLISRTVEAAAGARQAMIHLYNACAPAFRKIVFNMSRDEIKNIAVTGTRMVKQYMAKYPQTQWRYEYSPEVFSTTEPEFALDVSNAVADEWDATPQRKMVLNLPATIEATSPNMYADQIEWMHKNLARRDSIVLSVHPHNDRGTAVAAAEFAVMAGADRIEGCLFGSGERTGNVDLVTLALNLYTQGVHPGLDFSDIDEVRRCAEYCNQLPVHPRHPYAGDLVFTAFSGSHQDAIKKGFAQQQADAPWEVPYLPIDPADLGRSYDAVIRVNSQSGKGGVSYLLEQEHGLVLPRRLQIEFSRAIQRVTDETGREVSSDDVYTIFDSEYLAQQQPWQLVRHRIDGDPSAGEGKHFSIEAELSFNGERRIVKGSGDGAISAFVAALDVPVRIMDYHEHAIGTGTDTRAACYVEVRVGDSPTGFGVGIDRDIVTASFKAVLGAVNRHHVAATQATETEAVAA

SEQ ID NO: 3021 - protein, 419 aa, Xanthobacter autotrophicus Py2
MARLVMKFGGTSVANIERIRNVARHVKREVEAGYQVAVVVSAMSGKTNELVGWCKDASALYDPREYDAVVASGEQVTSGLLAIVLQEMGLSARSWQGWQLPISTDDAHGSARILDIDSEKLGAAIDGGQVAVIAGFQGIHLPTGRLTTLGRGGSDTSAVAVAAALKAERCDIYTDVDGVYTTDPRVVPKARRLDRIAFEEMLEMASLGAKVLQVRSVELAMVHNVRTFVRSSLVDPDAPETANVEKAGTLICDEEEIVANQMESQVVTGIAFSKDEAQVSIRRVADKPGIAAAVFGPLADAHINVDMIVQNVSADGFTDITFTVPTADFERAKAVIEKARDTIAHQVVEGATDVTKVSVIGIGMRSHAGVAAQAFQALAGKGINIRAITTSEIKISFLIDAAYTELAVRTLHSLYGLDS

SEQ ID NO: 3022 - protein, 262 aa, Brassica juncea
MVLSHAASDSDVSVHSTFASRYVRTSLPRFKMPENSIPKEAAYQIINDELMLDGNPRLNLASFVTTWMEPECDKLIMASINKNYVDMDEYPVTTELQNRCVNMIAHLFNAPLGRDETAVGVGTVGSSEAIMLAGLAFKRKWQNKRKAEGKPFDKPNIVTGANVQVCWEKFARYFEVELKEVKLSEGYYVMDPEKAVEMVDENTICVAAILGSTLNGEFEDVKLLNDLLVLKNKENGWDTPIHVDAASGGFIAPFLYPELEWD

SEQ ID NO: 3023 - protein, 448 aa, Francisella tularensis subsp. tularensis SCHU S4
MALHGKKDTIDNLDFFEQSLPKFKLPLNSQDPLEVYQEIKDELMLDGNSKQNLATFCQTEVDDFIHKLMDDCIDKNMIDKDEYPQTAEIESRCVNILANLWNSSAENAIGCSTTGSSEAAMLGGMAMKWRWRDKMKAQGKDYTKPNLVTGPVQVCWHKFARYWDIELREIPMSNESLIMTPEAVLERCDENTIGVVPTLGVTFTGQYEPVEQVCKALDDFERQTGVDIPVHVDAASGGFLAPFVEPELKWDFRLPRVKSINSSGHKFGLSPLGVGWVIWADKKYLPDDLIFNVNYLGGNMPAFALNFSRLGGQIVAQYYNFVRLGFEGYKKVHQLCYDVAEYIAKELRKMEIFEIIHAGEGGIPAVSWSLKATKEYSLFDISEKVRAKGWQIAAYTMPNNREDLVVMRVLVRRGFSYDLAQLMIRDLVAVIDSLEGKLKILKRSSFAH

SEQ ID NO: 3024 - protein, 175 aa, Triticum aestivum
MAPTVMASSATSVAPFQGLKSTAGLPVSRRSNGASLGSVSNGGRIRCMQVWPIEGIKKFETLSYLPPLSTEALLKQVDYLIRSKWVPCLEFSKVGFIFREHNASPGYYDGRYWTMWKLPMFGCTDATQVINEVEEVKKEYPDAYVRIIGFDNMRQVQCVRFIAFNPPGCDESGKA

SEQ ID NO: 3025 - protein, 244 aa, Magnaporthe grisea 70-15
MGSIQVPEGTFTAPPQQVSLDGFLFDMDGTIIDSTRAIEMHWASVGKEIGVDPELILKTSHGRRSIDTLKIYCPEKATIEYASEMEGRLPKLYSKEAEEIPGARSLLDSIIAAKAAPWAIVTSGTKPLVNGWLEALNLPRPAHMITAESVENGKPDPTCYLMGLDGLGLRDRAADVLVLEDSPAGILAGKAAGCKVLGLVTSHTVEQVVGAGPDWVVRDLSSVRLVGAEGGRVTLEIVDALESK

SEQ ID NO: 3026 - protein, 377 aa, Rhodopirellula baltica SH 1
MSSASSNGNAPSKIEKTIIIGSGPAGWSAAIYAARANLDPVLYEGTVKPEMIPLGQLAYTTEIENFAGFPAGNVRAFVESAVDKDRHWNLPMAPEGHEKDGQPHYAVQGVELMELMKQQALNFGTRVVGDDIERVDFSGPPHTLYPASGDPVQAHTVIIATGARANYLGLPSEELYKNKGVSACAVCDGALPVYRSKPLAVVGGGDSAVEEATYLANLKGADKIYLLVRRDQMRASKVMQDRAINHPNIEILWNTVVEEVLGDEKLVNGLRLKDTVDGSTRELKVGGMFVAIGHTPNTSFLDGAVEMNSEGYIQWTKAFRTNTSVNGVFAAGDVADDYYRQAITSAGTGCMAALDAERFLVEHEETTGTSEARPSLT

SEQ ID NO: 3027 - protein, 416 aa, Saccharomyces cerevisiae
MTTNEEFIRTQIFGTVFEITNRYNDLNPVGMGAFGLVCSATDTLTSQPVAIKKIMKPFSTAVLAKRTYRELKLLKHLRHENLICLQDIFLSPLEDIYFVTELQGTDLHRLLQTRPLEKQFVQYFLYQILRGLKYVHSAGVIHRDLKPSNILINENCDLKICDFGLARIQDPQMTGYVSTRYYRAPEIMLTWQKYDVEVDIWSAGCIFAEMIEGKPLFPGKDHVHQFSIITDLLGSPPKDVINTICSENTLKFVTSLPHRDPIPFSERFKTVEPDAVDLLEKMLVFDPKKRITAADALAHPYSAPYHDPTDEPVADAKFDWHFNDADLPVDTWRVMMYSEILDFHKIGGSDGQIDISATFDDQVAAATAAAAQAQAQAQAQVQLNMAAHSHNGAGTTGNDHSDIAGGNKGQRSCSCK

SEQ ID NO: 3028 - protein, 339 aa, Sulfitobacter sp. EE-36
MTKSNERKLTIARAMAEATAQEMCIDPSVFVMGEDIGPLGGVYGNTRGLIEEFGAERIRDTPISETAFIGAAVGAAQDGMRPVVELMFVDFFGVCFDAIYNLMAKNIYFSGGNVKVPMVLMTSTGGGYSDGGQHSQCLYGTFAHLPGMKVVAPSNAYDAKGLMTAAMRDDSPVVYMYHKGLQGMGWLGTEAGATVHVPEEPYTLEIGKAKVVREGKDVSIVSCGMGVHNALKAAKKLEEQGVSAEVVDLVSLVPLDRDTIRASAAKTGRLIVVDEDYMSYGLSGEIIASVTEHDISVLKAAPKRVAFPDVPIPFARAMEQFCLPNTDKIVAAWDEMQAA

SEQ ID NO: 3029 - protein, 444 aa, Listeria innocua
MNPDPESQQIILQLILIVVLTMLNAFFASAEMALVSLNKNRVKNQAETGDKKAVMLAKLVDDPSKFLATIQVGITLAGFFSSASAATSIATRLESVFGGSSFAKELSIIVVTIVLSYITLVFGELYPKRLALQKSEKIARVSVRPIMAVGVVLRPFVKFLSFSTDILVKLTRMEKNTDNEKMTREEMQLLIETGRRDGIIEVEELQMLRGVFEMDNKYAREVMVPRTDAFMIDAETESEELCDALLSENFSRVPVYTGDQDSVLGILHMKDFFAEARKSGFENIDVKSLVKNAYFAQETMFIDDLLKNMQRTRNQMAILMDEYGGVAGIVTVEDLLEEIVGEIDDENDVFSDEVKKIDDNTFIVEGRMPLDDFNKMFHVELPARGVDTVAGFVLTLTGTIPEEDDKVVVEYDTLRFTVEEMNDARLVSVRVEKDIQTSELEQLA

SEQ ID NO: 3030 - protein, 481 aa, Rhodobacter sphaeroides 2.4.1
MTDFRREKILVGGDWIQADAGGRIEVTNPATGAVIGTVPDAGAAETARAVAAAEAAFGPWRALTAAERATHLRRLAQAILDHREALAELLTEEQGKPLAEARGEVGMSAAYIQWFAEEARRVYGEVIPSPWPDRRLLVTRQPVGVVAAITPWNFPSSMLARKIGPALAAGCTVVAKPASQTPFSGLAWGVLGEMAGLPAGVLNIVTGSARAIGGELTANPSVRKITFTGSTPVGKVLLAQAAGTVKKMSMELGGNAPFLVFDDADLDRAVEGAIAAKFRNAGQTCVCTNRFYAQAGIHDEFVKRLAAATAALKVGPGAQDGSEIGPLIDAAAVAKTEEMVADATAKGGRIVTGGRRHTAGAGFYEPTVIADATDAMTFAREEIFGPVAPVFRFETEEEAIRRANATEYGLACYFYTSDLGRAFRVSEALDYGIVGVNEGLVTTEVAPFGGVKESGFGSEGSHHGMQDYLTLKYTAMGGLGR

SEQ ID NO: 3031 - protein, 478 aa, Pseudomonas fluorescens PfO-1
MNNSYDQLYLFIGGEWIDAQGRSTAAVVNPATGREIGRVPLATAGDLDRALEVSRVGFEQWRQTVPDQRAKILKRAADLILERAPHIAAQMTLEEGKPLSESMDEVVRAAEYFEWFAESARRIDGRVVPANRPGVLQLVKRQAIGPVAAFTPWNFPAITPARKLSAALAAGCSVILKPGEESPSTALALARALDDAGLPKGVLQVVFGVPDQVSSQLIASAIIRKVTFTGSVPIGRLLSARAAEGVKPITLELGGHGPVLVFADADVEKAAVEGVANRFRGTGQVCISSTRFIVQRGAYQAFVDHFVTATKALKIGDGFDPQTQVGPLANPRQLVKMEQLIADAVEKGARVLVGGEALPGDGFFFQPTVLADVPMNARIMHEEPFGPIAVLMPFDELADGLQEANRLPYGLSAYAFTSNARTAIDVADGLEAGMIGINQYRIVATELPFGGMKESGHGSEGGVEGIEHYLTHKFISQV

SEQ ID NO: 3032 - protein, 351 aa, Rhodobacter sphaeroides 2.4.1
MTRRHAVALIPGDGIGPEVIDASLEVLEKVARLHGFALDMTRFDWSCDRYLATGRMMPEDGIDQLRPHAAILLGAVGWPARVPDAVSLHGLLLPIRKSFDQFANMRPHRLLPGATGPLKSEAFDILCIRENTEGEYSGAGGRIHVGTPAEVAVETSIFTRRGVERILRFGFEQARRRSGRLASVTKSNAQKYSMVFWDEVTEEVAADYPDVTVSRYHIDAIAARMVMAPETLDVVVASNLFGDILTDLGAAIQGGLGFAPSANINPDRSQPSMFEPVHGSAPDIAGRGIANPVATLWSAALMLDHLGEEAAGRSLLAALSAVTAEGRLRTPDQGGRACTTDVARAVADRLS

SEQ ID NO: 3033 - protein, 236 aa, Aspergillus oryzae
MSRVKFNVNAEYGYLQNFKVLQNVFARHQVDKPIPVQQLTKCRMQDNLEFLQWTKKYWDQHFPGGDYDAVARRKASGAPPAAAGSRAGAASAGATRRGATPTGAVARPRVAAASGPNVSALQQEIATQKEAIGGLEKERDFYFAKLRDIELLLQSAIEADPELEKDDDSLVKHIQGILYSTECGSETELVTFTKINSTSYRRMLIIHGFPGSHRRLRELCTLQHDRCDELGAETKH

SEQ ID NO: 3034 - protein, 386 aa, Sulfolobus tokodaii str. 7
MGCQFSVNSKKVRIFDTTLRDGEQAPGIDLTVEQKVKIARKLAELGVDVIEAGFPAASEGEFIATKKILEEVGDQVEVIGLSRANKQDIDKTIDTGISSIHVFIATSDIHLKYKLKMTREQVLDKIYESVRYAKDHGLIVEYSPEDATRTDKDFLLKAVSTAIEAGADRINIPDTVGVMHPFKFHDLIKDVVSVTKDKIVSVHCHNDFGLATANSIAGVMAGARQVHVTVNGIGERAGNASLEEVVMALKKLLGYEVNIKTYKLYETSRLVSELTGVPVPYFKAIVGENAFGHEAGIHVHGVIENPLTYEPISPEEVGNFRRLALGKHSGIHGLKKLLEEQGIYLNDQELREVLNEIKKLAENGEKVNVDVAKEIAIKVSSKKIKV

SEQ ID NO: 3035 - protein, 740 aa, Cryptococcus neoformans var. neoformans B-3501A
MLRAFFKHSRAFITTRHHIHTMSVTDTAILDRLAQLQIAHPDVISHAPVKGAAEWKAELTLASANHATTPLTKTLLFKPKTAKSAVPTPVMVLAQENTETPSGAIGKLLELKELRLASEDLIKEVIPSAASKDDVSAFALSKPVPETLHLLLDAELAKSEEQHAVHLTSSATTLLIKGSDIKAYLDSLVEGEGVKIVDFAELKASAPAPIEKKPAAPKEAKAETSTAAADDDRYEMAIRFKKDEDFSGWYTDVLLKGQMLDYYDISGCYILRPWSYSIWQIIQNWFDDEIKKLGVQDCYFPMFVSSARLEKEKDHIEGFAPEVAWVTKAGSSDLDEHIAIRPTSETVMYPYYAKWINSHRDLPLKLNQWNSVVRWEFKNPQPFLRTREFLWQEGHTAFLDKADADKEVLDILDLYRKVYEDILAVPVIPGKKSEKEKFAGGDYTTTVEGFIPTTGRGIQAATSHHLGQNFSKMFDITVESPDKSQGRLYAYQNSWGLSTRSLGVMVMVHGDDQGLVLPPRVALQQVAIVPVGLSKGEGKNQPIYDACLKLERELVAAGIRAKADLRDGYTPGWKFNDWEMRGVPLRLELGPRDIANNSTLSVRRYDNHKTPMPLSDIANTVRTYLDDIQKSMLDRAAATFNDRLKIVTNWEDVVPTLDAKNVLVLPWCETEECEDEIKEKSKSLANKGAAEDAKAPSAGAKSLCIPFDQKRFGEFPQGEEQKCVQCGKKAKSWTLFGRSY

SEQ ID NO: 3036 - protein, 260 aa, Sulfitobacter sp. EE-36
MTKTILITGATDGIGLLTAKTLTAEGHNVLLHGRSADKLEAAAREVGGNPETYRADLSLLGDVNALVADVRAKHDTLDVLINNAGVLKVPNTQTDSGLDVRFMVNAIAPWALTVGLLPIIPKDGRVVSLSSAAQAPVNIKAMRVEQQLGHNEAYAQSKLALTIWSQELAREHPDGPMFVSVNPGSLLATKMVKESYGMAGNDLRIGADILRRAAVSEEFANASGQYYDNDAGRIARPHPAAADRAHVAQLMAAIRELAGA

SEQ ID NO: 3037 - protein, 567 aa, Saccharum robustum
  misc_feature (371)..(371): Xaa can be any naturally occurring amino acid
  misc_feature (497)..(497): Xaa can be any naturally occurring amino acid
HDGGGNAFPWSNAMLQWQRTGFHFQPQKNWMNDPNGPVYYKGWYHLFYQYNPDGAIWGNKIAWGHAVSRDLIHRRHLPLAMVPDQWYDTNGVWTGSATTLPDGRLAMLYTGSTNASVQVQCLAVPADDADPLLTNWTKYEGNPVLYPPPGIGPRDFRDPTTAWFDPSDSTWRIVIGSKDDAEGDHAGIAVVYRTRDFVHFELLPDLLHRVAGTGMWECIDFYPVATRGKVSGNGVDMSDALGKNGAVVGDVVHVMKAGMDDDRHDYCALGRYDAAANAWTPLDAEKDVGTGLRYDWGKFYASKTFYDPAKRRRVLWGWVGETDSERADVSKGWASLQGIPRTVLLDTKTGSNLLQWPVEEVETLRTNSTDXSGITIDYGSAFPLNLRRATQLDIEAEFELDRRAVMSLNEADVGYNCSTSGGAAARGALGPFGLLVLADKHLHEQTAVYFYVAKGLDGSLTTHFCQDESRSSSANDIVKRVVGSAVPVLEDETTLSXRVLVDHSIVESFAQGGRSTATSRVYPTKAIYANAGVFLFNNATAARVTAKKLVVHEMDSSYNHDYMVTDI

SEQ ID NO: 3038 - protein, 709 aa, Desulfovibrio vulgaris subsp. vulgaris str. Hildenborough
MFVRSVIAFATPNPTGLTMFLNEHQSKRLFEEAGIETPQGIMTDSAGIEGCLPPFDAPWFVKAQVLAGGRGKAGGVRRADDLAGLRDVAKDILGMRIGGHAVPFVRIEPATAIARECYVSFMVSRKRRELLFTASGSGGVEVESGQGALVCAVPLTGEMPEHVIRSAFFCIGVGREHWAGFREFVLRLHGAVRDYGLLLAEVNPLVLTGDGRWLALDGKVEVDDNVVDIRPDLLRFHTPEHLAPEENAAREAGLSYVELKGWVGLLVNGAGLAMATMDLLNFSGLAAANFMDLGGAADVPRMRRALELLFGNPQVRVVCVNLFGGIVSCAAVAGALVEALGDGRAAKPVVVRMDGFEAAEGRQLLERRAHPDVHVARDIDHALDLLRHLRPADAPDIVFTPGTEKPVPRIHGGAAGTRRGTPHLGKGARVLVQGITGRSAQLHTRLMLDYGTNIVAGVTPFKGGQVTQGVPVYDSVHEACRQHDIDATILFVPAAFAADSLLEAVAEGIPWAVCITEGIPQKDMLRALRVARGARTRIIGPNTPGIIVPGACKVGIMPGNVFSPGPLAVFSRSGTLTYEAAARLSAAGIGQSLCAGVGGDPYIGSDFVSLCELVRDDEATQGVLVLGEVGGTAEEELAAWVRETAFPKPVVSFVAGRTAPPGRRLGHAGAILDEADGGIAGKVRALCDAGIAVCPDLGSLPAAVRQALG

SEQ ID NO: 3039 - protein, 567 aa, Saccharum officinarum
HDGGGNAFPWSNAMLQWQRTGFHFQPQKNWMNDPNGPVYYKGWYHLFYQYNPDGAIWGNKIAWGHAVSRDLIHRRHLPLAMVPDQWYDTNGVWTGSATTLPDGRLAMLYTGSTNASVQVQCLAVPADDADPLLTNWTKYEGNPVLYPPPGIGPRDFRDPTTAWFDPSDSTWRIVIGSKDDAEGDHAGIAVVYRTRDFVHFELLPDLLHRVAGTGMWECIDFYPVATRGKVSGNGVDMSDALGKNGAVVGDVVHVMKAGMDDDRHDYCALGRYDAAANAWTPLDAEKDVGTGLRYDWGKFYASKTFYDPAKRRRVLWGWVGETDSERADVSKGWASLQGIPRTVLLDTKTGSNLLQWPVEEVETLRTNSTDLSGITIDYGSAFPLNLRRATQLDIEAEFELDRRAVMSLNEADVGYNCSTSGGAAARGALGPFGLLVLADKHLHEQTAVYFYVAKGLDGSLTTHFCQDESRSSSANDIVKRVVGSAVPVLEDETTLSLRVLVDHSIVESFAQGGRSTATSRVYPTKAIYANAGVFLFNNATAARVTAKKLVVHEMDSSYNHDYMVTDI

SEQ ID NO: 3040 - protein, 240 aa, Schizosaccharomyces pombe
MAEVEEKGLLSYYFPGERIPDSIISQDGSIRLGPGLVFQKKDREEEIVVSKAGRLHQTGKNAMLIDSRTKRYIPATNDQVIGQIISRFAEGYRVDIGSAHIAQLNALAFENVTRKSRPNLNVGSLVYARVSLADRDMEPELECFDATTGKAAGYGELKNGYMITGLSLSHCRKLILPKNTLLQTLGSYIPFEIAVGMNGRVWVNSENLSTTVLICTAIRNCEFMSDEEQIKYCKDLIKKL

SEQ ID NO: 3041 - protein, 332 aa, Medicago truncatula
MASQQQQVREWSGINTFAPATQTKLLELLGKLKQEDVNSLTILVMGKGGVGKSSTVNSIIGERVVAISPFQSEGPRPVMVSRARAGFTLNIIDTPGLIEGGYINDMALDIIKRFLLDKTIDVLLYVDRLDAYRVDNLDKLVAKAITDSFGKGIWNKAIVALTHAQFSPPDALAYDEFFSKRSESLLQIIKSGASLKKDDAQASAIPVVLIENSGRCNKNETDEKVLPNGIAWIPHLVHTITEIALNKSESIFVDKNLIEGPNPNQRGKLWIPVLFALEFLLIMKPIEGLIKNDVANEKKPSWETRDVGVKKETREVGQKDMRKERRGGAVRR

SEQ ID NO: 3042 - protein, 414 aa, Oryza sativa (japonica cultivar-group)
MESRKPPPSALVDNHVVPGDVVLDLAEMTNQTIKLGAGLRQDCDTIQATSAGRLRLSKPSKYWVESSQKRYIPSVEDTVLGVVVDTKPDNFLVDIKGPNLAFLPVLAFEGGTRRNIPKFEIGTLIYARVVKANSIMNPELSCMDATGKAAEFGQLKDGYMFDTSTGLSRIIFEWHRATKYGGKSLGETILMGAVEECTHKQTIAFSIRDDKCNRCRKGSSLNFRTLTAPRIRVRVLCACANSSEVVQLLFRISQVLNGRVEINANKCGTHPTPSKPYYVDKIDTNEQKVVHYQVNCRPARDRNTGSYSVKHHYPSPIVSWIEDLSSFGNVSFSQDPEYADEQSRSSVGQSSASVNLHDMQISVRLTDEFIELAKENTGNNVETCGILGASFTHPSQTCFLSSIDLHTQYSYQIL

SEQ ID NO: 3043 - protein, 204 aa, Glycine max
  misc_feature (13)..(13): Xaa can be any naturally occurring amino acid
  misc_feature (21)..(21): Xaa can be any naturally occurring amino acid
VFEKAPFIKVPQXNPHGQPKXGYAFIEFASFEDAKEALNSCNKMEIEGRTIRLELQGSNSRSQPSKTLFVKGLSEDTTEETLKESFEGSVRARIVTDRETGSSKGFGFVDFNSEEDAKAAKEAMEDGEIDGNKVTLDWAKPKGEGGFGGRGGGRGGFGGRGGGRGGRGGFGGRGRGGFGGRGGFRGGRGGGGDFKPQGKKTKFE

SEQ ID NO: 3044 - protein, 225 aa, Amaranthus tricolor
KWHVIMACRDFLKAERAAKSAGMAKENYTIMHLDLASLDSVRQFVNNFRQSGRPLDVLVCNAAVYLPTAREPTYTAEGFELSVGTNHLGHFLLSRLLLEDLKKSDYPSTRLIIVGSITGNTNTLAGNVPPKANLGDMRGLAGGLNGLNSSAMIDGGDFDGAKAYKDSKVCNMLTMQEFHRRYHEETGITFASLYPGCIATTGLFREHIPLFRFLFPPFQKYITKG

SEQ ID NO: 3045 - protein, 318 aa, Prochlorococcus marinus str. NATL2A
METIETDVVIVGGGPAGCSCALYTSRADLRTVILDKNPDVGALAITHQIANYPGVSSEMSGEALLKLMRDQATQYGADYRRAQVFGIDSSGDWKTIYTPEGTFKAKALVVASGAMGRPASFKGEAEFLGRGVSYCATCDGAFYRDREVAVVGINKEAIEEANVLTKFASKVHWITSNDPKPDDHHAQDLLSKPNVNHWSKTRLMQIEGNDGGVTGIKVKNRSIDTHQNLALEGVFVYMSGSKPITDFLGEQVAFKEDGGVLVDDFMSTTVEGVWAIGDIRNTPFKQAVVAASDGCIAAMAIDRYLNSRKSIRVDWVHA

SEQ ID NO: 3046 - protein, 492 aa, Schizosaccharomyces pombe
MSAKSIREYDGKAVLAYWLNRSPSISKEEYKTVSATPAVQLAQIQFPLPTLVIPAESTTYREVVEDVFAKVEQEHPWVKETKLVAKPDQLIKRRGKSGLLKLNATWDEAKEWIRERAGKNQKVQHAVGYLTTFLVEPFVPHPPNTEYYININSVREGDWILFCNEGGVDVGDVDAKARKLLVPVRLSEFPSRATIASTLLSDIPVEQHESLVDFIIRLYSVYVDCQFTYLEINPLVVIPTAKGADVFYLDLAAKLDQTAEFECGAKWAVARAPESLGIKTSGEESGAINADHGPPMVFPAPFGRELSKEEAYVQGLDAKTGASLKLTILNAEGRVWNLVAGGGASVVYADAVAVNGAADELANYGEYSGAPTDGQTYEYAKTVLDLMTRGEPRADGKVLFIGGGIANFTSPAVTFRAIARALGDYKDKLHAHKVSIWVRRAGPNYQEGLRVIREAGKKFDLPLKVYGPECHISGIVPMGLGKAPVEAEWQMA

SEQ ID NO: 3047 - protein, 333 aa, Desulfovibrio vulgaris subsp. vulgaris str. Hildenborough
MSLNLGINGFGRIGRYLVRLLAEDNELSIAAINARADNASLAHLFKYDSCHGRFNGEVGHDADGLIVNGRHIAVTREKINEWRWGELGIDLAVETSGTVKDRAGLAQHIARGAKKCVISAPGKDADVTIVMGVNHGDYDPAKHDVISAASCTTNCLAPAAKVVHETFGIRHGIMTTVHSYTMSQRILDGSHKDLRRGRAAALSMIPTTTGAAKATALVYPALAGKLDGMAVRVPTPNVSLVDLTCELERETTVEEVNAALKAAAAGPMLGNMGFCEEPLVSIDFMGSTFGGVVDAQCTSVIDKTMLKLIIWYDNEAGFTNQLVRLLRMVGKSL

SEQ ID NO: 3048 - protein, 610 aa, Arabidopsis thaliana
MTKPLKKGKRDAEEDLDMQVTKKQKKELIDVVQKEKAEKTVPKKVESSSSDASDSDEEEKDESSSEEEDDSSSDEEIAPAKKRPEPIKKAKVESSSSDDDSTSDEETAPVKKQPAVLEKAKVESSSSDDDSSSDEETVPVKKQPAVLEKAKIESSSSDDDSSSDEETVPMKKQTAVLEKAKAESSSSDDGSSSDEEPTPAKKEPIVVKKDSSDESSSDEETPVVKKKPTTVVKDAKAESSSSEEESSSDDEPTPAKKPTVVKNAKPAAKDSSSSEEDSDEEESDDEKPPTKKAKVSSKTSKQESSSDESSDESDKEESKDEKVTPKKKDSDVEMVDAEQKSNAKQPKTPTNQTQGGSKTLFAGNLSYQIARSDIENFFKEAGEVVDVRLSSFDDGSFKGYGHIEFASPEEAQKALEMNGKLLLGRDVRLDLANERGTPRNSNPGRKGEGSQSRTIYVRGFSSSLGEDEIKKELRSHFSKCGEVTRVHVPTDRETGASRGFAYIDLTSGFDEALQLSGSEIGGGNIHVEESRPRDSDEGRSSNRAPARGAPRGRHSDRAPRGGRFSDRAPRGRHSDRGAPRGRFSTRGRGPSKPSVMESSKGTKTVFNDEE

SEQ ID NO: 3049 - protein, 321 aa, Thermoanaerobacter tengcongensis MB4
MKTIGILTSGGDAPGMNAAIRAVVRTGIYYGLKVKGIMRGFAGLVEDEVIDLGLSSVGDIIQKGGTILRTARCEEFKQKEVRKKAYETLQKHGIEGLVVIGGDGSFRGAQLLSEEWNVNTICIPGTIDNDIPCTDYTIGFDTACNTVIDAINKIRDTATSHERANIIEVMGRNSGYIALYAGVAGGAEMIILPEVEWSIDELCDKITYGIKRGKLHHIIVLAEGVMSAPELAKMIKERLPKLDLRYTILGHIQRGGAPTVMDRVLASQMGARAVELLLENKTKRVISIRNNQIVDDDIDEALSMKKEFNRKLYELSKILSI

SEQ ID NO: 3050 - protein, 183 aa, Escherichia coli K12
MQDSILTTVVKDIDGEVTTLEKFAGNVLLIVNVASKCGLTPQYEQLENIQKAWVDRGFMVLGFPCNQFLEQEPGSDEEIKTYCTTTWGVTFPMFSKIEVNGEGRHPLYQKLIAAAPTAVAPEESGFYARMVSKGRAPLYPDDILWNFEKFLVGRDGKVIQRFSPDMTPEDPIVMESIKLALAK

SEQ ID NO: 3051 - protein, 224 aa, Amaranthus tricolor
KWHVIMACRDFLKAERAAKRIGMPKDSYTVMHLDLASLESVRQFVENFRRSGMPLDVLVCNAAVYLPTDKEPTFTAEGFELSVGTNHLGHFLLSRLLLDDLKQSDYPSKRLIIVGSITGNSNTLAGNVPPKANLGDLRGLAGGLNGVNSSPMIDGGEFDGAKAYKDSKVCNMLTMQEFHRRFHEETGITFSSLYPGCIAETGLFRNHVALFRTLFPPFQKYITK

SEQ ID NO: 3052 - protein, 319 aa, Clostridium acetobutylicum ATCC 824
MKTIAVLTSGGDAPGMNAAIRAVVRTAIEKGINVKGIQGGYSGLINGEIFDMNRHSVSDIIQRGGTILRTARCPEFLKEEVRQKAANVLRVFGIDGLVVIGGNGSFMGAQKLSKLGVKTVGLPGTIDNDLPYTDYTIGFDTTLNTVLDAINKLRDTSTSHERVSIIEVMGRDCGDIALFSGIAGGAESVIIPEIGYDFNELCKNILEGKLRGKMHNLIILAEGVGGAAELAKKVEEVTGIETRSTILGHIQRGGSPSAFDRMLASRMGVKAVEVLMEGKTSRVIGIKEGKIMDQDIDEALAVPRSFNKELYDIANMLSK

SEQ ID NO: 3053 - protein, 426 aa, Geobacillus kaustophilus HTA426
MRKDWQTNRRNMELINKYTCKNGVRIVLEQIPTVRSVAIGIWIGTGSRNETEQTNGISHFLEHMFFKGTTTRTARDIAEAFDSIGGQVNAFTSKEYTCYYAKVLDEHAPLALEMLADMFFHSTFVEDELQKERNVVLEEIKMYEDTPDDIVHDLLGKACYAGHPLGYPILGTEETLRTFTGDTLRQYMADYYTPDRVVISVAGNVDERFIDEVERYFGSFAAESKPPSSGTPAFVPQKIARKKDTEQAHVCIGFNGLPIGHPDAYPLLILNNILGGSMSSRLFQEVREQRGLAYSVFSYHSAYQDSGLLAIYAGTGSSQLDVLFETIQHTIRQLKEDGVTEKELHNSKEQMKGSLMLGLESTNSRMSRNGKNELLLGRHRSLDEIIEEIESVTVEKVNELARTVFTDDYALALISPDGVLPRPLRS

SEQ ID NO: 3054 - protein, 405 aa, Aquifex pyrophilus
MAKEKFERTKEHVNVGTIGHVDHGKSTLTSAITCVLAAGLVEGGKAKCFKYEEIDKAPEEKERGITINITHVEYETAKRHYAHVDCPGHADYIKNMITGAAQMDGAILVVSAADGPMPQTREHVLLARQVNVPYIVVFMNKCDMVDDEELLELVELEVRELLSKYEYPGDEVPVIRGSALGALQELEQNSPGKWVGSIKELLNAMDEYIPTPEREVDKPFLMPIEDVFSISGRGTVVTGRVERGVLRPGDEVEIVGLREEPLKTVATSIEMFRKVLDEALPGDNIGVLLRGVGKDDVERGQVLAQPGSVKAHRKFRAQVYVLSKEEGGRHTPFFVNYRPQFYFRTADVTGTVVKLPEGVEMVMPGDNVELEVELIAPVALEEGLRFAIREGGRTVGAGVVTKILD

SEQ ID NO: 3055 - protein, 827 aa, Haemophilus influenzae R2866
MNLSRRDFMKANAAMAAATAAGLTIPVKNVVAAESEIKWDKAVCRFCGTGCAVLVGTKDGRVVASQGDPDAEVNRGLNCIKGYFLPKIMYGKDRLTQPLLRMTNGKFDKNGDFAPVSWDFAFKTMAEKFKEAFKKNGQNAVGMFSSGQSTIWEGYAKNKLWKAGFRSNNVDPNARHCMASAAVAFMRTFGMDEPMGCYDDIEQADAFVLWGSNMAEMHPILWSRITDRRISNPDVRVTVLSTYEHRSFELADHGLIFTPQTDLAIMNYIINYLIQNNAINWDFVNKHTKFKRGETNIGYGLRPEHPLEKDTNRATAGKMHDSSFEELKQLVSEYTVEKVSKMSGLDKVQLETLAKLYADPTKKVVSYWTMGFNQHTRGVWVNQLIYNIHLLTGKISIPGCGPFSLTGQPSACGTAREVGSFPHRLPADLVVTNPKHREIAERIWKLPKGTVSEKVGLHTIAQDRAMNDGQMNVLWQMCNNNMQAGPNINQERLPGWRKEGNFVIVSDPYPTVSALSADLILPTAMWVEKEGAYGNAERRTQFWRQQVKAPGEAKSDLWQLMEFAKYFTTDEMWTEDLLAQMPEYRGKTLYEVLFKNGQVDKFPLSELAEGQLNDESEYFGYYVHKGLFEEYAEFGRGHGHDLAPFDMYHKARGLRWPVVEGKETLWRYREGYDPYVKEGEGVAFYGYPDKKAIILAVPYEPPAESPDNEYDLWLSTGRVLEHWHTGTMTRRVPELHRAFPNNLVWMHPLDAQARGLRHGDKIKISSRRGEMISYLDTRGRNKPPRGLVFTTFFDAGQLANSLTLDATDPISKETDFKKCAVKVEKAA

SEQ ID NO: 3056 - protein, 375 aa, Pneumocystis carinii
MEDEIAALVIDNGSGMCKAGFAGDDAPRAVFPSIVGRPRHQGIMVGMGQKDSYVGDEAQSKRGILTLKYPIEHGIVSNWDDMEKIWHHTFYNELRVAPEEHPALLTEAPLNPKSNREKMTQIMFETFNTPAFYVAIQAVLSLYASGRTTGIVLDSGDGVTHTVPIYEGYALPHAILRLNLAGRDLTDYLMKILTERGYNYTTTAEREIVRDIKERLCYVALDFEQEIHTASSSSSLEKSYELPDGQVITIGNERFRAPEALFQPSIVGMETCGIHETTFNSIMKCDVDIRKDLYSNIVMSGGTTMYPGIADRMQKEITALAPSSMKIKIVAPPERKYSVWIGGSILASLSTFQQMWISKQEYDENGPSIVYRKCF

SEQ ID NO: 3057 - protein, 542 aa, Chlamydomonas reinhardtii
MSEACLLAAKSALVGVANGDSLASAICAAMEAAAPVARHLQETTVDLTTLQETVDTIGLNLQGTMDGLNTLLLLYGGALVFLMHGGSAMLEAGAIRSKNAMNILLQTVLDASCSALMWYFVGFAFAFGIGDKPNKFIGNAMFALVDIDTHNTGSGTGKWIDWFFQWAFAATAVTIPAGAVAERFNFNAYLGYSMFIGGWVYPIIAHWVWCIEGWLGYGVIKPFINAGMIDFAGSGVIHMTGGLAGLIGAIMVGPRLGRFDADGKPVDMPGHSAILVVLGTVLLWFGWYGFNPASVLLINSSTYAIVCGRAAVCTTLAGAAGGVSCLIFGFARHRGWDLVGLCNGILCGFVAVTACPHVIYPWAAIICGLVAGLWFEFLCWLLLKLKIDDPLSAGPMHFGCGMWGVFFTGLFARQQYIQEYYVHGPSAAGELSKPYPWGAFYKGYNADGELVMSDGKLLASQIVGILVIIGWVIGMMVPFFGIFQFFGALRIPPEEEEMGLDRSKHGGSAYNGTGANTLGGLSPGNDVMRNNSPLGKVLPVTA

SEQ ID NO: 3058 - protein, 249 aa, Thermoanaerobacter tengcongensis MB4
MYKVVLLRHGESIWNMENRFTGWTDVDLSPKGIEEAKQAGKILKEKGFTFDAAFTSVLKRAIRTLWIVLDELDLMWIPVYKSWRLNERHYGALQGLNKAETAKKYGEEQVKLWRRSAEVRPPALTKDDPRYPGNDPRYADLSEDEIPLTENLIDTINRVIPYWESTIAPTIKSGKRVIIAAHGNSLRGLVKYLDNLSNEEIMELNIPTGIPLVYELDENLKPIRHYYLADEEELKKKQQEVAEQGKARA

SEQ ID NO: 3059 - protein, 466 aa, Silicibacter sp. TM1040
MSRVNELVGTLFTGGRKPDDLYGRVFVVSAFGGITNLLLEHKKTGEPGVYARFADAESDHGWHEALSRVGDEMRKAHEAVLENAGDVAQADAFVSERIEGARNCLIDLQRLCSYGHFRLAEHMLQIRELLSGLGEAHSAYVTALLLQRAGVNARFVDLSGWRDEGDVTLEERISSALNDVDPATEMPIVTGYAQCAEGLMREFDRGYSEVTFSCLAALTGASEAIIHKEFHLSSADPKLVGEGVAQKLGHTNYDVADQMSNMGMEAIHPKAAKTLRQADVPLRVTNAFEPEDPGTLIDDKPADQPAVEMITGLDIIALELFEQDMVGVKGYDAAILEVLTRHDVRIVSKTSNANTITHYLDTSLTVLKRVEKDLAKIYPNADISARLLSMASAIGRDLKGLSVLTRGLQAIADVGLASLGASQGPRNVDVQFIVEREDLKPVISALHKVLVEGRPAKQEKPIKAAA

SEQ ID NO: 3060 - protein, 795 aa, Aspergillus nidulans FGSC A4
MAPTVATQPPPPKRRRIGVLTSGGDAPGMNGAVRAVVRMAIHSDCEAYAVYEGYEGLVEGGDMIRQLHWEDVRGWLSQGGTLIGSARCMSFRERSGRLRAAKNMVLRGIDALVVCGGDGSLTGADVFRSEWPGLLDELVKNGELTAEQVEPYRVLNIVGLVGSIDNDMSGTDATIGCYSSLTRICDAVDDVFDTAFSHQRGFVIEVMGRHCGWLALMAAISTGADWLFIPEMPPKDGWEDIMCANITKNRRERGKRRTIVIVAEGAQDRNLNKITSDRVKDILTERLGLDTRTTILGHTQRGGAACAYDRSLSTLQGVEAVRAVLDMTPDSPSPVITIRENKIMRTPLMDAVKATQEVTAHIKNREFEKAMLLRDSEFKEYHFAYLKTATPDHPKLSLTQEKRMRIAIVHVGAPAGGMNQATRAAVTYCLTRGHTPIAIHNGFPGLIRHHADQPISSVREVKWQETDAWVNEGGSDIGTNRGLPSEDYDEVARCFKEHKFDALFVVGGFEAFTAVSQLRQARDKYDAFKIPMVVLPATISNNVPGTEYSLGSDTCLNALIDFCDAIRQSASSSRRRVFVIETQGGKSGYIATTAGLAVGAVAVYIPEEGIDIKMLARDIDFLRENFARDKGANRAGKIIMRNETASSTYTTQVIADMIKEEAKGRFESRAAVPGHFQQGGKPSPMDRIRALRMAIKCMMHLEGYAGKSKDEIANDEMSATVIGIKGSQVLFSVMGGEHGLEKVETDWARRRPKAEFWLQLQDTVNILSGRAGAKAMWTGYEDESRTRPSSPAHLS

SEQ ID NO: 3061 - protein, 82 aa, Triticum aestivum
  misc_feature (21)..(21): Xaa can be any naturally occurring amino acid
  misc_feature (26)..(26): Xaa can be any naturally occurring amino acid
  misc_feature (30)..(30): Xaa can be any naturally occurring amino acid
  misc_feature (33)..(33): Xaa can be any naturally occurring amino acid
  misc_feature (35)..(35): Xaa can be any naturally occurring amino acid
  misc_feature (53)..(53): Xaa can be any naturally occurring amino acid
  misc_feature (57)..(57): Xaa can be any naturally occurring amino acid
  misc_feature (63)..(63): Xaa can be any naturally occurring amino acid
YARGNGANPTAACCSGVRSLXGAARXTADXQAXCXCIKSAAGGLNAGKAAGIXSKCXVSVPYXISASVDCSKIRSTAHHCRS

SEQ ID NO: 3062 - protein, 225 aa, Shewanella sp. MR-7
MTDFIYQPPTTPWLDVLYQDKDIIVVNKPSGLLSVPGRDPAHYDSVYARVKAEHPHCQIVHRLDMATSGVMVVALIRSAERELKRQFHDRETSKTYLARVAGHIKNDTGSVDYPLICDWPNRPKQKVDHEIGKPSLTHFEVLSRAKRSTLVKLKPITGRSHQLRVHMMALGHPILGDGFYADPLAKSLAPRLLLHAAELTIKHPYTGESMTFSADAPFCEPEGEQ

SEQ ID NO: 3063 - protein, 291 aa, Aspergillus nidulans FGSC A4
MVFGSRPPALTEANIGDQSGKNNGTVYLAARNAKKTAEVIADLKQRFPASRGRLDSISLNLSDLSTIKKSAEEFLAKETRLHVLWNNAGVMFPPAGSTTSQGYELQLGTNNVGPHLFTKLLYPTLAATAKEAPKNTVRVVWVSSDAASWAPKPAIDFNNLDYRRNESDRSKYGRSKAGTVMQAVELARRARKDGSGIVSIALDPGIANTGLQRDMGRLMSTMVKLIANKPEIGAYTQLFAGLSPEITAEVAEKEWVVPPGKIGCPRRDLFTDTETSRKWWEWNEEQVKAYL

SEQ ID NO: 3064 - protein, 324 aa, Sulfolobus tokodaii str. 7
MMSLLPRAFDVRPGEKFDVVIIGMGPAAYSAALYSARFMLKTLMIGETPGGQLTEAGEVDDYLGLIGIQAADMIKLFNKHIEKYNVPAIMDTVEYFRKENNEFIVKTKRRGEFKADAIIVAVGVKRRKLNVPGEAEFTGKGVSYCSVCDAPLFKNRPVVVVGGGDSALEGAEILSRYATKVYLVHRRDEFKAQPIYVESVKQKPNVEFILNSVVKEIKGDKIVRKVIVQNLKTNEIRELDVNGVFVEIGFDPPTDFARQNGLEVDSHGYIKVDEWMRTNIEGVYAAGDCTGMWLGFRQIITSAAQGAVAAHSAFNYLTEKKRKK

SEQ ID NO: 3065 - protein, 399 aa, Guillardia theta
MYFIQNIKCYQFDKKNIFKTINKFRCRSQSLIKSNISEDSFFNQEISSSPCVIKVIGVGGGGGNAVNRMVGGVEGVEFWSINTDAQALSRSLAPNTCNIGAKLTRGLGAGGNPEIGRKAAEESRDLIAEAVSAGDLVFVTAGMGGGTGSGAAPIVAEVAKEMGCLTVGVVTKPFAFEGKRRMQQANDAILNLRNKVDTLIVVSNDKLLQIVPDNTPLQDAFSVADDILRQGVVGISEIIVRPGLINVDFADVRSVMADAGSALMGIGTGSGKTRAQDAAVAAISSPLLDFPIEKARGIVFNITGGQDMTLHEINSAAEVIYEAVDSNANIIFGALVDDNMENEISITVVATGFTQPNDSKFFSTKSAVDFSKIYDNKKTKSTYKESRAEFSDLWKKFYD

SEQ ID NO: 3066 - protein, 281 aa, Mycobacterium avium subsp. paratuberculosis K-10
MGAITLDGKATRDEIFVDLKQRVAALTAAGRTPGLGTILVGDDPGSQAYVRGKHADCAKVGITSIRRDLPADISTAALNDTIDELNANPECTGYIVQLPLPKQLDENAALERVDPDKDADGLHPTNLGRLVLNNPAPLPCTPRGIVHLLRRYDAEIAGAHVVVIGRGVTVGRPLGLLLTRRSENATVTLCHTGTRDLPALTRQADIIVAAVGVPHLLTADMVRPGAAVLDVGVSRVDGKLAGDVHPDVWEVAGHVSPNPGGVGPLTRAFLLTNVVELAERE

SEQ ID NO: 3067 - protein, 401 aa, Rickettsia akari str. Hartford
MALIIQKFGGTSVANIDRIKQIVSIIKAAIAKNNQVIVVVSAMAGVTNQLVTLCNEVSSLNSISQFAEYDVALSSGEIVTASLLALALQEKDIKARSFLAWQLPILTNNNHSKSVVESVTTDLLKKCLQLNIVPIIAGFQGINKSNRLTTLGRGGSDTTAALIAAAMKADRCDIYTDVEGIFTADPRIIPNAKRIKEIDFLEMLELASSGAKVLHPRAVELVMRYKIDMCVLSTFSPNKEGTLITSKDKNMENGIINSITSNKNLLKISVKSISLSFLQVANIITQNNNHIEFMQEVNNNEEYSFIASLTDKNNLQALLTNLKNDKQIQDFTFDAEIATISLIGYGIKNDCKVLETILSKLTKDNINVNMIQLSEVKITLLINDQDVEKTIFNLYNLFKIS

SEQ ID NO: 3068 - protein, 508 aa, Yersinia pestis biovar Medievalis str. 91001
METVANFINGKCVFSCGNSVTSGSPRAQAIFNSATGEPIRQVMMSTAQETEQAITAAQQAFASWSRQAPLKRARVMFRFKSLLEQHLDALAQLISEEHGKVYSDAVGELTRGLEVVEFACGIPHLQKGEHSANVGTGVDNHSLMQPLGVCVGITPFNFPAMVPMWMFPIALATGNTFVLKPSEKDPSLAVRLAQLLTEAGLPDGVFNVVQGDKTAVDVLLTDPRVQAVSFVGSTPIAEYIYQTASAHGKRCQALGGAKNHCILMPDADMDMAASAIMGAAYGAAGERCMALSVVLAVGDETADNLCARLEQQISTLRVGPGLAQEPENDMGPLISAPHRAKVLGYIDSGVAQKATLRIDGRGLKVAGHEQGYFVGPTLFDHVTPAMTIYQEEIFGPVLSVVRIADYRSAVDLINRHEYGNGTAIFTRDGGTARRFCEEVQVGMVGVNVPIPVPVAFHSFGGWKRSIFGPLNVHGNDGVRFYTRMKTITARWPEAQHDQGAAFSMPTLG

SEQ ID NO: 3069 - protein, 433 aa, Lactobacillus plantarum WCFS1
MEATADYETIKTTLAAAANEHGEPHWLVERRLAALDAMQGLAVPKADRFSICDWPLTPTDQPLKFSRSDRTLATDVTAEAGHIQIVQVGQTTVTVNLPDELDDQGVILTDMFTAFREHPQLTEKHFMGKVVKTDEDRLTSYHTAFLNAGVFLYVPKGVTVKEPIEITTIQDSTRVQPLISHVLIVAEQDSHFAVTQHLTTKGDVDNIANCVVEILARADSEVHFSAFDELGANTTAYLNRRAAISRGAKVDWAIGMMNNGNTFGDFDSELISEGAKSDAKVITVTTKAQDVCVNTRVTNRGKKTDGNIVQRGVIMEKSNLIFNGIGHIIHGASGAHAEQENRVLMMSDDAHGDANPILLIDENDVLAGHAASVGQIDQNQMYYLMSRGIDKPQAQRLVIRGFLSTVIGAIPSKTVRTRLTNTIERKLEDGIQF

SEQ ID NO: 3070 - protein, 183 aa, Pyrococcus abyssi GE5
MGKAQSVRFKVSKLMAYILRHDPWSFNLQPDEEGFVDLEEFVNAIRRVYPWVTKEFILDIVERDEKERYEVKEGKIRARYGHSYPVILDHKEDKESKTLYHGTIRENLEGIMREGIKPMKRQFVHLSLNYEDAYNTGRRHGSNVVVLMIDADCLRKKGFKILKAGKKVRIVKYVPVDCIVGEL

SEQ ID NO: 3071 - protein, 468 aa, Lactobacillus plantarum WCFS1
MSEVPDVVKNDRDYEYGFHDDVKPAYSTGRGLTEATVREISAAKHEPQWMLDYRLNAYHEYLKMPMPKFGPDLTKLDLKDMLYYQKMTDKKFRDWKEVPADLKRTFDRLGVPEAERKYLAGSSAQYESEVVYHNMRKDFEKLGIIFTDTDTALHDYPELFKKWFGKLVKPTDNKFAALNAAVWSGGSFIYVPKGVQTKTPIQSYFRLNAENSGQFERTLIIVEDGASVDYVEGCTAPNYSSDSLHAAVVEVNVEPNAYCRYTTIQNWSDNVYSLETKRAAAAENATMEWVDGNLGSKVTMKYPSVYLNGEGARGTMLSIAVASNGIHQDSGARMIHNAKNTSSSIVSKSIAKTGGATDYRGTVRFAKHSDGSKAHVECDTIIMDDQSSSNTIPYNEIDSANVAMEHEAKVSKISEEQLYYLMSRGISEAKATEMIIMGFVEPFTKQLPMEYAVELNRLISFEMEGSIG

SEQ ID NO: 3072 - protein, 146 aa, Arabidopsis thaliana
  misc_feature (13)..(13): Xaa can be any naturally occurring amino acid
  misc_feature (22)..(23): Xaa can be any naturally occurring amino acid
  misc_feature (28)..(28): Xaa can be any naturally occurring amino acid
  misc_feature (30)..(30): Xaa can be any naturally occurring amino acid
  misc_feature (33)..(33): Xaa can be any naturally occurring amino acid
  misc_feature (38)..(38): Xaa can be any naturally occurring amino acid
  misc_feature (44)..(45): Xaa can be any naturally occurring amino acid
  misc_feature (51)..(51): Xaa can be any naturally occurring amino acid
  misc_feature (54)..(54): Xaa can be any naturally occurring amino acid
  misc_feature (57)..(57): Xaa can be any naturally occurring amino acid
  misc_feature (88)..(88): Xaa can be any naturally occurring amino acid
  misc_feature (90)..(90): Xaa can be any naturally occurring amino acid
  misc_feature (110)..(110): Xaa can be any naturally occurring amino acid
  misc_feature (121)..(121): Xaa can be any naturally occurring amino acid
  misc_feature (123)..(123): Xaa can be any naturally occurring amino acid
  misc_feature (132)..(132): Xaa can be any naturally occurring amino acid
  misc_feature (139)..(139): Xaa can be any naturally occurring amino acid
  misc_feature (144)..(144): Xaa can be any naturally occurring amino acid
MASSMLSSTAVVXPPGFKQQWXXQFTGXKXSAXFPVTXKANNDXXSITSNXGRXSCXKVWPPFGKKKFETLSYLPDLSDVELAKEVDXLXRNKWIPCVEFELEHGFVYRXARETLPGYYDXPXNWTMWKLPXFGCTAPXQVLRXKK

SEQ ID NO: 3073 - protein, 413 aa, Treponema denticola ATCC 35405
MASTYEKLLTTITEAAKTANLEEDDYISLLSPEREMHVSIPVKMDNGKIKVFSGYRVQHSTLRGPAKGGIRFHQDVNIDEVRSLSAWMTFKCAVADIPYGGGKGGICVNPSNLSETELEKLTRGYTRRITSFIGPKTDIPAPDVGTNAKIMSWIVDSYSSYAGEFTPAVVTGKPLPLGGSKGRVEATGRGVLFATREILKKLNKTLKDQSVVIQGLGNVGGVTADLFYKEEARIIAISDTSSAIYNEKGLDIPQILKHKKGGKKLKSFEGDFKRITNEELLELKADILIPAALENQITEKNASNIKASIIIEAANGPITPEADKILEKKNIITVPDVLANSGGVIVSYFEWVQNLQGFYWTEEEVNKRLEDKMIEAFKLVWDVKEAYKVSMRKAAYIKALKELVETQKVKGIN

SEQ ID NO: 3074 - protein, 361 aa, Yersinia pseudotuberculosis IP 32953
MKKTYRIAAIPGDGIGHEVMPEGINVLQAAALRWDLDISFENIEWASCEYYQHHGQMMPNDWQRQLQCFDAIYFGAVGWPATVPDHISLWGSLLKFRRDFQQYVNLRPVRLFPGIPCPLVGKQPGDIDFYVVRENTEGEYSSVGGRLFEGTEQEMVLQASIFTRRGVDRILKYAFELAQMRPRKRLTSATKSNGLAFSMPYWDERFEVMAAQYPQISADKQHIDILCARFVLNPERFDVVVASNLFGDILSDLGPACAGTIGIAPSANLNPERDFPSLFEPVHGSAPDIYKRNIANPIAMIWAGAMMLDFLGQGDERYHAAHNGILNAIEQVIAQGPKTPDMCGDASTQQVGSAIVQVLSH

SEQ ID NO: 3075 - protein, 399 aa, Fervidobacterium islandicum
MAKVTFVRTKPHMNVGTIGQIDHGKTTLTAAITKYCSFFGWADYTPYEMIDKAPEERARGITINITHVEYQTEKRHYAHIDCPGHADYIKNMITGAAQMDGAILVLAATDGPMPQTREHVLLARQVNVPAMIVFINKVDMVDPELVDLVEMEVRDLLSKYEFPGDEVPVVRGSALKAIEAPNDPNDPAYKPIKELLDAMDTYFPDPVREVDKPFLMPIEDVFSITGRGTVVTGRIERGVIKPGVEAEIIGMSYEIKKTVITSVEMFRKELDEAIAGDNVGCLLRGSSKDEVERGQVLAKPGSITPLKKFKANIYVLKKEEGGRHTPFTKGYKPQFYIRTADVTGEIVDLPAGVEMVMPGDNVEMTIELIYPVAIEKGMRFAVREGGRTVGAGVVSEIIE

SEQ ID NO: 3076 - protein, 801 aa, Bacillus cereus G9241
MKKRLVMIGNGMAGIRCMEEILKHDSDSYEITIFGDEPHPNYNRIMLSHVLQGKTNMQDIIMNEYSWYEENEITLYTNEKVQSINREEKIIMTEKNRTLTYDKLILATGSSAFILPVEGSTLPGVTGFRTIEDTQFMIDTAKEKKKAVVIGGGLLGLEAARGLIDLGMDVHVVHLMPRLMEQQLDTKAASLLREDLEAQGMKFLMEKKTVKILGTDYVEGIQFEDGEVVDCNLIVMAVGIRPNTQIARDAGLIVNRGIVVNDYMLTNDESIYAVGECAEHDGIAYGLVAPLYEQGAILAKHITNLQTDGYTGSIVGTQLKVAGCDLFSAGQIYKDDQTKAISIFDECKRSYKKVLIRDNKVVGIVLYGDTADGTRLFSMLKKEEDIQEYTPASLLHKAGEESELDVATMSVDDTICGCNGVTKGTIVHAILEQELTTFEEVKGCTKAAGSCGKCRPLVEQVLSHTLGDAFDASAQSAGMCGCTPLSRDEVVAAIHEKGLKSPKEVRNVLDFAHEDGCSKCRPALNYYLRMAIPEEYEDDKSSRFVNERMNGNIQHDGTFSVIPRMYGGVTTADDLMKIAEVAKKYDVPLVKITGASRIGLYGVKKQDLPNVWADLHMTSGYAYSKSLRNVKSCVGSRFCRFGTKDSLGLGMFLEQSLEMVDTPHKMKMGVTGCPRNCAEVLTKDFGVVCVENGYQLYIGGNGGTEVREADFVMIVPTEDDVLRIATAYMQYYRETGIYGERTAYWTERLGFDHIKEILQDANMVTTLNERFQIARSTYTEAWGQALETKSLKAMYEVATMK

SEQ ID NO: 3077 - protein, 417 aa, Geobacillus kaustophilus HTA426
MKLIVQKFGGTSVRDERGRNLARRHIERALEDGYKVVAVVSAMGRCGDPYATDTLLSLIGGVHHHVTKREQDMLMACGEIISSVVFSNLLNEHGIKATAFTGAQAGFCTNSDHTNAKILEMRCDRLLEALRQYDVVVVAGFQGMAENGDITTLGRGGSDTSAAALGAALNAEWVDIFTDVDGVMTADPRIVESARPLDVVTYTEICNMAYQGAKVIHPRAVEIAMQAKVPLRIRSTYSDAPGTLVTSSVRGRKGSDVKERLVTGITYVADVTQIKVLAKEGHYELQSDVFQAMAHEGISVDFINISPYGVVYTVSGDMTEKAVAALRRIGYEPAVTPRCAKVSVVGAGIAGVPGVTAKIVTALSEQGIQILQSADSHTTIWVLVKQDDMEKAVNALHDAFCLSEADAGEDEAIWSEE

SEQ ID NO: 3078 - protein, 393 aa, Pyrococcus abyssi GE5
MKYDVVVVGSGVAGPTVARDVAKAGFSVLLVDKKAAIGTPKQCAEGITIEVFKEFDIPYDKRFINREIYGAKIYSPSGYTAELRYKHVSGVILERKVFDKMLAYYAAKAGAEVLARTEVVDVIRRNGKIVGVRAKHEGEPLEIEAKVIVAADGVESTIARKAGINTYAPPHEFDSGYEYEMLIEGYDPDLIHLFFGNEVAPRGYVWIFPKDEDRANVGIGIASDHPQTAKYYLDKWLKENNIPMRKILEVNVGLVPVGGFVKELVKDNVLVVGDAARQVNPVHGGGMKEAMKAASIAAKWIIKALEEENLELLKNYSEEWWRTEGPRMEKLLKLRKAMEKLTDEDLDVFVQLVSGTDLEKLAGGNYLEVVKALMKHPKVLMSRRRLEILKALL

SEQ ID NO: 3079 - protein, 443 aa, Shewanella sp. MR-7
MSQQNPGLKQSLSLWQVVVMGLAYLTPMAVFDTFGIVSEITSGHVATSYLLALAGILFTAFSYGHLVRKYPYAGSAYTYAQKTFSPNVGFMVGWSSLLDYMFMPMINMLLAKIYLTAMFPNVEPWIFIFGLVAVMTVLNLRGIDLVANFNGVIVFVQIAIILVFIGLMAHSLSLGEGEGVIASVRPFYSEEISLAPLFTGATILCFSFLGFDGLSSLSEETKDAKRVIPRAIVLTALIGGVIFVSVSYFLQLFFPDISRFQQLDAVLPEIALYVGGNLFQSVVLVATTIAVLASGMAAHAGVARILYVMGRDNMLPNKGFGYIHPKWRTPAFNVILVGLLALSAVSFDLEMALALVNFGALVAFTFVNLSVIVQFYIKEKRNQSLKDHFQYFALPLCGAATIGVLWLNLEPQSLELGLIWAAVGVLYLALRSLRLRKAVELQN

SEQ ID NO: 3080 - protein, 102 aa, Arabidopsis thaliana
  misc_feature (21)..(21): Xaa can be any naturally occurring amino acid
  misc_feature (47)..(47): Xaa can be any naturally occurring amino acid
MASSMLSSANMVASPAQASMXARFNGVRASAGLRGTGRGSCDMNSVXEDGGRDNCVLVGAPSVKTKFETRGYIPDLTDAAWAWGAEGLIRHWGSPLRKHSKC

SEQ ID NO: 3081 - protein, 446 aa, Triticum aestivum
SLQLSHTLRHQITVGSSIPINLPVVNQVFSSNRAIIIPHTSPLARIRPLAGRYVPPEVAAVRVPLLNLSNFQINDWPELSAKSYAIMVLMLPSDSARNWHVHELELVEVVADQVAVALSHAVILEESMRARDLLMEQNVALDLARREAEMAIRARNDFLAVMNHEMRTPMNAIIALSSLLLETELTPEQRLMVETVLKSSNLLATLINDVLDLSKLEDRSLELEIRAFNLHAVFKEVMGFIRPIAAIKRLSMSVMLTPDLPLCAIGDEKRLMQTILNISGNAVKFTKEGHITLLASVLKPDSLREFRTPDFHPAASDDHFYLKVQLKDTGCGISPQDLPHVFTKFAQTQPGGNQGYSGSGLGLAICRRFVTLMGGHIWLDSEGAGRGCTATFIIRLGVSDNTDAYQQQLAPLAWPGSANVESAGPKALHEETWPPSSLKPRYQRSV

SEQ ID NO: 3082 - protein, 172 aa, Oryza sativa
  misc_feature (155)..(155): Xaa can be any naturally occurring amino acid
  misc_feature (164)..(164): Xaa can be any naturally occurring amino acid
MQARFHKDWVISTVVRVLSCRERKGDFSCLTAARICEASTSDAVVQAAGTAMPVPLAPYPTPPVPFTPPNGAQSQLVCSGCRNLLMYPAGATSVCCAVCSTVTAVPAPGTEMAQLVCGGCHTLLMYIRGATSVQCSCCHTVKLAMEANQVAHVNXGNCRMLIMXQYGAQSVQ

SEQ ID NO: 3083 - protein, 342 aa, Streptomyces avermitilis MA-4680
MRVGVLTGGGDCPGLNAVIRGVVRKGVQEYGYDFVGFRDGWRGPLEGDAVRLDIPAVRGILPRGGTILGSSRTNPLKLDDGIRRIKENLAKQEVDALIAIGGEDTLGVAARLTDEYGVPVVGVPKTIDNDLSATDYTFGFDTAVGIATEAIDRLHTTAESHMRVLVCEVMGRHAGWIAIHSGLAGGANVILIPEQRFDVDQVCAYVTSRFKASYAPIVVVAEGAMPKDGQMVLKDESLDSFGHVRLSGVGEWLAKEIEKRTGKEARTTVLGHVQRGGTPSAFDRWLATRFGLHAIEAVRDGDFGKMVALRGTDIVRVPIAEATAKLKTVDPKLYEEVGVFFG

SEQ ID NO: 3084 - protein, 403 aa, Debaryomyces hansenii CBS767
MTIVTPVIYQIRELTPREKELIKASVPILEESGDVLTSKFYNHMLTDFPEVKPFFNESNQKTMKQPKILAFALLHYAKNIDDIAPLTAFVNQIVVKHVGLQVKPEHYPIVGQCLLDTMETLLGPEIATEEFLTAWATAYGNLAQILINAEAEKYKTMEWDGFRGFKITRIENESRNVKSVYFKPADGGKIAMPKRGQYVCIRFKLPDSDTEKSREYSLSQYPSSDEYRISVRLLEGGQISPFIHNGLQVGSTIRVSPPAGQFIYRESDVAKPVVLFVGGIGITPLVSITEKALESGRQVYMLNSNRQVETRPFAKWLQGLKEKYGDKFKLIEFISNESDSGLHAIDKLESRRLAAQDFDFVKPNFDYYMLGPNPYMNFVKGELLNRGVEESEIASEFFGPMEV

SEQ ID NO: 3085 - protein, 93 aa, Zea mays
RSTWLFADKSYMDIVIKDGVWVGHLLSGYSLPMDMPSQVNVKSSEEVAGMWKHSIKVSYEATKAAFPGGEVIAHLDHKYVQPLHLFYHRNLET

SEQ ID NO: 3086 - protein, 625 aa, Alkalilimnicola ehrlichei MLHE-1
MDSATAKTEEYTDNQVHPMAGQTMSGSDMIVEVLAQEGVDTVFGYSGGAILPTYDAIFRFNERHRPAGAGDDPIKLIVPANEQGAGFMAAGYARASGKVGVFMVTSGPGATNTVTPIRDCMADSVPVVAITGQVPTHAMGTDAFQEAPIVNIMGACAKHVFLVTKPEQLEATIRTAFEVARSGRPGPVVVDVPKDSQNWIGQFQGSGLLDMRGYRQRMESLRSAKLSDRKCRQFFEMLERSRRPLIYAGGGVINGNAAEQLREFARTFRIPVVTTLMGLGAVDTTDELCMGMLGMHGFAHANYAVEDCDFLIAVGSRFDDRVAGKVAEFAPLAEQIAHIDIDAAEIGKVKSVDWAHVGEAGRSLRQLLRYGESMGFKGEFQPWLDHCTALRERHGMDYDRESELIQPHYVIEEMNKLTDGRAIVATGVGQHQMWAAQYCDFREPRLWLTSGSMGTMGFGLPAAIGAQFARPDALVIDVDGDGSLRMNLGELETATTYGLPVKVLLLNNCGDGMVRQWQRLYFGDRFSGSDKSLHRKDFIKCAESDGFEFARRVSDKAEVTEALKAFLNFDGPAFLEVLIDPEASVLPMVGPGAGYKEMVTGDWITPRERPLQPRDRDEQEAPDLF

SEQ ID NO: 3087 - protein, 280 aa, Pseudomonas syringae pv. phaseolicola 1448A
MSEDRSSNGQKSWLGKLTQAFVHEPKNRQELLELLREAHQNKLLDSEALAIVEGAIQVADLQVRDIMVPRSQMISIKATQTPREFLPAVIDAAHSRYPVIGESHDDVLGVLLAKDLLPLILKADGDSDDVKKLLRPATFVPESKRLNVLLREFRANHNHMAIVIDEYGGVAGLVTIEDVLEQIVGDIEDEHDVEEDSYIKPLPSGDFLVKALTPVENFNEFFDSAFSDDEFDTVGGLVMNAFGHLPKRNEITEIGAYRFRILSADSRRIHLLRVTPISRP

SEQ ID NO: 3088 - protein, 543 aa, Haemophilus influenzae R2846
MSKQIQIPDIGSDEVTVTEVMVNVGDTISVDQSIINVEGDKASMEVPAPEAGVVKEILVKVGDKVSTGTPMLVLEAAGTAPVADAPTAPAADEPTAPVVATAPTASAIVEVNVPDIGGDEVNVTEIMVAVGDTITEEQSLITVEGDKASMEVPAPFGGVVKEILVKSGDKVSTGSLIMRFEVPGAAPAASASDSASAPQAAAPAAATTAQAPQSNNNVSGLSQEQVEASTGYAHATPVIRRLAREFGVNLDKVKGTGRKGRIVKEDIEAYVKTAVKAYESGATAQATGNGVANGAGLGLLPWPKVDFSKFGEIEEVELSRINKISGANLHRNWVIIPHVTHFDKADITDLEAFRKEQNALAEKQKLGVKITPVVFIMKAVAKALEAYPRFNSSITEDAQRLILKKYINIGVAVDTPNGLVVPVFKNVNKKGIIELSRELMEVSKKAREGKLTASDMQGGCFTISSLGGIGTTHFAPIVNAPEVAILGVSKSSMEPVWNGKEFAPRLILPMSLSFDHRVIDGADGARFISYLGSVLADLRRLVM

SEQ ID NO: 3089 - protein, 508 aa, Pseudomonas putida KT2440
MNAPQSPNSTKVEQVKLLIDGQWVESKTTEWRDIVNPATQEVLARVPFATVEEVDAAVAAAQRAFQTWRNTPIGARMRIMLKLQALIREHTKRIAQVLSAEQGKTLADAEGDIFRGLEVVEHAASIGTLQMGEFAENVAGGVDTYTLRQPIGVCAGITPFNFPAMIPLWMFPMAIVCGNTFVLKPSEQDPLSTMLLVELALEAGVPAGVLNVVHGGKQVVDAICTHQDIKAISFVGSTEVGTHVYNLGSQHGKRVQSMMGAKNHAVVLPDANRTQTINALVGAAFGAAGQRCMATSVAVLVGKAREWLPDIKEAASKLKVNAGCEPGTDVGPVVSKRAKERVLGLIESGIKEGAKLELDGRDVKVPGYEQGNFVGPTLFSGVKTDMQVYTQEIFGPVLVTLEVDTLDEAIALVNANPFGNGTGLFTQSGAAARKFQSEIDIGQVGINIPIPVPVPFFSFTGSRGSKLGDLGPYGKQVVQFYTQTKTVTARWFDDDSVNDGVNTTISLR

SEQ ID NO: 3090 - protein, 436 aa, Xanthomonas campestris pv. campestris str. ATCC 33913
MVEFLIVIALILLNGFFAMSEMSLMTSRKSRLKQMAGSSKRAARALALAESPENFLSTVQIGITLIGILTGVFGGEAIGIAIGTWLQGIVPALDPYAPVIGKTLAVALITFLTLIFGELVPKRLALRNSEDIAGVVAVPMAWLAKIAAPGVWVLARSTRLVLRMLGMGKDESASVSEEEIRMLVAESHEAGVIDAHERDMMNRVMRLGDRTADSLMTPRNRIAWLDANAEPERNLHVMREHEFSRYPVYRGSDQDIAGVLEVKSLVTRMDGHGAQLFQNLRDTLFVSESTHAMKLLEIFREEQQSMALVVDEYGEIRGLVTISDLMGAVVGRLQSVENTDDDALVVTRADGSLLIDGSLPVEELREVLGAELPEADEGDYHTLAGLCIYYFGRIPQAGEFFDWAGWRIEIVDLDGARVDKLLLRRVGDEDSDDIVG

SEQ ID NO: 3091 - protein, 207 aa, Triticum aestivum
  misc_feature (125)..(125): Xaa can be any naturally occurring amino acid
  misc_feature (137)..(137): Xaa can be any naturally occurring amino acid
  misc_feature (150)..(150): Xaa can be any naturally occurring amino acid
  misc_feature (155)..(155): Xaa can be any naturally occurring amino acid
  misc_feature (163)..(163): Xaa can be any naturally occurring amino acid
  misc_feature (188)..(188): Xaa can be any naturally occurring amino acid
  misc_feature (201)..(201): Xaa can be any naturally occurring amino acid
VTSRCSGLLLPDLRPGLAGLRSRSPPLSSPRVHLRGGRRRPRTLSCVAPPDSAEPKTDEQNVKAELGEEKPQPSSSSSSSTPQEAAAEPPVPDRGLNRRIAVLTTLAAVGLFGSQRLQLGGFSLXDLAANAVPYERXLSNGKPLFRIYQXGVNLXKLLRYYKXSNSQGRTTCHVNVTYKVGTDLIVGXRIPFPLIGRIEDXLNSRIF

SEQ ID NO: 3092 - protein, 447 aa, Corynebacterium glutamicum
MTVDEQVSNYYDMLLKRNAGEPEFHQAVAEVLESLKIVLEKDPHYADYGLIQRLCEPERQLIFRVPWVDDQGQVHVNRGFRVQFNSALGPYKGGLRFHPSVNLGIVKFLGFEQIFKNSLTGLPIGGGKGGSDFDPKGKSDLEIMRFCQSFMTELHRHIGEYRDVPAGDIGVGGREIGYLFGHYRRMANQHESGVLTGKGLTWGGSLVRTEATGYGCVYFVSEMIKAKGESISGQKIIVSGSGNVATYAIEKAQELGATVIGFSDSSGWVHTPNGVDVAKLREIKEVRRARVSVYADEVEGATYHTDGSIWDLKCDIALPCATQNELNGENAKTLADNGCRFVAEGANMPSTPEAVEVFRERDIRFGPGKAANAGGVATSALEMQQNASRDSWSFEYTDERLQVIMKNIFKTCAETAAEYGHENDYVVGANIAGFKKVADAMLAQGVI

SEQ ID NO: 3093 - protein, 568 aa, Dechloromonas aromatica RCB
MIANPATKYTAFPPVQLADRQWPNRTITQPPIWMSTDLRDGNQSLFEPMNAEKKMRMFKLLCDIGFKEIEIAFPSASETEFGFVRNLIEGGHIPDDVTIEVLTQAREHLIRRTFEALKGAKKAIVHVYNATSKTFRDNVFGMSKAEVVQMAVDAVKLIRAQAEAMPDTEIILEYSPELFTATELDFAKEVCDAVTTAWGATPQRKVILNLPTTVEIATPNIYADQIEWMHRNLARRDSVIISLHPHNDRGTAVAAAELGLMAGADRVEGCLFGNGERTGNVDLVTVALNMYTQGVHPGLDFSDINAVARAFEHCNQLPIHPRHPYVGDLVFTAFSGSHQDAIKKGFSAQEAAEQWSVPYLPIDPADVGRSYDSVIRVNSQSGKGGIAYLMETEHGVVMPRRLQVEFSGVVQQHTDAHGGEVSADGIWAMFARTYLDATTPIRYREHHLFEQGRNQGIRLNIDIDGTPHILTGEGNGPINAAVHALQSAGINIQVRSYEERSMVPMGEDGNARACAFMEIAGKGGDKSGGECYGVGVDSNIVTASIKALLSGVNRLGAARTSGDQSQAA

SEQ ID NO: 3094 - protein, 112 aa, Xanthomonas oryzae pv. oryzae KACC10331
MKLITAIIRPFKLDEVREALSAAGVSGITVTEVKGFGRQKGHTELYRGAEYVVDFLPKIKIETVVTNDRLDAVVEAIQNAAGTGKIGDGKIFVTAIEQVVRIRTGEIGADAL

SEQ ID NO: 3095 - protein, 552 aa, Lycopersicon esculentum
MASINISFPSTTFHSRSQANFKLFSGLHSGDVVSLNGVSSGSFIRLNARPHLTIKSDFKITSALLSGEGDIRFQSRGEKTLFSSLSTGTETQPDAVTFATLEADGVQTTSGFLSDDDECDLDRPTEGFSSVPEAIEDIRQGKMVLVTDDEDRENEGDLVMAASKATPEAMAFFVKYGTGIVCVSMTEEHLERLQLPLMVNDKKNEEKLCTAFTVSVDAKHGTTTGVSAHDRATTVLALASGDSKPEDFNRPGHIFPLKYREGGVLKRAGHTEASVDLAVLAGLDPVGVICEVVDDDGSMARLPMLRQFAKEHNLKIISVADLIRYRRKTDQLVEHASAARIPTMWGPFTAHCFKSIIDGIEHIAMVKGDIGDGQDILVRVHSECLTGDIFGSARCDCGSQLATAMKQIEAAGRGVLVYLRGHDGRGIGLGHKLRAYNLQDAGRDTVEANEDLGLPVDSRNYGVGAQILRDLGVPTMKFITNNPAQYSWLKGYGLAISGMVPVVTPFTNHYDTYLETTRAKMGHVYGLNLIRPATSTSTTNGKPNSENTSTIR

SEQ ID NO: 3096 - protein, 593 aa, Rhodobacter sphaeroides 2.4.1
MRMTTEEAFVKVLQMHGIEHAFGIIGSAMMPVSDLFPKAGITFWDCAHETNAGLMADGFTRSTGKMSMAIAQNGPGVTGFVTPVKTAYWNHTPLLLVTPQAANKTIGQGGFQEMEQMRLFADCVCYQEEVRDASRIPEVLNRVILQAWRNSAPAQINIPRDMWTQVIDVELPQIVAFERPAGGEEAVAEAARLLSGARFPVILSGAGVVLSGAIPDLARLAERLDAPVASNYQHNDSFPGSHPLAVGPLGYNGSKAAMELIARADVVLALGTRLNPFSTLPGYGIDYWPREARIIQVDINADRIGLTKKVTVGIQGDAAKVARAILAQLGEGAGDAGREERRHLVAQTKSRWAQELSSLDHEEDDPGTEWNAGARTRDADLMSPRQAWRAIMQAVPAEAIVSSDIGNNCAIGNAYPSFEAGRKYLAPGLFGPCGYGFPAILGAKIGNPDTPVIGFAGDGAFGISMNEMTACGREDWPAITMVIFRNYQWGAEKRNTTLWYDNNFVGTELDRDTSYAAIARACGAHGVQVRSQSELTAALHEAVERQMKARETTFIEVLLNQELGEPFRRDAMKKPVVVAGIDPADMRPQKGAA

SEQ ID NO: 3097 - protein, 498 aa, Yersinia pseudotuberculosis IP 32953
MSEYHEKNNALFKSITALDGALFINGEFRKGAGGRLPVENPATGKVIGHLAAATPEEIEEAVAAARRAFPAWAAERPKARANALHRLGDLIAADALNMARIMTIEQGKPVNEAQGEILKLAEICHFYGEEATRVQGDVVPNDPPGFQSLVVREPVGVVGAITPWNYPAELVGWKLCASLAAGCTLIIKPAELTPYTALAIAEKCLEAGIPAGVVNVLTGKGEQVGQALVEHPQVDKIAFTGSSAVGLHIQQSCPQVKRLSLELGGNGPMVVAACADVAAAVKGAVRRSFRNCGQVCIAINRIYVHRSCYRAFVSKMGVATNGLRLGNGLDDPAADLGAMASVEPLNKTRAHLEDALAKGARLVAGGKAPEGVEYAKGHFFRPTVLADCTHQMRVMTEETFGPLVGLAPFDDIDEVISRANDTPYGLAAYIYARDLAAIHRLSAALDYGNVAINNVDASMMNAPYGGRKQSGVGYEHGREGLLEYFNFKHIRLYHGIGD

SEQ ID NO: 3098 - protein, 142 aa, Triticum aestivum
GASTYNTFSSCPNPHQFDLDNVKFIGTSGQNIGDDLYRYSDAKDRLEFMERTLKWRHLAPTAPNSLGCYPYTDKDPFLVETCPHVYFVGNQDRYETRLLKGTEKQQVRLISIPRFCESGIAVMLNLRNLECSTLSFSTSFDA

SEQ ID NO: 3099 - protein, 289 aa, Triticum aestivum
ELIFCFSKYQYDDCIKDCDTAVERGRELRADFKMVSRALTRKGTALAKLAKSSKDYDVAIETFQKALTEHRNPDTLKRLNDAERAKKELEQQEYYDPKLADEEREKGNEFFKQQKYPEAVKHYTEALRRNPKDPKVYSNRAACYTKLGAMPEGLKDAEKCIELDPTFSKGYTRKGAIQFFMKEYDKAMETYQEGLKHDPSNQELLDGVKRCIQQINKANRGELTPEELKERQGKAMQDPEIQSILTDPVMRQVLIDFQENPRAAQDHLKNPGVKQKIQKLVSAGIVQMK

SEQ ID NO: 3100 - protein, 966 aa, Flaveria trinervia
MANRNVEKLASIDAQLRLLVPGKVSEDDKLVEYDALLLDKFLDILQDLHGEDLKEAVQQCYELSAEYEGKHDPKKLEELGSLLTSLDTGDSIVIAKAFSHMLNLANLAEELQIAYRRRIKLKSGDFADEANATTESDIEETFKRLVHKLNKSPEEVFDALKNQTVELVLTAHPTQSVRRSLLQKHGRIRNCIAQLYAKDITPDDKQELDEALHREIQAAFRTDEIRRTPPTPQDEMRAGMSYFHETIWKGVPKFLRCVDTALKNIGINERFPYNAPLIQFSSWMGGDRDGNPRVTPEVTRDVCLLARMMTSNMYFSQIEDLMIEMSMWRCNSELRVRAEELYRTARKDVKHYIEFWKRIPPNQPYRVILGDVRDKLYNTRERSRHLLVDGKSDIPDEAVYTNVEQLLEPLELCYRSLCDCGDHVIADGSLLDFLRQVSTFGLSLVKLDIRQESDRHTEVLDAITQHLGIGSYREWSEEKRQEWLLAELSGKRPLIGPDLPKTEEVKDCLDTFKVLAELPSDCFGAYIISMATSTSDVLAVELLQREYHIKHPLRVVPLFEKLADLEAAPAAMTRLFSMDWYRNRIDGKQEVMIGYSDSGKDAGRFSAAWQLYKTQEQIVKIAKEFGVKLVIFHGRGGTVGRGGGPTHLALLSQPPDTINGSLRVTVQGEVIEQSFGEEHLCFRTLQRFCAATLEHGMNPPISPRPEWRELMDQMAVVATEEYRSVVFKEPRFVEYFRLATPELEFGRMNIGSRPSKRKPSGGIESLRAIPWIFSWTQTRFHLPVWLGFGAAFKHAIQKDSKNLQMLQEMYKTWPFFRVTIDLVEMVFAKGNPGIAALNDKLLVSEDLRPFGEYLRANYEETKNYLLKIAGHKDLLEGDPYLKQGIRLRDPYITTLNVCQAYTLKRIRDPNYHVTLRPHISKEYAAEPSKPADELIHLNPTSEYAPGLEDTLILTMKGIAAGMQNTG

SEQ ID NO: 3101 - protein, 399 aa, Oryza sativa (japonica cultivar-group)
MGCAQGKCCVPRRQRGRGGGGAVGGRGGATLGRVAVPGAGLVLEYATLAVAGLYPDSPGRESQDAHLVATRFAGHPDLHLFAVFDGHGACGAACAGFARDALPRLLAGVGVGAGEEGGGRMVVVEDPAAAFREALPAANAEMHAADEVDDSMSGTTAVAALVAGGALHVANVGDSRAVAGVWREGRVAAEELSWDQTPFRADERARVKACGARVMSVEQVEGVRDPEAESWVADEGDPPRVWARDGLYPGTAFTRSLGDQAAEAVGVIAEPEVKSVEITPAHLFFVVASDGVFEFLSSQDVVDMVAAYEDPREACSAIAAESYKLWLEHENRTDDITIIIVHIRDSENVDKFLYRKRIPSAGSCCCAMAVVLALQSVRHAPVANPLGAVARVFLRAPAD

SEQ ID NO: 3102 - protein, 249 aa, Sinorhizobium meliloti
MVTINRPDAINALDVKHDQALARVWREVEADPLIRVSILTGAGGRAFCSGGDLKTYMPWRRQLAQEGNESTISFGGMTLPHEITKPVIAAIQGYCIAGGLELAMACDIRLSTADSKFGLAEVRWGVLPGGGGTQRLPRLVPVGYALEMILTGESITAQRAEQIGLVNRIVEAGDLLDTAFKVAQRIVENGPLAVQAAKKAVQQGLSAALQDGLTLEAALQRQLLQSEDAQEGLKAFAERRSPVFKGVAS

SEQ ID NO: 3103 - protein, 314 aa, Mycobacterium sp. KMS
MSNADTPIRIGTRASLLATTQAGTIRDALIARGHAAELVLISTEGDRNQGPIADIGVGVFTAALREAIHDGRVDAAVHSYKDLPTAADERFTIPAIPRREDPRDALVARDGLVLGELPAGSTVGTSSPRRAAQLRALGLGLEIRPLRGNLDTRLNRVGNGELDGIVVARAGLARIGRLGDVTETLEPVQMLPAPAQGALAVECRAGDTGLIALLAELDDADTRAAVTAERVLLAELEAGCSAPVGAIAEVVESIDEDGRVFEEVSLRGCVAALDGSDVIRASGIGTPGRAADLGVSVAAELFELGARELIADHH

SEQ ID NO: 3104 - protein, 492 aa, Polaromonas sp. JS666
MPLTLSQTDLLRQQNFINHQWQDAQSGARLPVSDPATGLDFAHVPDSGAADALAAVDAAHAVFPAWRARSARERAQFLKRWHALILANQHDLGRLISREQGKPLAEGVGEVAYAASYVEWFAEEATRTYGDMIPEPARGRKLMVVKEPVGVVAAITPWNFPAAMIARKIAPALAAGCTVVAKPAEDTPLTSLALVLLAQQAGLPPGVLNMVTASREKTPEVVDVWLADARVRKITFTGSTPVGKHLARESAGTLKKLSLELGGNAPFIVFDDADIDAAVNGLMVAKFRNGGQTCVCPNRVFVQDAVHDAFVEKLRARVGALKVGPASAPDSQIGPMINARAVEKIERHVADAVAKGARIAVGGQRMEGAAYASPNYYAPTVLTGAHSGMACSLEETFGPVVPVTRFGSEAEVIAAANDTPFGLAAYFYSSNIARVWRMADALESGIVGINEGALAAEVAPFGGVKESGYGREGSRYGLEDYMHTKYLCQGLV

SEQ ID NO: 3105 - protein, 156 aa, Francisella tularensis subsp. holarctica
MSIYDFKLTANDGSEYHLPKNKVLLIVNVASKCGFTKQYRGLQHLHKIYPDLEIVAFPCNSFGGQEPGSDEEIKNFCETNYNVTFPIMKKTKVNGKDAEPLFEYLKERAKGVLGTEAIKWNFTKFLVSKDGETVVRYAPKTIPEDLIPDIDNFLKD

SEQ ID NO: 3106 - protein, 1749 aa, Arabidopsis thaliana
MEQLRPFFLLLAIFVASLVNAEVHFHEFVIQETPVKRLCRVHNSITVNGQFPGPTLEVRNGDSLVITAINKARYNISLHWHGIRQMRNPWADGPEYITQCPIQPGGSYTYRFTMEDQEGTLWWHAHSRWLRATVYGALIIRPPLSSPHYPFPVIPKREITLLLGEWWDRNPMDVLNLAQFTGAAPNISDAFTINGQPGDLYRCSSQETLRFLVGSGEIVLLRVINSALNQELFFGVANHKLTVVAADASYTKPFSTNVIMLGPGQTTDVLLTADQPPAHYYMAAHAYNSANAAFDNTTTTAILKYKDASCVTLQAKSQARAIPAQLPGFNDTATAAAFTAQMKSPSKVKVPLEIDENLFFTVGLGLFNCPTPNTQRCQGPNGTRFTASINNVSFVFPKQNSIMQAYYQGTPTGVFTTDFPPTPPVTFDYTGNVSRGLWQPTRGTKAYKLKFNSQVQIILQDTSIVTTENHPMHLHGYEFYVVGTGVGNFNPNTDTSSFNLIDPPRRNTIGTPPGGWVAIRFVANNPGAWLMHCHIDSHIFWGLAMVFLVENGEGHLQSVQSPPLDLPQWYYSTTRPLVLVCPKRKIHLYYQTYNNACSFVQLNLTEHFSSRRDTNIVTFAAMASALECWTTRNAAGGCADDDFVDQVLMSSEDRSESLTAPPPSDQTSSAMQKRFQRLGRNVSDAIASLKNSLNLDSSRDNQNAATGGGRKLVWATVVRNLAKMYPGSQLPDKLVSNLRKHYDSLPLSYSQTGFDMKDVFVHIKLIEQAFGDDNPVFVIQEVCDEEADDQGSVFKLTFACTCSLPWSTISGSLDGALICCKKVQIFEKKGLTLGVVLLLVESGQEKMFKVKVVNALRSAVRKPKSTSVKLPFGLCGCEEQNAGVGEFGDVDVESIDQCYRHELDDLNTRIQLQMPPPSSSFSVSVDEWQTIQSGGDDIRKWLLNSDDLEFSGQLGPNSFKGVYRGTKVAIEKLKGCEKGNSYEFAIRKDFLELMTCGHKSILQFYGVCIDENHGLCVVTKLMQGGSLRELVLKKKKLQTKLIFQIAVDIAEGMKFINDHGVAYRDLNTQRILLDKQCNACLGDLGIVTACKSVNEAMEYETDGYRWLAPEIIAGDPEKTRESWMSNAYSFGMVLWEMVTGEEAYGSCSPVQAAVGIAACGLRPDIPKECPQVLKYLMIKCWNTCPSTRLNFSQIHCILLRAISRLLRPAFFIFFFLFFLPHNLTFGLCFNTEALALMKFKERIEIDPFGALVNWGELSHCSWSGVVCSHDGRVVILNLRDLSLQGTLAPELGNLTHLKSLILRNNSFSGKVPEEVTELQELEILDLCDNNFGQPFPFARRLLQISPPPSQPSPPSPMEEVPIDFPFFFAPPPQNIGASPPTETQVIPNPSPVPPPPAQPPPAQTPPPQLSEVPHAVNKKKSHKSKMYIIVGVLVGVLGVMAALVAFFFLWNQKVKLIKPWGETGSSGQLQDVVTTGVPKLKLAELETACEDFSNIIGSTSSDATIYKGTLSTGSEIAVLAVASGSLQDWSEDHETQFQEKRLSQVNHKNFLNVIGYCHEDEPFNRMLVFEYAPNGSLFEHLHDQDAEHLDWPMRLRIVMGIAYCMEHMHNLNPKPISHTNLNSSSVYLATDYAAKVSDFTFLSSTPLDPMTNVSSFGALLQEIITGKIPDPDSLLQEETKPVADPTLKSFQEEVMERVWEVVKECLSQKVEMKEVVVKLREITGITPEAALPSRSPAWWAELEIISTEM

SEQ ID NO: 3107 - protein, 327 aa, Thiobacillus denitrificans ATCC 25259
MANIMYWEAIQRAHDEEMARDPLVICLGEDIGVAGGTYKATKGLYEKYGPLRVMDTPISEGGFTGLAVGASFLGVRPIVEIMSVNFAWLAMDQMFNSAAKVRYMSGGQLTAPCVFRSAGGAAHQLGAQHSARMEKVFMGIAGLRVVTPSNPKQAYGLLKSAIRCDDPVFINEHELMYNMKGEVPDGEYFHPLEGSEVARAGTDVTLFGYNISVHWCLKAAEILDKQYGISAEVVDLYSLAPLDRAGIKASVTKTHRAVVVEEDEAPVGVGSEVIAIINEECFFELDAAPVRVHSALVPQPYNHTLEKAAIPDHEDVVKAVLKMFGRA

SEQ ID NO: 3108 - protein, 162 aa, Oryza sativa
MSDSEEHHFESKADAGASKTYPQQAGTIRKNGYIVIKNRPCKVVEVSTSKTGKHGHAKCHFVGIDIFNGKKLEDIVPSSHNCDVPHVDRTDYQLIDISEDGFVSLLTESGNTKDDLRLPTDDTLTNQIKNGFGEEGKDMILTVMSAMGEEQICAVKEIGAKN

SEQ ID NO: 3109 - protein, 361 aa, Schizosaccharomyces pombe
MNSHELIEESNNSGTPATKSSSKPTKKIRPRNDLVHYSKALSKVLRHTAKANGLQIREDGYIEVDSILKLPQFRGMGMELLLSIVKGNDKKRFTMEEVEGVLYIRANQGHSIKAVQVPMARIDNASSIPKVVHGTKKELWPVISKQGLSRMKRNHIHCATGLYGDPGVISGIRKSCTLYIYIDSAKAMQDGVEFYRSENGVILTEGVNGLLSSKYFSRVETSDGEVLLDAKASPKNNRSDESDQSDPESIDPFCDNLQALSMHELELLEEKHSNFGYSEGIIKGKMQVAQSGFDDGFKHGSRLGFQMGKTIGTLKAKLYIFEENEQMEILKQELDRLQESAEFHIFVANHKEEILKCIREK

SEQ ID NO: 3110 - protein, 708 aa, Oryza sativa (japonica cultivar-group)
MSLPAISLYTSPPPGAVYSSEFDPSSRGSSPPCSTAPPSTSHRPPAAAGGLSCLFSSPAAAASPPRAPPHDELGALWQDRSDEPAFAGGGGGYSSSPLKWRDLHHHHHHSPVSVFQGPSSSPAASRSPPASWLAGRDRDRERLFAGFVRNALGSCVDYAPALSPRSEVGGGELAFELDENLAEASPACEPCARELLAGAQARHRIFHEELVVKTFFEAEKAHRGQTRASGDPYLQHCVETAVLLANIGANSTVVSAGLLHDTIDDSFIDYDHIFHMFGAGVADLVEGVSKLSHLSKLARDNNTASRIVEADRLHTMLLAMADARAVLIKLADRVHNMKTLEALPLGKQQRFAKETMEIFVPLANRLGIASWKDQLENLCFKHLNPEEHKDLSSKLTKSFDEVLITSAVDKLDRGLRDAGLSYHNLSGRHKSLYSIHNKMLKKNLTMDEIHDIHGLRLVFEKEEDCYRALDVVHELWPQVPGRFKDYISRPKLNGYRSLHTVVMSENVHPFEVQIRTKEMHLQAEYGFAAHWRYKEGTCRHSFVLQMVEWARWVLTWQCEAMNKERPASLGDSDAIRPPCPFPMHSEDCPYSYTRQCDHDGPIFVILLEHDKMSVQEFQANSTVMNLMDRVGTNTPRWSPYRIPMKEDLRPKVNHEPISDLNRKLSMGDVVELTPALPHESLPNYREEIQRMYDRGGFALATRGGSSRR

SEQ ID NO: 3111 - protein, 371 aa, Zea mays
  misc_feature (128)..(128): Xaa can be any naturally occurring amino acid
  misc_feature (140)..(140): Xaa can be any naturally occurring amino acid
MTEAARFHGMIGGGGGKGMQDNVINGFDNIPYYQKFGEGSHMSVDSVDGFNLTNCAGGSVAMSVDSSSVGSNESRTVILKHPGLRDAPTASYSVNNSVFRPNRVAAHTLNEDALAQVLMDPNHPTEVXMGGPFAQGAFGXLYRGIYNGEDVAIKLLEKSENDPERAHSMEQQFVQEVMMLSRLSHPNIVRFIGACRKSVVWCTITEYAKGGSVRQFLARRDLKSDNLLISADKSIKIADFGVARIEVKTEGMTPETNLPVDGTHRPYDHNVDVYSFGIVLWELITGMLPFTNMTAVQAAFAVVNKGARPVIPQDCLSSLSHIMTRCWDANPEVRPPFTEIVCMLESAEMELLNNVRKARFRCCISEPMTTD

SEQ ID NO: 3112 - protein, 304 aa, Salmonella enterica subsp. enterica serovar Typhi str. CT18
MIYTLTLNSAIDMNIFSDPLQPNIVNRTHHTEFCPNGKGVNVALVLDHFQIPAHILGIFGGFTGHYIVESLRTRKMPVTPAWVEEPTRINIFIHDGKQEYKLVNPGSYIPDECKKQIITIISQLPDAEYLVISGSLPQGIESRFYAEIMHICQQKNIGVILDISHPSLRQLLEFKPLLIKPNDEEVKAIFGLTVSDDNDAKNTLTTLHALGAQNVLLTLGAKGMYFSNGIDYWFCSAPTVDLVSSACAGDAALAAFLSQWLSTGEVEYALSLASATGADVASSAGLGQLAAIETLLSQIHVRKL

SEQ ID NO: 3113 - protein, 306 aa, Pseudomonas aeruginosa UCBPP-PA14
MITGAAQMDGAILVCSAADGPMPQTREHILLSRQVGVPYIVVFLNKADMVDDAELLELVEMEVRDLLNTYDFPGDDTPIIIGSALMALEGKDDNGIGVSAVQKLVETLDSYIPEPVRAIDQPFLMPIEDVFSISGRGTVVTGRVERGIIKVQEEVEIVGIKATTKTTCTGVEMFRKLLDEGRAGENVGILLRGTKREDVERGQVLAKPGTIKPHTKFECEVYVLSKEEGGRHTPFFKGYRPQFYFRTTDVTGNCELPEGVEMVMPGDNIKMVVTLIAPIAMEDGLRFAIREGGRTVGAGVVAKIIE

SEQ ID NO: 3114 - protein, 553 aa, Aspergillus oryzae
MPAFSQATDLSAWKELQEHHTAVGRNIVLKEAFEKDPQRFEKFSRTFKNTVDNSDILFDFSKNFLTEETLSLLVKLAKEANVEELRDAMFKGEHINFTEDRAVYHAALRNVSNEPMQVDGKSVVEDVNSVLEHMKEFSEQVRSGEWKGYTDKKIDTIINIGIGGSDLGPVMVTEALKPYGAPGMKLHFVSNIDGTHIAEALKDSNPETTLFLIASKTFTTAETTTNANSAKKWFLETAKDESHIAKHFVALSTNEAEVTKFGIDKKNMFGFESWVGGRYSVWSAIGLSVALYIGYDNFHQFLAGAQAMDKHFREAPLEQNIPAIGGLLSVWYSDFFGAQTHLVAPFDQYLHRFPAYLQQLSMESNGKAITRSGEYVKYTTGPILFGEPATNAQHSFFQLLHQGTKLIPSDFIMAAESHNPVEGGKHQRMLASNFLAQSEALMVGKTPEQVKTEGAPDNLVPHKTFLGNRPTTSILAQKITPSTLGALIAYYEHLTFTEGAVWNINSFDQWGVELGKVLAKKIQQELETSGAGAGHDASTSGLLAAFKQKANLA

SEQ ID NO: 3115 - protein, 117 aa, Atriplex nummularia
MASSVVFKLACAVFMCMLVAAPHAEALTCGQVTSSMTPCMSYLTGGGSPTPACCGGVKSLNSMASTPADRKAACGCLKSAAGAMTNLNMGNAASLPGKCGISLPYPISTSTDCSKVN

SEQ ID NO: 3116 - protein, 535 aa, Yarrowia lipolytica CLIB122
NKNSRQECSGIYNKEDWGGKHDVYIEFTPEKLDTDDWLAFAIFEYRDVDKMGSDIPGDTGIKKYVCDQQAIDSNLCTKEQEGTYIIPKEGEVETYAKIETHRVNLREPETYRYDVSKTGYYCIATFSNDDNYKGKIFIQSAYGYLPGSQIPKHPFYGILSICYLVAFLLWMFSYWQHRQDVLPVQNYITGIFGFLVVEVMFVWSYYDIVNETGDSPGSKAFLVIVSILNSMRNAFTFFLLLIVCLGYGVVKPTLGNLMWKCQALGGIHFVFTLIFTIALYLMDPVDASNVILFLIIPLSITLTTFYIWILSSLTATTKYLVERKQHVKAQMYRNLWWILLGSVIVICGFFFFNALIMTSGSMTDTIVSEWKYRWFLFDGWVNVIYFIDFLLIAFIWRPTANNKRFAMSTELAQDENDAQEFEIGSLAGSDDEDDDEERNVGGIPQENPFGDHNRTSIDSMPDDVDLTRSDTKATLSGVYQKKDKEGASSSKSPEIEATDDATLFALDDEDEDDQQGESSRKKKGKGGEEEEGLLG

SEQ ID NO: 3117 - protein, 571 aa, Oryza sativa
MPDWRVGEFEGKLKDGFARSNNSEHENGAGTVSISSKKSKHGVASEKKPHVDISGLIDSDSQKCNSEQIHSANGIVSRDVNHDHIENCKVESNDFPLNTISETRYPTDNWNSSQFALSNDGSPVLNNQSTPQTGHGYGDNDLTYIDWPAIDNFEDVDNLFRCDSTYGQQQLPNTDELSWIPSSDAMYSSDVAMQPGFESSYSDYGILDDLSAFNCTEDKSLTTADPSSAVCDEQFDDSYLFNEQKPEDVYGEQAYQRDAMELLSSDQICTGQENLDMIGNRYSSENAMEQPEDQKFSIASGSQLSSSQNLLNQKNHLDSTSPSNITSESYPERNCQIIPSGASFAERNLKVQKKVASSASGQLISDNVTGHPGHQTLTRRASYPCENHEIGKRSLGKRGLGHSDVAMGTSMVVDGSFVSSISSDNSVEENSFRQLQDAVSQLDVKTKMCIRDGLYRLARSAQNRQVFPNTMNNNGDSHNVKDMQNAETSGKFVDPGSIETQTNPIDRSIALLLFHQPSEHVTGAVDEAASLKSHNDNHQAAAKNQRVMHASSVHSPRGQGDPMDAKSCRNN

SEQ ID NO: 3118 - protein, 723 aa, delta proteobacterium MLMS-1
MMKNGIDDIIRQVQEYLPEEDPTPLRRAYQLAVKVHSHGRHRYSGLPYLRHVLAVTNILVGMRLDLATVTAGLLHGALKQKEEPLSQAKLAEQFGVDVAAIVAGATRITAVQFNSHLAYQAENIRKMLLAMAADIRVLLLRLADRLHDMQTLHLEDRELAVEIAQETMDLYAPLASRLGIDWIKRELEDLAFAQLQPGAYQQLTAKIQTSLPDREAYVERIKELLSHHLRQNGLTNFRILGRPKHLYSIHKKLLVQNITLDKVYDKVAFRIIVGDIKECYTALGIIHSLWAPIDGRFKDFISHPKANGYRSVHTSVIGPDGDFMEIQIRTEEMDRIASEGIAAHWAYKEGQDASSRDVKLFKWLKQLVAMLQDLEDPKELLDTVKGELYEDDIYVLTPAGEVKGLPQGSSPLDFAYCIHTDVGHHCTGAKVNGQITPLRTPLKNGDVVEIITSPQQKPNRNWLNIVKTNRARNRIRQWLNQEERQRNLERGREICERELRKHQISFKKLVRTGHLKEVLKSLSCNSLDELLHKVGAGKLSIAAIVRQLQPEELRREEEEAEQERRRQAERQAARPRGGTGDGLVRVEGGTDIPTKIANCCLPVPGDEIIGFITTGRGITVHKSNCPNLLAGEAARRIGVSWTSQAKAPYRASIQATGVNRKGLLAALSNTITSDDANIASLEASSGKNGARFKIVLEVNGIDHLQRILQHIRQIDGINEAHRL

SEQ ID NO: 3119 - protein, 373 aa, Colwellia psychrerythraea 34H
MTLSSNTVTKQRFTLVCQKIQIETRDVKTFIFSMPKQQIGFNYHAGQYLNFTVNMAGTMQTCCYSLSSSPTTSDYVSITIKRIPQGKVSNYFHDHFKVGQSIDVQGVAGHFYLTDPMPKNVLLISAGSGITPMLSMLRFMVATQCKNQVIFVHSAKQKMDLIAQAEISNLAKQHGNCQIIYTLTQGANSQWYGYQGRLNEQILGNIEQISHYQTFVCGPKLFRKATQALLFKLGLQPSNCHEESFGAHEYSKEQTINTEESTPPLAPVIESQKVRPQNLEHQSSKAKVSIYFSRWKKRVQGNKQDSLLDQGETAGLILPYSCRAGSCGSCKAKLISGQVKQNSTDGLSAREQQQGYILLCSCSALTDVEISHE

SEQ ID NO: 3120 - protein, 123 aa, Desulfovibrio desulfuricans G20
MSKHILIVDDSKTVRNLVAFIMKKEGFRVTMAEDGLDGLEKLYSAEETVDLIISDVNMPRMDGFTFIKTVREQDTYRDLPIVVLSTEGQEKDIQMGMSLGANLYMVKPAQPDKMVKNIKMLLG

SEQ ID NO: 3121 - protein, 356 aa, Atriplex nummularia
MAAPVCCLPNDDLASRLVQKIAQTVEDEIPEQFLHKDGFPEAKDVPELWTRSLLIDFSLLSSGDQDEIVKFRSALSNWGCFLVKNHGIEGSFLEEVIEVSRKFFSLPFEEKMKYYTDDIFQGYDTDAVCQGLDQQKMNWNDRLFLTMYPKSKGNLKAWPQNPSNFSEIVDEYSKELINLTKGLYKAAAKSLNVREDSFCLEKEGVILSRFTLYPKCPRPKNVLGSKPHLDGSVFTIVLADQEGLEVQKDGQWFKVPVIPGALFVNFGDFGEVLTNGIYKSTMHRVATHSAKDRLSVTAFCTMDATQELTPLTELVTANRPPLYKKFKVYEYKEGVCCKCGPGENAIDAIKLDFPIL

SEQ ID NO: 3122 - protein, 193 aa, Photobacterium sp. SKA34
MQVISNNRFILRLILLVSSILFTSLVTTFANASSCPTLYQAPLKKLNSDEYYDFCKQLTGKVVLVVNTASQCGFTPQFKQLEELYKTYKDSGLVVIGFPSNDFKQDRGSDQQTANICYSNYGVTFPMITKTSVKGSKANPLYKHLIAQSGKSVGWNFQKYLLNKQGQVVGVFPSRLSPTSNEMVAAIKQQLNM

SEQ ID NO: 3123 - protein, 415 aa, Dehalococcoides ethenogenes 195
MGKIFIVDVTNRDGVQTARLGLSKLEKTLINMYLDEMGVFQSEFGFPTTKHERGYIEANLELAKMGVIKNLRLEGWIRALVADVDLAFRRAPGLRHLNLSISTSEQMINGKFQGRKVFTDIIDDMTVAVNAAYAKGAETVGVNAEDASRTSIVNLLEFGKAAKEAGATRLRYCDTLGYDNPFTIYETARTLSEKVGMPIEIHCHGDLGMAIGNSLAGAKGVVDGGQDVYVNTTINGIGERAGNADLVAFLLAVLKSKGFGEKYQLGHEIDLSKAWKIARFASYAFDVEIPINQPGVGRNCFAHASGIHADGVIKDSQNYELYGYEELGRGEALMVETGREICAGQYSGISGFRHVMGNMSVELPEDKDEANKILELVRYANVEAHKPLVEDELIFIAKYPEISRRLLTLTPLMND

SEQ ID NO: 3124 - protein, 990 aa, Glycine max
MLEPRESDIPVLFLVLVVLPLVAYILLGKWSETSKKRDRINLLAHLAAEEALRAEEMAVADVIPPVSASKNEHHVCARCSAPARTRCSRCKIVRYCSGNCQIIHWRLIHKQECQQLEPHKSSSFPLAVSVEEFGHGDGSYFYENLNNQFLGPSLKQTLRESAPLDYLVHPLTGTAASTTADFSVFNNFQHSAFERTSHKSNRETLRRDNGSIYESSIESSDYKASSSLSSVVPKEAFMRQKSRKSSDSVLEEEISNVSSGGFGVYINRFDASKNMIHENDSHQSQYGNALVTRHKYGRSNVSSAANNDNGVDEFETDITTKGVSVVKGGNYHSDEAAQYKRPSESTIKGSMKAKKILHTPKTKSSKSPKSTSKTSADFCCSEIEKKGKTADELKVAGNSDTIPLHGNGSNGTANTGIMKMMGLRKSTKPTPLASTESMDVKCKKVKKIKMLFPYDEFVKIFQSDVFGIYPRGLLNCGNSCYANAVLQCLTSTKPLVVYLLYRSHSKACCAKDWCLMCELEKHIMVLRENGDPLSPSRILWHMRSINCHMGEGNQEDAHEFLRLLIASMQSICLEALGGEKKVDPRLQETTFIQHTFGGRLQSKVKCLKCNHESERYENIMDLTLEILGWVESLEDALTQFTSPEDLDGENMYRCGRCTSYVRARKQLSIHEAPNILTIVLKRFQEGRYGKINKCITFPEMLDMIPFMTGTGDIPPLYMLYAVVVHLDTLNASFSGHYVSYVKDLQGNWFRIDDIEVQPVLVNQVMSEGAYILFYMRSCPRPPVEHTVKAVQQSVYDSSKHNPMEMQKPNKPGHSRHGSHQFFVSESSPNARPEISTHIIDTTNGFLRKSTNRNALPVTQTYAKNVRSEFSDTTSSDWSLFTSSDEASFTTESTRDSFSTVDYGDSGNMDPISSIFNYTPEKSYLKFSHSRPVTRVFPEKGHVEQVQRIDHSKRVGHSSNEHPPNGNCGLYVYYGSNPVCGTTRTSSQCEF

SEQ ID NO: 3125 - protein, 220 aa, Leuconostoc mesenteroides subsp. mesenteroides ATCC 8293
MAAKLVLVRHGESTANRDNEFTGWTDVPLTLKGVRQANRVGEVLKRHGLQFDVSFTSFLKRAIITDNIILEEIEQLWLPLHKAWQLNERHYGALRGLNKDYARQQYGANKVALWRRSYTATPPLLEHVIPDRRYPEDLEPRGESLKMASDRLVPYWHSEILPQIQQDKNVLIVAHGSSLRALVKYIEHISDEDIDGLEIDNGEPILYEYEEGFSERIYLE

SEQ ID NO: 3126 - protein, 429 aa, Rubrobacter xylanophilus DSM 9941
MARFTPHTEADIREMLDAIGVGSVDELFEDVSPRFEGELGLPPALSEYEALREVERLAARNRAGLPVFLGAGAYDRITPAAVGAIISRGEFMTSYTPYQPEVSQGHLQAIFEFQSVISELTGLEVANASVYDAASAVAEAALMTARLTKRDPKVALSAGLNPRYREVLETYGVEVAGLPFEGGATDFSGVPRDASGVIVQSPNFFGVVEDVGAAAEAAREVGALAVAVCDPIALAVLEPPGRLGADIAVGETQPLGVPLMFGGPYAGYMATRQRFVRQLPGRIAGETVDREGRLAYVLTLRAREQDIRRARANSNICTNQALTALAATIYTALLGPEGLREVAELSISKAHYLAGRLGEAGLRLRYPEAPFLWEFAVEMPDVKGANEALLEAGIVGGLDLGDGAMLVAVTEKRTKEELDAFVEVVANAG

SEQ ID NO: 3127 - protein, 388 aa, Alkalilimnicola ehrlichei MLHE-1
MAKGRTWRVAVCPGDGIGPEVMAPTVAALRAVAGREGLALELQHYDWPSHDWHRRHGEMMPGDWREQLAAHDAILLGALGDPGPTNDPDRYLLSDGVSLAPLLQLRKGFDLWACERPAVRLPGTPQYLADPRAEELDMLVIRENSEGEYVAQGGRLAPGTAREVATQVEVFTRLATERIIRHAFERALQRAHLRQTGERPPRPFPRTGGGEANAQVCLITKRNAQAYWGEMWTEIFAEVAPDYPEIATHHELVDAACMKFVTRPWVFDVVVASNLHGDILTDLAAVLCGGMGVAPSCNINPQDRRVPPLFEPTHGSAPDIAGQGLAGPEAMLLTAAMMLDWMGEEDPAAARAGERLRLAVAADLQTGSGEARGTEAVGAAILDRLDQQ

SEQ ID NO: 3128 - protein, 326 aa, Leuconostoc mesenteroides subsp. mesenteroides ATCC 8293
MAVKSYIDAIREAMDLALEKDDDVIIFGEDVGKNGGVFRATDGLQAKYGEDRVFNTPLAESGIGGMAIGLTTQDYRPIMEIQFFGFVFEVMDSIAGQMARNRFRFNGTRNMPIVVRSPYGGGTKTPEMHADNLEGMVAQIPGIRVVMPANPADAKGLLLSSIASNDPVVFLENLHLYRSLKGEVPEGYYTTPLDKAAIAREGDDVSIISYGGGVPVALKAAEELSKNGISAEVLDLRTVSPLDIQSIGETVAKTGRVVVVQEAQRMAGIGAAIMSEISERFILSLKAPIGRVAAPDSVYPFGQAENDWMIKSDDVVAKVVEVVNYD

SEQ ID NO: 3129 - protein, 471 aa, Rubrobacter xylanophilus DSM 9941
MLGNLIRDKGRPGRRGYTLPRPDVEPVSPEEVVPERLLRRERPRLPEADEPTVVRHYTNLSRRNWGIDTSFYPLGSCTMKHNPRANEAAAAHPGFAGLHPLQPEEQVQGALQVMYELQGFLAEISGFPAVSLQPLAGAQGELTSILMIRDYFRDAGDTGRRVVLIPQTAHGTNPATAAMAGFEAREIGLDARGCVDVGELRRLADESTAALMITNPNTCGVFERNMEEIAGILHSVGAFLYMDGANMNANMGRMRPADAGVDIMHFNLHKTFSTPHGGGGPGSGAIACSERLAPFRPDPVVERRGEGYRFARPEKSIGRVAAFHGNFGPMLRAWNYIRMHGPELREVTDLAVLNANYVRARLKGTYRLPYEGPCKHEVVVQPPKGIRALDVAKGLIDHGFHPPTIYFPLVVKEAMLIEPTETESKETLDDFVGAMLELAEAKPEELEEAPTRAPTRRLDEARAARNLKARW

SEQ ID NO: 3130 - protein, 384 aa, Arabidopsis thaliana
MTLPELPKDLVEEILSFVPATSLKRLRSTCKGWNRLFKDDKRFTRIHTEKAAKQFQPLTLTKNYRICPINVNLHGTTPSLEVKNEVSLLDPHSKNSAAQFNIDRVFHCDGLLLCTSQKDSRFVVWNPLTGVTKWIELGDRYNEGMAFILGYDNKSCNKSYKAMSFNYLDKDSEIYEFSSDSWRVIDDIIKPPHYMDYFRECFSLKGNTYWLGIDRRRRPPDLRITLIKFDFGTEKFGYVSLPPPCQVHGFEASNLSVVGDEKLSVLVQAGSTSKTEVWVTSKIGEANVVSWSKVLSLYPKPDVGFWHGLSFLLDEEKKVFLCCKSKGWMEEEDEDNVYIVGEDNKFILLNFGVETIGGESPIITTYVPSLVQIELAGSKRKTDY

SEQ ID NO: 3131 - protein, 373 aa, Pyrococcus furiosus DSM 3638
MIVLKFGGSSIKYDFEEATNLALSLFEDDAVIVVVSAIKGITDKLILYSQTLDKTIATKIASEYVSFAKSHGIDPVILKPYLDELFNLPDLPEEALRDYILSLGEVLSAVIFSASIGGKFVPSWDIFEAEGNFGNAFIDIKSSKKKFKRVFEVLEEGYIPVIPGFTAGKDGYILTLGRGGSDYSGVAAGVLGKAKLVAIMSDVEGIYTADPKLVPSARLIPYVSYDEIIISSKHGMRALQWKAAELAKEYKIPVLFGRTRNWRMGTLMSERSSGMPLMTYKDGLLLVNVTEEIKYPIIAEGPFWKLYKVSQEEGIHLMRELHTKLFQPSFIQYSVYKSSENGQKTQEFNEKISIEQGENRKIYYSEEEVNLPG

SEQ ID NO: 3132 - protein, 596 aa, Arabidopsis thaliana
  misc_feature (66)..(66): Xaa can be any naturally occurring amino acid
  misc_feature (85)..(85): Xaa can be any naturally occurring amino acid
  misc_feature (235)..(235): Xaa can be any naturally occurring amino acid
MTKEVCSNIGLWLLLTLLIGNYVVNLEASHHVYKRLTQSTNTKSPSVNQPYRTGFHFQPPKNWMNXDPFTLSIYLTNKNTHYLKXPNGPMIYKGIYHLFYQWNPKGAVWGNIVWAHSTSTDLINWDPHPPAIFPSAPFDINGCWSGSATILPNGKPVILYTGIDPKNQQVQNIAEPKNLSDPYLREWKKSPLNPLMAPDAVNGINASSFRDPTTAWLGQDKKWRVIIGSKIHCVXMVLASKNLEEYTSVYFRIFKARQNSNKYVVLMCSDQSRSSLKEDNDKTTYGAFVDINPHQPLSLRALIDHSVVESFGGKGRACITSRVYPKLAIGKSSHLFAFNYGYQSVDVLNLNAWSMNSAQIIDFGEILYGPLCLVVNKIANIYDILLILWPVREVERLRTKQVKNLRNKVLKSGSRLEVYGVTAAQADVEVLFKVRDLEKADVIEPSWTDPQLICSKMNVSVKSGLGPFGLMVLASKNLEEYTSVYFRIFKARQNSNKYVVLMCSDQSRSSLKEDNDKTTYGAFVDINPHQPLSLRALIDHSVVESFGGKGRACITSRVYPKLAIGKSSHLFAFNYGYQSVDVLNLNAWSMNSAQIS

SEQ ID NO: 3133 - protein, 957 aa, Magnetococcus sp. MC-1
MAHINVHTNLRNSRPLILFAGALLLLLLTQLWVITGKYQQDMREDLHGSIKAQLALLGATLQEAAIRGDLAQIKRNLEMWGQAHSEILAIRAISPNGFELVHYQAGALQGDMYVHKSAITVDGRQLITLEVTHNLSMINDRLRTMTLYMGVVSSLISGLFALTVWWIMTRFAIAPLNQELAARQRAENMIRESQQALVKAQLVAHMGSWSSDVAIEHMEWSQGLCQLLGVKVDEAPLPVERLLGLVPQPQQQSVLEMLDRLSQQQQNQVQMEHRIHRETGGVLQVLHRCERVEGANGPRVQGILIDTSQSEALRGALAASEEKFRNLFDNMGSGVAIYEAIDNGDDFIIRGFNKASTVFTKLDRESILGKRVTEIFPGIRAMGLLDLFKRVWHSGVPEHLPLTQYSDQRITQWVENYVYRLENGEVVAVFDDVTSNRQAQQELAQSELRFREMAETLEDVFWITSAHGHRILYVNPAFEKVWGYSVQALEQDINLWSQSIHPEDRARVEEALLQSTSHADGFDQEYRIVRGDDGQLRWIHNRGYPIEEQGQVVRVVGLATDITAKKENEAALQQAMRQAQQASQAKSEFLAAMSHEIRTPMNTVIGMTELLLETPLSEEQQRYVRSLRSSGTALLDVINAILDLTRIESGRLELTEERYDLHELMRETCEVMGYAAAKKKLEMVLEMNPNTPNYLVGDAPRLRQILINLVGNAIKFTEVGQVCVRVWLDEAVERLRIEVEDSGIGIPKEHINTIFDMFAQADSSMARRFGGSGLGLTISQRLAQLMGGRLAVQSQVQKGSCFTLSMPCQIGEEPAQEVVTETQSLTRQTLRILLAEDSVDNQNLIQAYLSRTSHELIYAINGEEAERYVKSGQPVDLILMDIQMPLVDGYTATRRIRAWEQQQGRPAVPIVALTAHALKEDEMRSLEAGCDAHLTKPIGKKQLLQVLAHYPRRESTP

SEQ ID NO: 3134 - protein, 403 aa, Pyrococcus furiosus DSM 3638
MFTNLVKMGKKLKNLTKKYQLNKEKIEKFITVRKRLTFLGERPSVVEKPVVVKFGGTSVRYAFEEALELVANLNENTRTIVVVSALAGVTDCLLRLANGDMSALLEIEEIHEELSQELDVQLDHLMYQLHKTLNSKSSFPSKEAFVDEIASFGERFSAELFSEGLKILGINAKAVDSKDILFAKGDYGNAEVDFKKSVYGAGILYRMLRRGIVPVVTGYYGNLNGFRATFGRGGSDYSATSIARLVNAKATLIMSDVEGIYTADPKLVPSAKLIHYISYREAKIAAKLGMKALHHRAIDPVEGRIPVILGKTRDLKFGTLISHKSQGIPVVVHKLIEDHAEVSVVSTRRSFSLPYEVYEEGDFYFKIKIPKEQFLEVLKDIHRRVVENESLRPSYDSELWAWV

SEQ ID NO: 3135 - protein, 550 aa, Magnaporthe grisea 70-15
MATVDDTQNHVQLNAESSLNEFPYQASADKEEYPSLPSAPLPDVDGSSQNGHTAANADLPPSESTEQPWNKVASGDFIHETKMPSEDRDNLARPGSLPTPEPSRRGSNTLVGSPRQGDGLQMLMDEFADDESSDTSWDIHETIRSRTQALAEKDHQGIFSNQRRGNQADAPDTVTSANAWLPAGFEDDLDEVTGADDEFEPTRGSRWRVRLAPLDTPFHRRMQTLVVLLHVLGMGITFSFFCFLCTLPLFWPIIIAYLVFIRLSRAGSDGKTNRRIEWLRRARIWKYFADYFPVKLHKTADLPPTRKYIFAIHPHGIISHGAFASFATEALGFSEKFPGITNSVCTLHGNFKTPFYREYLMAMGLISVSKESIINTLMTGGINGEGMGRAVSIIVGGAREALEACPKTMRLILKRRGFCRMALRTGADLVPVLCFGENDLYQQWGPQDHPRFRRLQMKALAYLGFAVPVLRGRGVFNYDFGVLPQRRPINVVVGEPIKVEQFRGSGNIEPRVEELWKLYCQKLQELYDQNKHVYFKDRQEDMRFVDSEEL

SEQ ID NO: 3136 - protein, 879 aa, Magnetococcus sp. MC-1
MPCGGMMSFRLKTVLGIALIQAFVLLTLVSSALDDLRQSHQNNLLAHAKTLTTLMDTATKAPILEKNHSALQAIAHEIVQKNAITYLSIYDNQQQILYQFGPAPTPHIKPDINLRDIDDATFDLRHPMLHEQSVYATLALGLPVTPIIKALHAAQNQQLRLALLAMSASILVSWLLGSYLTRQLVHLREAATAIGHGHFNHRIPVQGQDELALTATAFNRMSGELDKTYQRLKKSLYTSNRMAKLEATIMHTVMDGLITMDSSGKVLSFNHAAEGIFGYAAAEVVGEQITMLMPEPYRSQHDDYVQRYLQGAAPRVIGSAGRHVTAQRKDGALLPIRLSVNEMVFEGERLFVGLVADVSERLQEERALIEAKEQAEAANMAKSRFLAVMSHEVRTPMNGILGMLGLLNDRRLDGQQQEWLATAQESAESMLTLLNDILDFSKIEAGHLELEQSAFSPEQILKGVHDLFLPRATAKGITLELEQGANLPAWVQGDPGRLRQVLMNLVSNGIKFTHQGGVTMRVAQQAKREDSLLLQFEVQDSGIGIPPQQLTQLFQPFNQLDPSYSRKYGGSGLGLAICRHLVDLMGGEIRLESPPSGGSRFTFTARFGYAHAPQDEVLDNSEQEVQLHGVRVLLAEDSPTNQMVAVAMLARVGCHVDVAVNGLEVLEALTRAPYDLILMDLAMPEMDGWQAIARIRGMNAPLRDIPIIALTANAYPEVRAQCLAAGAQDFITKPIQRNILLNGILALVTQAQQTGQQGVGAKRCHSNAPIRDEKVLERLAEDTHCSLLPRILEVFIDEADARLQAISTALDNEAWQTVALEVHPLKSSAATFGAARLAACAMQLDAACKAQQWTQMHDLCNCLIEVYRETRGLYKGQQV

SEQ ID NO: 3137 - protein, 318 aa, Carica papaya
MENFPVIDLSKLNGEERALTMELIHDACENWGFFELVNHGISHDLMDTVERLTKEHYMKCMEQRFKEMVESNGLEAVQSEINDMDWESTFFLRHLPASNMHEIPDLEDDYRKAMKEFAVGLQKLAEQMLDLLCENLGFEKGYLKKVFYGSKGPNFGTKVSNYPPCPKPDLIKGLRAHTDAGGIILLFQDDKVSGLQLLKDDQWVDVPPMKHSIVINLGDQLEVITNGKYKSVMHRVIAQTDGNRMSLASFYNPGDDAVIYPAPSLVEKEAEKNQIYPKFVFDDYMKLYVGLKFQAKEPRFEAMKAMESTVTPGAIATV

SEQ ID NO: 3138 - protein, 300 aa, Bacillus halodurans
SFMSELSNYIGPDIDVPAGDIGVGAKEIGYMFGQYKKMRGGFEAGVLTGKGIGYGGSLARKEATGYGTVYFVEEMIKDHGFSFAGSTVVVSGSGNVSIYAMEKAMQLGAKVVACSDSGGYVYDKNGIDLQTVKRLKEVERKRISEYVNEHPHAHYVQGCSGIWSVPCDIALPCATQNELDEAAATMLIANGVKAVGEGANMPSTLQAVHTFQEHGVLFAPAKAANAGGVSVSALEMAQNSTRLAWTFEEVDAKLYEIMKNIYRESIKAAELYEASGNLVVGANIAGFVKVADAMISHGVV

SEQ ID NO: 3139 - protein, 146 aa, Magnetococcus sp. MC-1
MRFLHTMVRVADLEASLHFYRDLLGLVETQRKESQAGRFTLVYLAAPEDLERAKGEQAPEIELTYNWESECYSGGRNFGHIALLVEDIYAVCARMQQGGVTILRPPRDGHMAFFRSPDGISIELLQKGEALPMQEPWASMVNSGSW

SEQ ID NO: 3140 - protein, 320 aa, Escherichia coli
  misc_feature (58)..(58): Xaa can be any naturally occurring amino acid
MIMTVTSMLDNVLRIATRQSPLALWQAHYVKDKLMASHPGLVVELVPMVTRGDVILDXPLAKVGGKGLFVKELEVALLENRADIAVHSMKDVPVEFPQGLGLVTICEREDPRDAFVSNNYDSLDALPAGSIVGTSSLRRQCQLGERRPDLIIRSLRGNVGTRLSKLDNGEYDAIILAVAGLKRLGLESRIRAGLPPEISLPAVGQGAVGIECRLDDSRTRELLAALNHHETALRVTAERAMNTRLEGGCQVPIGSYAELIDGEIWLRALVGRPDGSQIIRGERRGAPQDAEQMGISLAEELLNNGAREILAEVYNGDAPA

SEQ ID NO: 3141 - protein, 185 aa, Brassica napus
RVIFHINYLGADQPTFTLNFSKGSSQIIAQYYQLIRLGFEGYKNVMQNCRENMLVLKEGIEKTERFNIVSKDVGVPLVAFSLKGQSFHSEFEISEMLRRFGWIVPAYTMPADAQHITVLRVVIREDFSRTLAERLVADILKVLHELDTLPSKISRKMGAEDFGNVKGKKVERDILMEVIVGWRKV

SEQ ID NO: 3142 - protein, 112 aa, Azorhizobium caulinodans
MKIVMAIIKPFKLEEVRDALTGIGVHGLTVTEVKGYGRQKGHTEIYRGAEYAVSFLPKLKIEVAVPSDQVAKVVEAITASAKTGQIGDGKIFVFQIDHAVRIRTGETDADAL

SEQ ID NO: 3143 - protein, 334 aa, Streptomyces avermitilis
MTTVALKPATMAQALTRALRDAMAADPAVHVMGEDVGTLGGVFRVTDGLAKEFGEDRCTDTPLAEAGILGTAVGMAMYGLRPVVEMQFDAFAYPAFEQLISHVARDAQRTRGAMPLPITIRVPYGGGIGGVEHHSDSSEAYYMATPGLHVVTPATVADAYGLLRAAIASDDPVVFLEPKRLYWSKDSWNPDEPGTVEPIGRAVVRRSGRSATLITYGPSLPVCLEAAEAARAEGWDLEVVDLRSLVPFDDETVVRVGARTGRAVVVHESGGYGGPGGEIAAGITERCFHHLEAPVLRVAGFDIPYPPPMLERHHLPGVDRILDAVGRLQWEAGS

SEQ ID NO: 3144 - protein, 493 aa, Azorhizobium caulinodans
MNVKTWSRVGLPTLLAASALALPVLAQTAAPAADAPAAAAAIPINKGDTAWMLVSAALVLMMSVPGLALFYGGLVRTKNMLSVLMQVFYTVSVVGILWVLYGYSLAFTGGSDFVGGFSKAFLAGITPDSGTGTFSVGVNIPEFAFIAFQMTFAMITPALIFGAFAERVKFSAIVLFVPLWVTFIYFPMAHMVWYWAGPDAVDAAAKALAAADAGGKAAAQSALDAVLADAGYIYKLGAIDFAGGTVVHINAGIAAFVGCLIVGKRTGYGKEAFQPHSLTLTLVGAGLLWVGWFGFNAGSNLEANGLTALAMMNTFIATCAAALSWMVVEWLAKGKPSMLGVVSGAVAGLVAVTPMAGFAGIMGSLVSGLIVGVLCFFFCTTVKNAFGYDDSLDVFGVHCIGGIFGAIATGIVVSPALGGTGIFDYTTGKVADYDMATQVIAQVKAVVVTLVWSGVGSAVLYYIVHAVVGLRATVEREREGLDITEHGERAYHS

SEQ ID NO: 3145 - protein, 350 aa, Mycobacterium sp. JLS
MSAHRIAVIPGDGIGTEVTASARTVLDAVAARHGIDLSYEEFDWSCRRFERDGAMMPADGLETLSGFDAILLGAVGWPGVPDHVSLWGLLIPIRRAFRQYVNLRPIRVFDGVASPLRDATDVDFVVVRENVEGEYSEIGGRINRGFPDEMAVQESVFTRVGVTRIADYAFDLAETRRRYVTSATKSNGIVHTLPFWDEVVAERAANHPGVRFDSEHIDALAAKFVLQPGRFDVVVGSNLFGDILSDLAAAVAGSIGIAPSANLDPTKQNPSMFEPVHGSAPDIAGRGVANPIGAVWSAALMLEHLGHASAAADVMTAVERTLAQPQTRTADLGGHASTAEVTDALAAQLR

SEQ ID NO: 3146 - protein, 533 aa, Xanthobacter autotrophicus Py2
MGKLKREIGLIGLTFVAVSGIIGSGWLFAPLLAAQHAGPAALIAWVIGGAAMLLFALTFAEISAMLPVAGGIARVPQFSHGNVVAMAMGWSAWVGYNTTAPIEVEAMLRYLGPHLGWLYTAPGSGTLSWAGVAVAGLMMVAFTVINAFGVRFFTRVNTAITWLKIAIPLVVVAALLAARFEPANFTQAGGGFAPFGVAGVLAAVSSGGIAFSFIGFRHAIDMAGEVKNPGVTIPIALVLALAIAFVVYGGIQFAFTGALLQADLAHGWGALALPGDFGPLGALAAALGMLWLVSLLNFGAVVGPFAGGLVSVGSNARLAFALAENGFFPERFASLSARGVPVAALLLNLVFSLATFVLLPFSEVVQLNSSAVILSFVVGPVAVVALRQLLPDATRPLRVPAVKLVAPVAFIIATYIIYWSGWPTVWRLGLCLLAGLALFLVHARNRAAGSLDLAEAVWLAPYLAGLGLVSFLGSFGGRGLIPFGWDLLVLAALGGGAFALAVRERLSQAKFDRYMSEERVLDAATEEEPEVRV

SEQ ID NO: 3147 - protein, 360 aa, Mycobacterium sp. JLS
MATEDPLRLGVVAGDGIGPEIVSAAVQISERALAAVSVPVDWRRLRMGAEAITAEGTPLPEATLAELDRLDAWLLGPHDNAGYPAPFRDALSPGGTIRKRYGLYANIRPARRLSGAIPAVCPTLDVVVVRENTEGFYSDRNMYDGPGEFMPTADVAMAVAVFTREACERIAHQAFRLARTRRRSVTVAHKANVLSKTTGLFRDSCVRVAEQYPDVTVRLEHIDALAALLVARPAEFDVIVAENMFGDILSDLTGQLAGSLGMAPSVNLSDTKAMAQAAHGSAPDIAGRNIANPVAMILSTAMLLEWLAERHHRGALADAATRIRDAVCRSLDDGVHTPDLGGAATTTGFTEHVLSVLASA

SEQ ID NO: 3148 - protein, 115 aa, Gluconobacter oxydans 621H
MPFVKLVTAIIKPFKLDDVREALTPLGVQGLTVTEVKGFGRQKGQTEIYRGAEYHVSFLPKLKIEVAVSDTIAEDVIEAIMTAARTGKIGDGKIMVSSLDQLIRIRTGETGEGAL

SEQ ID NO: 3149 - protein, 423 aa, Schizosaccharomyces pombe
MKPNTTNLRNECWDTFSIPKRSQNIKINQSTKHQRSISDFVGTAGPGRQVGNWIIKKTIGAGSMGKVKLVVNILTGEKAALKMIPFTPNNTSQTVRVQREALLGRLLRHPNICRVIDCIRTPACTYILFEYVPGGQLLEYILARGKLDEDLARSFAMQLINALVYLHKNFIVHRDLKIENVLLTQDSRQVKLIDFGLSNFYSKDDLLRTYCGSLYFAAPELLDAKPYIGPEVDVWSLGVVIYVMVCGRVPFDDVSVPMLHSKIKSGKLEFPSYISEDCCSLIAAMLNVNPRKRCSLEQAAKFPWLKKNSFCLYLPIPLTSIPSTPSIRSHVFKPPFNLKVLQLLHEHGLASIPELKHELYMAYIERKTTSLVCLYLLGVESLAPALRIPTALPPVYSRHQRHHSEILGAMDLTEKITAMQCPP

SEQ ID NO: 3150 - protein, 138 aa, Lycopersicon esculentum
MASTVMSSLSLKPTFTLEKISVKGLPSLTRSSSSFKVVASGVKKLKTDKPYGINGSMALRDGVDASGRKPKGKGVYQYVDKYGANVDGYSPIYNTDEWSPSGDVYVGGTTGLAIWAVTLLGILAGGALLVYNTSALAQ

SEQ ID NO: 3151 - protein, 627 aa, Triticum aestivum
MASSSAKPYCCSSLNPAPSNAIARRAALSALPAAKPRRFSHGLAAVAANPRASRSAVLRPVRACLAAPRRPEYVPDRIDDPNYVRIFDTTLRDGEQSPGATMTSAEKLVVARQLARLGVDIIEAGFPASSPDDLDAVRSIAIEVGNTPVGEDGHVPVICGLSRCNKRDIDAAWEAVRHARKPRIHTFIATSEIHMQHKLRKTPDQVVAIAREMVAYARSLGCPDVEFSPEDAGRSNREFLYHILEEVIKAGATTLNIPDTVGYTLPHEFGKLIADIKANTPGIENAIISTHCQNDLGLASANTLAGAYAGARQLEVTINGIGERAGNASLEEVVMAIKCRRELLGGLHTGINSQHITMTSKMVQEHSGLHVQPHKAIVGANAFAHESGIHQDGMLKFKGTYEIISPDDIGLTRANEFGIVLGKLSGRHAVRTKLVELGYEINDKEFEDFFKRYKEVAEKKKRVTDEDIEALLSDEIFQPKVIWSLGDVQATCGTLGLSTATVKLITIDGEEKIGCSVGTGPVDAAYKAVDQIIQIPTVLREYSMTSVTEGIDAIATTRVVITGDVSADKPALTSNSNRSFSGSGAAMDVVVSSVRAYLSALNKMSSYVGAVKASSEAPETISVQTTE

SEQ ID NO: 3152 - protein, 555 aa, Mesembryanthemum crystallinum
MQASSCLVKGNLGFEVQNRRRGVLAVAGLGGFKNSSPILSSNLRFVNGVINKKSSSCKLTTSGSVLMGAGLARMGLDHVFQSTAKYRSVKAQAASGDYEDPAPVKFQGKSSASVLPYVGVACLGAILFGYHLGVVNGALEYLSPDLGIAGNTVLQGWVVSILLAGATVGSFTGGSLADKFGRTRTFQLDAIPLAIGAYLCATAQSVQTMMIGRLLCGIGIGISSALVPLYISEISPTEIRGALGSVNQLFICIGILAALVAGLPLAGNPLWWRTMFGIAAIPSVLLALGMAMCPESPRWLFQQGKVAEAEKASAALYGKERVPEVMNDLKASVQGSSEPEAGWFDLFSSRYRKVVSVGAALFLFQQMAGINAVVYYSTSVFRSAGIESDVAASALVGAANVFGTAIASSLMDRQGRKSLLITSFSGMAASMLLLSLSFTWPVLAPYSGTLAVLGTVLYVLSFSLGAGPVPALLLPEIFASRIRAKAVALSLGMHWASNFVIGLYFLSVVTKFGISRVYLGFASVCMLAVLYIAGNVVETKGRSLEEIERALSPAV

SEQ ID NO: 3153 - protein, 550 aa, Chromobacterium violaceum ATCC 12472
MTGDSPLQQQHSRHIGPIALMLTGLGSIIGSGWLFGAAHAAQIAGPAAIVAWIVGMVIILSIALSYAELGAMFPESGGMVRYARYSHGSLLGFIAAWANWIAIVSVIPIEAEASVQYMSTWPYPWAQNLYHNGELSTVGLSFAAVLVIAYFLLNYWGVKLFAKANSAITIFKVIVPAVTVGALIYSGFHSENLNNPAMGGFAPFGWASVMTAVATSGIVFSFNGFQSPINLAGEARNPGKSVPFGVVGSILLAAVIYVALQVAFLGALSPSELAHGWKGLDFSSPFAQLAMALGLNWLMMTLYFDAFVSPSGTGATYMASTSRMIYGMQRNGTMPEIFGRIHPLYRIPRPAMWFNLAVSFVFLFFFRGWGTLAAVISVATVISYLTGPISAAALRRCAPDLPRPLRLAGLSVVAPFAFVCASLVLYWARWPLTGQILFLIVAALPVYIWYQAKAGWPEFARELKGALWMVLYLPAMALLSYIGSVDFGGIGLLPYGVDMAVVAAASLGFYFWGVNSGWYTRYLRDEHDPKLVEAMQQEAKASGKLAEQRG

SEQ ID NO: 3154 - protein, 589 aa, Geobacter sulfurreducens PCA
MTQSGPEDGSGNSRIGAAEMPEADTEKQQPASDAPSQELRDIRAQLELSLERYANLYHFAPVGYATIDAVGVIADANRTLAGMIGADCREMVGLLFSDFVHKDDVTSFVSHLARCTGQREGVTGEFRLSGRNGISVDVQLSSMPLTPPGGRVSCRTAITDITMIKRKERELNESREELCWAKEAAEDASRAKSEFLANMSHEIRTPINGVLGMLQLVLDTELGDEQRHCLEMAKRSADALLRLVNDILDFSRIEARKMVFESRPFDLTACVNSAVEILAFEARRKGLAVMVRMGPDVPAAVVGDEARLRQVLVNLIGNAVKFTDRGKVEVTAARAERQSDPLRTAIRISVRDTGIGIAPQERERLFRVFSQVDGACNRRFGGTGLGLALTRDIVEAMGGAIDVESQSGQGSTFTITIPLLLAVTASSPFLPADTLRIAEASAGGGTGAPVTPPISIQYEEARKVKILLAEDDPITRKFMEIMLERRNFEFESASDGHEAVEKWEAGEFDVVLMDVQMPRLDGYEATGLIRERERDRGRRTPIIALTAHAMRKDEDRCLDAGMDGYLSKPIDFTKLMECIGEILARRGRG

SEQ ID NO: 3155 - protein, 419 aa, Mycobacterium avium subsp. paratuberculosis K-10
MTELVTGETLPNVVVTGIAMTTALATDAETTWKLLLDSQSGIRKLEDSFVEEFDLPVRIGGHLLEDFDDGLTRAERHRMGYLQMMSTVLGRRVWENAGSPEVDSNRLMVSIGTGLGSSEEMVFSYDDMRARGMKGVSPLAVSKYMPDGAAVAVGLERHAKAGVITPVSACASGSEGIAQAWRNIVFGEADIAICGGVETKIEAVAIAAFAQMRIVMSTKNDDPVGACRPFDRDRTGFVFGEAGALMVIETEEHAKARGANILARIMGASITSDGYHMVAPDPNGERAGHAMSRAIQLAGLTPGDIDHVNAHATGTSVGDVAESKAINNALGPHGGNAAVYAPKAALGHSVGAVGAVESILTVLALRDQVVPPTLNLENLDPEIDLDVVAGKPRPGNYQYAINNSFGFGGHNVAIAFGRY

SEQ ID NO: 3156 - protein, 459 aa, Francisella tularensis subsp. holarctica
MQTEKINFVVVRVAIIAALAGLLFGMDIGYVNGSLHFISETFGLSVEQSGHVSSVLLLGAACGALFSGFLSKRYGRRKVLLIAAAIFSIFTIVGMLAPNYQIFISSRFILGIAVGIASFIAPLYLSEIAPKEFRGALIALYQLMITIGLFLVFLTNSALERTGSWRVMLTVLAIPSVIMFFGCLTLPRSPRWLILKGNDNEAALVLKKIRSSEAEALEEHNEIKQTTHRSVSVFSLLKQKFFIKVVLLGIALQAFQQFTGMNAFMYYSTDIFKLAGFTNPSTSTIVIGLLNMLTTFLAIKYVDKFGRKPILYFGLSLLIISCIIVGFIFKTHFVYGQAMVLSQTLQWTALIFCLLFIFGFAISMGPVIWILCSEIQPIEGRDFGVTASTMSNWICNAIIGNFALTWLTFHPDSTFFGFAISCIICILFVKFFIPETKDVSLEEIENNLRSGKSLAKIGR

SEQ ID NO: 3157 - protein, 474 aa, Mycoplasma gallisepticum R
MAFKKNLASSKDDNISDWYTEVISKGNLIHYSNIKGFMSFLPNGWKIWQLIKKELTKEFDQRDILELCLPSLISQNDFLLEKKHLEGFAPELFIVTKTSNETEKYILRPTSEIAFCNLWRETLRNYRQLPIKHNQWTSVFRVEKNTRPFLRNSEFFWHEIHSCFETEEQSNDFAVDIWKLYQRFIKDILCIPLVAGEKTEAEKFAGAKTTYTVETIMPDGQALQSATSHNLSQNFSKAFDIRYQTKNNDYQNVFSMSAGVSTRIIGAIIMTHGDDDGLVFPTKVAPYHISLNCIFDDTNQELNAKLKELANKYSQKYRVHLNVNKDSTGEIIKNSQLRGDCCVLLMGPNDLKKNEIVFIDRITKQKQFINLDHLDQKLEELFSTFDQKLYQKAKAVFETKVDFAQTFEEFEQKIASGKFVRVFYCNEDLYEKQIKEKTGASSRCIIKYLDEQTQERCFISNKKAKVEIYFARSY

SEQ ID NO: 3158 - protein, 708 aa, Oryza sativa
MPAWWPRKSRSKAKGVGKPPGAGAASAASSPRKSLDLVDLSASPSVTPRAREKARSLDSPSAAAPRHGGGRCGGGFGEVGYKLPVPVGDAGPGGQGQGQEPELEPAPVRFEENGDVVGGVAGDASSEELSVCSHDSSDEATDQQVCRSTDPASFVRGRNMPSDSHKILNEDNHFMSYSMPREHRKFFEVPVTNMGELHLHCDDLSTSETSSRGRMLPEDFLAPRTRSLSPGPKGHTFAVNNVNSREFGFSPRSPVKMMDGLKSPPHPLPLPPGPATCSPLPPSPTAYSPHPLGPTTCLQSESQWKKGKLLGSGTFGQVYLGFNSENGQFCAIKEVQVISDDPHSKERLKQLNQEIDMLRQLSHPNIVQYYGSEMTDDALSIYLEFVSGGSIHKLLREYGPFKEPVIRNYTGQILSGLAYLHGRNTVHRDIKGANILVGPNGEVKLADFGMAKHISSFAEIRSFKGSPYWMAPEVIMNGRGYHLPVDIWSLGCTIIEMATAKPPWHKYEGVAAIFKIANSKEIPEIPDSFSEEGKSFLQMCLKRDPASRFTATQLMDHPFVQDHPAVRAAKSGALRNAFAPADGTHTTSNREFSRKSITPLKDIGVSARDFTGFSTAVPSPHTASPISVVRTNMSLPVSPCSSPLRQFKQSNWSCLPSPPHPTFSNGATSYNLSSYMMNETRRIPTISDTWQDISQLKVQSPYGSPKRF

SEQ ID NO: 3159 - protein, 81 aa, Nostoc punctiforme PCC 73102
MTNIQETATSDIQEKIQEEVEQARTVCDINGSGSPECAAAWDAVEELQAEASHKRQSKPKNSLEQYCDDNPDAIECRVYDD

SEQ ID NO: 3160 - protein, 107 aa, Acidobacteria bacterium Ellin345
MKKIFVGNFAFTATEDDIRQLFTPYGKVDSVSLVTDRDTGRARGFGFVEMPNDTEAAAAIEGLNGRDSGGRALNVNEARPKTERGNSGGGGGRGNFRDKGRKREPRW

SEQ ID NO: 3161 - protein, 404 aa, Helicobacter hepaticus ATCC 51449
MEDIIQEIQPKAQNAVIGGSVNVSIQEIQDEPSKQGAVIAVIGVGGGGSNMVNHLANNNPHKDVKLIAANTDVQALETTNANLKMKLGERLTKGLGAGGNPDVGMKAALETYEEIKLALNGVDLVFISAGLGGGTGTGAAPVVAKAAKEVGALTVSVVTKPFKFEMGKRARLAEEGLRNLKAESDCIIVIPNDRLLSIIPKNCGHKEAFAFVNDVLTRAVNGMSSVILKHTQGDMNVDFADVKKAMSYKGLALMGIGEATGDNAASDAMQQAIVSPLLDNISIKGAKGAVIYFETHQNYPFTELSAAMEIIESLVDVEADLIQGIHTLNDVPEDFVRITVIATGFEKEIVNGGNDASRKTDEEQALEHSRQSIQLMRDVSGGDYNLFNNNDTLEVPTYLRNQKD

SEQ ID NO: 3162 - protein, 311 aa, Cucumis sativus
MAVFPIINLENINGDGRAKILEQIEDACQNWGFFELVNHGIPHEFLDMVEKMTRDHDKKCMEERFKETVLSKGLEAAQAEVNDMDWESTFFLRHLPESNISQMSDLDEEYKKIMKEFAKKLENLAEELLDLLCENLGLEKGYLKNAFYGSKGPTFGTKVSKYPPCPKPDLIKGLRAHTDAGGIILLFQDDKVGGLQLLKDGDWIDVPPMRHAIVVNLGDQLEIQKCDARVLITQTSGTGRMSIASFYNPGSDAVIYPAPALVEKDEEKKEVYPKFVFEDYMKLYLGVKFQAKEPRFEAMKANANLGPMATA

SEQ ID NO: 3163 - protein, 220 aa, Arabidopsis thaliana
MMMMSNLPNDLVEEILSRVTVTFMRTVRSICKKWNALTKDRSFTNKYIRNIAALGEREFLMIKEFSIYLVGVNLHGIQNNNFDLSIELKGKLISMDNTIRRFCISQIFHCNGLFLCVSQKDMDNRLVVWNPYCSKPRWIKPSYNYRTVDRFALGYDKSCGSHKILRLFGDNLNNLEIYDLSSNSWRVPNVTLERDIVYMQPGVSLKEKTYWYARDKESEN

SEQ ID NO: 3164 - protein, 189 aa, Prochlorococcus marinus str. NATL2A
MIDKSNSDTVIGSRQKIFLVILSFFLVVSLFFFRTGFKANEMLNQLAKNSLEPEIALSNGKPTVFEFYADWCEACKEMAPDMVNAEKLNSNKIDIVLLNVDNSRWFDLIDKYDVNGIPKLTFFDDQGEFKGFSLGVRKYSELNEIFLALINNSELPSFTKLSNSSNLISKNNLKVLNNSIKSEGPRDHS

SEQ ID NO: 3165 - protein, 360 aa, Magnaporthe grisea 70-15
MATARALRIGLIAGDGIGKDVVPAGRRVLEALPASLGLRFSFVDLQAGFQTFEETGSALPDRTVETLKGECDGALFGAVSSPTKPVKGYSSPIVGLRKKLDLYANVRPVKTVVSAPRPIDMVIVRENTEDLYVKDERTFDAPDGSGPVAEAIKRISYRASHRIASMAGEIALRRQKIRAAGAPSIHSSPLVTITHKSNVLSQTDGLFRSTAKEALADPKYAGSVAVEEQIVDSMVYKLFRQPEDYDVIVAPNLYGDILSDGAAALVGSLGLVPSANVGDGFVMGEPCHGSAPDIMGKNIANPIATLRSAALMLEFLNEEEAAAKIYAAVDANLVEGKVLSPDLGGKATTDQVLEDILRRL

SEQ ID NO: 3166 - protein, 898 aa, Yersinia pestis KIM
MNIASNPAASNTKDKWVRGHMNEQYSAMRSNVSMLGTLLGDTIKEALGEHILDRVETIRKLSKSSRAGNEASRQELLTTLQNLSNDELLPVARAFSQFLNLTNTAEQYHSISPHGEAASNPEALAQLFTRLKDKKLSDQDMRSAVDDLSIELVLTAHPTEITRRTLIHKLVEVNTCLSQLDHNDLADYERNKIMRRLRQLVAQSWHTDEIRKLRPSPVDEAKWGFAVVENSLWEGVPAFLREFNEQLENSLDYRLPVEAVPIRFTSWMGGDRDGNPNVTAEITRHVLLLSRWKATDLFLRDIQVLVSELSMSECTPELRELAGGEEVLEPYRQLMKNVRTQLTNTQAYLEARLKGERVLPPHDLLVSNDQLWEPLYACYQSLKACGMEIIANGQLLDTLRRVRCFGVPLVRIDVRQESTRHTDAIAELTRYLGLGDYESWSESDKQAFLVRELNSKRPLVPLKWEPSAETQEVLETCRVIAEAPQGSIAAYVISMAKVPSDVLAVHLLLKEAGCPFTLPVAPLFETLDDLNNADDVMTQLLGIDWYRGLIQGKQMVMIGYSDSAKDAGVMAASWAQYRAQDALIKTCEKAGITLTLFHGRGGSIGRGGAPAHAALLSQPPGSLKGGLRVTEQGEMIRFKFGLPEVTISSLALYAGAILEANLLPPPEPKKEWIEVMDLLSDASCDMYRSYVRENPEFVRYFRAATPELELGKLPLGSRPAKRRPDGGVESLRAIPWIFAWTQNRLMLPAWLGAGAGLQRAIDAGKQDVLATMCRDWPFFSTRIGMLEMVFAKADLWLAEYYDQRLVDKSLWPLGQQLRDQLAADIKVVLAIANDDHLMADLPWIAESIALRNVYTDPLNVLQAELLHRSRQQEHPDACVEQALMVTIAGVAAGMRNTG

SEQ ID NO: 3167 - protein, 393 aa, Candida glabrata CBS 138
MSKIFIPTANCGKAHDADIFGVAICNTFTVTCSGDGYIKLWKNKLLDNEQPKDHVQKQFVHKSGVHHIDLIDTVEKGGVNVCIISCVTFSGEIVFFELTQENQLKPIKLLTEKELKKSYWAVKWLQSSDLTVCHKFAATDVKGSTYVWDLSVFQEGTADSDEPQYNPHLKFQGEIPVKEPCVATALDISSNGLIATGLENGTVFVSQLTSLKPLYQFEGYGLHGIDQNSNTVRNVKFSPTGRLLAVANDSGSYGNITLYETEFGERIGNFTMATHSTQTSIGSFAHDGWVFGLAFNETGEFLASCGYDSKVRVWDVKLRERVSTLHITAGDIEVEEDILQEDEEGNSLKHPPIFDVKFIKKGVRAGMGSDVNEGLCCVCLDRSVRWYREAGGS

SEQ ID NO: 3168 - protein, 450 aa, Desulfovibrio desulfuricans G20
MTATRFESGSIVLDTTIPNLGPAKIPSPLSYCRFANEEQGLSLFLDHDQVEELGDEVVPLTFEPAGPRRHVYFDTSKTKCAIVTCGGLCPGINDVIRAIVMEAYHNYRVPAVLGIKYGLEGFIPRYGHDVVELTPALVGDIHQFGGTILGSSRGPQSPEEIVDALERMNVNILFMIGGDGTMKAVRSITGEINQRRLKISVIGIPKTIDNDINFISQSFGFETAVDKATEAIQCAHTEAVGAMNGIGLVKLMGRESGFIAAQATLSLKEVNFVLVPETPFTLHGEDGLLNALAQRLRERSHAVIVVAEGAGQHLLSGSHDTDASGNPILGDIATLLRTEIKSHFDKLGIPHTLKYIDPSYIIRSVPANANDRVYCGFLGQNAVHAGMAGKTGMVVAKLMDRYIHLPLDLVTSKRRKLNIISDFWRAVLESTGQSHLAGMVPPEARSCPRA

SEQ ID NO: 3169 - protein, 979 aa, Synechococcus sp. RS9917
MSRCPNGDDQLLQQRLELVEELWETVLRSECPPEQAERLLRMKQLSEPLAGDGDSSSSDAVVQLIREMDLVEAIAAARAFSLYFQLVNILEQRIEEDSYLASMSRCQESSEAEGVDPFAPPLASQTEPATFRDLFERLRRLNVPPAQLEALLQNLDIRLVFTAHPTEIVRHTVRHKQRRVASLLQQLQGTVDMASSDQASLRRQLEEEIRLWWRTDELHQFKPSVLDEVDYALHYFQQVLFDAMPQLRRRIQAALSQNYPDVRLPPAAFCTFGSWVGSDRDGNPSVTPEITWRTACYQRQLMLDRYVSAVQDLRDQLSISMQWSQVSAPLLESLEMDRLRFPEVYEERAARYRLEPYRLKLSYTLERLRLTQQRNQQLSEAGWRTPPEGLVPCQPTGASAGEALHYGSVAEFRSDLELIRNSLVSTELTCDPLDTLLTQVHIFGFSLASLDIRQESTRHSDALDELTRYLKLPTAYGAMDESARVEWLLEEMQTRRPLIPPAVEWSAATAETIAVFRMLHRLQEEFGSRICRTYVISMSHSVSDLLEVLLLAKEAGLVDPAAHHADLLVVPLFETVEDLQRAPEVMGQLFEHPLYRQLLPRAGEQAQPLQELMLGYSDSNKDSGFLSSNWEIHQAQIALQDLASRHDIGLRLFHGRGGSVGRGGGPAYQAILAQPSGTLQGRIKITEQGEVLASKYSLPELALYNLETMSTAVVQNSLVTSQLDATPSWNDLMSRLASRSRSHYRALVHDNPDLVAFFQQVTPIEEISKLQISSRPARRKSGAKDLSSLRAIPWVFGWTQSRFLLPSWFGVGTALADEVANDQEQLELLRRLHQRWPFFRMLISKVEMTLSKVDLELARHYVTSLGSADHREAFERIYATIADEYSLTRRLVLAITGQERLLDADPALQLSVDLRNRTIVPLGFLQVALLRRLRDQNRQPPMSEAPNTDPDGRTYSRSELLRGALLTINGIAAGMRNTG

SEQ ID NO: 3170 - protein, 319 aa, Candida glabrata CBS 138
MLRFTRGFSRKAGVYDQTIKNLLLPKDTKVMFQGFTGKQGTFHAKISQEYGTNVVGGTNPKKAGQTHLGQPVFASVKDCVKETGATVSGIFVPPPIAGAAIQEAIEAEIPLAVCITEGIPQHDLLYISEMLKSQNKTRLVGPNCPGVINPANHVRVGIQPTRIFKPGKIGIVSRSGTLTYEAVQQTTLSGLGQSLVVGIGGDAFPGTDFIDVLKLFLEDPQTEGIIMLGEIGGKPEIEAAEFLQEYNFSKANPKPVASFIAGKVAGQMKGVRMGHSGAIVEGSGTDAESKKEALRNVGVQVVESPGYLGQTLLEQFSKL

SEQ ID NO: 3171 - protein, 490 aa, Xanthobacter autotrophicus Py2
MPAVQETVERVRALDVDQYKYGFVTDIESEKAPKGLSEDTIRYISAKKNEPEWMLEWRLEAYRRWLTMVEPTWARVSYPQIDFQDYYYYSAPKAAPKSIDEIDPEILKTYEKLGIPLRERDALLGIESSGGSKVAVDAVFDSVSVATTFKAELASAGVIFMPISEAIREHPELVKTYLGSVVPVSDNFYATLNSAVFSDGSFVYIPKGVRCPMELSTYFRINERNTGQFERTLIIADEGAYVSYLEGCTAPQRDENQLHAAVVELVALKGAEIKYSTVQNWYPGDKDGKGGIYNFVTKRGDCRGDNSKISWTQVETGSAITWKYPSCILRGDNSQGEFYSIAISNGHQQVDSGTKMIHLGKNTSSRIISKGIAAGHSENTYRGQVSAHRKATGARNFTNCDSLLIGDQCGAHTVPYMEAKNASAQFEHEATTSKISEDQLFYCLQRGLGPEEAVALIVNGFVRDVLQQLPMEFAVEAQKLIAVSLEGSVG

SEQ ID NO: 3172 - protein, 494 aa, Salmonella enterica subsp. enterica serovar Paratyphi A str.
MSDVTLLAEVTTFLRQRHGQFIAGERQAGNGTNFSVTNPATGKIIADVVSATPTQAEEAMQSARRAFDVWRKMPTLQRGALLLKLADTLAAHREELAQLESVCSGKTILLSRGLELDQSVAFLRYFAGWAGKITGETLNVSLPSMGEERYTAFTQRQPIGVVVGIVPWNFSIMIVIWKLAAALVCGCTIVIKPSEYTPLTLLRVAELAKEAGFPDGVINVVNGAGGEIAQQLIAHPDCAKVSFTGSVATGEKVRRSATSSGKRVTLEPGGKNAALFLNDLTEQAMVNGILEAGYLNQGQICAAAERFYLPQEKLDTVMTLLRQRLSEIVPGSPLDEKTVMGPLANQVQLEKVLRLIQRAREEGDTIVYGGETLPGEGYFLQPTAVKVRSKNSTLIHEETFGPVCSFIGYQNEKEALSHINDSPFGLAASVWSENMSKALHYAEDIDAGMVWVNMHTFLDPAVPFGGMKGSGIGREFGSAFIDDYTELKSVMVRY

SEQ ID NO: 3173 - protein, 315 aa, Prochlorococcus marinus subsp. marinus str. CCMP1375
MTWSINSIPSQEGRTVFVTGANSGLGFDTAQALLEKGATVILGCRTLEKAERSRQKLLDETDCGKIDVLEIDLADLEKVNEALDKIAVKYKKLDLLINNAGVMAPPQTFSKQGFELQFAVNHLSHMALTLKLLPLIAKQPGSRVVTVSSGAQYMGKINLDDLQGGEGYDRWSSYSQSKLANVMFALELSKRLQQSNLDIASLSAHPGLARTNLQSTSVKLNGSWQEAIAYKLMDPMFQSSRMGALPQLLAATDPTAKTGEQYGPRFNFRGYPKICRIAPSALNSDEREQLWQLSEKLIGDAVDISKGKELLSTKK

SEQ ID NO: 3174 - protein, 193 aa, Triticum aestivum
AYLGDTIEQVCTKKQAGRPEFPGYRRPTRPPTRPSFFFFFYSNRAACYTKLGAMPEGLKDAEKCIELDPTFTKGYTRKGAVQFFMKEYEKAMETYQAGLKHDPNNQELLDGIRRCVEQINKANRGDISQEDLQEKQSKAMQDPEIQNILTDPIMRQVLMDFQENPRAAQDHLKDPGVAQKIQKLINAGIVQTR

SEQ ID NO: 3175 - protein, 339 aa, Burkholderia xenovorans LB400
MDTRSELQATIKAMVQPGKGLLAADESGPTIAKRFKTIGLESSEENRRAYRNLLLTTPGLGEFVSGVILYEETLGQKADDGTPFPQLAAKNGIVPGIKVDLGKIALALAPGDEITEGLDGLARRFVDYKRQGARFAKWRAVYNITASLPSRLAIEANADSLARYAAISQEAGIVPIVEPEVLMDGEHTIERSAEVTEAVLHAVFHALHRHRVVLEHILLKPSMVIAGSEHAQQSSTADIAAYTVRVLKRTVPSAVPGIVFLSGGQSPEEATANLDAMNRLGALPWNLSFSYGRALQEPPLQAWKGERSHVEQAQQALLKRARLNSAAALGKYEAAQEKS

SEQ ID NO: 3176 - protein, 285 aa, Bacillus cereus E33L
MRGKHIFIITALISILMLAACGQKDSSATVATATDSTITKSDFEKQLKDRYGKDMLYEMMAQDVITKKYKVSEDDVDKEVQKAKSQYGDQFKNILKNNGLKDEADFKNQIKFKLAMNEAIKKSVTEKDVKAHYKPEIKASHILVSDENEAKEIKKKLDVGASFEELAKQESQDLLSKEKGGDLGYFNSGRMAPEFETAAYKLKVGQISNPVKSPNGYHIIKLTDKKELKPYDEVKDSIRKNLEEERIADPTFSHKLLQKELKKANIKINDSELEDTFTIVSSQGN

SEQ ID NO: 3177 - protein, 308 aa, Arabidopsis thaliana
MEDVNGSDRFSFEIKQPYVEERLENRKREEAAVDAVSFVAETENGKKEVNFVPKKLLIVVTPTYNRAMQAYYLNRVAQTLRLVESPVLWIVVEGNVASFETSEILRKTGVMYRHLVCKRNMTSIKDRGVHQRNTALEHIELHKLDGIVYFADDDNIYSLELFQSLRQISRFGTWPVAMLAQSKNKAILEGPVCNGSQVIGWHTNEKSKRLRRFHVDMSGFAFNSTILWDPKRWRRPFSHPTRQLDTVKEGFQETSFIEQVVADESEMEGVPPACSSILNWHLHLDALDVPYPQGWAIQKNLQALITMK

SEQ ID NO: 3178 - protein, 362 aa, Glycine max
NFLAALIMLWAWKILLTVPLFIVILTVILTCKWRKRHLSMFESIENYLEQNNLMPIRYSYKEVKKMAGGFKDKLGEGGYGSVFKGKLRSGSCVAIKMLGKSKGNGQDFISEVATIGRTYHQNIVQLIGFCVHGSKRALVYEFMPNGSLDKFIFSKDESIHLSYDRIYNISIGVARGIAYLHYGCEMQILHFDIKPHNILLDENFTPKVSDFGLAKLYPIDNSIVPRTAARGTIGYMAPELFYNNIGGISHKADVYSYGMLLMEMAGKRKNLNPHAERSSQLFFPFWIYNHIRDGEDIEMEDVTEEEKKMVKKMIIVALWCIQLKPNDRPSMNEVVEMLEGDIENLEIPPKPTLYPSETITKN

SEQ ID NO: 3179 - protein, 259 aa, Sulfitobacter sp. EE-36
MSYQYITTEKKGHILVVTMNRPEVYNAVHVDMHNEMADCWDAFAADQDLWVAVLTGAGDKAFSAGNDLKATAAGGSKATMPASGFAGLSSRFDLEKPIVAAVNGFAMGGGFETALSCDIILASDQAKFALPEVKVGFFAAASGVQRLSRYIGRLAAQEMMFTGRTIMADEALSMGCVNAVYPADQLMAKAMEKAEELCAVSPSAVKATKRVLNDMYKRDGMQESIAYSREVIADLSKTEDFKEGVNAFVEKRKPNWVNK

SEQ ID NO: 3180 - protein, 902 aa, Chromobacterium violaceum ATCC 12472
MASNAALSRYQAGLEAEIVRRTEALRQSEKLSQSIIAGAPVGVVVVDGAGAIKDINRTALAVFGVEAGAGLPATLGGLARLEGDGPLPGALSRGLAGADLAALSGEFWELLLRRADGSATQVEAGLTVVDMSGERTGTLFIRDISNRKLQEGKLKQAMEEAESATRAKSDFLANMSHEIRTPMNAIIGLAHLALRTGLDPKQRDYLQKIHNSGKHLLGIINDILDFSKIEAGKLDLENAEFDLERVLDNLAALLGEKAEAKGLELIFDIGPGLDRSLIGDPLRLGQILINYANNAVKFTERGEVTVRARCREERGDSLLLHFEVSDTGIGLSAEQKAKLFQSFQQADTSTSRKYGGTGLGLAISRKLAEMMGGEVGVDSEPGKGSTFWFTARLGKGEPHPERLPGVGMRNRRALVVDDSRAAREILAEQLRGMTFRVDEAEDGEQALERVEQAERDGDRYEVVFLDWRMPRMDGIEAARRLMRHDAALRPHRVMVTGYGREEVFRLAEDAGIEMTLIKPVSASVLFDSTMRLFGGEAAAGARAAPAADEIDLSPLRGMRVLLAEDNELNQQVATELLSAADIEVTVASNGEEALSLAEAQPFDLALMDMQMPVMDGLEATRRLRRLASWGKRPILAMTANAMSGDRERCLEAGMNDHVTKPIDPDKLFAALKRWDPRAGRADAAEPAASAARERPDQEDSDDPLRRIPGLDVGGALRRMMGRRPLYEGLLRRFVADQADAFGQVRLALARDDRDAAVRGAHTLRGLAGTVGADHLQQLSGRLEAALQAGLQLSGLDAEMAEAQAELGRLIGALGAALPESAPPAADGEADPAVLDRLEALLAEDDADAVEVYGAESGRVRPALGEAAAAFEQALRQYRFDDALARLREARAGMREGGHGQSV

SEQ ID NO: 3181 - protein, 312 aa, Arabidopsis thaliana
MPFAPSLLSSSSSVSQFLPRFPNATRFNVTPRSRAATVVAASVTDLAGVDSTTIAVLGGGSVAALAAMVSLTDPERRRKLQAEEVGGGDKEVVREYFNSTGFERWRKIYGETDEVNRVQKDIRLGHAKTVENTMLMLTEDRSLAGVTVCDAGCGTGLLSIPLAKEGAIVSASDISAAMVAEAEMKAKAQLPSENLPKFEVNDLESLTGKYDTVVCLDVLIHYPQNKADGMIAHLASLAEKRVILSFAPKTFYYDILKRIGELFPGPSKATRAYLHSEADVERALGKVGWKISKRGLTTTQFYFSRLIEAVPM

SEQ ID NO: 3182 - protein, 292 aa, Aeropyrum pernix K1
MECYRDIHGFMAGHLAEAVEVLREGLEASSVRVLTFTGNLVATGLRGVLAQLIDGGLFNVVFTTAGALDHDIARFMGGKYLKGRFEADDTELHRRGVHRLGNVFIPVESYGPLVERFVRTLAEQAAGVRGEWGVYELLRLAGSLMEGDRDSILAAAARRGVDVFVPGWPDGAFGTSLFMERQRGTSITVDYFRDMARLADIFFPQEGEAAALIVGGGISKHHAIWWSQFRGGLDYAVYVTTAVEYDGSLSGAHPREAVSWGKIKESSRRVVVYGDATITLPVIAYCLLHGCG

SEQ ID NO: 3183 - protein, 991 aa, Medicago truncatula
MANKMEKMASIDAQLRQLVPAKVSEDDKLIEYDALLLDRFLDILQDLHGEDLKDSVQEVYELSAEYERKHDPKKLEELGNLITSFDAGDSIVVAKSFSHMLNLANLAEEVQIAHRRRNKLKKGDFRDESNATTESDIEETLKKLVFDMKKSPQEVFDALKNQTVDLVLTAHPTQSVRRSLLQKHGRVRNCLSQLYAKDITPDDKQELDEALQREIQAAFRTDEIKRTPPTPQDEMRAGMSYFHETIWKGVPKFLRRVDTALKNIGINERVPYNAPLIQFSSWMGGDRDGNPRVTPEVTRDVCLLARMMAANLYYSQIEDLMFELSMWRCNDELRVRAEELHRNSKKDEVAKHYIEFWKKIPLNEPYRVVLGEVRDKLYRTRERSRYLLAHGYSEIPEEATFTNVDEFLEPLELCYRSLCACGDRAIADGSLLDFLRQVSTFGLSLVRLDIRQESDRHTDVMDAITKHLEIGSYQEWSEEKRQEWLLSELIGKRPLFGPDLPQTDEIRDVLDTFRVIAELPSDNFGAYIISMATAPSDVLAVELLQRECKVRNPLRVVPLFEKLDDLESAPAALARLFSIDWYINRIDGKQEVMIGYSDSGKDAGRFSAAWQLYKAQEDLIKVAQKFGVKLTMFHGRGGTVGRGGGPTHLAILSQPPETIHGSLRVTVQGEVIEQSFGEEHLCFRTLQRFTAATLEHGMRPPSSPKPEWRALMDQMAVIATEEYRSIVFKEPRFVEYFRLATPEMEYGRMNIGSRPAKRRPSGGIETLRAIPWIFAWTQTRFHLPVWLGFGAAFRQVVQKDVKNLHMLQEMYNQWPFFRVTIDLVEMVFAKGDPGIAALNDRLLVSKDLWPFGEQLRSKYEETKKLLLQVAAHKEVLEGDPYLKQRLRLRDSYITTLNVFQAYTLKRIRDPNYKVEVRPPISKESAETSKPADELVTLNPTSEYAPGLGRHTHSYHEGYCCWHAEHWLNFGYIFFTCICFFMLKCVLRFHKY

SEQ ID NO: 3184 - protein, 175 aa, Oryza sativa (japonica cultivar-group)
MAPSVMASSATTVAPFQGLKSTAGMPVARRSGNSSFGNVSNGGRIRCMQVWPIEGIKKFETLSYLPPLTVEDLLKQIEYLLRSKWVPCLEFSKVGFVYRENHRSPGYYDGRYWTMWKLPMFGCTDATQVLKELEEAKKANPDAFVRIIGFDNVRQVQLISFIAYKPPGCEESGGN

SEQ ID NO: 3185 - protein, 385 aa, Mycobacterium sp. KMS
MTPPHNYLAVIKVVGIGGGGVNAVNRMIEQGLKGVEFIAINTDAQALLMSDADVKLDVGRDSTRGLGAGADPEVGRKAAEDAKDDIEELLRGADMVFVTAGEGGGTGTGGAPVVASIARKLGALTVGVVTRPFSFEGKRRSNQAENGIQSLRESCDTLIVIPNDRLLQMGDAAVSLMDAFRSADEVLLNGVQGITDLITTPGLINVDFADVKGVMSGAGTALMGIGSARGDGRALKAAEIAINSPLLEASMEGAQGVLLSVAGGSDLGLFEINEAASLVQDAAHPEANIIFGTVIDDSLGDEVRVTVIAAGFDSAGPSRNPVVSPSAAATQPIAPGRAGKVASPLFEPADPASVPVHTNGATVSIGGDDGGIADDDVDVPPFMRH

SEQ ID NO: 3186 - protein, 236 aa, Zea mays
MASSMLSSAAVVTSPAQATMVAPFTGLKSSSAFPVTRKANNDITSIVSNGGRVSCMKVWPPVGKKKFETLSYLPDLTEVELGKEVDYLLRNKWIPCVEFELEHGFVYREHGSTPGYYDGRYWTMWKLPLFGCTDSAQGLKEVQECKTEYPNAFIRIIGFENNRQAQGISFIASKTHRLPRGFNLRWNENFQHKKTPGLQFHLPNGLGSFSPFGFSLFPKNFKIRNCKNWVKEETRN

SEQ ID NO: 3187 - protein, 146 aa, Triticum aestivum
  misc_feature (82)..(82): Xaa can be any naturally occurring amino acid
DDDGAWRRDERAGSHAGQRRASWRGHGSHKTLREHARDEAPRSTYLTDYVGRSEVGGILGGQVSSALSPCISYARGNGANPXAACCSGVRSLAGAARSTADKQAACKCIKSAAGGLNAGKAAGIPSKCGVSVPYAISASVDCSKIR

SEQ ID NO: 3188 - protein, 258 aa, Clostridium tetani E88
MKNIILKKENGIVEITINRPKSLNALNSETLNELGAAIKDISESDDVKVVIITGAGEKAFVAGADITEMQNLNAKQGRALARLAQKVFSDIEHMPQIVIAAVNGYALGGGCELCMACDIRLASKNAKFGQPEVNLGITPGFAGTQRLPRLVGKGTAKELIFTTDMIDANEAYRIQLVNKVYEADELIDKARELAKKIMSKAPYAVSLAKAAINDGMNMDTESAYKYEADIFGLCFATEDQKEGMKAFLEKRKSNFKNC

SEQ ID NO: 3189 - protein, 280 aa, Thalassiosira weissflogii
PHSFPPHSVALQVLGTFILWFGWYGFNPGSTLGISGEGVPDVAALCAVTTTIAAASGSVSAMFTDMLPSRRSTGETMYDITMCMNGALSGLVGITAGCSVVEPWAAFVIGIVAGWTYIFWSALLVKLKIDDAVDAIPVHFGNGIWGCIAVGLFAEPTRTINAFGEHGHYGRFYSWGNGSADAHLLAAQVCGVLWIIGWVTVIMLPYFLILNAIGLFRVDALEEEVGLDISHHKGAAYDMSGPSADVQEKFEISRSQRKIRFPRRTLMKQPKQATLQLLDF

SEQ ID NO: 3190 - protein, 489 aa, Photobacterium sp. SKA34
MTNKAVKEQHVIIWFRSDLRVVDNTALNHAIESGLPIIALFIATPMQWHQHNMAAVQVDFIHRRLQVLKQQLAKRNIPLQVIEVNDFSESVYLIEQVCIDYNAVHVFANKQYPINEHKRDNSVGELLAKKSIKFSIFDDNYILQPEMVLTRDGELFKVFTPFRNAWIKRFSSSTCYPVTINSDIVTSGVVSKLLSDSSQIKAFNYPIIDSVLWPVDEETIAQRLETFCETKAETYHQNRDFPAIDGTSCLSPYLAIGALSARQCLHQLQQYFPNAFEINKDDGAFTWLNEIVWREFYGHLLHRYPELSKHQPFQKFTQFVKWKDDEALLKAWQEGKTGFPIVDAGMRQLRATGWMHNRLRMITASFLTKDLLCDWRVGEQWFMQHLIDGDFSSNNGGWQWAASTGTDAQPYFRVFNPTLQGQRFDPKGDFIRTWVKELEHVPDKYIHTPHQWASEESLNYPLPIVDHKEARLIAIESFKQAKAYMDIHQ

SEQ ID NO: 3191 - protein, 505 aa, Polaromonas sp. JS666
MSTLRRIAGQCPSPDTSQIPSCQDPNLMTYPNTQLFIAGEWQEAADGRSLAVFNPATGKEIGRVAHAAKVDLDRALAAAQQGFETWRKVPAFERSKIMRRAAGLMRERAGEIAAVLTQEQGKPLAEAKVEAMAAADIIEWFAEEGFRVYGRVVPSRNLATRQLVLKDPVGPVAAFTPWNFPINQAVRKLSAALATGCSIIVKAPEETPAGPAALIQAFADAGIPAGVIGLVYGNPAEISGYLIPHPVIRKITFTGSTPVGKQLAALAGQHMKRVTMELGGHAPVIVAEDADVELAVKAAGGAKFRNAGQVCISPTRFLVHESIRNDFAAALVKHAQGLKVGDGLGEGIQMGPLANPRRLTAMAEFTQDAVQRGAKVAAGGERIGDLGNFWAPTVLTDVPLDAKVFNDEPFGPMAAIRSFNTLDEAIAEANRLPFGLAGYAFTRSLKNAHALSQHVEVGMLWINQPAAPWPEMPFGGVKDSGYGSEGGPEALEAYLNTRAVSIMNV

SEQ ID NO: 3192 - protein, 159 aa, Burkholderia vietnamiensis G4
MSTLYSFSAETLAGEPVSLDAYRGKVLLIVNTASECGFTPQYAGLQKLYDRYAARGFSVLGFPCNQFGKQEPGDATQIGAFCERNYGVTFPMFAKIDVKGDHAHPLYRYLTDEAPGILGLKAIKWNFTKFLIGRDGRIVKRYAPSTKPEEIAADIDKLL

SEQ ID NO: 3193 - protein, 251 aa, Zea mays
KILPSTTPKPNQGWIYTDRVNPKAAGQTVLDFYSQRYLHSERQAWQERIEQGQIEVDGKTVDPTYPLQAGQTLTYWRSPWVEPEVPLQLSVLHRDEDLWAIDKPSGLPVLPGGDFVYHTVLEQLKIQYPQESLFPLHRLGTGTSGLLLLGRSTLGRRELSRQFREHICRKIYRTVIGPCDLPEKFECHQAIGKIPYPQLGYIYAASSHGKPAQSYGRILARSPEKTWLEVEIRTGRPHQIRIHLASLGYPL

SEQ ID NO: 3194 - protein, 91 aa, Prochlorococcus marinus str. NATL2A
MSILVTSPCTETTIQELVTKNWPIWTCDVSSFNWTYEDQETCLLLAGEVTVTPDGGEPVKFGAGDLVVFPAGMDCRWDVHKAVRKHYRFGD

SEQ ID NO: 3195 - protein, 455 aa, Yarrowia lipolytica CLIB122
MSEPTLESLQYTINTAYMLVASAGVFVITPGIGLFYAGMLRKNSAMQVIVQSYITTFVVTIQWWIWGYALALGDGSSFLGNLNMAFLKDSNPGPLVEGGPVPSAAYFIFSVFFPVCTVQIFLGSTAERGRVIPAQIIGFLFTTVVYCPLAYWFWAPKGWLLVLGTLDFAGGAPVHIAGGTASLAYAMFLGPRKITPRFHAYKPHNATMSMIGTTLIWYGWLFFNSGTLQAVNTRTAYIMLNTHLSASAAGMTYVIYDKIFHKKFSMMGACEGAIAGLVAVTPSCGYVAPWAAFTGGIMTALVCRLTINVNKWLRVDDAIYSFNLHAIGGCMGSLVTGFFASSTWTDMDGSKDAIAGGWIANHWVQIPYQLAGLGATIGWTFVVTYILCFVVDKIPGLKLRVDEDQELKGMDAYDILESAGETIDGVIVNTTEILVAHTPAHTPDSGSFVRGEKKE

SEQ ID NO: 3196 - protein, 168 aa, Yarrowia lipolytica CLIB122
MSAEKTNTAFYNLAPLDKNGEPFPFKQLEGKVVLIVNVASKCGFTPQYKGLEEVYQKYKDQGFTIIGFPCNQFGGQEPGSADEISSFCQLNYGVTFPVLQKINVNGNDADPVYVYLKEQKAGLLGFRGIKWNFEKFLVDKHGNVVDRYASLKTPAGLESTIETLLKKP

SEQ ID NO: 3197 - protein, 966 aa, Flaveria australasica
MANRNVEKLASIDAQLRLLVPGKVSEDDKLVEYDALLLDKFLDILQDLHGEDLKEAVQQCYELSAEYEGKHDPKKLEELGSLLTSLDTGDSIVIAKAFSHMLNLANLAEELQIAYRRRIKLKSGDFADEANATTESDIEETFKRLVHKLNKSPEEVFDALKNQTVELVLTAHPTQSVRRSLLQKHGRIRNCLAQLYAKDITPDDKQELDEALHREIQAAFRTDEIRRTPPTPQDEMRAGMSYFHETIWKGVPKFLRRVDTALKNIGINERFPYNAPLIQFSSWMGGDRDGNPRVTPEVTRDVCLLARMMTSNMYFSQIEDLMIEMSMWRCNSELRVRAEELYRTARKDVKHYIEFWKRIPPNQPYRVILGDVRDKLYNTRERSRHLLVDGKSDIPDKAVYTNVEQLLEPLELCYRSLCDCGDHVIADGSLLDFLRQVSTFGLSLVKLDIRQESDRHTEVLDAITQHLGIGSYREWSEEKRQEWLLAELSGKRPLIGPDLPKTEEVKDCLDTFKVLAELPSDCFGAYIISMATSTSDVLAVELLQREYHIKHPLRVVPLFEKLADLEAAPAAMTRLFSMDWYRNRIDGKQEVMIGYSDSGKDAGRFSAAWQLYKTQEQIVKIAKEFGVKLVIFHGRGGTVGRGGGPTHLALLSQPPDTINGSLRVTVQGEVIEQSFGEEHLCFRTLQRFCAATLEHGMNPPISPRPEWRELMDQMAVVATEEYRSVVFKEPRFVEYFRLATPELEFGRMNIGSRPSKRKPSGGIESLRAIPWIFSWTQTRFHLPVWLGFGAAFKHAIQKDSKNLQMLQEMYKTWPFFRVTIDLVEMVFAKGNPGIAALNDKLLVSEDLRPFGESLRANYEETKNYLLKIAGHKDLLEGDPYLKQGIRLRDPYITTLNVCQAYTLKRIRDPNYHVTLRPHISKEYAAEPSKPADELIHLNPTSEYAPGLEDTLILTMKGIAAGMQNTG

SEQ ID NO: 3198 - protein, 590 aa, Oryza sativa
MVMAPIPQPWHQWPFLILFFLVLFSCESNLPCRNGVEATQRVFLYPQSPKVSSIVSKGYRTGYHFQPPKNWINDPNGPMYYNGIYHEFYQYNPNGSVWGNIVWGHSVSTDLINWIRLEPAIEGNTPSDINGCWTGSATILTGDQPVIIYTGADTEKRQVQNIVLPKNRSDPYLREWTKPKNNPLIEPVGPGLNSNQFRDPTTGWIGPDGLWRIAVGAELNGYSAALLYKSKDFMQWTRVDHPLYSSNASNMWECPDFFAVLPGKNNGLDLSAAIPNGAKHVLKMSLDSCDKYMIGVYDLKHDMFVPDTVLDDRRLWLRIDYGNYYASKSFFDSKKGRRIIWGWTNETDSTSDDVAKGWAGIHAIPRTIWLDGDGKRLLQWPIEEVESLRRNEVSHQGLELKKGDLFEIKGTDTLQADVEIDFELTSIDAADPFDPSWLLDTEKHCREADASVHGGLGPFGLVVLASDNMDEHTTVHFRVYKSEQKYMVLLCSDLRRSSLRPGLYTPAYGGFFEYDLEKEKKISLRTLIDRSAVESFGGGGRACIMARVYPAAVVDGATHMYAFNNGSSTVKVSQLKAWSMTRAQVNVRKG

SEQ ID NO: 3199 - protein, 145 aa, Brassica napus
  misc_feature (50)..(50): Xaa can be any naturally occurring amino acid
  misc_feature (73)..(73): Xaa can be any naturally occurring amino acid
  misc_feature (90)..(90): Xaa can be any naturally occurring amino acid
  misc_feature (96)..(96): Xaa can be any naturally occurring amino acid
NVYGLCELKASGDGTPQFRPLSAQLPRSSEPHNQVRGEVVTQLKHNRPIXKVMSPMKHTGYPKRMPKLGEWGXHIPPQAAADRFAAKISXLTSFRXPCLIEITPRAQAPKRELWLSFWSEAHYTPLPDTHRFPAQQNPKTPHWLF

SEQ ID NO: 3200 - protein, 401 aa, Debaryomyces hansenii CBS767
MAINTPVIYKIRELTPREKKLIKASIPILDEDVLTSKFYNHMLTDFPEVRPFFNETHQKTMKQPRILAFGLLHYVKNIDDLAPLTTFVNQIVVKHVGLQVKPDHYPIVGQCILDTMKTLLGDRIATEEFLTAWATAYGNLAQTLINAEADKYKSNEWDGFRDFNISRIVNESKNVKSVYFKPVDGGKIAIPKRGQYVCIRFKLPDSETEKGREYSLSQYPSSDEYRISVRLVEDGQISPFIHNGLQVGSTIRVTPPAGQFVYREANSDKSVVLFVGGIGITGLVSITEKALESGRQVYMLNSNRQVETRPFAKWLQGLKEKYGDKFKLIEFTSNESDSGLHAIDKLESRRLAAQDFDFVKPNFDYYMLGPNPYMKFVKGELLNRGIEESAITSEFYGPMEV

SEQ ID NO: 3201 - protein, 123 aa, Dianthus caryophyllus
MITIHHPWVFAFGLLGNFISFMVFLAPLPTFIRVYKKKSTEGFQSFPYVVAIFSAMLWIYYALLKGNSLLLITVNVTGVIIETIYVIIFITYAPRQARISTMKLLLFMNFGGFCMIVPRPRPR

SEQ ID NO: 3202 - protein, 368 aa, Candida glabrata CBS 138
MLGIRSFRLNARRFLATAQPSIGRFTGKPNPSTGKFTVSFIEGDGIGPEISSSVKRIFQAADVPVEWETCDVTPIFVNGLTTIPDPAVQSINKNLVALKGPLATPIGKGHRSLNLTLRKTFNLFANVRPAKSIEGFKTTYENVDLVLIRENTEGEYSGIEHLVSPGVVQSIKLITRDASERVIRYAYEYARAIGRPRLIVVHKSTIQRLADGLFVNVAKELAAEYPDIQLETELIDNTCLNVVSNPSSYTDAVSVCPNLYGDILSDLNSGLSAGSLGLTPSANIGHKVSIFEAVHGSAPDIAGQNKANPTALLLSSVMMLNHMGMTEHADRIEKAVLGTIAGGSEYRTGDLGGSASTTSFTDAIIKKL

SEQ ID NO: 3203 - protein, 471 aa, Pyrococcus furiosus DSM 3638
MCLITGGINLTKEEIVKMIITGKHRGPDSFGVWSDGLVIKSEDFSEIKEIRGGNVVLAQCRLAMTGSKNYTQPFYNDIVLVHNGEIYNHESLRKWLIERGASFESDVDSEVILRLLEYFIFDKKMKVEEAVKKAMLMLRGDYAVAFALNGKIYLFRDPIGVRPLYYSPRGRFGSEKKVLWSVGEEAIPVNPGELVKLPEEEKMKLLSPWDIKGSGKGYYDGLKNLLQDAVRIRTAKKVGVLFSGGLDSSLIALLASKYSKVVLYTAGTEDSKDVEWARKVSDELRLELREYIFTREEVEREIKNVMFAIEEPNPMNLAIAIPLYFATKLARKDDVKVLLSGQGADELFGGYAKYLENPSLMRKDIEEIAERNLGRDDKVGMLNGVEVRYPYLDLPFVSLALRVPLEEKIREGVRKAILRRIALDFGLPEEVAFREKKAAQYGSNAQKILSKIAKKSLREFAQKLFSEVFST

SEQ ID NO: 3204 - protein, 466 aa, Leuconostoc mesenteroides subsp. mesenteroides ATCC 8293
MSLLARAFKRESVDNYLSADSHMSRVLTTRDLISLGVGTVIGTGIFILPGHEAADHAGPAVAIAFLIAAIFSGLSGMAFAEFSAAMPVAGSAYSYGGAIYGEIIGWLLGWSLIVEYFLAVSAIATGFSAYLGNLLAIFGIHIPKYLSAGPMEGGIVNLFAVLIILFVAAILSRGLNTSKKVENGAVVIKIAILILFIVGGSFFIKTSNYVPFYPKEFHSGLGGLNGIWAATASIIFAFLGFDTIAAHAAEVKNPQKTMAKGIVGTVIISALLYTLFSIVLTGIVNYKKLGVDDPAAFALQVVHQTQFSIVITIGALIGMFTAVLALIYASSRLTYSFGRDGLLPRSLGKISPGSHLPVNALILAVAVEVIFAGLIPLSTLASLINAGTLTAFAFINFGILILRRRKDLAHDGFKVPGYPIVPFIAGMISLFFITQLSAETLKMFGLWLLLGVIWYFSYGIKHSKLS

SEQ ID NO: 3205 - protein, 112 aa, Azorhizobium caulinodans
MKKIEAIIKPFKLDEVKEALQEVGLQGITVTEAKGFGRQKGHTELYRGAEYVVDFLPKVKIEVVLADDMVEKAVEALLRAAQTGRIGDGKIFVSSIEEAIRIRTGETGLDAI

SEQ ID NO: 3206 - protein, 554 aa, Pseudomonas putida KT2440
MAYYRTPHDVTALPAWQALQKHRDAMQSFSMREAFAADAKRFDQFSLSACGLFLDYSKNLITEQSRDLLVNLANEVGLQDAIKSMFSGEIINASEGRPVLHTALRRPVGDKLSVNGVNVMPEVHKVLNQITELVGRIHDGLWRGYSEKPITDVVNIGIGGSFLGPELVSEALLPYAQRGVRCHYLANIDGSEFHELSANLRAETTLFIVSSKSFNTLETLKNAMAARTWYLAQGGSEAELYRHFIAVSSNKAAAVAFGIREENIFPMWDWVGGRYSLWSAIGLPIALAIGTANFKELLSGAYTMDQHFQTAPFDKNMPVLLALLGVWYGNFWDANSHAILPYDHYLRNITKHLQQLDMESNGKSVLQDGTPVKTDTGPVIWGGVGCNGQHAYHQLLHQGTQLIPADFIVPVVSFNPVADHHQWLYANCLSQSQALMLGKTREEAEAELRAKGLNEADIEKLAPHKVIPGNRPSNTLVVERISPRRLGALVAMYEHKVFVQSVIWGINAFDQWGVELGKELGKGVYQRLVGSLEDSAEDGSTQGLINYFRGRHRG

SEQ ID NO: 3207 - protein, 112 aa, Crocosphaera watsonii WH 8501
MKKVEAIIRPFKLDEVKIALVNAGIVGMTVSEVRGFGRQKGQTERYRGSEYTVEFLQKLKLEIVVENDQVAMVIDKLRGAARTGEIGDGKIFVSPVDQVIRIRTGESDLEAI

SEQ ID NO: 3208 - protein, 319 aa, Bacillus cereus E33L
MKKKKIGLLVMAYGTPESLEDVEAYYTHIRHGRKPSEEALQDLIGRYKAIGGISPLAKITKEQAHKLTDSMNNMFTEYEFNCYLGLKHTAPFIEDAVEEMKRDGIEQAISIVLAPHYSTFSIKAYNERAIRLSEEIGGPVIEPIDQWYDEPKFISYWADQIKETFTKIEDKEKAVVIFSAHSLPEKIIAAGDPYVEQLQHTADLIAAAANIQNYTIGWQSAGNTSDPWIGPDVQDLTRELFEEHRYEAFIYCPVGFVAEHLEVLYDNDYECKVVTDELNAAYFRPNMPNAQSTFIDCLATIVSKKMKEIVDKELILNNN

SEQ ID NO: 3209 - protein, 467 aa, Arabidopsis thaliana
MVVEEENRSMEEGLLQHQNDRDDRRITACVILSTFVAVCSAFSYGCAAGYTSGAETAIMKELDLSMAQFSAFGSFLNVGGAVGALFSGQLAVILGRRRTLWACDFFCVFGWLSIAFAKNVFWLDLGRISLGIGVGLISYVVPVYIAEITPKHVRGAFTASNQLLQNSGVSLIYFFGTVINWRVMAVIGAIPCILQTIGIFFIPESPRWLAKIRLSKEVESSLHRLRGKDTDVSGEAAEIQVMTKMLEEDSKSSFSDMFQKKYRRTLVVGIGLMLIQQLSGASGITYYSNAIFRKAGFSERLGSMIFGVFVIPKALVGLILVDRWGRRPLLLASAVGMSIGSLLIGVSFTLQQMNVLPELIPIFVFVNILVYFGCFAFGIGGLPWVIMSEIFPINIKVSAGTIVALTSWTSGWFVSYAFNFMFEWSAQGTFYIFAAVGGMSFIFIWMLVPETKGQSLEELQASLTGTS

SEQ ID NO: 3210 - protein, 523 aa, Zea mays
MAWARLASRSRLRPAASAAGRSRHASTPAPPPPPSPPTTRTVPAATSAPPLRRLLLLPRHRFADATPSASTAWLLGARWRQGHGRRCFASAAYPAQATPGEASELVDVPLAQTGEGIAECELLRWFVAEGDQVDEFQPLCEVQSDKATIEITSRFKGKVHKIHFVPGDIVKVGETLLKMVVGDSQIVSPDNIVPSAGKSLGVESAVFSSEGNVPGGNLSTPAVRHLAKQYGISINEIVGTGKDGRVLKEDVLNYAVSKGVCKQQSLASEGNIGQVELLEEGKALLDEDFYEDKKILLRGYQRSMVKSMSLAAKVPHFHYLEEINCDSLVQLKTTFQNENKDQTIKHTFLPFLIKSLSMALSKYPMLNSSFIEETNEVVFKGPHNIGVAMATTHGLVVPNIKKVQSLSILEITKELARLHEMASQNRLSAADIEGGTITLSNIGAIGGKFGSPLLNLPEVAIIALGRIQKLPRFDDDENVYPSSIINVTVGADHRVVDGATVARFCNEWKSLVEKPELLLLHMR

SEQ ID NO: 3211 - protein, 484 aa, Agrobacterium tumefaciens
MIKLKNAALLRDACLVNGRWLKAADGKTIAVENPANSMIIGHVPSLSADEVEAAVESANKAFSEWSRRAAKDRAAILRRWFDLMVANADDLGALMTAEQGKPFAEARGEALYAASFVEWFAEEAKRVYGDTIPSPTTDKRITILKQPIGVCAAITPWNFPAAMITRKAAPALAAGCTMIVKPAEQTPLTALALGVLAEEAGVPAGVFQVVTGAARDIGKVFTESDTVRKISFTGSTEVGRLLMAQSAPTIKKLSLELGGNAPFIVFDDADLDAAVEGAIVSKYRNAGQTCVCSNRIYVQDGVYDAFAEKLVKRVESLSVGEGTEPGVLIGPLIDQDAVAKVEDHVADALGKGAKIVTGGKRHALGGTFYEPTVLTGATQAMKVAREETFGPVAPLFRFGTEDEAVAMANDTEFGLAAYFYTENVRRTWRVAEALEYGMVGHNTGLISNEVAPFGGVKQSGLGREGSHYGIDEYLEIKYLCSAIG

SEQ ID NO: 3212 - protein, 326 aa, Brassica napus
  misc_feature (177)..(177): Xaa can be any naturally occurring amino acid
  misc_feature (188)..(188): Xaa can be any naturally occurring amino acid
  misc_feature (269)..(269): Xaa can be any naturally occurring amino acid
MWFFGKKGASGFSARSTAEEVTHGVDGTGLTAIVTGASSGIGVETARVLALRGVHVVMAVRNTGSGAKVKEDIVNRVPGAKLDVMELDLSSMDSVRKFASDYKSSGRPLNLLINNAGIMACPFMLSKDNIELQFATNHLGHFLLTKLLLDTMKNTSRESKRGGRIVNLSSEAHRYSXPEGVRFDKITXTKSSYSSIRAYGQSKLCNILHANELAKQLKEDGVNITANSLHPGAIMTNLGRYFNSYLAGAVGAVAKYVLKTVPQGAATTXCYVALSPQVTGVTGEYFLDSNIAKPISLAKDSELAKKVWDFSTKLTESQSGESSTSN

SEQ ID NO: 3213 - protein, 499 aa, Arabidopsis thaliana
MTMISDLSKDLVEEILSKAPITSLGAVRSTHKQWNALSKGRLLYKAEAKDQFLGFMVMDHRFLSMIFHLNGILKGDGEGFDRPSIREVGDIVNQIDISKVFQCDGLVLCVPSDNSSVVVWNPYLGQTKWIEAREPHDESDMFALGYDKDKNHKILRLYDECYYYYEVYNFKTESWGEEDHLPGWDIDSYNRGVSLNGNTYFLTQEQRAKDKYRVFLLCFNFTTEKFENFIAMPFKYHRKYVGTLSCVGNEKLAALYQRWDTGEMAIWVTTKIESNEVLWSNLFKVDMKPLVRFGFQQCKDEAGSFFIDEEKKLAVVFNLDKKRGKRNNKTRCYHTAYIIGEKGYLKKEVLGEAVEVRKDVYRSALVCSSSYVPSLEKINQIEEEEEDKCKSIKMVDTKRQLETSFGLDFELHEDSCFFIDEEKKLAVVFDLAESKRCKTANAYIIGVQIDDPIARRDKRERNRKWMSKRKEKKRKGTNKQQGLTPMKKKQEVHLLLINR

SEQ ID NO: 3214 - protein, 127 aa, Schizosaccharomyces pombe
MAAVNIIKKRTKPFKRHQSDRFKRVGESWRKPRGIDSCVRRRFRGTISMPKIGYGNNKKTRYCMPNGLKAFLVRNVSDVELLLMHNKTYAAEIAGNVSARKRVEIVEKARALGVKVTNAGAKVRSQE

SEQ ID NO: 3215 - protein, 131 aa, Photobacterium sp. SKA34
MAKIIHSMIRVLDLDASLKFYTEALDLEIAERLDFEEFSLVYLRNEENDMELELTWNEGTKEPYTHGTGYGHIAVAVDDLEDEHAKLTECGYAPLEIKEFFREGTLLAKFFFVQDPDGYKIEFLQRHARYQ

SEQ ID NO: 3216 - protein, 250 aa, Cryptococcus neoformans var. neoformans JEC21
MAPITIKARGILFDLDGTLISSTTICESVWHKWAEVYPVDLTEVFKSSHGIRTRELLRHWLNITDPVELETATEKFETDVLKEAQRLASIGKGGITLLPGVEKLLLALNAASKDAARWAIVTSATNAYATNAITTLSLPRTSHLITADEVSQGKPHPEPYIMGAAALGLKPTDCIVFEDAPSGVKAGVASGARVVAVCTSHKRSALEGLGAHLIVENLSDINLDTEGDEGYQWDHLNYCFHRSVCYILHQ

SEQ ID NO: 3217 - protein, 346 aa, Lycopersicon esculentum
KLSKNKSDRYLPKVGDSLPESIDWREKGVLVGVKDQGSCGSCWAFSAVAAMESINAIVTGNLISLSEQELVDCDRSYNEGCDGGLMDYAFEFVIKNGGIDTEEDYPYKERNGVCDQYRKNAKVVKIDSYEDVPVNNEKALQKAVAHQPVSIALEAGGRDFQHYKSGIFTGKCGTAVDHGVVIAGYGTENGMDYWIVRNSWGANCRENGYLRVQRNVSSSSGLCGLAIEPSYPVKTGPNPPKPAPSPPSPVKPPTECDEYSQCAVGTTCCCILQFRRSCFSWGCCPLEGATCCEDHYSCCPHDYPICNVRQGTCSMSKGNPLGVKAMKRILAQPIGAFGNGGKKSSS

SEQ ID NO: 3218 - protein, 335 aa, Mycobacterium bovis AF2122/97
MTAPPVHDRAHHPVRDVIVIGSGPAGYTAALYAARAQLAPLVFEGTSFGGALMTTTGVENYPGFRNGITGPELMDEMREQALRFGADLRMEDVESVSLHGPLKSVVTADGQTHRARAVILAMGAAARYLQVPGEQELLGRGVSSCATCDGFFFRDQDIAVIGGGDSAMEEATFLTRFARSVTLVHRRDEFRASKIMLDRARNNDKIRFLTNHTVVAVDGDTTVTGLRVRDTNTGAETTLPVTGVFVAIGHEPRSGLVREAIDVDPDGYVLVQGRTTSTSLPGVFAAGDLVDRTYRQAVTAAGSGCAAAIDAERWLAEHAATGEADSTDALIGAQR

SEQ ID NO: 3219 - protein, 997 aa, Arabidopsis thaliana
MTMMSDLSLDLVEEILCRVPITSLKAVRSSCKLWNVLSKNRILCKTEARNQFLGFTIMNHRLYSMRFNLHGIGLNENSEEFIDPSIKPIGNLLNQVEISKVFYCEGLLLCVTRNHSSKLVVWNPYLGEIRWIKTRNDYHIGVTYALGYDNNKNHMILRFFSEQGYYEIYDMNSSDSWDCFYGIPNKGLKCYQPGASLNGNAYFLTEGREVMEGYDCLLGFDFTTKKFGPLLSLSFSHDFIETGRLSCVKGEKLAVLYQRCYTYEMEVWVTTKIEPNAVSWSKFLAVEMEPLTSLKFNDDSGSFFIDEEKKIVVVFDIDESERNNTAYIIGDYGCLKEVDLDEVVNPQESVEVGDRIYSFSPFVCSCSYVPSLVKFKEDAEHERKDKKRKSKRKRTNKDGYDFILCFDFTTERFGQILPLPFKHSFRDTWTLSSVKEEKLAVAVLYWKNTCVMIEIWMTIKIDPNVESWSKFLRVDRKPCIDLRFDDRNDSFFIDEEKKVVVFFSSDKVKTSTAYVIGDNRYLRTVDLEKAANSQESVEVGERVYCFSPLVCSCSYYVPSLVKINHNAGRKRKEKKTKRKSKDKQMKLSNKEPGFCFPQCYVLISSNTWYRDVDGEPIVDFDDFGNDREPSTEPLQDFDEDLADDIGDWDGEGSQTPVYDNDKVAKPRKRLVKKSSSERVTIDVPELIDEDVDDAEFDEFMGGRGGGSTDYDDKVGRKRKKEKERSSSGSGKEKRHKFPNRGERKSEEIDEMWKSIAHNPENDEEGVRTMDDDNFIDDTGLDPSERYGGDAGDRSPTHYPQAEEGEDEDEVNNLFKMGKKKKKTERNPAEIALLVENVMAELEVTAEEDAELNRQGKPAINKLKKLSLLTDVLGKKQLQTEFLDHGVLTLLKNWLEPLPDGSLPNINIRAAILRVLTDFPIDLDQYDRREQLKKSGLGKVIMFLSKSDEETNSNRRLAKDLVDKWSRPIFNKSTRFEDMRNLDEDRVPYRRPPEKNPS

SEQ ID NO: 3220 - protein, 619 aa, Saccharomyces cerevisiae
MVKESIIALAEHAASRASRVIPPVKLAYKNMLKDPSSKYKPFNAPKLSNRKWPDNRITRAPRWLSTDLRDGNQSLPDPMSVEQKKEYFHKLVNIGFKEIEVSFPSASQTDFDFTRYAVENAPDDVSIQCLVQSREHLIKRTVEALTGAKKATIHTYLATSDMFREIVFNMSREEAISKAVEATKLVRKLTKDDPSQQATRWSYEFSPECFSDTPGEFAVEICEAVKKAWEPTEENPIIFNLPATVEVASPNVYADQIEYFATHITEREKVCISTHCHNDRGCGVAATELGMLAGADRVEGCLFGNGERTGNVDLVTVAMNMYTQGVSPNLDFSDLTSVLDVVERCNKIPVSQRAPYGGDLVVCAFSGSHQDAIKKGFNLQNKKRAQGETQWRIPYLPLDPKDIGRDYEAVIRVNSQSGKGGAAWVILRSLGLDLPRNMQIEFSSAVQDHADSLGRELKSDEISKLFKEAYNYNDEQYQAISLVNYNVEKFGTERRVFTGQVKVGDQIVDIEGTGNGPISSLVDALSNLLNVRFAVANYTEHSLGSGSSTQAASYIHLSYRRNADNEKAYKWGVGVSEDVGDSSVRAIFATINNIIHSGDVSIPSLAEVEGKNAAASGSA

SEQ ID NO: 3221 - protein, 112 aa, Brassica napus
SQHHSWTNKKIMDTTRDNRKDMSFRGSAQAPMMSKQEYIRTSSQSSKPRKLVTASYFSLESVVVLVGLTASLLILPLILPPLPPPPFMLLLIPIGDYGSWLMGLGFLWPSFF

SEQ ID NO: 3222 - protein, 135 aa, Brassica napus
  misc_feature (3)..(3): Xaa can be any naturally occurring amino acid
  misc_feature (9)..(9): Xaa can be any naturally occurring amino acid
  misc_feature (19)..(19): Xaa can be any naturally occurring amino acid
  misc_feature (34)..(34): Xaa can be any naturally occurring amino acid
  misc_feature (38)..(39): Xaa can be any naturally occurring amino acid
  misc_feature (41)..(41): Xaa can be any naturally occurring amino acid
  misc_feature (46)..(47): Xaa can be any naturally occurring amino acid
  misc_feature (53)..(53): Xaa can be any naturally occurring amino acid
  misc_feature (57)..(57): Xaa can be any naturally occurring amino acid
  misc_feature (66)..(66): Xaa can be any naturally occurring amino acid
  misc_feature (68)..(68): Xaa can be any naturally occurring amino acid
  misc_feature (72)..(72): Xaa can be any naturally occurring amino acid
  misc_feature (77)..(77): Xaa can be any naturally occurring amino acid
  misc_feature (81)..(81): Xaa can be any naturally occurring amino acid
  misc_feature (86)..(86): Xaa can be any naturally occurring amino acid
  misc_feature (89)..(90): Xaa can be any naturally occurring amino acid
  misc_feature (97)..(97): Xaa can be any naturally occurring amino acid
  misc_feature (103)..(103): Xaa can be any naturally occurring amino acid
  misc_feature (105)..(106): Xaa can be any naturally occurring amino acid
  misc_feature (115)..(117): Xaa can be any naturally occurring amino acid
  misc_feature (119)..(119): Xaa can be any naturally occurring amino acid
  misc_feature (121)..(122): Xaa can be any naturally occurring amino acid
  misc_feature (128)..(131): Xaa can be any naturally occurring amino acid
NAXLMEWTXNDKRRFLHVXSALLDLDRTIHFYTXCFGXXLXRKRDXXEEKYSXAFLXFGPETSNFXVXLTYXYGVRXYDIXQLAFXHFXXSTQDVSXMPEAVXVXXANDTRETCXXXGXAXXVIACGXXXXAYMI

SEQ ID NO: 3223 - protein, 396 aa, Streptomyces avermitilis MA-4680
MAAPQNYLAVIKVIGVGGGGVNAINRMIEVGLKGVEFIAINTDAQALLMSDADVKLDVGRELTRGLGAGANPAVGRKAAEDHREEIEEVLKGADMVFVTAGEGGGTGTGGAPVVANIARSLGALTIGVVTRPFTFEGRRRANQAEDGIAELREEVDTLIVIPNDRLLSISDRQVSVLDAFKSADQVLLSGVQGITDLITTPGLINLDFADVKSVMSEAGSALMGIGSARGDDRAVAAAEMAISSPLLEASIDGARGVLLSISGGSDLGLFEINEAAQLVSEAAHPEANIIFGAVIDDALGDEVRVTVIAAGFDGGQPPSKRDTVLGSSSAKRDEPTPARPAESRPSFGSLGSVTPKEAPEPAPEPVNELPVSPPVPPSRTYSDSAAEELDVPDFLK

SEQ ID NO: 3224 - protein, 220 aa, Thermus thermophilus HB27
MGPVRFAPSILTADLARLGEAIREAEAAGVDWIHLDVMDGVFVPNLTFGPLLVEAVRRVTSLPLDVHLMIVKPERYLEDFAQAGADHITVHFEATYHPHRAVQKVKELGKKAGLAVNPGTPLEAFEPLLPDLDLALLMSVNPGFGGQRYLPTATERLRRLKAMRDRLNPACLIVVDGGINRDTVAEARRAGADVAVAGSALFNDKPVAENLKALRLALLG

SEQ ID NO: 3225 - protein, 362 aa, Photobacterium profundum SS9
MAGTYKIAVLPGDGIGPEVMLQAHKVLDAVEEKFGFTLERSEHDVGGIAIDNHGCPLPESTMKGCEESDAILFGSVGGPKWEHLAPNDQPERGALLPLRKHFQLFCNLRPAQIHSGLEGFSPLRADISERGFDIVVVRELTGGIYFGQPKGREGEGPQEKAYDTEIYHRYEIERIARIAFESAMLREKNVYSIDKANVLQSSILWREVVEEVAKDYPEVTLNHMYIDNATMQLIKDPSQFDVMLCSNIFGDIISDECAMITGSMGMLPSASLNQEKFGMYEPAGGSAPDIAGKNIANPVAQILSAALMLRYSLDEEKAARAIEQAVSQALEAGELTADLAGKGAALSTSEMGDKIAAYIRQA

SEQ ID NO: 3226 - protein, 313 aa, Haemophilus influenzae R2866
MASVVTITLNAAYDLVGRLNRIQLGEVNTVETLGLFPAGKGINIAKVLKDLGVDVAVGGFLGKDNSADFEQMFNKHGLEDKFHRVDGKTRINVKITETEADVTDLNFLGYQISPQVWQQFVTDSLAYCLDYDIVAVCGSLPRGVSPELFADWLNQLHQAGVKVVLDSSNAALTAGLKAKPWLVKPNHRELEAWVGHSLNSLEEIIAAAQQLKAEGIENVIISMGAKGSLWINNEGVLKAEPAKCENVVSTVGAGDSMVAGLIYGFEKGLSKTETLAFATAVSAFAVSQSNVGVSDLSLLDPILEKVQITMIEG

SEQ ID NO: 3227 - protein, 502 aa, Mycobacterium tuberculosis H37Rv
MTTLWQPHRNDYSPIPGRGVHARRGARRPRPRGGRAERPGTGQLTRSGRRALLVGLTAASVGVLYGYDLSAIAGALLSLSEEFELTTREQELLTTTAVLGQIAGALGGGILANAIGRKKSVVLIVAGYAVFALLGATSVSVPMLVVARLLLGVTIGLSVVVVPVYVAESAPAAVRGSLVTAYQLATLSGIVVGYLVGYLLAGSHGWRAMFGLAAAPATLLLPLLWRMPDTARWYLLKGRIADARSALRRIQPEADIDAELADMAAAVDERGGGIGEMVRRPYLRATLFVIALGFLVQITGINAIIYYSPRLFAAMGFAGYFAMLALPAMVQVAGLAAVCASLFLVDRLGRRPILLSGIATMITADAVLITVFANDSDGGTGLVLGFAGVLLFIIGFNFGFGSLVWVYAAESFPSRLRSMGSSPMLTSTLTANAIVAAFSLTMLRVLGGAGVFAVFGTFAVVAFVVVYRFAPETKGRKLEEIRHFWENGGRWPAERSPAADEP

SEQ ID NO: 3228 - protein, 401 aa, Kluyveromyces lactis NRRL Y-1140
MSKLFIPTTNCGKAHETDIYGLVITNPYTVSCSGDGYLKLWNNKLTEDQLAKDHVIKEFVTPMGLHHVSAFESVESNGETVIILSAISFDGKIYFYQIDLKEGKLVKLSLLNADDSKHSYWACQWYISTNPKNPHKFIATTVQGTTKVWNFIIFQEPELDTETGEPLSNSLVYEPHFNFQGKINSQTPRFATAVDVSSTQLIATGFSDGSVVVSQLSTLRPVYNFEGFGLKGVEESSSTIRDIKFSPAGSLLAVAHDSGSYGCVSLYETEFGERIGNFTVPTHGNQTTIASYAHNGWVFSVSFNSTGEYLASAGYDGKIRIWDTKSRERVSTLNVNTTDIEIEEDIVLEDEHGDSLEVPPVLAVSFFDKCVRSGMGGSTNEGICCVCSDRSIRWYREAGGI

SEQ ID NO: 3229 - protein, 514 aa, Photobacterium profundum SS9
MKDQVIIFDTTLRDGEQALSASLTVKEKLQIAYALERLGVDVIEAGFPISSPGDFESVQTIAKHIKNSRVCALSRAVAKDIDVAAESLKVAEAFRIHTFISTSTIHVQDKLRRSYDDVIEMAIAAVKRARNYTDDVEFSCEDAGRTPIDNLCRMVEAAINAGARTINIPDTVGYTLPSEFGGIVAQLFNRVPNIDKAIISVHCHDDLGMSVANSMAAVQAGARQVEGTINGLGERAGNCSLEEIAMIIKTRSDFLGVETNIKHEEIHRTSKMVSQLCNMPIQANKAIVGANAFNHSSGIHQDGMIKNKNTYEIMTPESIGLKSQALNLTSRSGRAAVKNHMDTLGYIDGDYNLDTLYADFLKLADRKGQVFDYDLEALMYFANLRDEDDFFKLNYLSVQSGSIMATTSIKLQCGDEEKCEAAVGNGPVDALYQCIYRLTGYEIALDKFDLTAKGEGEDGLGQADIIANYKGRKYHGTGLATDIVEASGQALLHVINSIYRADQIAEIKERIATV

SEQ ID NO: 3230 - protein, 1059 aa, Magnetococcus sp. MC-1
MKLSHKFILTLLPPILLALFGLGWWHHHTTMAEVTKANERYLQTLLDGFMENALQRRFVILQENNLNDIASFVQTYRREIYADAERIAQKHEVQLIIYDTRGNVQYATSKPITKQPPIELKQLLLPDSTGRLTALPPSGDEATGALYLQQGFSPWRWQILLLASDAQLTAAVRNIRHTTLLVAALLTAAFILLVYGLLRHLVLQPVALLRQASKCIAHHEPLPKLPLTEGDEISHLAIAIAAMSRSIGEYHRHLQTQRNRFETLLAANPDLISLKNRVGIYQVVNPAFCHFLGLPKEAILGQDDARLFTPHQAARIRQADQWVLSSGAPSAQEEEAVGPDNLPLWLHVIRTPITQATGEVSGILTTVRNISARRMAEEALRTAHEGLEQEVAQRTQALRESETRLRIVTENLPAVVWMSDPLLTSMHFVSPAYEQIWGKSRESLLQDPQSLWTSIHPSDRSFVLKRILNSNGQPWEAEYRILHPDGTTRWIREQGAAFRDTHKQILFLIGCAFDVTPLKETERALSTAKQEAESANHAKSAFLATMSHEIRTPLNGITGMIELLQRSALSVEQRQQVETISKCSVVLMDILNDILDLSKIEAGQLVLERAPFSPTQLLLNLLEVMQPQARNKELDLQLNMDEKLPSTMLGDATRLRQVALNLIGNAIKFTPRGWVKISLLVHERIDDIVWVELAVQDQGIGIADEKLVHLFNPFTQADSSITRNYGGTGLGLAISKRLVEAMAGAISVTSIEGKGTHFRVTLPMQVAHTPLPADAFAPQETLALRPLQMLLVEDETVNQQVVCALLEDEGHHVDVANHGEEAVLMCQQRAYQVILMDLRMPKMDGLSATEQIRQQGMNQQTPIIALTADVLKSTLDRCLEVGMQQVLTKPIRLVQLNHALAHIGLPMAPPRPPAQALSEPAPEATESALPTESEEDTCLNLTRLRYLVSNMDQDHLLNIIQAFKTTSENCLSGMQQALENGDEGALRHTAHKLAGSAATLGLQRVMEMAKIMEEHSSQPSVQHNQLSLLRYQVELGFSAIAKETGLSLQMQETEHVASL

SEQ ID NO: 3231 - protein, 406 aa, Escherichia coli K12
MKRAVITGLGIVSSIGNNQQEVLASLREGRSGITFSQELKDSGMRSHVWGNVKLDTTGLIDRKVVRFMSDASIYAFLSMEQAIADAGLSPEAYQNNPRVGLIAGSGGGSPRFQVFGADAMRGPRGLKAVGPYVVTKAMASGVSACLATPFKIHGVNYSISSACATSAHCIGNAVEQIQLGKQDIVFAGGGEELCWEMACEFDAMGALSTKYNDTPEKASRTYDAHRDGFVIAGGGGMVVVEELEHALARGAHIYAEIVGYGATSDGADMVAPSGEGAVRCMKMAMHGVDTPIDYLNSHGTSTPVGDVKELAAIREVFGDKSPAISATKAMTGHSLGAAGVQEAIYSLLMLEHGFIAPSINIEELDEQAAGLNIVTETTDRELTTVMSNSFGFGGTNATLVMRKLKD

SEQ ID NO: 3232 - protein, 413 aa, Listeria innocua
MDRRRVVVTGIGAVTPIGNDAETSWENAKKGVNGVAEMTRLNPDDFPVKIAAELKDFDVEKYLEKKEARKMDRFTHYAIASAEMAVQDSGLIIDDSNATRVGVWIGSGIGGMETFETQYEVFLNRGHRRVSPFFVPMMIPDMGSGQVSIRFGAKGINSTTVTACATATNSIGDAFKVIERGDADAMITGGAEAPITKMSLAGFTANKALSLNPDPETACRPFDKDRDGFIIGEGAGVVILEEYEHAKARGAKIYAEVVGYGATGDAYHITAPAPNGEGAARAMKMAIDDAGLTPDKVDYINAHGTSTPYNDEYETQAIKTVFGEHAKKLAISSTKSMTGHTLGASGGIEAIFALLSIRDNIIAPTIHLENQDEVCDLDYVPNKAREAEVNVVMSNSFGFGGHNATLVFKRIED

SEQ ID NO: 3233 - protein, 153 aa, Triticum aestivum
NKFVQKSRLVPVRNSRDIVDPRGRTKPSPSPLLERAKLRGLRPSARPSLLIVASKKAKKVQTAQPYGPGGGVEFKEGVDASGRVAKGKGVYQFADKYGANVDGYSPIYTPEEWSPSGDVYVGGKTGLFLWAITLAGILLGGALLVYNTSALAS

SEQ ID NO: 3234 - protein, 586 aa, Prochlorococcus marinus subsp. pastoris str. CCMP1986
MALLIKKFGGTSVEDITKIKAIAQSIIQSKEAGNDIVVVVSAMGHSTDHLNKLAESISKNPNSRELDMLLSTGEQVTMALLSMSLNEYGIPAISLTGSQVGIVTESIHGKARILDIKTERIQNYINQGYVVVVAGFQGSTLSHTGSMEITTLGRGGSDTSAVALSTALGAETCEIYTDVPGVLTTDPRIVPNAKLLDIISCEEMLELASVGASVLHPRAVEIARNYGIKLYVKSSQALSNGTLLHSKIKPLALKRGGLELTKTVNSLEVLEKQTVFSISKLPDRPGIAAQIFETLSKANINVDLIIQATHDGKSNDIAFTVNDFELTKTIDQCKLITKQLGGEYDFKKNMTKLSIQGAGIMGRPSVSADLFDTLFQANINVRLIATSEIKVSCVIDIENISKAIRFVSEKFKLSDKQIFINPVIESEDQPEVRGIALDKNQVQVSIRNLPDKPGVAASICLALAENNLIFDTIVQSERLTSLKTKDISFTMSKQDRERANTIFHSLTKKLAGSFIEDGPAIAKVSTVGAGMAFKVGTAGKIFRALANKNINIEMIATSEIRTSCIVLEQDCDQAVNAIHSYFQLDK

SEQ ID NO: 3235 - protein, 1026 aa, Dechloromonas aromatica RCB
MKISPTHAPICEKRPSPARSVFSEGAAWLALGLILAVTAAICALVRETTEEQIYQRFLYRAEQQRSNILFRLEAHAQVLRGAAALFDASETVDRREWRDYIAHLHLAKTLPGIQGIGFSLMVSQRDKAAHERAMRAEGFPDYAITPAGTRERYSSIIYLEPFAGRNLKAFGYDMFAEPVRRDAMEYARDYGEPALSGKVTLVQENQQDVQPGFLIYVPVYRPSMPHETIKERRTALLGFTFSPFRAEDLMRSAVSRDNKDVEIELYDGEIRPERLLFDSHIDQSSASQGRQQVELPIEFGGHQWIALFRSRPEFDSITASQLPISIALIGTLIGLMSFFWLLRKNRFQQSITAYADRLEENETRLRTLINTMPDIVCLKDGAGRWTEANTLLLRLFALESVGYQGMTGGELAAAGHFDYARLAALEASDEQVWLNGERLHDELTIPVEGQHDRIFDIAKVPLFAADGSRHALLTVGRDITERVETEKALRSAERKFRGLIEQSLAGVYIIQGRCFRYVNPYFARIFGYDSPDEIIDQPLFEELVSPQDRQMVANNVRRRLNGEMETLHYSFVGQRKDGSPVDVEVFGTKVDYEDQPALIGVVIDITERKQAEAELKRHRENLEEQVNARTADLLLAKEAAEAANRAKSTFLANMSHELRTPMNAIIGMTHLLIRGNENASQREKLAKVSNAADHLLHLLNDILDLSKIEAERLTLEKIPLRISDIVANAISMAGEKIAAKGLQFNQQISPQLVTTELIGDPLRLRQILLNLLDNALKFTAQGSISLSASVTDETSENLTIRISIEDTGTGIPDEAKDRIFAPFEQVDGSTTRQHGGTGLGLSIVKQLIHLMHGKIEVSSTPGIGSCFTLTARLDKAPSKPRHQATPERPVRAPQPLTLGNKQLLLAEDEPVNREVMLDLLSDIPGLRVDIAENGERAFELASTRHYDLILMDMQMPKMDGLEATRAIRQLSGYAETPILATTANVFNEDRERCIESGMSDFITKPVEPGLLYTKLSSWLAANSGAD

SEQ ID NO: 3236 - protein, 426 aa, Rickettsia akari str. Hartford
MSNQRVNKRVVITGLGLVTPVGLNVSSSWKNIVNGVSGIKTITEFDASKLACKIAGLIDYSEKDGFKLENFTQADNVNRLSKMDKFIHYGVAAATEAVEDSGWLPENEESRDRTGLILGSGIGGLKMIEDTSIKLYQENNGKVSPFFIPASLINLLSGLVSIKYGFSGPNQAAVTACSTGAHAIGDAMRMIKHGYADVMVAGGAEAPVTPVGVAGFVAARALCTKYNDNPEKASRPWDKDRSGFVMGEGAGVVVLEEYEHALNRGAKIYGEVIGYGSTGDAYHMTAPHPEGRGAYRAMRNAMLDAAITPNMIDYINAHGTSTNLGDEIELAAVQKLFLEANPQILMSSTKSSIGHLLGAAGSVEFIFSALAIRDQIAPPTLNLDNPMDEVKIDLVKLKARETKIDYVLSNSFGFGGTNASLVIKRV

SEQ ID NO: 3237 - protein, 91 aa, Prochlorococcus marinus subsp. marinus str. CCMP1375
MSISVTSPCSKSTIEDLGIKNWPIWTCDPSTFPWTYREKETCLILEGEITVTPNGGEPVKFGVGDLIVFPEGMSCTWEVHKAVKKHYRFGN

SEQ ID NO: 3238 - protein, 257 aa, Pseudomonas fluorescens PfO-1
MSYETILLETHGRVGLITLNRPQALNALNAQLVSEVNRALDGFEADANIGCIVITGSTKAFAAGADIKEMADLTYPQIYMDDLFSDSDRVANRRKPIIAAVNGFALGGGCELALMCDFILAGDNAKFGQPEINLGVLPGMGGTQRLTRAVGKAKAMEMCLSGRMIDAVEAERCGIVARIVPSAELLDEALKVAAVIASKSLPITMMVKESVNRAFEVNLTEGVRFERRVFHAAFATQDQKEGMAAFVAKRAPEFQGK

SEQ ID NO: 3239 - protein, 116 aa, Glycine max
  misc_feature (10)..(10): Xaa can be any naturally occurring amino acid
  misc_feature (27)..(27): Xaa can be any naturally occurring amino acid
  misc_feature (47)..(47): Xaa can be any naturally occurring amino acid
  misc_feature (60)..(60): Xaa can be any naturally occurring amino acid
HIPHRAPDLXAKLTFLLVLGLIQALLXTGNWRIYELRDYSKTVRTDXNISRGEPDDDTNXPETELLTIAQFKLRLCTGTDGIPWRDLNSIAMLQRPMVVHMRDTGHTHHFTAYKHD

SEQ ID NO: 3240 - protein, 212 aa, Arabidopsis thaliana
  misc_feature (153)..(153): Xaa can be any naturally occurring amino acid
  misc_feature (173)..(173): Xaa can be any naturally occurring amino acid
  misc_feature (175)..(175): Xaa can be any naturally occurring amino acid
  misc_feature (177)..(177): Xaa can be any naturally occurring amino acid
  misc_feature (182)..(184): Xaa can be any naturally occurring amino acid
  misc_feature (186)..(186): Xaa can be any naturally occurring amino acid
GLSPFFISISRVAKSIDAGDYDYAIAFQERIRIPDEKMTYYEDLAEMYVGDDVSPDFYGWVFPKCDHVAVGTGTVTHKGDIKKFQLATRNRAKDKILGGKIIRVEAHPIPEHPRPRRLSKRVALVGDAAGYVTKCSGEGVYFAAKSGRMCAEXIVQGPQNGKKMIYRRGFREXLXNXENHLXXXRXFMCKFSNPEKTVLNVNSKSTLQRSPL

SEQ ID NO: 3241 - protein, 121 aa, Zea mays
MARTQSAVAVAVVAAVLLLAAAATTSEAAITCGQVSSAIAPCLSYARGTGSAPSASCCSGVRNLKSAASTAADRRAACNCLKNAARGVSGLNAGNAASIPSKCGVSIPYTISTSTDCSRVN

SEQ ID NO: 3242 - protein, 322 aa, Haematococcus pluvialis
TFHKPVSGASALPHIGPPPHLHRSFAATTMLSKLQSISVKARRVELARDITRPKVCLHAQRCSLVRLRVAAPQTEEALGTVQAAGAGDEHSADVALQQLDRAIAERRARRKREQLSYQAAAIAASIGVSGIAIFATYLRFAMHMTVGGAVPWGEVAGTLLLVVGGALGMEMYARYAHKAIWHESPLGWLLHKSHHTPRTGPFEANDLFAIINGLPAMLLCTFGFWLPNVLGAACFGAGLGITLYGMAYMFVHDGLVHRRFPTGPIAGLPYMKRLTVAHQLHHSGKYGGAPWGMFLGPQELQHIPGAAEEVERLVLELDWSKR

SEQ ID NO: 3243 - protein, 592 aa, Daucus carota
MGVTIRNRNYDHGSLPFLQSLLAILLVTTTTLHINGVEAFHEIHYNLQSVGAENVKQVHRTGYHFQPKQNWINDPNGPMYYKGVYHLFYQYNPKGAVWGNIVWAHSVSTDLINWTPLEPAIFPSKPFDKYGCRSGSATILPGNKPVILYTGIVEGPPKNVQVQNYAIPANLSDPYLRKWIKPDNNPLVVANNGENATAFRDPTTAWLDKSGHWKMLVGSKRNRRGIAYLYRSKDFIKWTKAKHPIHSQANTGMWECPDFFPVSLKGLNGLDTSVTGESVKHVLKVSLDLTRYEYYTVGTYLTDKDRYIPDNTSVDGWAGLRYDYGNFYASKTFFDPSKNRRILWGWANESDSTAHDVAKGWAGIQLIPRTLWLDPSGKQLMQWPIEELETLRGSKVKFSRKQDLSKGILVEVKGITAAQADVEVTFSFKSLAKREPFDPKWLEYDAEKICSLKGSTVQGGVGPFGLLTLASEKLEEYTPVFFRVFKAQNTHKVLMCSDATRSSLKEGLYRPSFAGFVDVDLATDKKISLRSLIDNSVVESFGAKGKTCISSRVYPTLAVYENAHLYVFNNGSETITVENLDAWSMKKPLRMN

SEQ ID NO: 3244 - protein, 493 aa, Rhodopseudomonas palustris CGA009
MHVSAAADGLRLAFGQAIGLIRPPAWMMPDMTASAVLRRRPLAALAVLAAVVVGTPAAAQTVTAAPPATFTLQNGLRVVVIPDHRTPVVTQMIWYKVGSADETPGKSGLAHFLEHLMFKGTEKHPAGEFSQTVLKIGGNENAFTSYDFTGYFQRVPRSHLEQMMTFEADRMTGLVLKDENVLPERDVVLEEYNMRVANDPDARLTEQIMAALYLNHPYGRPVIGWHQEIAKLDREDALAFYRRFYAPNNATLVIAGDIEADEVRPLAERIYGTIPAQPAIPPQRIRPQEPTPAGPRTVTLADPRVEQPAVRRYYLVPSAHTGAKGDSAALEVLAQLLGHGSNSYLYRALVIDNPLAITVGANYQGNALDDSYFIVAGTPKPGVDFAAIEKKIDEVIADVVANPVRSEDLERVKTQLIAAAVYAQDNQATLARWYGQALTTGLSVQDVQSWPDRIRAVTSDDVRAAAKQWLDRNRSATGYLVTGPAAKQEEKRS

SEQ ID NO: 3245 - protein, 649 aa, Vigna radiata var. radiata
MEHHKPLLPTSSHAAPTSSTRKDLLFVLCGLLFLSSLVAYGGYRASGVPHAHLSSPTSNHQQDHQSPTSLPSSKWYPVSRGVSSGVSEKSSNLLFAGEGGASEAFPWDNSMLSWQRTSFHFQPEKNWMNDPNGPMYYKGWYHFFYQYNPNGAVWGDIVWGHAVSRDMIHWLHLPLAMVADQWYDKQGVWTGSATILPNGEIIMLYTGSTNESVQVQNLAYPADPSDPLLLDWIKHTGNPVLVPPPGIGAKDFRDPTTAWLTSEGKWRITIGSKLNKTGIALVYDTEDFKTYELKEGLLRAVPGTGMWECVDFFPVSKKNGNGLDTSVNGAEVKHVMKVSLDDDRHDYYAIGTYDDNKVLFTPDDVKNDVGVGLRYDYGIFYASKTFYDQNKDRRILWGWIGESDSEYADVTKGWASVQSIPRTVRLDTKTGSNLLQWPVDEVESLRLRSDEFKSLKAKPGSVVSLDIETATQLDVVAEFEIDTESLEKTAESNEEFTCSSSGGAAQRGALGPFGLLVLADEGLSEYTPVYFYVIKGRNGNLRTSFCSDQSRSSQANDVRKQIFGSVVPVLKGEKFSLRMLVDHSIVESFAQGGRTCVTSRVYPTKAIYGAARLFLFNNATEATVTASLKVWQMNSAFIRPFPFNPDQKS

SEQ ID NO: 3246 - protein, 393 aa, Haloarcula marismortui ATCC 43049
MKLAMIGFGQAGGKIVDKFLEYDKETGSGIVRSAVAVNTAKADLLGLEHIPEENRVLIGQARVKGHGVGADNELGAEIAEEDIDEVQGAIDNIPVHEVDAFLIVAGLGGGTGSGGSPVVAKHLKRIYTEPVYGLGVLPGSDEGGIYTLNAARSFQTFVREVDNLMVFDNDAWRQTGESVEGGYDHINEEIVRRFGVLFGAGEIEAGDNVAESVVDSSEIINTLDGGGVSTVGYASEDVEVSSGGGGLLSRFKGDDSSDDSMDTANTTNRITSLVRKAALGRLTLPCEIEGAERALLVMAGPPEHLNRKGIERGRKWLEEQTGSMEVRGGDYPTNAPKVAASILLAGVHNVPRIKELQQVAIEAQDNIDDIRNQSEDNLEDLVEDDEDELDPLF

SEQ ID NO: 3247 - protein, 243 aa, Triticum aestivum
MVSADAARNVVGIIGNVISFGLFLSPTPVFWRIIKAKDVEEFKPDPYLATLLNCMLWVFYGLPIVHPNSILVVTINGIGLVIEGSYLIIFFLYSTNNKRLKMIGVLAAEAAFMVAVVLGVLLGAHTHEKRSMIVGILCVIFGTIMYASPLTIMGKVIKTKSVEYMPFTLSLVNFLNGCCWLAYALIKFDLYVTIPNGLGAFFGLMQLILYGCYYKRTPKEEKSVELPTSNPAGAGNVSVTVDR

SEQ ID NO: 3248 - protein, 472 aa, Thermoplasma acidophilum
MEFRQAYYDEPLIKDIKSDTSFKLSEDVDENLLPQDMRRTDLKLPQVSEVDVVRHYTRLSQMNYTVDVGIYPLGSCTMKYNPKYADRIASFAEFRNIHPFQPESTVQGTLQIMYELQEFLKKISDMDAVTLQPMAGADGEFTGILIIKKYFEDLHEDRTEIIVPDSAHGTNPASATMGGFDVVEIPSNSEGMVDLNALKAAISKKTAALMITNPNTLGIFEQNITEIAKILHDAGALLYYDGANLNAIFGITSPGLMGFDIVHFNLHKSFATPHGGGGPGAGPVAVKSFLSDFLPVPVVGYDGKRYFLDYGKKKSIGRVSSFYGSFSILLRAWSYVIRNGDDGLKNATIRAVLNSNYLKKKVEGYYEVPYYPLKKHEFVLSTEKTGRRALDIGKYLLDFGIHSPTVYFPLIVKEAMMIEPTETVSKDDLDRYADVLISALKVPEDDLKSRPRNTAVSRIDEVKAARDLKVRW

SEQ ID NO: 3249 - protein, 523 aa, Candida albicans SC5314
MYQHQDQTQHQYYQQYNSYNPSIEDLIASSDDKRYQNGGIGNSLQRPPVAGLPYISSQVNPNTSSANLSKLTSNINNYGYNNNNNSHIQLHTPPLSSNPSFTSFQNLNYPLSPLSKPTSPEPILSAASVTTSNFLASSFFSWLPPIDVKIVSFCIGWYLCSIISSNSTKLILNDFKFPVTLTQFQFSASFTFCLVFLNIVKVNPESISSKLPPGFIPSMTDTNRISLSEFITPTRLIIQTTLPMGMFQFIGHITSHKATSLIPVSIVHTIKSLSPIITVLIYRFLFGKSYRMRTYVTLIPLCCGIMLTCYKKSHTSNQNNVPGAGSSVINNNLDKINTNNNYSTGLIFAFISMIIFVSQNIFAKKRLTVESTNAIPMNNKSSLRINSNKVDKLTILFYCSIIGFILTCPIYFVTEWMNYNAFGAISLLQLNSYVMSLVLLNGLSHFVQSLLAFQILGMVSPINYSIANILKRIFIILISFIWESKQFSNSQSIGLVITLFGLYCYDRWGTVSNSGSASNPGKY

SEQ ID NO: 3250 - protein, 433 aa, Thermoplasma acidophilum
MDELLSMLNFLGMKDPEELFSDIPKSVRKKSIGIGGGLDEYRVIDRAMEIGRKNKTDMINFLGNGIYDRVIPEAVNYILSKPEFLDSYTPYQPEISQGMLQSMFEYQSLISDLMGMDVTNASMYDGYSALGEAARMAYRINGHSKILVPESSYDSKISVLRNYIWGLNMKIMKYRIGEDGMIDLDDLSSKIDSDTSAIVVENPNGYGILDKNIFGVKDIKKDAVLISYVDPISLGVVKPPGEYGSDIAVAEGQQLGIPMNFGGPLLGLMSFKMEHIRRSPGRIIGESIDSNGKRAYVMTLQTREQHIRRAKATSNICSNQALLTLAASAYLSIMGSTGLRKVALLTIKHSRMIKEKLSSIGVKPYFSTESFSDVMFRLERDVMEALASKNILGGLKLRQLISDTPMKDATFFTVTEKTDAAAIEKLAAALEVI

SEQ ID NO: 3251 - protein, 513 aa, Ashbya gossypii ATCC 10895
MLATAQVRTLRALVRCYSSLPLTVQVRLPNGNSYEQPTGLFIDGKFVPSHQAKTFEVIDPGTEEEITHVYEAREEDVDAAVAAAKRAFLPWSRADPEVRAQCLFKLADLIEKHQETLANIESLDNGKSLLCSRGDVALVARYLRTCGGWADKIYGNVMETGPDHFSYTRREPLGVCGQIIPWNFPLLMWSWKIGPALATGNTVVLKPAESTPLSALYVCNLANEAGIPKGVMNIVPGFGKIVGEHLCTHPDVKKVAFTGSTATGRHIMRTCAETVKKVTLELGGKSPNIVFADADIDKAVKNIGFGIFYNAGEVCCAGSRVYVQDSVYDEVLEKFKQFSENLKVGNPFEEGVFQGAQTSQMQVDKILSYVDIGVKEGARIVAGGERLGRKGFFIKPTIFADVNENMRVVKDEIFGPVVTVSKFSTVDEVIAMANNSQYGLAAGIHTTDINKAIDVSNQIKAGTVWVNTYNDFHPNVPFGGFGQSGIGSEMGVQALDNYTQTKAVRMAIDHVKV

SEQ ID NO: 3252 - protein, 105 aa, Thermoanaerobacter tengcongensis MB4
MVIEVNKDNFDEVVKKEEKLVLIDFWGPKCEQCLALMPEVEKLEQKYADKVKFCKLDASQNRRLCISLKVLGLPTFQLYKNGEKVDEISKDVTIEKIEEMIKRHI

SEQ ID NO: 3253 - protein, 308 aa, Thermoanaerobacter tengcongensis MB4
MSTLYDCLIIGGGPAGLSAAIYASRGKLNTVVFERSKIGGQAAITDDIENYPGSVEEATGPKIVKRMREQAESFGTCFVMEEVKKVELSEKIKKVITTKGCYEGKTVIIATGAEHMKLNVPGEEEFIGKGVSYCATCDADFFTDLDVVVVGGGDSAVQEALYLTKFAKNVTIIHRRDKLRANKCLQDKAFKNPKIKFLWDSVVERIEGDGIVEKVIVRNVKTGELKEVKTDGVFIFIGMKPSTEIFKGLIEMDERGYILTDENMRTNIEGVFAAGDCRAKLLRQIVTAAADGAIAAVAAERYIEELEC

SEQ ID NO: 3254 - protein, 304 aa, Methanococcus maripaludis S2
MKLRIGTRGSTLAMVQTEYIAGLLNDLDIETEIIIVKTTGDKDQNKKLADLGIGVFTKELDNKMLENEIDIAVHSLKDVPTLWSDELQITATPKRESPDDIIIWRKDCDFDIEHDELNVGTSSIRRTSFLQFTNPNLTPKLLRGNVATRINKLRNGEYDTIVMAKAGLIRQGIDLSEFNYKKLDILPAPAQGVIGVASRKADAKINQILEKICDKKTYIEATAERWALKEYGGGCQAPFGAFAIYDTEEGILNLRCELVDEQGTIKRVKSNEGFVICTTDDVELSKELGARVGASFKEIETFTY

SEQ ID NO: 3255 - protein, 570 aa, Candida glabrata CBS 138
MAGEKVELSSMDSAIEIRHVNQHAKEISSENKSESYDDNKEFEGSNRVVIKPVNDEDDVSVMINFNQGVSHFIIMLTFVASLSGFLFGYDTGYISSALISIGTDLDNKELTYGEKEITTAATSLGALIFALVAGFSVDIFGRKPCLMFSNIMFLIGAILQVTAHKFWQMTAGRFIMGFGVGIGSLIAPLYISEIAPKMIRGRLTVINSLWLTGGQLIAYGCGAGLNHVHNGWRILVGLSLIPTVLQFVFFIFLPDTPRYYVMKGDYEKAKSVLKRSYNGVSDELIDRKIEELLALNQSIPGKNHVERTWNAVKELHTKPANFRALIIACGLQGIQQFTGWNSLVYFSGTIFESVGFKNSSAVSIIVSGTNFIFTLVAFFCIDKIGRRNILIIGIPGMTVAHVMSAIAFHFIGIKFVGNTAIVEHSGFSSWGIVIIVFIIMFAAFYALGIGTVPWQQSELFPQNVRGVGTAFATATNWAGSLVIASTFLTMLQNITPTGTFGFFAGLCVVSFFFCYFCYPELSGLELEEVQTILQDGFNVQASKELAKKRKRQIAVLKKAKHQPTEEIIEE

SEQ ID NO: 3256 - protein, 160 aa, Pyrococcus furiosus DSM 3638
MKKKYKKVVVGGTFDRLHLGHKALLRKAFEVGEIVYIGLTSDEMIKEKQYSERILPYEKRLLDLIKFLEVNKYRNYRIMKIHNAIGFTTKIKSLEAIVVSEETYKGAVLVNKAREELGLRPLDIVVIPIIRSRLGCKISSSLIRAGLIDPFGNPIRREEK

SEQ ID NO: 3257 - protein, 446 aa, Thermoanaerobacter tengcongensis MB4
METDVLVIGGSAGGILAALSVKKTYKDKKVTVIRMAERVMVPCGIPYIFGTLKDTSKNVIPDSMLTNAGVELVIDEVVSIDRQNKKVSTRKNGDISYKKLILATGSLPIVPTFIPGYDLDNVFTIKKDEEYLKFVQQKINEAEDVVVVGGGFIGVEMAEQVQLLGKNVTIIEVADKLLWQAFDPEFSDMAEAKLKEHGIKVLTGTKVTKFIGEKEVKEVEIHTGERIKADVVIVAMGVKPNTKLAEEAGIKLNEKGAITVDEYMRTNDPDIFAVGDCAEKKCFFTRKNVPILLASIAANEAKIAGVNAFELRLVRENKGTISAFSTKIYNTAFAAAGLTETQARAEGFDIVIGEFNTIDKHPGTLPNTMNVKIKLIFSRYSGVILGAQLAGGDNVGEMINILSLAIQKGTTASELTTFQVATHPLLTSSPVSYPISSAALDALSKI

SEQ ID NO: 3258 - protein, 230 aa, Candida glabrata CBS 138
MSSKRDIQISKALSYLLRHGAVKENLPFDVNGYIEVERVLNHQRLKSHKCTLEDLHRVVDTNDKKRFNIKLSDDGQTELICAVQGHSIDRIKPDEEVLEVIDTAEKLPKNIIHGTSVRNAIQILKSGSIKRMNRNHIHLSIGITEKDKEVISGMRKSSRVHIYILSEPKILEHLKLYRSMNSVILTPDDINKSLFLLVKIRAASGSDESKDERELINLLDENGIKHEYFN

SEQ ID NO: 3259 - protein, 229 aa, Listeria innocua
MKLVLIRHGQSEWNKLNLFTGWHDVDLSEEGVVEAMTAGKRIKEAGLEFDVAFTSVLTRAIKTLNYVLEESDQMWVPVHKSWRLNERHYGALQGLNKQETAEKYGADQVQKWRRSYDTLPPLLEENDERQAKNDRRYQLLDTHAIPSGENLKVTLERVIPYWMDTIAPEIKAGRRVVIAAHGNSLRALVKFLEGISDDEIMELEIPTGVPLVYELNDDLKPVNKYYLDK

SEQ ID NO: 3260 - protein, 572 aa, Photobacterium profundum SS9
MEMLSGADMIVRSMIDQGVKHIFGYPGGSVLDIYDALHEKSDIEHVLVRHEQAAVHMADGYARATGDVGVVLVTSGPGATNAITGIATAYMDSIPMVVFSGQVMSNLIGNDAFQECDMVGISRPVVKHSFLIKKAQDIPEIIKKAFYIASSGRPGPVVIDIPKDMLNPAETYPYQYPESIAMRSYNPTTQGHKGQIKRGLKALLSAKKPVLYVGGGAVISECDQQILKLAESLNLPVVNTLMGLGAFPGTHKNCLGMLGMHGTYEANMAMHNADLIFGIGVRFDDRTTNNVDKYCPNATIMHIDIDPSSISKTIAVDIPIVGSAETVLDCMLKMLDEQESSNDQEAIASWWADLESWRSRKCLSYETNNERIKPQQVIESLYKLTNGDAYVASDVGQHQMFAALYYPFDKPRRWINSGGLGTMGFGLPAAMGVKFALPDAEVVCVTGDGSIQMNIQELSTALQYDIPVKIINLNNRFLGMVKQWQDMIYQGRHSHSYMDSVPDFAAIAEAYGHVGVRISDPAKLDSELEKALAMKDKLVFVDISIDETEHVYPMLIRGGSMSEMWLSKTERT

SEQ ID NO: 3261 - protein, 179 aa, Oryza sativa
  misc_feature (110)..(110): Xaa can be any naturally occurring amino acid
  misc_feature (117)..(117): Xaa can be any naturally occurring amino acid
  misc_feature (155)..(155): Xaa can be any naturally occurring amino acid
  misc_feature (169)..(169): Xaa can be any naturally occurring amino acid
MAPTVMASSGTSVAPFQGLKSTAGLPVSRRSTNSGFGNVSNGGRIKCMQVWPIEGIKKFETLSYLPPLTVEDLLKQIEYLLRSKWVPCLEFSKLGFVYRENHRSPGYYDXRYWTMWXLPMFGCTDATQVLKELEEAKKAYPDAFVRIIGFDKRQXQCQLISFIAYKPPXGCEESGGKLS

SEQ ID NO: 3262 - protein, 340 aa, Arabidopsis thaliana
MGLKEDVLRGLYEYGYEKPSAIQQRAIMPILQGRDVIAQAQSGTGKTSMIALSVCQVVDTFGSDKTHACIGGKSLGEDIRKLEHGVHVVSGTPGRVYDMIKRRSLGTRAINLLILDESDEMLSRGFKEQIYDVYRYLPPDIQVCLVSATLPHEILEMTSKFMTDPVKILVKRDELTLEGIKNFFISVEKEEWKFETICDLYDTLIITKAVIFCNTKRKVDYISEKMRSSNFTVSSMHGDMPQKERDEIMNQFRTGESRVLITTDMFARGIDVDQVSLVINYDLPNNRELYIHRIGRSGRFGRKGVAINFVKIDEIKILRDIEQYYSTQIDELPKNIADLI

SEQ ID NO: 3263 - protein, 676 aa, Candida glabrata
MSHIEFLERAGCSQYADLFEEYSLTDINDLMHIDRDILLEIGVKKLGDRIRILKESKKLQEPKDDAKHVQQLQELISNISELSTTSTNINEEVITERHCVIFILNDGSAKKVNISGCFNADSIKKRLIKRLPSNLLAVNTDGQTTQESSDYDVFIVDYSKNVLRLLYDIELVTICHSNDRVEKNRLIFVSKDQTPTDRAINASKKLYLKTITALNHIESYYDAQSGMPNTPVTQDGTLRIHKEGKDKLRKIFDQRPPSEFISTNIAGYFPHADTKRLEKALRESYRQSARISMKSNNSRHISSESNRVGDILLKHSNAVDMALLQSLDNNNAPSSKPEVIPPSTPQEEDNEGKIKLMEETESIDDYYMNSDEEHGTVSLPTKIVTPKNWLKGARIGSGSFGTVYLGMNAQTGELMAVKQVEIKPAIAATADANVEDKNAEKNVAKAPSTNLHRKMIDALQHEMSLLKELQHENIVTYYGSSQEGGNLNIFLEYVPGGSVSSMLSNYGPFEEPLIVNFTRQILIGVAYLHRKNIIHRDIKGANILIDIKGCVKITDFGISKKLSPLNQENQDKRTSLQGSVYWMSPEVVKQTATTSKADIWSTGCVVIEMFTGKHPYPDFSQMQALFKIGTNVTPEIPSWASPQGRDFIRKTFELDYQRRPTAIELLQESWLESHII

SEQ ID NO: 3264 - protein, 808 aa, Geobacillus kaustophilus HTA426
MKRKLVLIGNGMAGVRCIEEILKLDREAFEITIFGSEPHPNYNRILLSKVLQGDTRLDDITLNSWEWYERNGIRLFVGETVTEVDIKRRLVRTDRGRVVEYDELIFATGSNPFILPVPGADLPGVTAFRDIQDCERMIEYAKTYKKAAVIGGGLLGLEAARGLLHLGMDVDVIHIFDYLMERQLDPTASKLLQRELEKQGMNFLLRKETAELFGNGRVEGVRFKDGTSIAADLVVMAVGIRPNVELARKSGIEVNRGIVVNDYLETSVPHIYAVGECAEHRGVVYGLVAPLYEQGKVLAQAICGRKGKPYEGSVVSTQLKVSGVDVFSAGEFMDVEGTESIKLYDEARSVYKKVVVREGKIVGAVLFGDTSEGRKLFDMIQRGDSLEALSLSLLAPASSGGKGSLVAAMADTDVVCGCNGVTKGAICQAIAEHGLKTVAEVRDYTNASRSCGGCKGLVAELLEHMLGEEANRYAVKETICGCTDLSREEVLEAIEQRRLMTVKEVMSVLGWKNEEGCSKCRPALNYYLGMLYPGEYDEEAESLFVNERLHANIQADGTYSVVPRIYGGVTTAEQLRNIADVAEKYNVPMIKITGGQRIDLLGVKKEDLPRIWADLGMPSGYAYAKALRTVKTCVGKQFCRFGTQDSTGLGIRMEQTFERLKTPHKVKMAVSACPRNCAESGIKDVGVVGVEGGWEIYVGGNGGTHLRAADLLCTVKTEDEVIEMTGAFLQYYRESAHYLERTSKWVERVGLEHIREVLFDVETRRALLERLHKALSATKDPWREIVENERLQQLLFRDIGDKEPVPVE

SEQ ID NO: 3265 - protein, 185 aa, Magnaporthe grisea 70-15
MRPLTDTETQTLLAKLANYTGNSLKSLIAPLEDGDRYVFRLHKDRVYYVKLSIANLATTIARDKLMSLGTCLGKFTKSGKFRLHITALPILSEHARYKMWVRSNGEMPFLYGGNVVKAHVGRQTDDCPEHQGIVVYNMQDVPLGFGLTAKSTADARRLDPTGITCFRQSDCGEYLRDEDALFATG

SEQ ID NO: 3266 - protein, 509 aa, Arabidopsis thaliana
MLLHLLLLLCLSSSLKVQASVHEYRSERFVSKGNAFVFHGGSEGIYSSSPSDNFTSDSDSVSFIRFEKIKFQRPEEVSNRSSLSIHAVVFEVEDRENIGGSAYGGQRAVCCTSDLAKLGVCSHGDVIYRPSAKDSGWPQVFGVSLAENEFSVILPTRSIQVTRTGMYNLYFIHCDSDLKDLVVEGKTIWKNPTGYLPGRMAPLMYFYGFMSLAFVLLGIFWFSQCARFWREVLPLQNCLTLVITLGMCEMALWYFDYAEFNETGIRPTVITIWAVTFGSIKRTSARIIILMVSMGYGVVRPTLGGFTSKVIMLGVTFFIASEILELMENVGAVSDLSGKARLFFVLPVAILDAFFIIWIFKSLSATFKKLQTRRLLVKLDIYRKFTNALAVDILVSLGWICYELYFKSKDVYNEHWQNAWIIPAFWQLLSFSLLIVICSLWAPSQNSTRYAFSGSSGDTSAEFEKDDYTLTLIKPSPIPSHEVKNLSETRLLPADEGEPEKDLEEDKRE

SEQ ID NO: 3267 - protein, 309 aa, Listeria innocua
MTKKVGLLVMAYGTPYKDEDIERYYTDIRHGHKPSEEMIADLRGRYHAIGGLSPLAKITEAQAYGLEKALNDAQDEVEFKAYIGLKHIEPFIEDAVEAMHKDGIEEAISIVLAPHYSSFSVEAYNKRAKDAADKLGGIHIQAINDWYKQPKFIQMWADRINETAKQIPAEELIDTVLIVSAHSLPEKIKQHNDPYPDQLQETADLIFDKVAVPHYALGWQSEGKTGEPWLGPDVQDLTRELYGREKYKHFIYTPVGFVAEHLEVLYDNDYECKVVTDEVGAAYHRPPMPNADPEFLEVLRTVVWDAYTK

SEQ ID NO: 3268 - protein, 188 aa, Brassica napus
MNSLAIRVSKLLRSSPPLLHPNHLLHGRSWFSTGPIDEEGLEEDFEETISERPELQPQGVDPRKGWGFRGVHRAIICGKVGQAPLQKILRNGRTVTIFTVGTGGMFDQRLMGATNQPKPAQWHRIAVHNEVLGSYAVQKLAKNSSVYVEGDIETRVYNDSISSEVKSIPEICIRRDGKIRLIKSGERH

SEQ ID NO: 3269 - protein, 181 aa, Rumex obtusifolius
MASSIMSSATVARPSAAQATVIAPFTGLKNIATFPTTRKSSDLSFPSNGGKVRCMQVWPPEGKIKFETLSYLPPLSEADLLAQINYLLINGWVPCLEFDVGPGAVYREHHHSPGYYDGRYWTMWKLPMFGCTDATQVVAELEEAKKAYPHAFVRIIGFDNVRQVQCVSFIAYKPPRAEGTY

SEQ ID NO: 3270 - protein, 810 aa, Lens culinaris
MTSIATKDEASSSSSPSILTSKWTNHVFVSFRSEDTRQGFTDHLFASLERRGIKTFKDDHDLKRGEVISVELNKAIQESMFAIIILSPNYASSTWCLDELQKIVECSKSSGQTFFPIFHGVDPSDVRHQRGSFAKAFRKHEEKLRKDRNKIERWRDALREVASYSGWDSKGWLVEMFMLISFYLEFPKHETIITCFLYRLVALFTYRLMQVSFPSLCRKEASLVETIAEHIHKKLIPKLPVCKDNLVGIDSRIEEIYSLLGMRLSDVRFIGIWGMGGIGKTTIARSVYDAIKDEFQVSCFLADIRETISRTNGLVRIQTELLSHLTIRSNDFYNIHDGKKILANSFRNKKVLLVLDDVSELSQLESLAGKQEWFGSGIRVIITSRDKHLLMTHGVNETYKAKGLVKNEALKLFCLKAFKQNQPKEEYLSLCKEVVEYARGLPLALEVLGSHFHGRTVEVWHSALEQMRNVPHSKIHDTLKISYDSLQPMERNMFLDIACFFKGMDIDGVMEILEDCGYYPKIGIDILIERSLVSFDRGDRKLWMHDLLEEMGRNIVCQESPNDPGKRSRLWSQKDIDQVLTKNKGTDKIQGIALNLVQPYEAGWNIEAFSRLSQLRLLKLCEIKLPRGSRHELSASPLGTQYVNKTSRGLGCFPSSLKVLDWRGCPLKTPPQTNHFDEIVNLKLFHSKIEKTLAWNTGKDSINSLFQFMLLKLFKYHPNNSSILIMFLENLKSINLSFSKCLTRSPDFVGVPNLESLVLEGCTSLTEIHPSLLSHKTLILLNLKDCKRLKALPCKIETSSLKCLSLSGCC

SEQ ID NO: 3271 - protein, 186 aa, Triticum aestivum
LAWVAAEVWTLGGKNVSVEGSWDNWKSRKPMQKSGKDHSLLLILPSGVYRYRFVVDGERRCFPDLPCETDAMGNAVNLLDVHDFVPESVESVSEFEAPPSPESSYSFQAPEEKDFANEPPALPSQLHLGVLNSQNSEEICARPQHIVLNHLFIEKGWGAHPLVALGVTHRFESKYVTVVLYKPIER

SEQ ID NO: 3272 - protein, 215 aa, Mycoplasma pulmonis
MKYIAPSLLNLKKDQRLNIANELLENGIKWIHYDVMDGKFVPNHAIEIEEIIHIKTNAKKHIADAHLMVENPLYYFEKLWDKVEYLTFHFEALKDENEIWKIIQKYKSKVKIGISLKPETKIEKLDPFLKDIDLVLIMSVEPGKGGQKFIDSSLEKIAYIKEKINKQNLNLVIQVDGGINNITAKQAFKSGGDVLVAGTYLVFEPTKEKIASLLD

SEQ ID NO: 3273 - protein, 616 aa, Triticum aestivum
MGSHGKPPLPYAYKPLPSDADGERAGCTRWRVCAVALTASAMVVVVVGATLLAGFRVDQAVDEEAAGGFPWSNEMLQWQRSGYHFQTAKNYMSDPNGLMYYRGWYHMFFQYNPVGTDWDDGMEWGHAVSRNLVQWRTLPIAMVADQWYDILGVLSGSMTVLPNGTVIMIYTGATNASAVEVQCIATPADPTDPLLRRWTKHPANPVIWSPPGVGTKDFRDPMTAWYDESDDTWRTLLGKSDDNNGHHDGIAMMYKTKDFLNYELIPGILHRVERTGEWECIDFYPVGRRTSDNSSEMLHVLKASMDDERHDYYSLGTYDSAANRWTPIDPELDLGIGLRYDWGKFYASTSFYDPAKKRRVLMGYVGEVDSKRADVVKGWASIQSVPRTIALDEKTRTNLLLWPVEEIETLRLNATELSDVTLNTGSVIHIPLRQGTQLDIEATFHLDASAVAALNEADVGYNCSSSGGAVNRGALGPFGLLVLAAGDRRGEQTAVYFYVSRGLDGGLHTSFCQDELRSSRAKDVTKRVIGSTVPVLDGEAFSMRVLVDHSIVQGFAMGGRTTMTSRVYPMEAYQEAKVYLFNNATGASVTAERLVVHEMDSAHNQLSNMDDHSYVQ

SEQ ID NO: 3274 - protein, 359 aa, Hortaea werneckii
MAEFVRAQIFGTTFEITSRYTDLQPVGMGAFGLVCSAKDQLTSQAVAVKKIMKPFSTPVLSKRTYRELKLLKHLRHENIICLSDIFISPLEDMYVVTELLGTDLHRLLTSRPLEKQFIQYFLYQILRGLKYVHSAGVVHRDLKPSNILINENCDLKICDFGLARIQDPQMTGYVSTRYYRAPEIMLTWQKYDVEVDIWSAGCIFAEMLEGKPLFPGKDHVNQFSIITELLGTPPDDVIATICSENTLRFVQSLPKRERQPLKNKFKNADPQAIELLERMLVFDPRKRVKAGEALADPYLAPYHDPTDEPEAQEKFDWSFNDADLPVDTWKIMMYSEILDFHNVDANAEQAAHNNDTVAG

SEQ ID NO: 3275 - protein, 135 aa, Haemophilus influenzae 86-028NP
MQILHTMLRVGDLDRSIKFYQDVLGMRLLRTSENPEYKYTLAFLGYEDGESAAEIELTYNWGVDKYEHGTAYGHIAIGVDDIYATCEAVRASGGNVTREAGPVKGGSTVIAFVEDPDGYKIEFIENKSTKSGLGN

SEQ ID NO: 3276 - protein, 348 aa, Wolbachia sp. wNaw
QALEKSLCDKKIQLGINLTKGLGAGALPDVGKGAAEESIDEIMEHIKDSHMLFITAGMGGGTGTGAAPVIAKAAREARAAVKDRAPKEKKILTVGVVTKPFGFEGVRRMRIAELGLEELQKYVDTLIVIPNQNLFRIANEKTTFSDAFKLADNVLHIGIRGVTDLMVMPGLINLDFADIETVMSEMGKAMIGTGEAEGEDRAISAAEAAISNPLLDNVSMKGAQGILINITGGGDMTLFEVDAAANRVREEVDENANIIFGATFDQAMEGRVRVSVLATGIDGRNNKSETSPISQSEDSEKEKFKWPYSQSESTQDKTLETKPAEQVSEGAKWGSNIYDIPAYLRRKK

SEQ ID NO: 3277 - protein, 346 aa, Rickettsia rickettsii
MLGYMKKRIAIVLFNLGGPKNLKSVKPFLFNLFYDKAIINLPNPLRYIIAKIISITREKKSQKIYSLIGGKSSLLQETEEQKLALTEKLKQLIKEDFAIFINMRYSAPFAKEVIGQIKKYNPSEIILLPLYSQFSSTTTGSSVKNFLQNLDIDIPIKTICCYPLEKDFIKAHVSLIKEKLYDKNFRILFSAHGLPEKIIKAGDPYGFQIKETVQAIVKELNIKDLDYKITYQSRVGPIEWLKPNTEDEIELAGKLKKDIIIVPISFVSEHVETLVELDIEYKLIADKYEIQYTRIPTLGTNKIFINSLTNILLRFINKVDTNLVMSSSSTRICPNEFTKCLCKLTS

SEQ ID NO: 3278 - protein, 220 aa, Yersinia pseudotuberculosis IP 32953
MLVECKGFLFDLDGTLVDSLPVVERAWIGWAQRRGVNPSKVLDFIHGKQAITSLRHFMPGASEAEIQDEFLALEQIEANDTEGVTALPGAVALLTRLNELAIPWAIVTSGSIPVASARRAAGCLPEPKVFVTAELVKQGKPAPDAYLLGAERLGLAPADCIVVEDAPAGILSGLAAGCQVIAVNAPTDTPKLDQVDLVLHSLEQLVVDATAHGAVVRLLP

SEQ ID NO: 3279 - protein, 815 aa, Haemophilus influenzae R2846
MRVLKFGGTSLANPERFSQAAKLIEQAHLEEQAAGVLSAPAKITNHLVALSEKAALNQSTDTHFNEAIEIFYNIINGLHAENNQFDLNGTKALIDAEFAQIKGLLEEIRQAGKVEDAVKATIDCRGEKLSIAMMKAWFEARGYSVHIVDPVKQLLAKGGYLESSVEIEESTKRVDAASIAKDKVVLMAGFTAGNEKGELVLLGRNGSDYSAACLAACLGASVCEIWTDVDGVYTCDPRLVPDARLLPTLSYREAMELSYFGAKVIHPRTIGPLLPQNIPCVIKNTGNPSAPGSIIDGNVKSESLQVKGITNLDNLAMFNVSGPGMQGMVGMASRVFSAMSGAGISVILITQSSSEYSISFCVPVKSAEVAKTVLETEFANELNEHQLESIEVIKDLSIISVVGDGMKQAKGIAARFFSALAQANISIVAIAQGSSERSISAVVPQNKAIEAVKATHQALFNNKKVVDMFLVGVGGVGGELIEQVKRQKEYLAKKNVEIRVCAIANSNRMLLDENGLNLEDWKNDLENATQPSDFDVLLSFIKLHHVVNPVFVDCTSAESVAGLYARALKEGFHVVTPNKKANTRELVYYNELRQNAQASQHKFLYETNVGAGLPVIENLQNLLAAGDELEYFEGILSGSLSFIFGKLEEGLSLSEVTALAREKGFTEPDPRDDLSGQDVARKLLILAREAGIELELSDVEVEGVLPKGFSDGKSADEFMAMLPQLDEEFKTRVATAKAEGKVLRYVGKISEGKCKVSIVAVDLNNPLYKVKDGENALAFYTRYYQPIPLLLRGYGAGNAVTAAGIFADILRTLQH

SEQ ID NO: 3280 - protein, 347 aa, Wolbachia sp. wMic
QALEKSLCDKKIQLGINLTKGLGAGALPDVGKGAAEESIDEIMEHIKDSHMLFITAGMGGGTGTGAAPVIAKAAREARAVVKDKGAKEKKILTVGVVTKPFGFEGVRRMRIAELGLEELQKYVDTLIVIPNQNLFRIANEKTTFADAFQLADNVLHIGIRGVTDLMIMPGLINLDFADIETVMSEMGKAMIGTGEAEGEDRAISAAEAAISNPLLDNVSMKGAQGILINITGGGDMTLFEVDSAANRVREEVDENANIIFGATFDQAMEGRVRVSVLATGIDSCNNKPEASSVNQNKIPAKEKNFKWPYNQIPISETKEYASTEQTNERVKWGSNVYDIPAYLRRKK

SEQ ID NO: 3281 - protein, 124 aa, Arabidopsis thaliana
  misc_feature (13)..(14): Xaa can be any naturally occurring amino acid
  misc_feature (25)..(25): Xaa can be any naturally occurring amino acid
  misc_feature (37)..(37): Xaa can be any naturally occurring amino acid
  misc_feature (55)..(55): Xaa can be any naturally occurring amino acid
  misc_feature (65)..(65): Xaa can be any naturally occurring amino acid
TGASGIRSCIMVXXMIGPVPITANXALMSCGTVNGNXLAGCIAYLPREGAPLTQXGCCTGVTNLXKNMAQYNPQDRQQACRCLQSAAKAVGPGLNTARAAGLPSACKVNIPYKISASTNCNTVR

SEQ ID NO: 3282 - protein, 170 aa, Zea mays
MGAAESVPETSIHEFTVKDCNGKEVSLETYKGKVLLVVNVASKCGFTETNYTQLTELYQKYRDKDFEILAFPCNQFLRQEPGTDQQIQDFACTRFKAEYPVFQKVRVNGPDAAPVYKFLKASKPGLFGSSRIKWNFTKFLVDKDGKVIERYGTSTAPMAIEKDIQKALEE

SEQ ID NO: 3283 - protein, 212 aa, Candida glabrata CBS 138
MVQFMEIKDAIEHFKQNKFVIVMDDEDRENEGDLICAAANVTPEHIAFLVRHSSGYVCTPMSNKIADRLDLPLMRDNLKCESADDDRHGTAYTITVDVSEGTTTGISAHDRALTCAKLADPSAKPKDFLKPGHICPLRAKDGGVITRQGHTEAAVDLCRLSGLPEVGVICELVNDRDGSMMRLNDCAEFGKKFDIPIITIQSLIKYIKENNL

SEQ ID NO: 3284 - protein, 308 aa, Borrelia burgdorferi B31
MGFKGYILSIVFNGKDFANKYYLMLKEFLKQHNLRDKIALKVVLANDEPASNLYVSIKSRVAKEIGLNVEVIKFSANSVQSDILEVIDRENKNLSTDGIIVQLPLLKGMDLNSILNSIVYSKDVDGLSFVNLGKMILGDKKGFIPCTALAVLKILRDEGIKTLGKTVVVVGRSPLVGRPISILLSSKPYDATVIVCHSKSIYLDVYLRQADIVISAVGKPRLIDKSMLCGKPYVIDIGISEIETDNGKILSGDTDFDNIKECVKFITPVKGGIGPVTVLMLMFNTIKAHLINNRMFDVLNRLEKLLEV

SEQ ID NO: 3285 - protein, 282 aa, Azoarcus sp. EbN1
MDSLPGKPLSLLERLSALLSREPEDRGELMALLHSAFERNLLDADALSIIEGTLQMSDLQVSDVMVPRSQMEVIGVDDAMDKIASFVIETGHSRFPTVGESKDDVVGIFLAKDLLRYFVGQEFELRDALRPAVFVPETKRLNVLLRDFRVSRNHMAIVVDEYGGVAGLVTIEDVLEQIVGEIEDEYDSDLAGDNIRLMQDGRYRVKATTEIADFNTAFATNFSDADVDTIGGLVIRALGRLPQRGDTVILADVKVQVLRADSRRVYTLLVEHAVPVADARQA

SEQ ID NO: 3286 - protein, 348 aa, Wolbachia sp. wForm
QALEKSLCDKKIQLGINLTKGLGAGALPDVGKGAAEESIDEIMEHIKDSHMLFITAGMGGGTGTGAAPVIAKAAREARAAVKDRAPKEKKILTVGVVTKPFGFEGVRRMRIAELGLEELQKYVDTLIVIPNQNLFRIANEKTTFSDAFKLADNVLHIGIRGVTDLMVMPGLINLDFADIEPVMSEMGKAMIGTGEAEGEDRAISAAEAAISNPLLDNVSMKGAQGILINITGGGDMTLFEVDAAANRVREEVDENANIIFGATFDQAMEGRVRVSVLATGIDGRNNKSETSPISQSEDSEKEKFKWPYSHSESTQDKTLETKPAEQVSEGAKWGSNIYDIPAYLRRKK

SEQ ID NO: 3287 - protein, 451 aa, Leuconostoc mesenteroides subsp. mesenteroides ATCC 8293
MKVTKFGGSSLANGQQLQRVYDIIRADDDRKVVVVSAPGKRFKDDRKVTDLLISYAQATLADEDTTEIIETIKHRYHSIGEYFELPDYELADLDEQIEHLARKHYRSFDYLYAAFAAHGEYLNAQLIAKVFNHLGMPARFVDPKEIGLVVDDNARSATFDAASYTTIGELDLSTSERLIVPGFFGYTKNGDMATFSRGGSDITGAIMARGLRADLYENFTDVSAIYAVNPSIVEHPAAIQQMTYDEMRELSYAGFAVFHDEAIIPAIQGGIRINIKNTNDPDAPGTFIVPPTEVQQTRPVTGIANSNRFAALYLHRYLLNKQVGFTLRILEILKRHNISYEHMPSGIDDLTIIFDKTMLTQEQVDNMLSDIAAEIKPDTLKWIPSYGIIMVVGEGMRNRVGALTEIVAPLKERNISLQMVNQGASEISIMLGIQPDLSDSAVEAIYTNIFK

SEQ ID NO: 3288 - protein, 202 aa, Prunus persica
MASYEKQYGATPTDEYGNPIRRTDEYGNPLGHHTTTTGTTAATTGAGGYDPHDFAATTVAGQGQGVHGHDYDRKGHHGVTGAVLHRSGSSSSSSSEDDGLGGRRKKKGLKEKVKEKLPGGTKTDTTYGGTGTTGQHHQEKGTMDKIKEKLPGTGGHRADDPYPSQTHTTATTTPYGGTAYTEEHQEKKGIMDKIKEKLPGQH

SEQ ID NO: 3289 - protein, 958 aa, Photorhabdus luminescens subsp. laumondii TTO1
MTQTLSQLENQGEFIRRHIGSSAEQQKEMLATVGASSLNDLTQKIVPRDIALPEPPDVGGGATEQQALAELKAIASQNKRYQSYIGMGYAPAVLPPVILRNLLENPGWYTAYTPYQPEVSQGRLESLLNFQQVTIDLTGLDIASASLLDEATAAAEAMAMAKRISKLKNADRFFVADDIHPQTLDVVRTRAETFGFDVIVDKAEKVLELDGVFGVLLQQVGTTGEVHDYADLIAQLKQRKIIVSVAADLMALLLLTAPGKQGADMVFGSAQRFGVPMGYGGPHAAFFASRDEFKRSMPGRIIGVSRDAAGNTALRMAMQTREQHIRREKANSNICTAQVLLANIAAMYAVYHGSKGLKRIAGRIHRLTDILAVGLQKAGFTLRYKTWFDTLTVEVADKAAVLARAEKAEINLRTDTYGAVGITLSEATRRDDVIKLFSVLTGTDDKLDVEALDKELMTESHSIPASMLRSDEILLHPNFNRYHSETDMMRYMHRLERRDLALNQAMIPLGSCTMKLNAAAEMLPISWPEFNELHPFCPPEQAQGYQQMISQLSHWLVQLTGYDVVCMQPNSGAQGEYAGLLAIRRYHESRGEGHRHICLIPSSAHGTNPASAHMAGMTVVVVSCDKEGNIDLVDLREKAEESGNELSCIMVTYPSTHGVYEETIRQVCEIIHQYGGQVYLDGANMNAQVGITAPGFIGADVSHLNLHKTFCIPHGGGGPGMGPIGVKAHLAPFLPGHSVVQMDGLTEQRAVSAAPFGSASILPISWMYIRMMGSQGLKQASQTAILNANYIAARLKNDYDVLYTGHNGYVAHECILDIRPLKEEFGISEMDIAKRLIDYGFHAPTMSFPVAGTLMVEPTESESKVEIDRFVDAMLAIRAEIGKVAKGEWSLEDNPLVNAPHVQAELVSDWSHSYSRETAVFPTLETKANKYWPAVKRLDDVYGDRNLHCSCAPVSDYQ

SEQ ID NO: 3290 - protein, 108 aa, Methanothermobacter thermautotrophicus str. Delta H
MRKKFKRQEYARYKKLGEKWRRPRGRTSKMRRYEKGKPAMPAIGYRKPSEVRGLHPSGYEDVLVSNMRELEALDPEKQAARIASAVGARKKTLMLEKARELGIKVLNP

SEQ ID NO: 3291 - protein, 171 aa, Zea mays
MVKYSTEPTNPTKSTKAMGRDLRVHFKNTRETAFALRKLSLTKAKRYLEDVIAHKQAIPFRRYCGGVGRTAQAKSRHSNGQGRWPVKSARFILDLLKNAESNAEVKGLDVDTLYVSHIQVNQAQKQRRRTYRAHGRINPYMSSPCHIELILSEKEEPVKKEAESQIATRNA

SEQ ID NO: 3292 - protein, 463 aa, Rickettsia akari str. Hartford
MSFLRKKSFESVKEIGSSSGLSKTLGALDLILLGLGAMIGTGVFVVTGIIAAKYSGPAVMLSYAIAGITCIFVALVYTELAAMLPTSGSIYTYSYVAFGEVFAWMIGSVIILELGVAAGIVAAGWSGYVQGILAAGGINLPKELTTVPTNGGIINLPAFLISVFIGFILYLGTKDSKRLNAILVFIKMVAIFVFILAAAPHFDVTNWSNFMPFGFSNVLVGASILFLAFTGFGTIATAAEECKNPKRDIMIGIIGSLVLTTIVYVTMAGLVTGIAHFDQLNNDQPLAYALTINNSKIGSAIVATGAVCGMMTVLMMNIYGTSRIFYAIARDGLLPKSFAKLHPKYDSPYITIIIFASLSAILGGFCSTELLTQFTSMGALIDYITVTIIVVLFRVKLPDAQRPFKCPLVFIIVPFILIACAYLLFIQIYDGEFNILMAGRALIYWFITIFILYIIRSFFMTKE

SEQ ID NO: 3293 - protein, 618 aa, Magnaporthe grisea 70-15
MKTVSTSDRLAELRGLMRARSIDVYIVPTEDAHSSEYIAPCDGRREFISGFSGSAGTAVVTNDKAALATDGRYFNQAATELDNNWELLKQGQPDVPTWQEWTADQAAGGKTVGVDPTLLSSSEAKALQEKIKSKGGNDLVAISDNLVDLVWGRHKPSRPSNPIAFLPKKYSGKDTEPKLKELREVLEKKKVFGFVISTLDEIAWLFNLRGSDIPYNPVFFSYAVVTADNATLYVDASKLSEESHAYLKENKVDIRPYESIFEDSEVLAKSLKPTEDQGEESKVKKLAISNKTSWALKLALGGDGAVDEIKSPVCDAKAIKNETELEGMRQCHIRDGAALIEYFAWLEDQVANKKATLNEVQAATKLENLRAKHEDFVGLSFTTISAVGANAAVIHYKPEEDSCATIDADSVYLCDSGAQFLDGTTDTTRTLHFGKPSEAERKAYTLVLKGNMALDMAIFPKGTTGFALDPFARQFLWQEGLDYRHGTGHGVGSYLNVHEGPIGIGTRKHYAGVPLAPGNVTSIEPGFYEDGSYGIRIENIAMIREVETKHMFGDKPYLGFEHVTMVPYCRRLIDESLLTPREKQWLNDYNKLILDKTSGFFKDDNLTMAWLERETQPY

SEQ ID NO: 3294 - protein, 969 aa, Prochlorococcus marinus subsp. pastoris str. CCMP1986
MNPKSNTDLFIDRHLGLNDNDEKKMLQKLGFNNIDEFIHQVIPEDIQLKEKCSDVLPKGCSEIEALNELEEISNKNHKFRSLIGLGYYGTHTPKVIQRHVLENPRWYTAYTPYQAEIAQGRLEALFNFQTLICELTGFSIANASLLDEGTAASEAMTMSFSSRKNKSSNTFLVDENVFDHTFNVLLTRAKPLGIKLKRFNQKYFNNHDDVFGLLIQLPGKNGDLFDPTFLISQAHKAEIVVTSIIDPLAQVLIKPIAQFGVDIAVGSLQRFGVPMGFGGPHAAFFACTEKYKRLIPGRIVGQTLSKNGEQSLRLALQTREQHIRREKATSNICTAQSLLAIISSFYATYHGSLGLTKMAKRLVVLRRYLESLLSELGLKIPLGSRFDSFDIYCEESEKIHKEALKNGFNFRILPLGSSIEESKGFGISLDELTDKNEIHKIVNCVANGLGRKEDLTHITLNNCFQFEGIPLRNKEWMQQNVFENYQSETDLMRYIFKLAEKDFSLVDGMIPLGSCTMKLNSAAELSPISWANLSSIHPFAPANQTNGYSKIISDLEKWISDLIGLNSVSFQPNAGSQGEFAGLLAINSYFSSKGDLLRKKCLIPQSAHGTNPASAVMAGFDVVTIKCDSEGNISYEDLLNKVQEFDNTIGALMLTYPSTHGVFELKIREICDLIHSVGAFVYLDGANLNAQVGLCRPGDYGVDVCHLNLHKTFCIPHGGGGPGVGPVATSETLSPFLPSHSLKDNTFSQFGYSVSSSQHGSASILPISWMYIKMAGQRGLRKASSHAILSANYIANTLKNKFKILYKGQNNCVAHECILDFRELKSKTGLSVNDIAKRLIDYSFHAPTISWPVPETIMIEPTESESLTELNRFCEAMILISEEIEEIENNINLRNNNLISNAPHTINELIADNWNYPYSKEKAAYPYKGKFEHKFWSSVSRIDNAYGDRNLICSCNVNDKDFLDDKKCA

SEQ ID NO: 3295 - protein, 304 aa, Gluconobacter oxydans 621H
MSMLSPEKPSEPAKIIDGKGIARALTDQVGREVAKFVEQGNTIPGLAVVLVGNDPASEVYVKNKAIQTHRVGMRSFMHMLPQSTSQDELLDLIAQLNANPKIHGILVQLPLPAQIDPVAVTNAIAPHKDVDGLGEVNAGRLSLGIDGIVPCTPLGCLMLLQSVHKDMTGMHAVVIGASNLVGKPMAQLLLKENCTVTVAHIHTRNTKELAREADILVVATGKSELVRGDWIKPGATVIDVGITRVPAENGKTRLVGDVAFDEAFPIAGHITPVPGGVGPMTIACLLHNTLQAARATQAVADASS

SEQ ID NO: 3296 - protein, 461 aa, Arabidopsis thaliana
MATSNLRRHLSASRLRLNRFISTSSSYHSHRRVVVTGLGMVTPLGRGVETTWRRLIDGECGIRGLTLDDLKMKSFDEETKLYTFDQLSSKVAAFVPYGSNPGEFDEALWLNSKAVANFIGYAVCAADEALRDAEWLPTEEEEKERTGVSIGGGIGSICDIVEAAQLICEKRLRRLSPFFIPKILVNMASGHVSMKYGFQGPNHAAVTACATGAHSIGDATRMIQFGDADVMVAGGTESSIDALSVAGFSRSRALSTKFNSSPQEASRPFDCDRDGFVIGEGSGVIVLEEYEHAKRRGAKIYAELCGYGMSGDAHHITQPPEDGKGAVLAMTRALRQSGLCPNQIDYVNAHATSTPIGDAVEARAIKTVFSEHATSGTLAFSSTKGATGHLLGAAGAVEAIFSILAIHHGVAPMTLNVKNPDPIFDKRFMPLTTSKKMLVRTAMSNSFGFGGTNASLLFASI

SEQ ID NO: 3297 - protein, 429 aa, Zea mays
HFGCRVMAQGINFPDFIGAVGGHDGGVDFGGNFCDMAFYQKLGEGTNMSVDSLNSMQTSMHGGSIAMSVDNNSSVGSNSDSRTGMLGHPGLKGPAIVGSYSVGHSIFRPGRVSHALSEDALAHALMDNKFPTETLKDYEEWTIDLGKLHLGMPFAQGAFGKLYRGTYNGMDVAIKLLERPEADPEKAQLLEQQFVQEVMMLATLRHPNIVKFIGACRKPLVWCIVTEYAKGGSLKNFLSKRQNRSVPLKLAVKQALDVARGMAYVHGLGFIHRDLKSDNLLISGDKSIKIADFGVARIEVKTEGMTPETGTYRWMAPEMIQHRPYNQKVDVYSFAIVLWELVTGNVPFANMSAVQAAFAVVNKGVRPAIPHDCLPALAEIMTMCWDTNPEVRPPFAEIVRMLEQVEVEVLTTVRKARFRCCIAQPMTLD

SEQ ID NO: 3298 - protein, 112 aa, Prochlorococcus marinus str. NATL2A
MKKIEAIIRPFKLEDVKIALVNAGIVGMTVSEVRGFGRQKGQVERYRGSEFTVEFLQKLKVEVVVPDEKSEIVLKAIADAAKTGEIGDGKIFVSPIDSVVRIRTGDRNEIAL

SEQ ID NO: 3299 - protein, 285 aa, Glycine max
  misc_feature (50)..(50): Xaa can be any naturally occurring amino acid
  misc_feature (91)..(91): Xaa can be any naturally occurring amino acid
  misc_feature (101)..(101): Xaa can be any naturally occurring amino acid
  misc_feature (113)..(113): Xaa can be any naturally occurring amino acid
LLFFEALLQAKEDLKEVDKEITGGELADATNMSIIQVRKAIEVGRAARNXLIKHILRLGLFVINRYFQDFASLPEGSFQVGGKLPGFFEEXERKDPKRRLXLSTYSLFGIRHXIVRSITLSSFTRVSFGLERVRVDIQRTKLKLTFELQRSPTEEELVERIGISLERYHEVMKASKPILSLHSRHITTQEEYINGITDVDGVNGDNRRQLAVLRLALDDVLDSLKPKESLVIRQRYGLDGKGDRTLGEIAGNLNISREIVRKHEVKALMKLKHPARLDYLRRYVV

SEQ ID NO: 3300 - protein, 149 aa, Cynara scolymus
IGHASTSTRMRSGRMYVRAAPEGLSEKIASSIESAKESCAEDLASGECVAAWDEVEELSAASSHARDKAKDTDPLETYCKDNPETDECRTYEDLIDAIHVFSVLLRYCLVDYLFYIIIAELLVVMYDTNMLYLGHIYQKKKKVLVDAWP

SEQ ID NO: 3301 - protein, 95 aa, Salmonella enterica subsp. enterica serovar Typhi str. CT18
MQLNITGHNVEITEALREFVTTKFAKLEQYFERINQVYVVLKVEKVTHISDATLHVNGGEIHASAEGQDMYAAIDGLIDKLARQLTKHKDKLKQY

SEQ ID NO: 3302 - protein, 319 aa, Clostridium perfringens str. 13
MKKIAVLTSGGDAPGMNAALRAVTRMALHHGLEVMGVQRGYAGLINGELFKMDRKSVSEIINRGGTILRTARCLEFKQEEVREKAAQILKAYGVEALVVIGGDGSFMGAKLLSKLGVKTVGLPGTIDNDLSYTDYTIGFDTALNTVVDAINKLRDTSTSHERVSIVEVMGRNCGDLALYAGIAGGAEAIIVPEMPFDKDELIKTILEGRTNGKTHSIIVVAEGVGGSAELAKEIESVTGIETRATILGHIQRGGSPTADDIVLASRMGAKAVEVLLEGKTSKVIGIKENRIFDMDIDEALDIERSFDESLYEMANAINK

SEQ ID NO: 3303 - protein, 408 aa, Pyrococcus furiosus DSM 3638
MLEKLLEQAGIKLDFDGEEEKKSEIVDEFSGYKINIAVVGVGGSGNNTISRLYDLGVQGADLIAMNTDAQHLAITKAHKKVLLGKHITQGKGSGGDPKVGYLAAEASAQEIAAAVDGYDLVFITAGMGNGTGTGAAPVVARIVKETARNNGRFQEPLVVSVVTFPFKTEGTVRIEKAKWGIQRLLEYSDTVIIIQNDKLLELVPKLPLQSAFRFADELIARMVKGIVETIKLNSIVNIDFADVYSIMKGGGPALIGIGESDSNNRAVDAVNNALTNKMLDVEFGSGEKALVHFTIGPDVSLEEINKAMEVVYEKLSEKSEIKWGAMVDPEMGKTVRAMVIMTGVRSPYILGNVNALTDSSSWVVPKDRRLIGDPRIEKMFPDFNGSRAGRKRPSVGDAILKELGFKEL

SEQ ID NO: 3304 - protein, 215 aa, Tabernaemontana divaricata
LPSFVDWRSKGAVNSIKNQKQCGSCWAFSAVAAVESINKIRTGQLISLSEQELVDCDTASHGCNGGWMNNAFQYIITNGGIDTQQNYPYSAVQGSCKPYRLRVVSINGFQRVTRNNESALQSAVASQPVSVTVEAAGAPFQHYSSGIFTGPCGTAQNHGVVIVGYGTQSGKNYWIVRNSWGQNWGNQGYIWMERNVASSAGLCGIAQLPSYPTKA

SEQ ID NO: 3305 - protein, 354 aa, Chlorella vulgaris
MNTVVENSLEQARPVFPFTAIVGQEEMKLALILNVIDPKIGGVMIMGDRGTGKSTTVRALVDLLPEIQVVADDPFNSDPKDPELMSQEVRGRLQRKETVPITTKKISMVDLPLGATEDRVCGTIDIEKALTEGVKAFEPGLLAKANRGILYVDEVNLLDDHLVDVLLDSAASGWNTVEREGISISHPARFILVGSGNPEEGELRPQLLDRFGMHAQIGTVKEPNLRVQIVEQRANFDAAPLEFRETYQDSQAQLGNQILEARNLLPQIQLEYDYRVKISQICSELDVDGLRGDLVTNRASKAIASFEGRTEVTPEDIFRVIPLCLRHRLRKDPLESIDSGDKVRDIFKRVFGYE

SEQ ID NO: 3306 - protein, 112 aa, Synechococcus sp. WH 5701
MKKVEAIIRPFKLEDVKVALVNAGIVGMTVSEVRGFGRQKGQVERYRGSEFTVEFLQKLKLEVVVDDDRVDTVVTAIQDAARTGEIGDGKIFISSVGTVIRIRTGDRDSTAI

SEQ ID NO: 3307 - protein, 176 aa, Zea mays
MAAASSATSVHDFTVKDSSGKDVDLSVYRGKVLLIVNVASQCGLTNSNYTQQAQLYEKYKNQGLFLIHCSCFEILAFPCNQFGGQEPGTNEEIAQFACTRFKADYPIFDKVDVNGNNAAPIYKFLKSSKGGLFGDSIKWNFSKFLVDKEGRVVDRYAPTTSPLSIEKDIKKLLGSS

SEQ ID NO: 3308 - protein, 131 aa, Triticum aestivum
  misc_feature (71)..(71): Xaa can be any naturally occurring amino acid
  misc_feature (82)..(82): Xaa can be any naturally occurring amino acid
  misc_feature (92)..(92): Xaa can be any naturally occurring amino acid
  misc_feature (106)..(106): Xaa can be any naturally occurring amino acid
MAPTVMASSATSVAPFQGLKSTAGLPVSRRSNGASLGSVSNGGRIRCMQVWPIEGIKKFETLSYLPPLSTXEALLKQVDYLXIRSKWVPCLXFSKLGSSSVKHNAXPGYYDGRYWDNVGSCLCFGCTDATQ

SEQ ID NO: 3309 - protein, 153 aa, Methanothermobacter thermautotrophicus str. Delta H
MAKVKYAYKEEDRSGTARASATHLKISPKHAVEICREIRGMELEKAKKYLEEVIRMERPVAFKRYNRKVGHRRGLNGWASGRYPVKAAGQILKVLENAEANAEYKGLDTEKLRIIHISSHRGPVIRGWIPRAFGRATPFNTPTTHVQIVLGEA

SEQ ID NO: 3310 - protein, 482 aa, Saccharomyces cerevisiae
MSAFVRVVPRISRSSVLTRSLRLQLRCYASYPEHTIIGMPALSPTMTQGNLAAWTKKEGDQLSPGEVIAEIETDKAQMDFEFQEDGYLAKILVPEGTKDIPVNKPIAVYVEDKADVPAFKDFKLEDSGSDSKTSTKAQPAEPQAEKKQEAPAEETKTSAPEAKKSDVAAPQGRIFASPLAKTIALEKGISLKDVHGTGPRGRITKADIESYLEKSSKQSSQTSGAAAATPAAATSSTTAGSAPSPSSTASYEDVPISTMRSIIGERLLQSTQGIPSYIVSSKISISKLLKLRQSLNATANDKYKLSINDLLVKAITVAAKRVPDANAYWLPNENVIRKFKNVDVSVAVATPTGLLTPIVKNCEAKGLSQISNEIKELVKRARINKLAPEEFQGGTICISNMGMNNAVNMFTSIINPPQSTILAIATVERVAVEDAAAENGFSFDNQVTITGTFDHRTIDGAKGAEFMKELKTVIENPLEMLL

SEQ ID NO: 3311 - protein, 328 aa, Gloeobacter violaceus PCC 7421
MSRTVIIGSRDSQLALVQTHWVRDELQRAHPDIRFEIVEMKTQGDKILDVALAKIGDKGLFTKELESAMLEKRTDLAVHSLKDLPTALPPGLILGAITEREDPSDAVIVRRGLEAAGLADLPEGAVVGTSSLRRLAQLKHHYGERLRFQDIRGNLNTRLRKLDEGRYDAIVLAVAGMRRLGWSERISEVLSPDISLHAVGQGALGIECREADGEILDLLTVLNHPPTARRCRAERAMLRALEGGCQVPIGVYTELDDSGRLTLQGIVASLDGRNMARACRSGPGDAPEALGRAVAEDLKAAGAQAILDQIFVLVRSPGVIAPGAAPAS

SEQ ID NO: 3312 - protein, 421 aa, Corynebacterium flavescens
MALVVQKYGGSSLESAERIRNVAERIVATKKAGNDVVVVCSAMGDTTDELLELAAAVNPVPPAREMDMLLTAGERISNALVAMAIESLGAEAQSFTGSQAGVLTTERHGNARIVDVTPGRVREALDEGKICIVAGFQGVNKETRDVTTLGRGGSDTTAVALAAALNADVCEIYSDVDGVYTADPRIVPNAQKLEKLSFEEMLELAAVGSKILVLRSVEYARAFNVPLRVRSSYSNDPGTLIAGSMEDIPVEEAVLTGVATDKSEAKVTVLGISDKPGEAAKVFRALADAEINIDMVLQNVSSVEDGTTDITFTCPRADGRRAMEILKKLQVQGNWTNVLYDDQVDKVSLVGAGMKSHPGVTAEFMEALRDVNVNIELISTSEIRISVLIREDDLDAAARALHEQFQLGGEDEAVVYAGTGR

SEQ ID NO: 3313 - protein, 488 aa, Geobacillus kaustophilus HTA426
MDMTMTTGVQTLKNYIGGQWVESRSGKTEAVPNPATGEVLAYVPISSREELDEAVRAAKEAFKTWRKTPVPRRARILFKYQQLLVEHWEELARLVTLENGKSYNEAYGEVQRGIECVEFAAGAPTLMMGRQLPDIATGIESGMYRYPIGVVGGITPFNFPMMVPCWMFPLAIACGNTFVLKPSERTPMLANRLAELFKEAGLPDGVLNIVHGAHDVVNGLLEHPDVKAISFVGSQPVGEYVYKTAAAHGKRVQALTGAKNHSIVMPDADLNVAVREIINAAFGSAGERCMAASVVVAVGEIADELVEKLVAAANELKIGNGLEESVFLGPVIREAHKQRTVKYIELGEKEGAILVRDGRKDAAVQDNGYFIGPTIFDRVTTDMTIWKDEIFAPVLSIVRVETLDEAIEVANKSPFANGACIYTRDGGNVRKFREEIDAGMLGVNLGVPAPMAFFPFSGWKNSFYGDLHANGMDGVEFYTRKKMMTSRW

SEQ ID NO: 3314 - protein, 494 aa, Rubrobacter xylanophilus DSM 9941
MNVEREGRVETRMIERLFVGGEWVGEASTGRTFEVENPASGRVIAVLPDGGGGEMRRAVEAAVAAQPGWEEATAYERASVLWRAAGLMRERAEHLARVMTLEQGKPLAESRGEISYAASFVEWFAEEGKRVYGESVPSSFRDKRILVLKRPVGVAAAITPWNFPAAMITRKLAPALAAGCAMVVKPSELTPLSALELAKIFEEAGLPRGLLSVVVGTDPGDITAPLMEDGRVRKLSFTGSTEVGKHLMRQAAKTMKRLSLELGGHAPFIVFEDADLEAAVEGALVSKMRNMGQTCVCANRIFVQKSVLEPFAERLVERMGRMKVGDGLQEGVSVGPLIEERALRKVERHVEDARQKGARVLLGGSRLSSGGGYFFAPTVLCGADESMLVFREETFGPVAALASFESEQEVVERANATPYGLAGYYYTRDVGRVMRLAEKLRYGILGANDGLPSTAQAPFGGLKESGFGREGGHWGIEEYLDVKYLSLGGLGSSS

SEQ ID NO: 3315 - protein, 288 aa, Thermus aquaticus
MILVNRETRVLVQCITGREGQFHTKQMLDYGTKIVAGVTPGKGGTEVLGVPVYDTVKEAVAHHEVDASIIFVPAPAAADAALEAAHAGIPLIVLITEGIPTLDMVRAVEEIKALGSRLIGGNCPGIISAEETKIGIMPGHVFKRGRVGIISRSGTLTYEAAAALSQAGLGTTTTVGIGGDPVIGTTFKDLLPLFNEDPETEAVVLIGEIGGSDEEEAAAWVKDHMKKPVVGFIGGRSAPKGKRMGHAGAIIMGNVGTPESKLRAFAEAGIPVADTIDEIVELVKKALG

SEQ ID NO: 3316 - protein, 345 aa, Pyrococcus horikoshii
MYKVAVIKGDGIGPEVIDAAIRVVKSVTDKIKFYEFEGGLSVFKKYGVPIREEDLEEIRKMDAILFGATTTPFDVPRYKSLIITLRKELDLYANLRIIPNFKLRKEIIIVRENSEGLYSGEGAYDSNKVVDFRIITRKGAERIAKFAVKLAKDRSTFLTFVHKANILESDRFFRKIVLDIARKEDVKVREEIVDSFTIKLVKDPWNLGIILSENMFGDILSDLATIHAGSIGIVPSGNYGEDIALFEPIHGSAPDIAGKGIANPIGAILSAAMMLDYLGLDGSIIWKAVGRYVRRGNLTPDMEGRATTLEVTNGIISEIYRLDEYEIDEVWRDEVRLGRILLEIS

SEQ ID NO: 3317 - protein, 594 aa, Medicago truncatula
MKSMASSQSSNNLWVLLGLGLAGIYVLTRKLKQTVKEDLGAFIQKLQLLPPPPPAPPKAPHPLTSLTFAISDLFDIEGHVSTFGHPEWARTHEPASSTSPAVSTLVQSGATCIATTVLDNLSYGISGENKHFGTPSNPAIPARVPGGSSSGAAVAVAANFVDFSLGVDTSGGVRVPAGFCGILGFRPSHGAVSHGGIIPVSTSLDTVGWFAKDPDILRRVGHILLQAPFVMQRSPRQIIIADDCFQHLNVPLDRSSQVVIKATEKLFGKQVLKHINLEGYIRSKVPSLKACSGQKANGELKSSSLILLANIMQFLQRHEFGHMHDEWMSIVKPDLHPAVSAQLHEKFDVSEVEMENSKSVRSEMRVAVNSLLKDEGILVIPTVADPPPKLGGKEILSQDYQSRAFSLLSIASISGCCQVTVPLGFYDKYPVSVSLIARYGGDRFLLDTLKTMYTSLQEQADIAATSKASRNVVSKEQSAEIAKEKGNQAYKDKQWQKAIGFYTEAIKLCGNNATYYSNRAQAYLELGSYLQAEADCTKAISLDKKSVKAYFRRGTAREMLGYYKEAIDDFKYALVLEPTNKRAASAAERLRKLF

SEQ ID NO: 3318 - protein, 192 aa, Triticum aestivum
  misc_feature (132)..(132): Xaa can be any naturally occurring amino acid
  misc_feature (164)..(164): Xaa can be any naturally occurring amino acid
MFADAGFSFSAYSPPGPGYSYSPLFSSSPSSFSSPSASTHAAPPPPPLPLPLPLLHHQQQQHQAAAAAAAMYHHLGDMGQPSLISEYDLGAEGDLFKAPEPIIEEPVLALDPVAAAISMMSGGDNSMDDSIXRLDMGLSWVLYECEKVLMEKSVIEETISWLVXLRVPMLNVGGRAGGPRAFIVRGVLLAGR

SEQ ID NO: 3319 - protein, 235 aa, Rickettsia akari str. Hartford
MKDIEYWDKNFSGCKYSDKLIERLLLLNTQVKQPIDIREVKKGIYYARKYHGEQMRQSGDPYYSHPIAVTIMVAEFVAKEAPKLFTFRMLQAALLHDTIEDTELTEEMISNIFDEEVAMHVEGLTRIKACGKISSAKSLILLIKQKRYDTALIKLFDRIHNLQTLEAKSPEKAHKIIKETLKSFLVLSEILEIPSVSELIYTECYKNNLKFNINSTLNKIINFDSFPFSQNKLLP

SEQ ID NO: 3320 - protein, 125 aa, Magnetococcus sp. MC-1
MKLLSIDDSRTIRRVISGVGAMLGFEVLEAENGMVGLKVLEESSHEVGLILLDWNMPGLNGLEVLKKVKADERFMHIPVMMVTTEGEKDNIIRAIQAGACHYMTKPFSQEEMAGRIMEAIGMGGM

SEQ ID NO: 3321 - protein, 112 aa, Haemophilus influenzae 86-028NP
MKKIEAMIKPFKLDDVRESLSDIGISGMTITEVRGFGRQKGHTELYRGAEYMVDFLPKVKLEVVVPDELVDQCIEAIVETAQTGKIGDGKIFVYHVERAIRIRTGEENEDAI

SEQ ID NO: 3322 - protein, 310 aa, Rickettsia rickettsii
MKITTKVLIIGSGPAGLSAAIYTARAALKPILINGMQPGGQLTITTGVENYPGFAETVQGPWLMEQMYMQAKNVGTEIVSDYVEKVDLSKRPFKVFTGAGNEYDAESIIICTGAEAKWLGIASEQKFRGFGVSACATCDGVFFKNQEIVVVGGGNSAVEEALYLTNHANKVTIVHRRDSFRAEKILQDRLFKNSKISVIWDHVVDEIVGSNKPKSVTGVKIQNVHTKEISLLNCSGVFIAIGHAPNTGLFTGQIAMDDDNYIITKSGTTRTSVEGVFAAGDVQDKIYRQAVTAAGTGCMAALEAEKFLNK

SEQ ID NO: 3323 - protein, 346 aa, Zea mays
MGGRASRHRAQPHDQSSHPPPRPPPKQQQQQQGQQHPNNRPNKPKQQQQPPPPRPPPPHQAPPASAAAPGAATVGRVLGRPMEDVRASYTFGRELGRGQFGVTYLATHKPTGHRYACKSIATRKLAHSDDVDDVRREVQIMHHLTGHRSIVELRGAYEDRHSVNLVMELCEGGELFDRIIARGHYSERAAAALCREIVSVVHSCHSMGVMHRDLKPENFLFLNKREDSPLKATDFGLSVFFKPGEQFRDLVGSAYYVAPEVLKRRYGAEADIWSAGVILYILLSGVPPFWAENEDGIFDAVLRGHIDFASDPWAFISNSAKDLVKKMLRQDPKEALTAAENLNHPW

SEQ ID NO: 3324 - protein, 630 aa, Oryza sativa
MPLLAAAAAVAPPLSSFHSLSLSSRGLRVPSPCEARPRAPLRRGDLAIRMGGGPRTFPGGVSKWQWKRMQARKAKQLLKARLARERQLYEMRKRAELRDAAAHLERPWDPDASDSAAAAAAAPNLLSVAADDQMKALADRFHRPGGVDLWNDRDGPRVFAAPDTGRASARFFPKGSVHSVQPYGLVNGGLESTLAARGNPSDATDRSHRHRLQGVRENAAKKEMRGVGGDREPAVEYIERGGVWEPVSNLDGGDDDDSSDGGWNDDIVTSDLEDMGDVDLRPEQRAMVGRDRRKDNVARWEATTSVAIGSDGVRDQRGNGISLEPEGTSEYHLGQSWQERNSGSRGKRPAGRRKALNTDGGSAIGKDRVVGGSSFSDSEVTRNGFEPKWRSTTRGRTTNDVRRWNPPNEGGRNVPRKGWTDDEFGSNSDSGMDHKLMPKWKTQNRLNRSENGRDRPELKYMANTNNGERTRRYMRGSDGEGRRDRFVNRFASDLEEPEWKPRRKSGAGNDGDGRRDRFVNRFASDLEEPKWKPGRKSGARMNIGNREYIDDMNGRFRRGSDGDGMNGRFRRGSNGAARLLDAMDSNREIGSEDDSYRMSRNGGQRRGDGYSLRPTSELHNSRRLRESNEM

SEQ ID NO: 3325 - protein, 323 aa, Haemophilus influenzae R2846
MTKSAKIGVLLANLGTPDSPTPKSISRYLWQFLTDPRVVDLPRCKWYPLLKAIILPLRSKRIAKNYQAIWTAQGSPLLAISRQQKDALQAYLDKQNIDTQVEIAMTYGNPSIQSAVKNLLKNQVERIIVLPLYPQYSSSTTGAVFDAFANALKEERGLVPFDFIHSYHIDENYINALANSIKVRLKSDEFLLFSYHGIPLRYEKMGDYYREHCKQTTIAVVNKLGLTENQWGMTFQSRFGREEWLQPYTDKFLESAATQNIQKIAVICPGFSVDCLETIEEIDKENRENFLKNGGQSYQYIPALNVEHAHIEMMAKLIIEKLA

SEQ ID NO: 3326 - protein, 475 aa, Rickettsia rickettsii
MNLLKNITGKNYINGEFIEFGKQISVINPATLKEIATVPNLGLSEINSAINNTVTSFALWSQSSFEARIAILRRWYNLVIENIEELSHILTLEQGKVLAESKKEILYGASFIDWYTYAIHNIHSTIKPGNSNTHKIVTQYEPVGPSAAITPWNFPNAMIARKVVPAIAAGCSVILKPSSLTPLSALVLAKFASDAGLPSGVFNVITGSSDIIGKAFCEDFRLRKLSFTGATNVGKILYQNAANTLKRLSLELGGNAPFIITADNNLEKVVSDLVIAKTRNSGQSCTSPNRIFIEESIYEKFIEILKAKFTKLKAGDGFDKESDVGPLINSAAIEKIQKLLADAQSKGAKLICGGKTVDNFIEPTIIIDCLDNMDIFRIEIFGPVVACYKFKDLDEVIEHANNTEYGLQGYVYSNNISVAQMIASKLDFGMVSINDPLPANAKAPFAGRKASGFGVEGSFEGIFEYLNTKYINLQN

SEQ ID NO: 3327 - protein, 318 aa, Haemophilus influenzae R2846
MSDTKHAKLLILGSGPAGYTAAIYAARANLKPVLVTGLQQGGQLTTTDEIENWPGDFEMTTGSGLMQRMLQHAEKFETEIVFDHINRVDLSSRPFKLFGDVQNFTCDALIIATGASARYIGLPSEENYKGRGVSACATCDGFFYRNKPVGVIGGGNTAVEEALYLANIASTVHLIHRRDSFRAEKILIDRLYKKVEEGKIVLHTDRTLDEVLGDNMGVTGLRLANTKTGEKEELKLDGLFVAIGHSPNTDIFQGQLELNNGYIVVKSGLEGNATATSVEGVFAAGDVMDHNYRQAITSAGTGCMAALDAERYLDSQEA

SEQ ID NO: 3328 - protein, 264 aa, Triticum aestivum
HSRTSLYKKAGWYRSGIPGISSTHASAHASGDSSDSDESDEEPPQKKQKDAAKVAPKSAKKDSSSDDDSSDESSDDEPKKEVTTATKSQKEEPNTPASNKGQATGSKTLWMGNLSFNIEYDQVKQFFAQIGEVVDVRLATHEDGHPKGFGHVEFATAEDAQKALDSLNGGDLMGRPVRLDMAAERGASAPRTRDGGSFGKPSGGPSLSVFVKGFDSSQQEDAIRSSLQEHFSKCGEITRVSVPMDYENGASKGIAYMDFTDESS

SEQ ID NO: 3329 - protein, 496 aa, Triticum aestivum
  misc_feature (13)..(13): Xaa can be any naturally occurring amino acid
  misc_feature (66)..(66): Xaa can be any naturally occurring amino acid
  misc_feature (68)..(68): Xaa can be any naturally occurring amino acid
  misc_feature (125)..(126): Xaa can be any naturally occurring amino acid
  misc_feature (138)..(138): Xaa can be any naturally occurring amino acid
  misc_feature (144)..(144): Xaa can be any naturally occurring amino acid
  misc_feature (147)..(148): Xaa can be any naturally occurring amino acid
  misc_feature (256)..(256): Xaa can be any naturally occurring amino acid
  misc_feature (262)..(262): Xaa can be any naturally occurring amino acid
  misc_feature (264)..(266): Xaa can be any naturally occurring amino acid
  misc_feature (274)..(274): Xaa can be any naturally occurring amino acid
  misc_feature (276)..(276): Xaa can be any naturally occurring amino acid
  misc_feature (278)..(279): Xaa can be any naturally occurring amino acid
  misc_feature (281)..(281): Xaa can be any naturally occurring amino acid
  misc_feature (283)..(283): Xaa can be any naturally occurring amino acid
  misc_feature (285)..(285): Xaa can be any naturally occurring amino acid
  misc_feature (288)..(290): Xaa can be any naturally occurring amino acid
  misc_feature (300)..(300): Xaa can be any naturally occurring amino acid
  misc_feature (303)..(304): Xaa can be any naturally occurring amino acid
  misc_feature (309)..(313): Xaa can be any naturally occurring amino acid
  misc_feature (315)..(316): Xaa can be any naturally occurring amino acid
  misc_feature (318)..(318): Xaa can be any naturally occurring amino acid
  misc_feature (323)..(324): Xaa can be any naturally occurring amino acid
  misc_feature (328)..(330): Xaa can be any naturally occurring amino acid
  misc_feature (332)..(334): Xaa can be any naturally occurring amino acid
  misc_feature (338)..(338): Xaa can be any naturally occurring amino acid
  misc_feature (344)..(344): Xaa can be any naturally occurring amino acid
  misc_feature (346)..(346): Xaa can be any naturally occurring amino acid
  misc_feature (348)..(350): Xaa can be any naturally occurring amino acid
  misc_feature (353)..(354): Xaa can be any naturally occurring amino acid
  misc_feature (356)..(356): Xaa can be any naturally occurring amino acid
  misc_feature (360)..(360): Xaa can be any naturally occurring amino acid
  misc_feature (363)..(363): Xaa can be any naturally occurring amino acid
  misc_feature (365)..(365): Xaa can be any naturally occurring amino acid
  misc_feature (371)..(371): Xaa can be any naturally occurring amino acid
  misc_feature (377)..(378): Xaa can be any naturally occurring amino acid
  misc_feature (385)..(386): Xaa can be any naturally occurring amino acid
  misc_feature (390)..(390): Xaa can be any naturally occurring amino acid
  misc_feature (394)..(394): Xaa can be any naturally occurring amino acid
  misc_feature (398)..(398): Xaa can be any naturally occurring amino acid
  misc_feature (424)..(424): Xaa can be any naturally occurring amino acid
  misc_feature (460)..(460): Xaa can be any naturally occurring amino acid
  misc_feature (472)..(472): Xaa can be any naturally occurring amino acid
MAGTGVFADVLDXEVYKYYADGEWRASASGKTVAIVNPTTRQTQYRVQACTQEEVNKVMDAAKVAXKXWARTPLWKRAELLHKAAAILKEHKTPIAECLVKEIAKPAKDAVSEVVRSGDLVSYTXXEGVRILGEGKLXVSNSFXGNXXNKYCLSSKIPLGVVLAIPPFNYPANLAGSKIGPALIAGNALVLKPPTQGAVAALHMVHCFHLAGFPKGLISCVTGKGSEIGDFLTMHPGVNCISFTGGDTGIAISKKXGMVPLXMXXXGKDACIVXEXAXXDXVXAXIVXXXFSYSGQRCNXVKXXLIMEXXXXXVXXKXNAKLXXLKVXXXEXXXDITXVVTESXAXFXXXSGXXCXGERXNFXPXVQEKGXLIWPLXXDHVRPDXXIAWXEPFXPVLXVIRINSVEEGIHHCNASNFGLQGCVXTRDINKAIMISDAMESGTVQINSAPARGPDHFPFQXLKDSGIGSQGIXNSINMMTKVKSTVINLPSPSYTMG

SEQ ID NO: 3330 - protein, 303 aa, Mycobacterium sp. JLS
MLGKIGDVQGHGPKLERVTFPDKSVASTLEGGLSVSDAQVTEKQPDALVEQRGHTLVVTLNRPESRNALSTEMLSIMVDAWDRVDNDPEIRSCILTGAGGYFCAGMDLKAATAKPPGDSFKDGSYDPSRIDGLLKGRRLTKPLIAAVEGPAIAGGTEILQGTDIRVAGESAKFGISEAKWSLYPMGGSAVRLVRQIPYTIACDLLLTGRHITAAEAKEYGLIGYVVPDGTALDKALEIAEVINNNGPLAVQAILRSIRETEGLHENEAFKIDAKIGIEVFLSEDAKEGPRAFKEKRAPNFKMK

SEQ ID NO: 3331 - protein, 832 aa, Haemophilus influenzae 86-028NP
MGENAMNLSRRDFMKANAAMAAATAAGLTIPVKNVVAAESEIKWDKAVCRFCGTGCAVLVGTKDGRVVASQGDPDAEVNRGLNCIKGYFLPKIMYGKDRLTQPLLRMTNGKFDKNGDFAPVSWDFAFKTMAEKFKEAFKKNGQNAVGMFSSGQSTIWEGYAKNKLWKAGFRSNNVDPNARHCMASAAVAFMRTFGMDEPMGCYDDIEQADAFVLWGSNMAEMHPILWSRITDRRISNPDVRVTVLSTYEHRSFELADHGLIFTPQTDLAIMNYIINYLIQNNAINWDFVNKHTKFKRGETNIGYGLRPEHPLEKDTNRATAGKMHDSSFEELKQLVSEYTVEKVSKMSGLDKVQLETLAKLYADPTKKVVSYWTMGFNQHTRGVWVNQLIYNIHLLTGKISIPGCGPFSLTGQPSACGTAREVGSFPHRLPADLVVTNPKHRETAERIWKLPKGTVSEKVGLHTIAQDRAMNDGEMNVLWQMCNNNMQAGPNINQERLPGWRKEGNFVIVSDPYPTVSALSADLILPTAMWVEKEGAYGNAERRTQFWRQQVKAPGEAKSDLWQLMEFAKYFTTDEMWTEDLLTQMPEYRGKTLYEVLFKNGQVDKFPLSELAEGQLNDESEYFGYYVHKGLFEEYAEFGRGHGHDLAPFDMYHKAHGLRWPVVEGKETLWRYREGYDPYVKEGEGVAFYGYPDKKAIILAVPYEPPAESPDNEYDLWLSTGRVLEHWHTGTMTRRVPELHRAFPNNLVWMHPLDAQARGLRHGDKIKISSRRGEMISYLDTRGRNKPPRGLVFTTFFDAGQLANSLTLDATDPISKETDFKKCAVKVEKAA

SEQ ID NO: 3332 - protein, 458 aa, Haloarcula marismortui ATCC 43049
MDTQQAIRETPEPVTPGDRPPRLGRVPFVDNTAAMLRDPLGFYDRAGAHEADMVGYSVAGTTGCFVCHPDLVEQVLVTDADVYEKGQLLQDTLGQFIGEGLFLLEGEEWQQQRTALQPAFYRERIAAYGDTMTEFADRAAAGWSDGQRIDVLPHMQSLTLNILGKTLLDVDIETTADALEPLLDALRTRLDPRSLSAYLPLWVPTATNRAVTNSLAEFQSTLDDVIAARQREDEHAREARDDVLSLLLSLDDETMDRERLGHQLLTFLVAGHDTTALTLTYAWFLLANNPKRQQRLHDELDATLGERQPTPEDLFELPYLDAVLNEVLRLYPPAFTVFRQPTEPVTLGGYELSTDAQLTLPQWLVHRDDRWYDAPDAFRPERWDDDLEASLPDYAYYPFGGGPRHCIGMRFARMEAKLALATIAQQYAVEAVTEPPLSLAMQITLSPTAPVEVRLRER

SEQ ID NO: 3333 - protein, 440 aa, Mycobacterium avium subsp. paratuberculosis K-10
MRAGKVVEAQPHPHAALRRSTLPGGLRVVTEYLPAVRSASVGVWVGVGSRDEGATVAGAAHFLEHLLFKSTPTRTAVDIAQAMDAVGGELNAFTAKEHTCYYAHVLDADLELAVDLVADVVLNGRCAAEDVELERDVVLEEIAMRDDDPEDALGDMFLGALFGDHPVGRPVIGTARSVASMTRTQLHSFHVRRYTPERMVVAVAGNVDHDEVVAMVREHFGPHLVRGRQPIAPRKGAGRVNGRPGLLLGTRDAEQTHVSLGVRTPGRGWQHRWALSVLHTALGGGLSSRLFQEIRELRGLAYSVYSTVDIFADSGALSVYAACQPERFAEVMAVTSGVLESVARDGITESECRIAKGSLRGGLVLGLEDSGSRMSRLGRNELNYGRHRSIEHTLAQIDRVSVDEVNAIARRLLTQHYGAAVLGPYGTKRSLPQQLRAMVR

SEQ ID NO: 3334 - protein, 212 aa, Mycoplasma genitalium G37
MIIQANDDDSSDSFIKQKLIACNTVGAKSELIKLSNQITQAELIEKIISLNHDVNVTGIILQLPVYPHLDKNSLLEAINPLKDVDGLTTNHLAEIKPCIVEAIITLKELFNLEFNNQKIVVVGLGITGGKPIYEFLKTSGYKVQACDKDTPNTFELIKSADIVFTAIGKSHFFQAKNFKKGVILFDIGVSRNKQNKLCGDINPEGIEKKARW

SEQ ID NO: 3335 - protein, 391 aa, Agrobacterium tumefaciens
MAKSKFERNKPHVNIGTIGHVDHGKTSLTAAITKYFGEFKAYDQIDAAPEEKARGITISTAHVEYETPARHYAHVDCPGHADYVKNMITGAAEMDGAILVCSAADGPMPQTREHILLARQVGVPAIVVFLNKVDQVDDAELLELVELEVRELLSSYDFPGDDIPIIKGSALAALEDSDKKIGEDAIRELMAAVDAYIPTPERPIDQPFLMPIEDVFSISGRGTVVTGRVERGIVKVGEEVEIVGIRPTSKTTVTGVEMFRKLLDQGQAGDNIGALVRGVTRDGVERGQILCKPGSVKPHKKFMAEAYILTKEEGGRHTPFFTNYRPQFYFRTTDVTGIVSLPEGTEMVMPGDNVTVEVELIVPIAMEEKLRFAIREGGRTVGAGIVASIVE

SEQ ID NO: 3336 - protein, 171 aa, Murraya paniculata
HNLLFILGFNAFGGFSIFLPRLIDAIASDKTGLQAKLRSEVKEKCGTSSLTFESVKSLELVQSVVYETLRLNPPVPLQYARARKDFQLSSHDSVYDIKKGELLCGYQPLVMRDSKVFDDPESFKGERFMGEKGSELLNYLYWSNGPQTGTPNDMNKQCAGKDYVTLVACLT

SEQ ID NO: 3337 - protein, 433 aa, Methanococcoides burtonii DSM 6242
MNDVSSEKSIGYLSAVSIGIGGMVGGGIFAVLGLAVEIGKGGTPIAFGLAGIVALITSYSYAKLSVRYPSEGGTVEFLNQAFGSGLVTGGLNILLWLSYVVMLSLYAYAFGSYGSTFFPDSMQAVLRHVLTSIIIVSLTVVNIVGAKVVGKLETWIVGFKVAILLIFIGVGIWSVKSQPFQPTISSNPLQLVAGGMIIFLAYEGFELIANTAKDVKNPGKTLPCAYYSAVVFVIVLYVLIAFITVETVSIDSIIQAKDYALAVAAKPFLGNFGFNLIAVAALLSTASAINATLYGASRVSFTIAKDGELPEILEEKIWNRPIEGLLITSALTLIVANTFNLASISIMGSAGFLLIFGAVNASNACLYQKTASYRWISITGIIVCSIALFTLIWYTLNNSPKDIFILAFMLCSAFAIEAIYRRFTGRYIKKIHE

SEQ ID NO: 3338 - protein, 115 aa, Triticum aestivum
  misc_feature (30)..(30): Xaa can be any naturally occurring amino acid
MARGAATQLVLVAMVAAMLLVGGDAAISCXQVTSALSPCISYARGNVANPPAACCSGVRSLAGAARSTADKQAACKCIKSAAGGLNAGKAAGIPSKCGVSVPYAISSSVDCSKIR

SEQ ID NO: 3339 - protein, 413 aa, Helianthus annuus
MAGVAPEGSQFDARQFDSKMNDLLSADGQDFFTSYDEVYDSFDAMGLQENLLRGIYAYGFEKPSAIQQRGIVPFTKGLDVIQQAQSGTGKTATFCSGILQQLDYNVVECQALVLAPTRELAQQIEKVMRALGDYLGVKVHACVGGTSVREDQRILSAGVHVVVGTPGRVFDMLRRQSLRSDNIKMFVLDEADEMLSRGFKDQIYDIFQLLPSKVQVGVFSATMPPEALEITRKFMNKPVRILVKRDELTLEGIKQFYVNVEKEEWKLETLCDLYETLAITQSVIFVNTRRKVDWLTDKMRSRDHTVSATHGDMDQNTRDIIMREFRSGSSRVLITTDLLARGIDVQQVSLVINYDLPTQPENYLHRIGRSGRFGRKGVAINFVTLDDEKMLGDIQKFYNVVVEELPSNVADLI

SEQ ID NO: 3340 - protein, 208 aa, Tabernaemontana divaricata
  misc_feature (117)..(117): Xaa can be any naturally occurring amino acid
LPEQIDWRKKGAVTPVKNQGSCGSCWAFSTVSTVESINQIRTGNLISLSEQELVDCDKKNHGCLGGAFVFAYQYIINNGGIDTQANYPYKAVQGPCQAASKVVSIDGYNGVPFCNEXALKQAVAVQPSTVAIDASSAQFQQYSSGIFSGPCGTKLNHGVTIVGYQANYWIVRNSWGRYWGEKGYIRMLRVGGCGLCGIARLPYYPTKA

SEQ ID NO: 3341 - protein, 108 aa, uncultured prokaryote
WTMVAGGGASVVYADTIADFAGVKDLANYGEYSGGPTTAETEFYAETIFDLMTRHKDPRGKILIIGGAIANFTDVAKTFTGIINALEKYADKLKEHGTKIYVRRGGPN

SEQ ID NO: 3342 - protein, 323 aa, Saccharum officinarum
MAPALSFPIIDMGLLGGEERPAAMELLRDACESWGFFEILNHGISTELMDEVEKLTKDHYKRVREQRFLEFASKTLKDAQDVKAAENLDWESTFFVRHLPESNIAEIPDLDDDYRRAMRQFAGELEALAERLLDLLCENLGLDRGYLARAFRGPRTGAPTFGTKVSSYPPCPRPDLVSGLRAHTDAGGIILLFQDDRVGGLQLLKDGAWVDVPPLRHSIVVNLGDQLEVITNGRYKSVMHRVVAQPDGNRMSIASFYNPGSDAVIFPAPALVKAEEAAAGAYPRFVFEDYMKLYVRHKFEAKEPRFEAFKSVETDSSNCIAIA

SEQ ID NO: 3343 - protein, 109 aa, uncultured prokaryote
WTMVAGGGASVVYADTIADLAGVKDLANYGEYSGGPTTAETQFYAETIFDLMTRHEDPRGKILIIGGAIANFTDVAKTFTGIINALEKYADKLKEHKTKIYVRRGGPNY

SEQ ID NO: 3344 - protein, 117 aa, Brassica napus
MAGLMKLACLVLACMIVAGPITSNAALSCGTVSGYVAPCIGYLTQNGPLPRGCCTGVTNLNNMARTTPDRQQACRCLVGAANSFPTLNAARAAGLPKACGVNIPYKISKSTNCNSVR

SEQ ID NO: 3345 - protein, 111 aa, uncultured prokaryote
WTMVAGGGASVVYADTIADMAGIEDLANYGEYSGGPTTGETKFYAETLFDLMTREKDAEGRGKVLIIGGAIANFTDVAKTFTGIIQAFENYQDKLKEVGVKIYVRRGGPNY

SEQ ID NO: 3346 - protein, 118 aa, Brassica oleracea var. italica
MAGVMKLACLVLACMIVAGPITANRALTCGTVNSNVAPCIGYITQGGTLPGACCTGVSKLNSMARTTPDRQQACRCLETAARALGPNLNAGRAAGIPKACGVSVPFPISTNTNCNNVK

SEQ ID NO: 3347 - protein, 200 aa, Fusarium proliferatum
VAVKKIMKPFSTPVLAKRTYRELKLLKHLKHENVISLSDIFISPLEDIYFVTELLGTDLHRLLTSRPLEKQFIQYFLYQIMRGLKYVHSAGVVHRDLKPSNILVNENCDLKICDFGLARIQDPQMTGYVSTRYYRAPEIMLTWQKYDVEVDIWSAGCIFAEMLEGKPLFPGKDHVNQFSIITELLGTPPDDVINTIASEN

SEQ ID NO: 3348 - protein, 112 aa, uncultured prokaryote
WTMVAGGGASVVYADTIADLAGGVEELANYGEYSGGPTTDETRFYTETVLDLMTREKDPKGRDKILIIGGAIANFTDVAKTFTGIIQAFEKYADKMKDVGVRIYVRRGGPNY

SEQ ID NO: 3349 - protein, 567 aa, Torulaspora delbrueckii
MSTTEHTPVDHLSPAVSASGSGLSTPSNKAERDDIKDFDAAADREAAVDIPKRPASSYIGVSILCLMVAFGGFVFGWDTGTISGFVNLSDFLQRFGQRSKDGVYYLSKVRMGLIVSIFNIGCAIGGIILSKIGDIYGRRIGLVAVTVIYVVGILIQICSFNKWYQYFIGRIISGLGVGGIAVLSPMLISEVSPKQIRGTLVACYQLMITLGIFLGYCTNYGTKTYNDSTQWRVGLGLCFAWAIFMIGGMLFVPESPRYLVEHGNIEEAKRSLSRSNKLSVDDPAVLAELDAISAGVEAEKLAGSASWGELFSTKTKVFQRLIMGVMLQSLQQLTGDNYFFYYGTTVFKSVGLKDSFQTSIIIGVVNFFSTFVGIFCIERFGRRTCLLWGAASMVCCFVVFASVGVTKLWPEGPSHQDISSKGAGNCMIVFTMFFIFCFATSWAGGCYVIVSESFPLRVKSKGMAIATAANWLWGFLIAFFTPFITGAINFYYGYVFMGCLVFGYFYVFFFVPETKGLTLEEVETMWLEGVLPWKSAAWVPPDRRGADYNAEEMAHDDKPMYKRFFSK

SEQ ID NO: 3350 - protein, 117 aa, Brassica oleracea var. italica
MAGLVKLSCLVLACMIVAGPIATNAALSCGTVSGNLAACIGYLTQNGPLPRGCCTGVTNLNNMARTTPDRQQACRCLVGAANSFPTLNAARAAGLPKACGVNIPYKISKSTNCNSVR

SEQ ID NO: 3351 - protein, 109 aa, uncultured prokaryote
WTMVAGGGASVVYADTIADFAGVEDLANYGEYSGGPTTGETKFYAETIFDLMTRYDDPRGKVLIIGGAIANFTDVAKTFTGIIQAFEMYADKLKSHKTKIYVRRGGPNY

SEQ ID NO: 3352 - protein, 434 aa, Listeria innocua
MILTIKFLIIALLIAISAFFVATEFAIVKMRPSRLDQLIAEKDKRAVLARHIYNHLNAYLSACQLGITISSLGLGWLGESTVEAALHPLFSLLELPQSAITILSFTIAFLFITFLHVVVGELVPKTLAIDKTETVALAVARPLHIFYKVMFPFIWILNGSAVFIARLFGLEPASEHEIAHTEDELKIIVGESYKSGEINQSEFRYVNKIFDFDERMAKEVMIPRTEIVTVDTGSTIGELSDIMQNERYTRYPVIDGDKDHVIGVLNLKEILSAYVEHGSNPSFSIDPYVKPIIRVIETIPIKELLFRMQRERSHIAILLDEYGGTSGLVTVEDIVEEIVGDIRDEFDADEIPEIRKIKDGHYIVDAKLLIDEVNNILGTEIEEEEVDTIGGWFLTQNYEVEVGDEIDYDGFIFRVKQGEPHHIEYIEIIKKTND

SEQ ID NO: 3353 - protein, 328 aa, Prochlorococcus marinus subsp. marinus str. CCMP1375
MSQDILFLATLVAVVLIGSALCSGIEAALLTVNPLRVHELAAKRKPVRGAKKLAKLRHRLGRTLTVLTIANNGFNIFGSLMLGIYATFVFKAGIDRALFSIGLTLLVLLLGEILPKSVGAKLSLQVSLISAPILHLLSVLMRPLILPLEHLLPVITTENEITTDEEEIRQMARLGSQKGQIEADEAAMIGQVFQLNDLTARDLMTPRVSAPTLDGSVTLEKLRTKLLTNNSQRWVVLGKEVDKVLGIAKRERLLTALLQGHTQLTPIDLCEAVEFVPEMIRVDRLLTCFNKDKTGVRVVVDEFGGFVGLIGAEAVLAVLAGWWRKSNK

SEQ ID NO: 3354 - protein, 92 aa, Brassica rapa subsp. pekinensis
ALTCGTVSGNLAACIGYLTQNGPLPRGCCTGVTNLNNMARTTPDRQQACRCLVGAANSFPTLNAARAAGLPKACGVNIPCKISKSTNCNSVR

SEQ ID NO: 3355 - protein, 104 aa, Brassica napus
MSLSAIGFEGYEKRLEVSFFEPSLFLDTHGKGLRALPKSQIDEILAPAECTIVSSLSNDELDSYVLSESSLFIFPYKIIIKTCGTTKLLLSIEPLLRLAGELSL

SEQ ID NO: 3356 - protein, 312 aa, Lactobacillus plantarum WCFS1
MAKSYDVIIIGAGPAGMTAALYASRANLSVLLLDRGIYGGQMNNTAAIENYPGFKSVLGPDLAKDMYESATQFGAEYAYGSVESVEDRGDVKIVTTDSDTFETKALVIGTGSEYRKLGVTGEDTYGGRGVSYCAVCDGAFFRNKHVVVVGGGDSAIEEGTYLTQLADKVTVIHRRDQLRAQQILQDRAFANPKMEFVWNSNVTEIIGDDKKVTGVKVNNNKTGEDSEIAVDGVFIYVGINPITKPFSNLGITDENGWIETNDHMETKVPGIFAVGDVRKKDLRQVATAVGEGGTAGQGVYTYITALGDKVNN

SEQ ID NO: 3357 - protein, 315 aa, Roseovarius nubinhibens ISM
MADTQFGPHGWTPERLGSLAGRCYVITGANAGTGYEAARLFLSKGASVVMLNRSAEKSAAAIATLKAEHGAEADVRFIEMDLADLTSVRRAAEEIRETVPRIDALICNAAIAQVPKQRLTVDGFESQLGTNHYGHFALCGLLFERIEESEGRIVVVASLGYNMGIKTIQFDDLNWDNNYSANAVYSQSKLAQMMFAYELQDRIRAAGKSVEVLVCHPGSSKTSLIKTSGSPVMRAIWWLMTKSPMVQTAQQGAYPEVMCATEEGLEERALYGPTGRMEFVGPVGRGTLHPHAYDKPVMTRLWEVSEAATGVVWPL

SEQ ID NO: 3358 - protein, 353 aa, Dianthus gratianopolitanus
MVSSTINETLDGKHDINKVGQGETVCVTGASGFIGSWLIMRPLERGYTVRATVRDPDNTKKVQHLLDLPHAKTNLTLWKADLNEEGSFDAAVDGCTGVFHIATPMDFESKDPENEMIKPTINGMLDILKSCVKAKVRRVVFTSSGGTVNVEATQKPVYDETCWSDLDFIRSVKMTGWMYFVSKILAEQAAWKYAAENNLDFISIIPPLVVGPFIMPSMPPSLITALSPITRTESHYTIIKQGQFVHLDDLCMSHIFLYENPKANGRYVASACAATIYDIAKTLREEYPEYNVPTKFKDYKEDMGQVQFSSKKLTDLGFEFKYGLKDMYTEAAETCRAKGLLPISLEHHENGSA

SEQ ID NO: 3359 - protein, 288 aa, Rickettsia rickettsii
MNNIIDGKALANEILADLKLEIQELTSQTNASPKLAIVLVGDNPASIIYVRHKIKNAHKVGIYTLLINLSATIHTNDLISKINELNLDNEISGIIVQLPLPSSIDKNKILSAISPSKDIDGFHPLNVGYLHSGISQGFIPCTALGCLAAIKKYEPNLTGKNVVIIGRSNIVGKPLSALLLKENCSVTICHSKTHNLRSITSKADIVVAAIGSPLKLTAEYFNPESIVIDVGINRISSNKIIGDVDFENVQSKVQYITPVPGGIGPMTIAFLLKNTVKAFKDSLYTLDT

SEQ ID NO: 3360 - protein, 493 aa, Arabidopsis thaliana
MVLSKTVSESDVSIHSTFASRYVRNSLPRFEMPENSIPKEAAYQIINDELMLDGNPRLNLASFVTTWMEPECDKLMMESINKNYVDMDEYPVTTELQNRCVNMIARLFNAPLGDGEAAVGVGTVGSSEAIMLAGLAFKRQWQNKRKAQGLPYDKPNIVTGANVQVCWEKFARYFEVELKEVNLREDYYVMDPVKAVEMVDENTICVAAILGSTLTGEFEDVKLLNDLLVEKNKQTGWDTPIHVDAASGGFIAPFLYPELEWDFRLPLVKSINVSGHKYGLVYAGIGWVVWRTKTDLPDELIFHINYLGADQPTFTLNFSKGSSQVIAQYYQLIRLGFEGYRNVMDNCRENMMVLRQGLEKTGRFKIVSKENGVPLVAFSLKDSSRHNEFEVAHTLRRFGWIVPAYTMPADAQHVTVLRVVIREDFSRTLAERLVADFEKVLHELDTLPARVHAKMANGKVNGVKKTPEETQREVTAYWKKLLETKKTNKNTIC

SEQ ID NO: 3361 - protein, 205 aa, Xanthomonas oryzae pv. oryzae KACC10331
MNQTLYDIPVTRIEGGPATLADYRGKVLLVVNVASKCGLTPQYEGLEALYRDKRAQGLEVLAFPANDFNGQEPGSEAEIAQFCRLTYDVTFPMFAKIAVTGEQAHPLYQALTSTHPHTTGDGPMREKLAGYGIAPNPRARRVVELRKIPDRPRRQDHRPLRPGYPRRRCTPASGNRHGVGGLNLAILLGVSSACIAGEIALRCLS

SEQ ID NO: 3362 - protein, 122 aa, Zea mays
MAAVLNSRKTPQVVAVLVAAALLASSASAAITCGQVGSSLAPCIPYATGRASALPASCCSGVKSLNSAARTSADRQAACRCLKSLANSVKSVNMGTVATIPGKCGVSVGFPISMSTDCNKIS

SEQ ID NO: 3363 - protein, 331 aa, Streptococcus suis 89/1591
MAETKVMALREAINLAQSEEMRKDEKVFLMGEDVGIYGGDFGTSVGMLDEFGPKRVRDTPISEAAIAGSAVGAAQTGLRPIVDLTFMDFVTIALDAIVNQAAKTNYMFGGGLKTPVTFRVASGSGIGSAAQHSQSLEAWLTHIPGIKVVAPGTANDAKGLLKSSILDNNPVIFLEPKALYGKKEEVNLDSDFYIPLGKGEIKREGTDVTIISYGRMLERALKAAEEVAAEGISVEVVDPRTLIPLDKELIIESVKKTGKVILVNDAYKTGGFIGEIASIITESEAFDYLDAPIIRIASDDVPVPYANILENAVLPNVEKIKAAIYKQVNKG

SEQ ID NO: 3364 - protein, 262 aa, Oryza sativa (japonica cultivar-group)
MAVVASRCTGLLLPDLGASLAGFRRRRSTPASSLSFRPRRARRRLGSLSCIAPPDSAEPQTDEPAAKDDSTEDKAEASSASQDAGNPTFPNKDLSRRIALASTIGAVGLFAYQRLDFGGVSLKDLAANATPYEEALSNGKPTVVEFYADWCEVCRELAPDVYKVEQQYKDRVNFVMLNVDNTKWEQELDEFGVEGIPHFAFLDKEGNEEGNVVGRLPKQYFLDNVVALASGEPTVPHARVVGQFSSAESRKVHQVADPRSHG

SEQ ID NO: 3365 - protein, 462 aa, Streptococcus suis 89/1591
MAIEIIMPKLGVDMQEGEIIEWKKQEGDFVNEGDVILEMMSDKTSMELEAEESGVLLKIVHGNGATVPVTEVIAYIGAEGETVEAGASSAPAVEPAAAIEEVPAGRTPVIVAPATAAKPQGSGKVRATPAARKLARELGIDLGLVPGTGANGRVHKVDVEDFKGAAPKATPLAARIAADQGVDLSTLTGSGVNGKIVKNDVLAVLAPVAVETAAPVPKAEEKPAKELPEGVEIIKMSPMRKAISKGMVNSYLTAPTFTLNYDIDMTNLMALRKQVLEPIMNKTGLKVTFTDLIGLAVVRTLMKEEHRYMNASLINDAQEIELHKFVNLGIAVGLDDGLVVPVVHGADKMSLSDFVVASKDVIKKAQSGKLKGAEMSGSTFSITNLGMFGTKTFNPIINQPNSAILGVASTVQTPVVIDGEIKIRPIMALCLTIDHRIIDGMNGAKFMVDLKNLLENPLELLI

SEQ ID NO: 3366 - protein, 129 aa, Cryptococcus neoformans var. neoformans JEC21
MPAHIPIVKKRTKHFKRHQSDRYHGVKESWRKPKGIDNRVRRRFKGQIPMPKIGYGSNQKTRHLLPSGHKELLVHNLSELELLLMHSGKYAASIAHGVSSKKRVEIIARAKVLGVKVTNPAAKLRTEEA

SEQ ID NO: 3367 - protein, 357 aa, Haloarcula marismortui ATCC 43049
MKVVLIGVGQAGGKVTQSLAQFDYDMGFDAVRGALAVNTARADLQNLDIDTALIGQDRVKGHGVGGDNELGAQVMQENATEVLDELDGRITTEAEAIVVVAGLGGGTGSGGAPMLARELKRIYEKPVYVLGILPGRDEGGLYQANAGRSLKTAAREADSLLLVDNDAWRGSGDSVAAGFERVNDAISQRVGLLFASGEAVEGVGESVVDSSEIINTLRGGGIASIGYASAEASEDAGENVNTITSVTRKALLTSMSLPNAVKADSALLVVAGDPERLSRKGVERARRWVEDQTGSMEVRGGDFPLGSDKIASLIVLSGVERSERVNEFMERATEAANSQGGTTDPDEFTNDQLDGLF

SEQ ID NO: 3368 - protein, 222 aa, Glycine max
MMSSSPFPSCFRPSPTTESQPPPPPPPAHSTISNLTIYHTDTGPVSLTWSRSIVGRSLHIQLHQNQNPLDSPPYPNPTTLSFHHHIRPFLFWKKHGSKKLAPDTFLFWNLSRAKFGAAPEPLSGFYVALVVHNHMTLLIGDSTKDAFSKSKARHPNTPQLLLLKKEHVFADRLYTTRATFGGKAREIQIDCGYHDHSRLCFSVDGEKVLQIKRLKWKFRGNE

SEQ ID NO: 3369 - protein, 873 aa, Rhodopseudomonas palustris CGA009
MSGLWQSMTTAWMSRTDRSALLDFWLGGRGAGTLIANTDIDEQEMRRIRAAQINSVTRLTPVTMSINVANAALILFTFWDNDARPQLLAWTAMIVFAAGSAVQSWLRNRFEPRLEASAHAIRRMTLHALLLGLIWGAMPVMVFVKADPGDQLIVACVAAGMISGGAFTLSTVPRAGLAYTWSLAAGSALSLALCDGMAYRITAAFLVLYAVFMSRNLISHGEMFFDNLRAKFELERQTEIISLLLKDFQANASDWLWQTDAHGRLVHVPERFVEVAKLPPSLLIGAPLADVIGMLCPEDGRCAMGVAAKMAQREPMNDLVVHVVIGGTPRLWSLTAKPMFDAAGEFAGYRGVGRDVTERWRAEQAEAENRAKSSFLAMMSHEIRTPMNGVLGLANSLLETKLDPEQQQAVTTIRDSGDDLLRILNDILDLSKLEAGRLEFEQADFSPTTLVESVRAIIEPEVRGKGIELKVDIDPRLPPSLNGDAARIRQVLLNLAANAVKFTEQGSIAIVLTCVKRNDSHATVEWQVTDTGIGISPDRVGSLFTDFAQADVSINRRFGGTGLGLAISRRIVEQMGGDIAVTSREGEGSTFRFSLDLPWSNAWIADHRLDRLGSDDLRTRIAMLGRPLRVLIAEDDSTNQMVVMKMLQEFAAEITVVSDGTDAVQAAGEGEFDVVLMDVRMPNMDGLAATRAIRGKGGALAKLPIIALTANAFPDDVKVCRDAGMNDFLAKPLRKPALVAAVLRALRGASTPVTMPSPPMLVDLDTLAELTAEIGQDQVNEMVALFFAETERRIALFRRFAEHMDRHDLEVEAHSLKGGARTLGFHPIAEIARSIEREAGSISPEALDLFTGQLNKALIELRRQCEGSLKLAS

SEQ ID NO: 3370 - protein, 112 aa, Colwellia psychrerythraea 34H
MKKIEAIIKPFKMDDVREALGEIGVTGMTVSEVKGFGRQKGHTELYRGAEYMVDFLPKVKLEIVIAKEDVERCVNAILETAQTGKIGDGKIFITDVERVIRIRTGEENREAI

SEQ ID NO: 3371 - protein, 475 aa, Streptococcus agalactiae
MTKEYQNYVNGEWKSSVNQIEILSPIDDSSLGFVPAMTREEVDHAMKAGREALPAWAALTVYERAQYLHKAADIIERDKEEIATVLAKEISKAYNASVTEVVRTADLIRYAAEEGIRLSTSADEGGKMDASTGHKLAVIRRQPVGIVLAIAPYNYPVNLSGSKIAPALIGGNVVMFKPPTQGSVSGLVLAKAFAEAGLPAGVFNTITGRGSEIGDYIVEHEEVNFINFTGSTPVGQRIGKLAGMRPIMLELGGKDAGIVLADADLDNAAKQIVAGAYDYSGQRCTAIKRVLVVEEVADELAEKISENVAKLSVGDPFDNATVTPVIDDNSADFIESLVVDARQKGAKELNEFKRDGRLLTPGLFDHVTLDMKLAWEEPFGPILPIIRVKDAEEAVAIANKSDFGLQSSVFTRDFQKAFDIANKLEVGTVHINNKTGRGPDNFPFLGLKGSGAGVQGIRYSIEAMTNVKSIVLDMK

SEQ ID NO: 3372 - protein, 289 aa, Triticum aestivum
  misc_feature (252)..(252): Xaa can be any naturally occurring amino acid
  misc_feature (278)..(278): Xaa can be any naturally occurring amino acid
MESSRGILIPGTPPLPHAYEPLPSSLADANGQEVRRTSGGVRWRAWAAVLAVVALVVAAAAFGASRVDPDAVASSVPATADHGVLEKTSEAYSASGGFPWSNAMLQWQRTGFHFQPEKNYMNDPNGPVYYRGWYHFFYQHNPGGTGWGNISWGHAVSRDMVHWRHLPLAMVPDHWYDIEGVLTGSITVLPDGRVILLYTGNTETFAQVTCLAEAADPSDPLLREWVKHPANPVVVPPPGIGMKDYRDSTTGXFDNSDHTWRLLFGSKNNTDPSGIVFXYKTKGFPQLTR

SEQ ID NO: 3373 - protein, 858 aa, Glycine max
RTTAGVVQQFPNNTCSVYITYSKEEEAIRCIQNVHGFVLEGRPLRACFGTTKYCHAWLRNMPCSNPDCLYLHEIGSQEDSFTKDEIISAYTRSHVQQITGAANNIQRQAGNVLPPPLDDCMDNSSGKPIVKNSSSTSVSIVRSSPPNGTSGRPIALSAVAWGTRATNCQPAADGLLCPNGLSRPKPDTISSSLPFSSAVACTIQASLNSDVTKRPLLSDGSRSMTPQIKNELLKPVEQNRSMDILDSAGERTLVSDVSLSAVKLNNQLSSLPLAGDSGRGSFTATNTTSSIDITRQPLSFGPEEAVISTCEEIENLSCEFSSVYIDRNAQNKHYSLSIPSSSPDNVLVKSMQSQELQYNTDKLKDLMIKNADSKAAALYNEVCNLKEQCDLSLDSQSQVVSANTEVEDDVTTFDNQRLKDPEVIGSYLPESASFLHVSNHSSPLLLQRGDPCNVVNAGFLDANDKVEDNSLLHAHNICNGYSDEISTSSYWFRHDASNEHHIGRLVSDAVNIGSDAVMDKGESSIISNILSMEFDAWDDSLASHESLTKLLGDNTDSQNGPLKKSSSRKVQSNNQSRFSFAWQEESKFQANVPPSSGATQPFPKNGSLIQDFVERDFSLNKLGFANGFPSNNLKESGNLGSGHFIASNNKLSAVSRAQISAPPGFSVPNRAPPPGFSSVERMGQAFDSLSGNSLLDPSFLLRNSYQTPSNGNIGGPGDVEFMDPAILAVSKGPEQFNYFENEARVQLLMQRSPSPQQDLRFSEIGNSFSQFGDSYGISSRLNQSQVSNLASFPQLSLQQSRNAVLSNGQLDGRNGNGLGVAELLRNERLGFNKFYRGYDDSKYRMPNSMDVFNRTFGI

SEQ ID NO: 3374 - protein, 374 aa, Methylococcus capsulatus str. Bath
MTDIFDPSDEFGPARIIQVREPSVGLRATVIIDNVALGPAIGGLRIASAGSTADGCRLARTMTLKSAAADLPHGGGVAMLHPAPGSPENACRQHRVRALACALRSEDQFIFAPDMGSGETTMAWIRDENGRAVGLPRELGGIALSRIGAAGWGLYHATEVALRYCGFKLEDARVVIQGFGTVGQNTARYLVENGAVVVGIADSGGTLYHPRGLDIAELVAIKAKGGSVVDSSEGERLAPDAAVDLDCDIWIPAAGSDVITPDNAARLKARLVVEAADASLAPAAERYLHEKGIICVPDFIANAGGLIGAAMECRGANKTQVLSAIKEKIRRNTEKVLQSVETDGTLPREAAVRLAMKPIVKAMSYRRWSGLSAD

SEQ ID NO: 3375 - protein, 116 aa, Gossypium hirsutum
MSLKLACVVVLCMVVGAPLAQGAVTSGQVTNSLAPCINYLRGSGAGAVPPGCCTGIKSLNSAAQTTPVRQAACRCIKSAAAGITGINFGLASGLPGKCGVNIPYKISPSTDCNSVK

SEQ ID NO: 3376 - protein, 148 aa, Triticum aestivum
IRVKDKDASLSFYQDVMGMKLKRTSESPNAGFNLYFLGYGVDAPETTANGVNPVSDSEGLLELTWNYGTEKDAEFKYHNGNDEPQGFGHICIAVDDLDAACARFEEKKVNWKKRLTDGRMKNIAFVLDPDNYWIEVVQNEKLKTRSNW

SEQ ID NO: 3377 - protein, 111 aa, uncultured prokaryote
WTMVAGGGASVVYADTVADLGRVKELANYGEYSGNPSRTETREYVKTVFDLMTREKHESGKPKILIIGGAIANFTDVAKTFDGIIDAMKEYADKLKDVGVRIYVRRGGPNY

SEQ ID NO: 3378 - protein, 217 aa, Salmonella enterica subsp. enterica serovar Paratyphi A str.
MNQTLLSSFGTPFERVELALDALREGRGVMVLDDEDRENEGDMIFPAEIMTVEQMALTIRHGSGIVCLCITEDRRKQLDLPMMVENNTSAYGTGFTVTIEAAEGVTTGVSAADRVTTVRAAIKDGAKPSDLNRPGHVFPLRAQAGGVLTRGGHTEATIDLMTLAGFKPAGVLCELTNDDGTMARAPECIAFAGQHNMAVVTIEDLVAYRQAHERKAS

SEQ ID NO: 3379 - protein, 546 aa, Prochlorococcus marinus subsp. marinus str. CCMP1375
MTATNSLNIAFDQIADALAAIRNGECVVVVDDESRENEGDLICAAQFATPQQINFMATEARGLICLAMDGERLDQLDLPLMVDRNTDSNQTAFTVSIDAGPEYGVSTGISAEDRARTIQVAINPQTKPNRLRRPGHVFPLRANKGGVLKRAGHTEAAVDLSLLSGLSAAGVICEIQNADGSMARLPELTKYAKTWGLKIISIADLIRFRLENERFVYRKAKTRLPSIFGDFQAIGYTNELDGTEHIALVKGNINELKEPVLVRMHSECLTGDAFGSLRCDCRPQLEAALNLISEEGEGVVVYLRQEGRGIGLINKLKAYSLQDGGLDTVEANLKLGFAADLRNYGVGAQILTDLGINRLRLLTNNPRKIAGLGGYGLRVESREPLVINPTDYNANYLAIKRTKLGHYIGNDDDSGKYYVIYWKGIVSSNMLSAYKNKAEQIASDNKVELNPESSSRLLALLQRPQFVWRVQNCIDFESIINLLKEIIKWDGTKSIGIFITNSKEQAIHPSQDVETILENISNLKDTNYKNIANINDKDLPFIMTWQ

SEQ ID NO: 3380 - protein, 112 aa, uncultured prokaryote
WTMVAGGGASVVYADTIADMAGGVEDLANYGEYSGGPTTDETRFYTETVLDLMTREKDPKGRDKILIIGGAIANFTDVAKTFTGIIQAFEKYADKMKDVGTRIYVRRGGPNY

SEQ ID NO: 3381 - protein, 116 aa, Avena fatua
SQVYQKYKDQGLEILAFPCNQFGGQEPGTNEEIVEFACTRFKAEYPIFDKVDVNGKEVSPLYKFLKSSKGGLFGDSIKWNFSKFLVDKEGRVVDRYAPTTSPLSIEKDIKKLLGTS

SEQ ID NO: 3382 - protein, 112 aa, uncultured prokaryote
WTMVAGGGASVVYADTIADLAGGVEELANYGEYSGGPTTDETRFYTETVLDLMTREKDPKGRDRILIIGGAIANFTDVAKTFTGIIQAFEKYADKMKDVGVRIYVRRGGPNY

SEQ ID NO: 3383 - protein, 111 aa, uncultured prokaryote
WTMVAGGGASVVYADTIADLAGVEDLANYGEYSGGPTTDETRFYTETVLDLMTREKDPKGRDKILIIGGAIANFTDVAKTFTGIIQAFEKYADKMKDVGTRIYVRRGGPNY

SEQ ID NO: 3384 - protein, 116 aa, Thermus thermophilus HB27
MKLIVAIVRPEKLNEVLEALFQAEVRGLTLSRVQGHGGETERVETYRGTTVKMELHEKVRLEIGVSEPFVKPTVEAILKAARTGEVGDGKIFVLPVEKVYRIRTGEEDEAAVTPVQ

SEQ ID NO: 3385 - protein, 93 aa, Brassica napus
  misc_feature (28)..(28): Xaa can be any naturally occurring amino acid
  misc_feature (46)..(46): Xaa can be any naturally occurring amino acid
  misc_feature (70)..(70): Xaa can be any naturally occurring amino acid
IFLLSINPPVGTKGVPWPKFGDWDVNDXASAEGFTVIFKHNHRDEXKKTGEANRGSPGKSTDGHAKSGEXGGDPNKPQPKKWLCCMQSPAVDS

SEQ ID NO: 3386 - protein, 111 aa, uncultured prokaryote
WTMVAGGGASVVYADAIADFAGIADLANYGEYCGGPTTGETKFYAETILDLMTREKDPQGREKILIIGGAIANFTDVAKTFTGIIQAFEEYADKMKDVGDKIYVRRGGPNY

SEQ ID NO: 3387 - protein, 204 aa, Glycine max
RGRVGGRVGEHIAMVKGDIGDGHDVLVRVHSECLTGDIFGSARCDCGNQLALAMQQIEAAGRGVLVYLRGHEGRGIGLGHKLRAYNLQDDGRDTVEANEELGLPVDSREYGIGAQMLRDLGVRSMKLMTNNPAKYIGLKGYGLTVSGRIPLLTLITSENKRYLETKRVKMGHIYGTEFNGRLSTHDSGNGNATRIEDSNAVTGL

SEQ ID NO: 3388 - protein, 651 aa, Arabidopsis thaliana
MQDLFGSVRRSLVFRSTTDDENQENHPPPFPSLLADKITSCIRKSMVFAKSQSPPNNSTVQIKPPIRWRKGQLIGRGAFGTVYMGMNLDSGELLAVKQVLITSNCASKEKTQAHIQELEEEVKLLKNLSHPNIVRYLGTVREDETLNILLEFVPGGSISSLLEKFGAFPESVVRTYTNQLLLGLEYLHNHAIMHRDIKGANILVDNQGCIKLADFGASKQVAELATISGAKSMKGTPYWMAPEVILQTGHSFSADIWSVGCTVIEMVTGKAPWSQQYKEIAAIFHIGTTKSHPPIPDNISSDANDFLLKCLQQEPNLRPTASELLKHPFVTGKQKESASKDLTSFMDNSCSPLPSELTNITSYQTSTSDDVGDICNLGSLTCTLAFPEKSIQNNSLCLKSNNGYDDDDDNDMCLIDDENFLTYNGETGPSLDNNTDAKKSCDTMSEISDILKCKFDENSGNGETETKVSMEVDHPSYSEDENELTESKIKAFLDDKAAELKKLQTPLYEEFYNGMITCSPICMESNINNNKREEAPRGFLKLPPKSRSPSQGHIGRSPSRATDAACCSKSPESGNSSGAPKNSNASAGAEQESNSQSVALSEIERKWKEELDQELERKRREITRQAGMGSSPRDRSLSRHREKSRFASPGK

SEQ ID NO: 3389 - protein, 289 aa, Listeria innocua
MTHLTLPILEDWEGLTLTAILQEKFHLGKKARHEIRMSQDVLLNNKPLDDWNTPLFVGASLSLPIILHDKIPVYEYDLEIIYEDDFLLVVNKPVGMKTHANDSYETDTCANAVQYYLEKTGQEANALAVHRLDQTTSGLVLFAKNKLAIAGLSWQMENRAIHRTYLAAVDGTWGLVMQTINKPIGEDRHHGSRRQISPYGQPAVTHVKVLENDNENNTSLVECQIETGRTHQIRVHLSGIGHPIIGDTLYGGSSRANRIMLHAEKLHLNHPFKGKEMNFSAPAGDDWVF

SEQ ID NO: 3390 - protein, 725 aa, Oryza sativa (japonica cultivar-group)
MAPARSIVQHTQPPGTPTHYTGMLPLARVLGIDTEASLFQAAAAGVQSSKSRFFRARLGLHLTKKDGWIIWTLVRSTTFKTFCTTGLPSDVVIEVGDMTFHLHKFPLMSRSKKLHDLITNRESRAAGGGEQDEEEEEDAGEIREEEVVLEVDEDSDVHRIRLPDFPGGAEAFEQAAKFCYGVKLDLTPATAAPLRCAAERLGMSDDHSDDNLISRADRFMSHTVLRNPRDAIRALRSCEGLLPLADDLGLVSRCVDAIAAKAAASTPTALFGWPINDAAAAAAAAAGDRPRRKNNAGAGATWFDDLAGLSLATFTRVIAAMKERNVGPEIIEGALIAYAKRSIPGLSRSGRHVGGATAAAAAAPSSDGEQKALLETVIANLPEETIKSNAHTGTAVGATTARVLFGLLRTTSILQASESARDMLERRIAARLPDAALDDLLIPSYSYLVETLYDVECVERIVRYFLEGRDADDGNDDGSELETPGREASRRAMLAVGRLMDAYLGEIAADANLKPDKFCDLAWALPDGARVYDDGLYRAVDIYLKAHPGLREEEKEKVSGVVDGRKLTLEACTHAAQNERLPLRTVVQVLFFEQLQLRRAIARTIMANEGGAAGQGEEEGDSDAGGTWRVATRGNQMLRLDMDSMRNRVQELERECTSMRKAIEKMDRRGGGSTPGERGATPAMEGRWGSMVTKRFGCKFPAQVCQSQQRTVVARPRRPRIEQSP

SEQ ID NO: 3391 - protein, 135 aa, Glycine max
MMRRLRLGMDGDGEELTAQETALYDRQIRVWGADAQRRLSKSHVLVYGMKGTVAEFCKNIVLAGVGSLTLVDDRAATEEMLSSNFLIPPDENVYSGKTLAELCCNSLKDFNPMVHVSVEKGDLSSFDVEFLSKFD

SEQ ID NO: 3392 - protein, 247 aa, Glycine max
MYVASMRKSFKDSLKVLEADIQHANTLASDFPREYDGACLQMRMSYSPAAHLFLFLVQWTDCHLAGALGLLRILIYKVYVDGTTTMSTHERKASIREFYAVIYPSLLQLEKGVTDTEDKKQKVVCMERYRRRDDEEYRQSSDIDIEREDECGICMDMNSKIVLPNCNHAMCLKCYREWRTISQSCPFCRDSLKRVNSGDLWVFTDRRDVVDMATVTRENLRRLFMYIDKLPLIVPDSLFDTYDSHIR

SEQ ID NO: 3393 - protein, 369 aa, Chlamydomonas sp. W80
MSGKAVHARQASRARKGAPIRMESDASEKKLKVAINGFGRHRPSFLPRLGGPQQSRLLDAGSAINDSGGVKQASHLLKYDSILGTFDAEVKIVDDSHISVQRQVRIQIVSSRDPLQLPWKALDIDLVIEGTGVFIDTKGAGKHIEAGAKKVLITAPAKGDGIPTFVCGVNADDYKHEYPIISNASCTTNCMAPFVKVLEEKFGIIKGTMTTTHSYTGDQRLLDASHRDLRRARAAAMNIVPTSTGAAKAVALVLPSMKGKLNGIALRVPTPNVSIVDLVVQVEKKTFAEEVNAAFREAANGAQKGVLAVSDEPLVSVDFRCSDVSSTIDASLTMVMGDDMVKVVAWYDNEWGYSQRVVDLAEITAQKWE

SEQ ID NO: 3394 - protein, 215 aa, Brassica napus
  misc_feature (71)..(71): Xaa can be any naturally occurring amino acid
MESPAAATAKPARGAGGRKGGDRKKSVTKSVKAGLQFPVGRISRYLKKGRYAVRYGAGAPVYLAAVLEYLXAAEVLELAGNAARDNKKNRINPRHLCLAIRNDEELGKLLHGVTISSGGVLPNINPDLLSQKRLEFFLTLTRFFSPRELLVLRKQLRNLPFFFGFSDYVGCLLYVYLRLVLSMMNPVEDYVIKSHFVMKEVPSSVSKQKKKKRAA

SEQ ID NO: 3395 - protein, 479 aa, Haloarcula marismortui ATCC 43049
MRRDFLSGGREPRDMDNDADVDAGAIAFGTDGWRATLDVFTKPRVRMVGQAVATTLAERGASGTVAIGYDARETSPGFADELAHVLRANGFDVLLPDRDTPTPILAWTVKDRGLAGALQITASHNPPEYNGVKFIPGDGSPALPDWTAAFEENLAVLDPLPEDEWGERTEEDLIGPFHDHALDFVDTDLDDLSVAYDALYGSGRGVTDALLEAAGADVTRLNCEQDPEFGGGSPEPSAENAEGLVGEVSEGDAALGIINDGDADRIGVVTPDRGYLDPNLFFAAMYDFLLEDGTGDVVRTVSTSSIVDRVAEAHGQNVHEVAVGFKWVAEAMAEHDALFGGEESGGFGLPDHLRNKDGVLVALAAAAAEREEPLDARVDRLLDEHGEIHQDRISVDCSDDRKEPVLEDLETALPETLAGVAVDGINTVDGFKIRLEDGTWVLVRPSGTEPKLRVYAEAGSDARVGELLDAGQELVEPLV

SEQ ID NO: 3396 - protein, 323 aa, Desulfitobacterium hafniense DCB-2
MTNTVRKIAVLTSGGDAPGMNAAIRAVVRKGIYHGLEVFGIRKGYEGLIHGEFITMHLGAVADIIHRGGTMLMTARSQEMLTPEGQKNAAAQLRYRGIDALIVIGGDGSFRGAQTLSAQGIAIVGIPGTIDNDITGTDLTIGFDTAVNNVVQAVSKIRDTATSHDRTFLVEVMGRDCGNIALQSGVACGAESILVPEIEPDLDDIVAKLERGHQRGKHHSIIMVAEGAMSAWNLGEELRQRTGFETRVTILGHIQRGGNPSALDVVLASQMGGKAVEILCAGETDRMTACVNQEIQSLPLEVAYGERKPFNKVLYDLANQLAI

SEQ ID NO: 3397 - protein, 513 aa, Rhodopseudomonas palustris CGA009
MADAATPPSGFQANLDRAAPLLKQLKADGIGHLIGGEIVAASSGEVFETASPIDNSVLAQVARGTAADIDRAAKAAKAAFPAWRDMAPAKRRKLLHTIADAIEARADDIAVLECIDTGQAHRFMAKAAIRAAENFRFFADKCAEARDGLNTPSDEHWNVSTRVPIGPVGVITPWNTPFMLSTWKIAPALAAGCTVVHKPAEWSPVTADMLARICKDAGLPDGVLNTVHGFGEEAGKALTEHPAIKAIAFVGETATGAAIMAQGAPTLKRVHFELGGKNPVIVFGDADLDRALDAVVFMIYSLNGERCTSSSRLLVQSSIADSFIEKLAARVRALKVGHPLDPATEVGPLIHQRHLDKVCSYVDVARKDGATIAVGGAPFDGPGGGHYVQPTLVTNARSDMQVAQDEVFGPFLTVIPFKDEAEAIQIANDVRYGLTGYVWTADMGRALRVADALEAGMIWLNSENVRHLPTPFGGMKQSGIGRDGGDYSFDFYMETKHVSLARGTHKIQKLGAV

SEQ ID NO: 3398 - protein, 356 aa, Glycine max
MNTLSSTLHGGWLPRSASKTKTASLSKCHRIWVTKASVAVEQQTKVALIRIGTRGSPLALAQAYETRDKLMASHPDLAEEGAIEIVIIKTTGDKILTQPLADIGGKGLFTKEIDEALLNSEIDIAVHSMKDVPTYLPDKTILPCNLPREDVRDAFISLTAASLADLPPASVIGTASLRRKSQILHRYPSLNVQENFRGNVQTRLRKLNEGVVQATLLALAGLKRLSMTENVTSILSIDDMLPAVAQGAIGIACRSDDDKMAEYIDSLNHEETRLAVVCERAFLQTLDGSCRTPIAGYACRNEDGNCLFRGLVASPDGTRVLETSRVGPYAVEDMIEMGKDAGKELLSRAGPNFFSS

SEQ ID NO: 3399 - protein, 529 aa, Arabidopsis thaliana
MAASPKIGIGIASVSSPHRVSAASSALSPPPHLFFLTTTTTTRHGGSYLLRQPTRTRSSDSLRLRVSATANSPSSSSSGGEIIENVVIIGSGPAGYTAAIYAARANLKPVVFEGYQMGGVPGGQLMTTTEVENFPGFPDGITGPDLMEKMRKQAERWGAELYPEDVESLSVTTAPFTVQTSERKVKCHSIIYATGATARRLRLPREEEFWSRGISACAICDGASPLFKGQVLAVVGGGDTATEEALYLTKYARHVHLLVRRDQLRASKAMQDRVINNPNITVHYNTETVDVLSNTKGQMSGILLRRLDTGEETELEAKGMFYGIGHSPNSQLLEGQVELDSSGYVLVREGTSNTSVEGVFAAGDVQDHEWRQAVTAAGSGCIAALSAERYLTSNNLLVEFHQPQTEEAKKEFTQRDVQEKFDITLTKHKGQYALRKLYHESPRVILVLYTSPTCGPCRTLKPILNKVVDEYNHDVHFVEIDIEEDQEIAEAAGIMGTPCVQFFKNKEMLRTISGVKMKKEYREFIEANK

SEQ ID NO: 3400 - protein, 1376 aa, Lactobacillus paracasei
MEMDEKKHYKMYKSKSVWVFACLSTCLIVSFFNDGQNVSAATSASSTQISQTNTGSQPNNETTGETAQSSVNSTATASSSSVADLPSSSDSKSSIGSTISQPTVDKKETSKSDTADNDLTKSVTTSDSDKALPTSKTTLPTSNEQVQSSVGQSQTDQSASSATIATNAVTSDVSQNDQYNEPYRNQYHYSSSQNWINDPNGLFYDSKTGLYNLYYQYNPEGNQWGNMSWGHAVSKDLINWTQEDVAIPMLQNQGWEDFTYTNTTGSLKDKGEVRYVGVPTTNWGDADGKKAIFSGSIVVDTNNVSGLGKDAILAFYTADYQIATRKNDGAEDGWGTWIGLTEIQEQHLAYSLDGGKTFIQYSKDGNAANPQAIIPTSMNQGGDAANFRDPSVVYDAVNKQYYLTVVSGQQALIYKSSNLLDWTYASKIERENDVGNGVWECPSLVPMKVAGTNETKWVFCISVQQGAHATGSGMQYYVGNMTADGTWVPESSKTLQNPMTMDSGEDFYAGIPFSNMPDGRTVMLAWQSNWSYVDEAKTSPWSGNMTLPRELSLKKNADTTDGYLLTNTVVKEIANNEEANVINKAESNFTVSRSDEQVQYEGKQYKISATFSWDEADKPKSVGFKLRVSDDQKYDMIVGYDLTTGLLYVQRLNTGEPNMGAPRDKMNATVNADGSITITVYVDETSIEAFANDGEKSITQNFFMRPENIGDQATTGVYVYSNDGTTKISDLTINPITSIWNSTGQLTEKFVDENGNTIASDKIQTGRVGQSYTSESATIPGYVFVKENTDHINSNQLYTTQNQTITYTYRASQASVVTKDTTLAAGPSAAWNAADNLVGATDADGNALAVSDLTVNGAVDPKTPGTYTVTYSYTDATGNKISKKATVTVIASKADIVTKDTTMVAGASTIWNAADNFVEAKNADGNALTVSDLMINGTVDSKTPGTYTVTYSYTDAAGNKINKEAIVTVIASKADIVTKDTTMVAGPSAAWNAVDNFVEATGADGNALALSDLTVNGAVDPKTPGTYTVTYSYTDPAGNKISKEATVTVIASKADIVTKDTTMVAGPSATWNAVDNFVEATGADGNALALSDLTVNGAVDPKTPGTYTVTYSYTDVAGNKISKEAIVTVIASKADIVTKDTTKVAGPSATWNAADNLVIATDAKGNALALSNLTVTGSVDSKTPGTYTVTYSYTDAAGNKISKEATVTVIASKADIVTKDTTMVAGPSAAWNAANNLVSATDADGNALAMSNLTVTGTVDLKTQGTYTVTYTYTDVAGNKISKEATVTVLTEKETNIEDNTGSSISNDRENPPASITGKGGDDIHQNAKTTMTKKKTETLPQAGNHVNELAIVLGQMILAICVGGILWLKRRVKRV

SEQ ID NO: 3401 - protein, 424 aa, Oryza sativa (japonica cultivar-group)
MGIFWSKAEPPPPMVLVPPLFDYPPIAARTRMSVPAYELMFGKLSLQNLFEDYFDHAGNMTSRVMLKPLEDPHVDLIATVSAAADKIDGTQVKGDALFRWQKDLDDPHTFVDLLVSTSNPMLQVRSCAYHPKYRVGAFGTFPLLMGNRVRSEDYGVMGVRYGSENLSFGSSFVPFPGSAELPSGAWLVGRKGSLSAGVQYKPLSGNKHLMPYTDWKNWNCAISYGVGLTSPLSPSFIFSLELARSTEFIASFYQHMVVQRRVKNPFEDDQIVGITNYIDFGLELATRIDKDKPSESANNSLFQFAASWQANKNFLFKGKLGPSKSSVALAFKSWWRPSFTFSVTAVNDHLKGTRSYGFGIRVEDLRQPSYQRADPNYVMLTPSKEHLAPGVLREYGKRPMFQAEVDSGNYDHLPTELKPISKIF

SEQ ID NO: 3402 - protein, 340 aa, Arabidopsis thaliana
EFRAEEHSNQFHSIIAMAIWLGAIHFNVALVLWCLIFLPPSLSLMYIHLSLYLSISLCLLLQVSNLNSLKSSVFVRVLGLLSLFIFIPIDHRSKYGRKLARYICKHACNYFPVSLYVEDYEAFQPNRAYVFGYEPHSVLPIGVVALCDLTGFMPIPNIKVLASSAIFYTPFLRHIWTWLGLTAASRKNFTSLLDSGYSCVLVPGGVQETFHMQHDAENVFLSRRRGFVRIAMEQGSPLVPVFCFGQARVYKWWKPDCDLYLKLSRAIRFTPICFWGVFGSPLPCRQPMHVVVGKPIEVTKTLKPTDEEIAKFHGQYVEALRDLFERHKSRVGYDLELKIL

SEQ ID NO: 3403 - protein, 825 aa, Triticum monococcum
MAFSPRSPWSRSKKPDIYSTVVVHDDEDNARGGGAARAEDDDDDDPSALPPLLQRLPKDFGGASFDDDDDPYSSDLDDASLSATVVIKRGAPASTSSSSRSPFLDLRRSSPRAAEADPFSTFVVHGTARSGGASSPRESVSGTFIRHSGGPPSPRESVSGTFIRHTRGSSSPHESFSGTFIHHTSSASSPRDSASGAGAGFGSSFITPSSGQAEEDRQPSLLMQQQQSRRKASMSSLPDSVTREDPSTKYELLHELGKGSYGAVYKARDLRTQELVAVKIISLTEGEEGYEDIRGEIEMLQQCSHPNVVRYFGSYQGEEYLWIVMEYCGGGSVADLIGITEEPLDEPQIAYICRETLKGLAYLHTIFKVHRDIKGGNILLTEQGEVKLGDFGVAAQLTRTMSKRNTFIGTPHWMAPEVIQESRYDGKVDVWALGVSAIEMAEGMPPRSTVHPMRVIFMISSEPAPMLEDKEKWSLLFHDFIAKCLTKDARLRPPAIEMLKHKFIEKCNTGASKMLAKIKEAKIIRETAVQNQLPDSDDAMDATVRINEDYGETVPTNSQSTHETKNDGSGGDFGTMIVHPEDGDEAAESSIFPRAEFIPGLGSINSFTHDPKRAELISKFWAESTAESDASKERDLYGLPDIQEPKTMPRSTGTVKHHKGVEGTVLRHDITASPGVASTMNKLSSSPSRKAFSVQDKLWSIYAAGNTVPIPFLKAIDISPLALVSDSVAGNGPAGSSTTDALEAVRELFSGDGQAKKGRKGQNEAPLPPGVHDRLTTSPTLMNLAQALAYHKTCYEDMPLQDSQATEEQQTIQNLCDTLRTILRL

SEQ ID NO: 3404 - protein, 258 aa, Silicibacter sp. TM1040
MAYETINVDTQDHVCLIKLNRPEALNALNSVLLGELCAALEEADASDKVRCIVLTGSEKAFAAGADIKEMSEMSYVDVFTSNLFADANDRIAAIRKPIIAAVSGYALGGGCEVAMMCDFIIAAETAKFGQPEINLGVIAGMGGTQRLTRFVGKSKSMDMNLTGRFMTADEAERAGLVSRVVPAKKLIEEAMAAASKIAEKSVLTSIAAKEAVNRAYELPLSEGMLFERRVFHSMFATEDQKEGMAAFLEKREAQFRDK

SEQ ID NO: 3405 - protein, 303 aa, Candidatus Kuenenia stuttgartiensis
MSAKLIKGTEIGEQILEEITGEVAEIKKKHGVVPGLVTILVGENPASMSYVTLKIKTAHRVGFKEVQDSQPADISEKDLLALIEKYNHDDSIHGILVQLPLPKHIDEKKVLNAIDPDKDVDGFHPVNVGRLMIGGNEVKFPPCTPAGIQELIVRSGVETRGAEVVVVGRSNIVGKPIANMMLQKGKGADATVTIVHTQTRNMAEHCKRADVLIVAAGVPGLVKPEWIKPGACVIDVGVNRVGEKPSKNDPNKMVALLKGDVDFEAASEIAGFITPVPGGVGPMTITMLMRNTLRSLKFKLGIK

SEQ ID NO: 3406 - protein, 123 aa, Pinus taeda
MAVKKMVEAVFVVGLVVTMMNVWGAVPVEGAISCNQVVSAMTPCATYLIGNAATPAATCCPSIRGLDSQVKATPDRQAVCNCLKTQAKSYGVKLGKAANLPGLCKVTDLNVPISPNVDCSKVH

SEQ ID NO: 3407 - protein, 753 aa, Methanosarcina barkeri str. fusaro
MASVETTERLGCSLGFFSTFAIGTGTMIGAGIFVLPGIALADAGSGAIISFLLGGLISIATAISMSELATGMPLAGGSYYYISRTMGAALGAIIGLGSWLALIFKGTFALIGLAEYAQIFYPLPLYFVAAATGVILLVINYRGAKSSGSLQNFIVIFLLVILALFIARVSFMVNPANLSPATSYGGTSIITTAGVIFISYLGLAEAAAVSEEVKNPSKTLPLAFIASAVVVTLFYVSTMAVVVGFSDPQVTGKSITPLADIAGLLAGESGRIAISLSALLATLSTANGAILSSSRFPFAMSRDALMPEWFVLIHQKFETPHNAILVTGIVMVLLLFLFDIEELARLGGAFNILIFILLNMAVIILRKRNLPGYEPTFRDPFFPYTQIFGIVGSIVLLPLLGGLPLLFTIMMIFAGIGWYSFYGRGKAVPEYNLFDLLENTVEKKEIEPVPLVKVLVPISNQKHERDLLKLADFMGSEIICLHVIEVPDQTNLKLAQEAYHEKKIEMDCRFKEEFENYPAILGHKREYIAAFDHNISNSILEQAEIEHADMIIMGWHEPKRFEYSHGVTNQVLLSSKSPIALLKGHLPDSINKILVGYNGKENSIYGLSLAEKLAVNTGAGIEIISIISPDEAQENRQKITDELESLVKKISSIPVSFRVLEKYSIEDALLEASNNNDLTIIGDSSERFKISLLGTLSQRIAKHSKKPIVVVKKSKPISKESFNYLVKKHARKIYARLRGKEVKLNSDKSAVLA

SEQ ID NO: 3408 - protein, 111 aa, uncultured prokaryote
WTMVAGGGASVVYADTIADFAGIDDLANYGEYSGGPTTGETKFYAETILDLMTREKDPQGRDKILIIGGAIANFTDVAKTFTGIIQAFEKYADKMKDVGVKIYVRRGGPNY

SEQ ID NO: 3409 - protein, 111 aa, uncultured prokaryote
WTMVAGGGASVVYADTVADLGQVEELANYGEYSGNPSRTETREYVKTVFDLMTREKHESGKPKILIIGGAIANFTDVAKTFDGIMDAMKEYADKLKDVGIRIYVRRGGPNY

SEQ ID NO: 3410 - protein, 111 aa, uncultured prokaryote
WTMVAGGGASVVYADTIADMAGIEDLANYGEYSGGPTTGETKFYAETLLDLMTREPDAQGRGKVMIIGGAIANFTDVAKTFTGIIQAFENYADKMKAVDLKIYVRRGGPNY

SEQ ID NO: 3411 - protein, 337 aa, Streptococcus pyogenes MGAS10394
MKRIAVLTSGGDAPGMNAAIRAVVRKAISEGMEVYGINRGYAGMVDGDIFPLGSKEVGDKISRGGTFLYSARYPEFAQLEGQLAGIEQLKKHGIEGVVVIGGDGSYHGAMRLTEHGFPAVGIPGTIDNDIAGTDYTIGFDTAVNTAVEAIDKLRDTSSSHGRTFVVEVMGRNAGDIALWAGIASGADQIIVPEEEFDIEKVASTIQYDFEHKGKNHHIIVLAEGVMSGEAFAQKLKEAGDKSDLRVTNLGHILRGGSPTARDRVIASWMGSHAVELLKEGKGGLAVGIHNEELVESPILGTAEEGALFSLTEEGKIIVNNPHKARLDFAALNRSLSQ

SEQ ID NO: 3412 - protein, 108 aa, uncultured prokaryote
TMVAGGGASVVYADTIADLAGVKDLANYGEYSGGPTTAETEFYAETIFDLMTRHKDPRGKILIIGGAIANFTDVAKTFTGIINAFEKYADKLKEHKTKIYVRRGGPNY

SEQ ID NO: 3413 - protein, 112 aa, Prochlorococcus marinus subsp. marinus str. CCMP1375
MKKIEAIIRPFKLEDVKIALVNLGIVGMTVSEVRGFGRQKGQVERYRGSEFTVEFLQKLKIEVVVADESVDGVIKAIAEAAKTGEIGDGKIFVSSIETVLRIRTGESDDSAL

SEQ ID NO: 3414 - protein, 350 aa, Medicago sativa
MLDAVNEPENTELRHHDRRKCTHDRFMGSNFQLKDSDRPSSSIDSITNRADQILDDADVGECEIPWEDLVIGERIGLGSYGEVYRADWNGTEVAVKKFLDQDFSGAALSEFKREVRIMRRLCHPNVVLFMGAVTRPPNLSIISEFLPRGSLYRILHRPNCQIDEKQRIKMALDVARGMNCLHASTPTIVHRDLKSPNLLVDNNWNVKVCDFGLSRLKHNTFLSSKSTAGTPEWMAPEVLRNEPSNEKCDVYSFGVILWELATLRLPWSGMNPMQVVGAVGFQNGRLEIPKELDPLVARIIWECWQQDPNLRPSFAQLTVALKPLQRLVIPSHQDQVASPLPQEISVNSTP

SEQ ID NO: 3415 - protein, 979 aa, Coccidioides immitis RS
MTVSSPPPSSPFYLLSYPAPGVLLVTINRPKQRNSVPFQGHWDLHKLWQWFDSEGSLQVGIITGAGDKAFCAGQDLLEVERNRLNPPTEPYLQGHPPSGFAGISTRKGKKPIIAAVNGFAYGGGFEICLNCDMVIASPRAQFSLPEAKRGIYAAAGGLPRIMRIAGLQIASEIALTGRPISAEEAKSWMFVNRISKTHESLIDEAVEFAKELSQLSPDALIVTRAGIREAWEVAGIDKATANTRDRYDQGLHSGENVKEGLAAFREKRAPNLKLGGGTSQHADDGRSEQFEQLCRVLFGSWLATPGHGTPRTLCHICHTFSQSILYRGDRWGPKFVTGDEGTSLDRPMFCSEWPVSSPSGYKITDHMVNEAFPERPSFKIAMLGAGAAGIDFLHHAILAFKDDPDVDLVVCEKNHDIGGTWLENRYPGCACDVPSASYQFPWRPNPGWTMYYSTSREIWEYLRKIVDDEGMMRYIRLRTAIVHAAWQEPKSKWVLHLVERNEKDEVVREWDEEFDMFLSGAGILNAWKWPDIPGLHRFKGRLFHTARYEEGFDLKGKSVAVIGSGSSGVQTVAAIYNDVSKLYTWVRTPTWITPGFAQKYAGPDGKNFAYSEEQKDIWRAYPEKYRSYRKMIEDELNGRFRFVLRNSKESDDAILIIPQNFNVGCRRPTPGNGYLEALVGSKTTCYTENIGGITPNGFLTTDGTEVNVDVIICATGFDTTFRPRFPIIGLDGKNIADRWKNRAESYISVSVSNVPNYFMYGGPYSPVAQGSILPILTLLSNHFIQVIKKMRKEHIRRLSPKESAMRDFVEHASVYLQRTAWADPCSSWFKQGKIDGNIVMWPGSRLAFFDLIKEPKYEDYEIEYWSGNRWGYLGNGFSTVEFDGSDISSYLNCELFPQEPAASKQEEKVESNPLHSPAKDSLKSKEFDSLGLLQDTPGFQVARKYDLKRPVLANPGQPRAPQKAKSYEGMILSKSHQKL

SEQ ID NO: 3416 - protein, 436 aa, Lactobacillus johnsonii NCC 533
MKRQISFGQALATVVGTVIGGGVFFKIGSISHETGTSSLTLFVWILAGIVSIASGLTVSEIAAALPVTGGSIKYIEYTYGKVWGFLFGWAQMLVYFPANIAALSVIFGQQFVVLFNLPAKYATLIGLLLAIFLMGLNFISTKFSTRMQSVMTILKAIPIALIVLFGLFNSSKVDINLFPLSAGHNTSFWTGLSGGLLAALFAYDGWINVTNLAGEIEKPEKNLSRAIIIGLSAITLIYVLVNYAFLTAIPFKEIVGNQNTAYLASLKLFGSLGGKLVTIGILISVYGAINGFMLTGMRIPYTLAKNKMLPFSDKISRTNVNTGVPTLSALIILVVSLIMILLGTFDLLTNMLVFVMWTFTTLISIAVVILRYREPKLERPYVVPWYPIVPIISIGGGLFIVISTVINEFWLSITGIGLTLLGLPIYYYMKKQNNRQ

SEQ ID NO: 3417 - protein, 311 aa, Zea mays
MPCLQWQRTGFHFQPQKNWMNDPNGPVYYKGWYHLFYQYNPDAAVWGNKIAWGHAASRDLVHWRHLPLAMVPDHWYDTNGVWTGSATTLPDGRLAMLYTGSTNASVQVQCLAVPADDADPLLTNWTTKYERNPVLYPPRGIGPRDFRDPTTAWLDPSDGAWRIVIGSKDDDDDHHAGIAVVYRSRDLVHFDLLPGLLHRVAGTGMWECIDFYPVATTGGVDMSDASIGTNDVLHTFYDPAKRRRVLWGWVGEADSERADVSKGWASLQGVPRTVLLDTKTGANLLQWPVEEVETLRANSTDLSGITVDHGS

SEQ ID NO: 3418 - protein, 414 aa, Oryza sativa (japonica cultivar-group)
MRRYDEMPPAMVLVPPPFTFPAAAARTRMAVPAYEVMFGKLQRRSLFDDYFDQVGSITSGMIMLRPLVDSHVDLTAKMTTTGGEALFRWQRYLDDPNTFMDLHLSTPKPMVQLRSCAYYPKYRIGAFGTFPLLKANRDCSEGDYGIMGLRYGSENLSIGASFLPFALSGQVPYGAWLVGRKGNISAGIQYKPLCESMHPVPLTDLKNWNCAISYGMGSTSPLSPSFNFSLELVRNTQLVASFYQHFVVQRRVMNPREEEHIIGTTNFVDFGLELATSLDKDKAKENASNPSFQVAASWQASKNFLVKGKLGPSKSSMALAMKSWWRPFFTFSFTAMYDHLKGTGSYGFGISIEDLKEPSYQMAYSNYVIVTQNKEDVEPRFLKKLGKKYIFQPDIDSGNYDNLPTGLKPIDKIL

SEQ ID NO: 3419 - protein, 499 aa, Glycine max
  misc_feature (151)..(151): Xaa can be any naturally occurring amino acid
MNSNGYPASSFKIPTVKFTKLFINGHFVDSLSGGEFETIDPRTGEVIARIAEGTKEDIDLAVKASRLAFDHGPWPRMPAVERARIMMKWADLIDQHVEEIAALDAIDAGKLYHMLKAIEIPATANTIRYYAGAADKIHGEVLKPAREFHAXTLLEPVGVVGHIIPWNFPSIMFVSKVSPCLAAGCTMVLKPAEQTPLSALFYAHLAKLAGIPDGVLNVVPGFGATAGAAICSDMDIDKVSFTGSTEVGREVMRAAANSNLKPVSLELGGKSPFIIFDDADLDKAVELALMAVVYNKGEVCAAGSRVFVQEGIYDEFEKRLVEKAKAWVVGDPFDPNVQQGPQVDKKQFEKILSYIEHGKREGATLLTGGKRVGNKGYYIEPTIFSNVKEDMLIAQDEIFGPVIALMKFKTIEEAIKSANNSRYGLVAGVVTKSLDTANTMSRSIRAGVVWINCYFAFENDIPYGGCKMSGFGKDSGLEALHKYLHVKSVVTPIYNSPWL

SEQ ID NO: 3420 - protein, 404 aa, Oryza sativa
MASAACSSSASALVRLTGPIHLCSAPPRGSARRRHASVRCSFAPVETARIKVVGVGGGGNNAVNRMIGSGLQGIEFYAINTDSQALLNSQAQYPLQIGEQLTRGLGTGGNPNLGEQAAEESKEAIANALKDSDLVFITAGMGGGTGSGAAPVVAQISKEAGYLTVGVVTYPFSFEGRKRSLQASALEALEKLERSVDTLIVIPNDRLLDVVDENTPLQDAFLLADDVLRQGVQGISDIITIPGLVNVDFADVKAVMKNSGTAMLGVGVSSSKNRAQEAAEQATLAPLIGSSIEAATGVVYNITGGKDITLQEVNKVSQIVTSLADPSANIIFGAVVDDRYTGEIHVTIIATGFPQSFQKSLLADPKGARIMEAKEKAANLTYKAVAAATVQPAPAATWSRRLFS

SEQ ID NO: 3421 - protein, 654 aa, Triticum aestivum
  misc_feature (157)..(157): Xaa can be any naturally occurring amino acid
  misc_feature (470)..(470): Xaa can be any naturally occurring amino acid
  misc_feature (479)..(479): Xaa can be any naturally occurring amino acid
MIPLCASSSPSTPAIIAPRPRRLRHRTTTPSLPHSRSPHRHLLLASPSSPAPTPRPLARAQRLAAAATAAEMVFSVTKKETKPYEGQKPGTSGLRKKVTVFQQPHYLANFVQATFNALPADQVKGATIVVSGDGRYFSKDAVQIIAKMAAANGVRRXVWVGQDSLLSTPAVSAIIRERISADGAKATGAFILTASHNPGGPTEDFGIKYNMGNGGPAPESVTDKIFSNTKTITEYLIAEDLPNVDISVTGVTSFTGPEGPFDVDVFDSATDYIKLMKTIFDFESIKKLLASPKFSFCFDGLHGVAGAYAKRMFVDELGASESSLLNCVPKEDFGGGHPDPNLTYAKELVERMGLGKTSNADPPEFGAAADGDADRNMVLGKRFFVTPSDSVAIIAANAVQSIPYFASGLKGVARSMPTSAALDVVAKNLNLKFFEVPTGWKFFGNLMDAGMCSVCGEESFGTGSDHIREXDGIWAVLAXWLSILAYKNKDNLGGDKLVTVEDIVLQHWATYGRHYYTRYDYENVDAEAAKELMANLVKMQSSLSDVNKSIKEIQPTVADVVSADEFEYKDPVDGSVSKHQGIRYLFGDGSRLVFRLSGTGSVGATIRIYIEQYEKDSSKTGRESSDALSPLVDVALKLSKIQEYTGRSAPTVIT

SEQ ID NO: 3422 - protein, 417 aa, Glycine max
  misc_feature (151)..(151): Xaa can be any naturally occurring amino acid
MLESGAKFPGIIDLNKNNNNYYDFSQGFYHKLGEGTNMSIDSVGSLQTSNGGGSVAMSIDNSSVGSNDSHTRMLDHQGLRRRANDNYSVAHSANRRGRVTHALSDDALAQALMDNSSPTEGLDNFDEWTIDLRKLNMGEPFAQGAFGKLYXRGTYNGEDVAIKILERPENDPAKAQLMEQQFQQEVTMLATLKHSNIVRFIGACRKPMVWCIVTEYAKGGSVRQFLMKRQNRSVPLKLAVKQALDVARGMAYVHGLGFIHRDLKSDNLLIFGDKSIKIADFGVARIEVQTEGMTPETGTYRWMAPEMIQHRPYTQKVDVYSFGIVLWELITGMLPFQNMTAVQAAFAVVNRNVRPIIPNDCLAVLRDIMTRCWDPNPDVRPPFAEIVGMLENAENEIMTTVRKARFRCCMTHPMTAD

SEQ ID NO: 3423 - protein, 306 aa, Methanococcoides burtonii DSM 6242
MVYDLIIIGGGPGGLSAGIYAVRYGLNTLVLEKGFVSGQISTTGDVENYPGFPSIGGMELMDKFAEHAKAAGVVVEDRDVLEVRSEGDMKIVHTSEGDIEASSVIIATGAEPKHLGIPGEEEFRGKGVSYCATCDGPFFSGRNVIVVGGGESAITDALILSDMAASVCVVHRRDELRASKILQDRAFARSNIEFLWGTTLEEIVGDSVVREAVIRDINAAEVCRVPIDGVFVYVGVKPSTGFVDVDKDKYGFIITNERMECSEKGVFAVGDCRNAILRQVVTAASDGAIAAFEAYNYVSSLERSGK

SEQ ID NO: 3424 - protein, 590 aa, Arabidopsis thaliana
MSAPKFGYVLLLIVLINISNNGVDAFHKVFKKLQSKSTSLESVSPLHRTAYHFQPPRHWINDPNAPMLYKGVYHLFYQYNPKGAVWGNIVWAHSVSKDLINWEALEPAIYPSKWFDINGTWSGSATHVPGKGPVILYTGITENQTQIQNYAIPQDLSDPYLKTWIKPDDNPIVKPDNGENGSAFRDPTTAWFNKKDGYWRMLVGSKRKNRGIAYMYKSRDFKKWVKSKRPIHSRKKTGMWECPDFFPVSVTDKKNRLDFSYDGPNAKHVLKVSLDLTRYEYYTLGTYDTKKDRYRPDGYTPDGWDGLRFDYGNYYASKTFFDDKTNRRILWGWANESDTVQDDTVKGWAGIQLIPRTILLDSSGKQLVFWPIEEIESLRGKNVQMTNQKMEMGQRFEVQGITPAQVDVDVTFNVGNLEKAEKFDESFATKPLELCNLKGSNVNGGVGPFGLITLATSDLEEYTPVFFRVFKDAASNKPKVLMCSDAKPSSLKKDTGTDAKERMYKPSFAGFVDVGLLDGKISLRSLIDHSVVESFGAKGKTVITSRVYPTKAVGEKAHLFVFNNGSQPVTVESLNAWNMQKPLKMNQGAK

SEQ ID NO: 3425 - protein, 246 aa, Zea mays
  misc_feature (235)..(235): Xaa can be any naturally occurring amino acid
MCGILAVLGCADDTQGKRVRVLELSRRLKHRGPDWSGMHQVGDCYLSHQRLAIIDPASGDQPLYNEDKSIVVTVNGEIYNHEQLRAQLSSHTFRTGSDCEVIAHLYEEHGENFIDMLDGVFSFVLLDTRDNSFIAARDAIGVTPLYIGWGIDGSVWISSEMKGLNDDCEHFEIFPPGHLYSSKQGGFKRWYNPPWFSEVIPSVPYDPLALRKAFEKAVIKRLMTDVPFGGLLSGXLDSSLGAAVTV

SEQ ID NO: 3426 - protein, 396 aa, Salmonella enterica subsp. enterica serovar Typhi str. CT18
MLDAQTIATVKATIPLLVETGPKLTAHFYDRMFTHNPELKEIFNMSNQRNGDQREALFNAIAAYASNIENLPALLPAVEKIAQKHTSFQIKPEQYNIVGTHLLATLDEMFNPGQEVLDAWGKAYGVLANVFIHREAEIYHENASKDGGWEGTRPFRIVAKTPRSALITSFEFEPVDGGTVAEYRPGQYLGVWLKPEGFAHQEIRQYSLTRKPDGKGYRIAVKREDGGQVSNWLHHHANVGDVVHLAAPAGDFFMNVAADTPVSLISAGVGQTPMLAMLDTLAKEQHTAQVNWFHAAENGDVHAFADEVSELGRTLPRFTAHTWYREPTEADRAQRVFDSEGLMDLSKLEAAISDPAMQFYLCGPVGFMQFAAKQLVSLGVNNENIHYECFGPHKVL

SEQ ID NO: 3427 - protein, 291 aa, Oryza sativa (japonica cultivar-group)
MAQIIDGKAVAADIRREVAADVAALSSAHNLVPGLAVVIVGSRKDSQTYVQMKRKACAEVGIRSVDVDLAEDISEAALVAEVHRLNADPAVHGILVQLPLPKHINEEKILNEISLEKDVDGFHPLNIGKLAMKGRDPLFLPCTPKGCMELLTRSGVTINGKRAVVVGRSNIVGLPVSLLLLKADATVSIVHSRTPNPESIVREADIVIAAAGQAMMVHYWIKPGAAVIDVGTNSISDPTRKSGYRLVGDVDFAEVSKVAGHLTPVPGGVGPMTVAMLLKNTVDGAKRGIVQ

SEQ ID NO: 3428 - protein, 404 aa, Campylobacter jejuni RM1221
MKRVVVTGIGMINALGLDKESSFKAICNGESGVNKITLFDATDFPVQIAAEVKNFDPLEVVDGKEVKKIDRFIQLGIKAAREAMQDAGFSEELDKEEFGIVSASGIGGLPNIEKNSIICSERGPRKISPFFIPSALVNMLGGLISIEHGLKGPNISCVTACAAGTHAIGEAYKSIALGNAKKMLVIGAEAAICPVGIGGFASMKALSTRNEDPEHASRPFDKERDGFVMGEGAGALVFEEYEEAKKRGATIYAELIGFGESADAHHITSPTLDGPLRAMKKALNMAGNPKVDYINAHGTSTPVNDKNETAAIKELFGNNIPLISSTKGQTGHCLGAAGAIEAVVSVMALRDGVVPPTINQLVKDDECDLDYIPNISRKVDLKVVMSNSFGFGGTNGCVVFKKVD

SEQ ID NO: 3429 - protein, 227 aa, Methanocaldococcus jannaschii [sequence omitted]

SEQ ID NO: 3430 - protein, 326 aa, Saccharomyces cerevisiae
MSTDSTRYPIQIEKASNDPTLLLNHTCLRVKDPARTVKFYTEHFGMKLLSRKDFEEAKFSLYFLSFPKDDIPKNKNGEPDVFSAHGVLELTHNWGTEKNPDYKINNGNEEPHRGFGHICFSVSDINKTCEELESQGVKFKKRLSEGRQKDIAFALGPDGYWIELITYSREGQEYPKGSVGNKFNHTMIRIKNPTRSLEFYQNVLGMKLLRTSEHESAKFTLYFLGYGVPKTDSVFSCESVLELTHNWGTENDPNFHYHNGNSEPQGYGHICISCDDAGALCKEIEVKYGDKIQWSPKFNQGRMKNIAFLKDPDGYSIEVVPHGLIA

SEQ ID NO: 3431 - protein, 109 aa, uncultured prokaryote
WTMVAGGGASVVYADTIADLAGVEDLANYGEYSGGPTTGETKFYAETIFDLVTRYEDPRGKVLIIGGAIANFTDVAKTFTGIIQALENYADKLKAHNTKIYVRRGGPNY

SEQ ID NO: 3432 - protein, 684 aa, Agrobacterium tumefaciens
MATKVKENEEAENERDGATDGPLLDLSDDAVKKMIKAAKKRGYVTMDELNSVLPSEEVTSEQIEDTMAMLSDMGINVIEDEDAEEAAPAEDDGDSDNEESEGGELAPSGGTALATAKKKEPTDRTDDPVRMYLREMGSVELLSREGQIAIAKRIEAGRETMISGLCESPLTFQALIIWRDELNEGTTLVREIIDLETTYSGPEAKAAPQFQSPEKIEADRKAAEEKEKTRRLRGPTGDEDVTDVGGDGLPPEEEEEDDDESNLSLAAMEAELRPQVMETLDTIADTYKNVRKLQDQQVEARLACTGTLSSGQERRYKELKDQLITAVKSLSLNQNRIDSLVEQLYDISKRLMQNEGRLLRLAESYGVKRDSFLEQYHGAELDPNWMKSITNLAARGWKEFAREESNTIREIRQEIQNLSTETGISIAEFRRIVSMVQKGEREARIAKKEMVEANLRLVISIAKKYTNRGLQFLDLIQEGNIGLMKAVDKFEYRRGYKFSTYATWWIRQAITRSIADQARTIRIPVHMIETINKIVRTSRQMLHEIGREPTPEELAEKLAMPLEKVRKVLKIAKEPISLETPVGDEEDSHLGDFIEDKNALLPIDAAIQGFLRETTTRVLASLTPSEERVLRMPFGIGMNTDHTLEEVGQQFSVTRERIRQIEAKALRNVKHPSRSRKLRTFLDS

SEQ ID NO: 3433 - protein, 215 aa, Campylobacter jejuni RM1221
MYVAPSLLSANFLKLEEEVKAIEAAGADLLHIDVMDGHFVPNLTFGPCVIEKISTISKLPLDVHLMVKDVSKFIDLFIPLKPKFISFHMESEVHPIRLCEYIRSQGIHPAIVLNPHTPIDSIKHMLEFVDMVLLMSVNPGFGGQKFLPLVHEKIKELRQMIDKKNAKVFIEVDGGVNGLNASDLEESGADILVAGSYIFSSNDYKTAISSLKLEF

SEQ ID NO: 3434 - protein, 111 aa, uncultured prokaryote
WTMVAGGGASVVYADAIADFAGIADLANYGEYSGGPTTGETKFYAETILDLMTREKDPQGREKILIIGGAIANFTDVAKTFTGIIQAFEEYADKMKDVGVKIYVRRGGPNY

SEQ ID NO: 3435 - protein, 111 aa, uncultured prokaryote
WTMVAGGGASVVYADTVADLGQVEELANYGEYSGNPSRTETREYVKTVFDLMTREKHESGKPKILIIGGAIANFTDVAKTFDGIIDAMKEYADKLKDVGVKVYVRRGGPNY

SEQ ID NO: 3436 - protein, 112 aa, uncultured prokaryote
WTMVAGGGASVVYADTIADLAGGVEDLANYGEYSGGPTTDETRFYTETVLDLMTREKDPQGRDKILIIGGAIANFTDVAKTFTGIIQAFEKYADKMKDVGTRIYVRRGGPNY

SEQ ID NO: 3437 - protein, 407 aa, Pseudomonas fluorescens PfO-1
MAIEIKAPTFPESVADGTVATWHKQPGDAVKRDELIVDIETDKVVLEVLATADGVLGAIVKGEGETVLSDEVLGSIVEGGAASAAPAAAAAPAAAAAAPAAADGEDDPIAAPAARKLAEENGINIASVAGTGKGGRVTKEDVVAAVAAKKAAPAAAPAKAAAPAAAAPVFAAGDRIEKRVPMTRVRATVAKRLVEAQSNMAMLTTFNEVDMTEVMALRSKYKDLFEKSHNGVRLGFMSFFVKAATEALKRFPAVNASIDGNDIVYHGYADIGVAVSSDRGLVVPVLRNAEHMSLAEIEGGIATFGKKARDGKLSMDEMTGGTFTITNGGTFGSMMSTPIVNPPQAAILGMHNIIQRPMAINGQVVIRPMMYLALSYDHRLIDGKEAVTFLVTIKNLLEDPARLLLDI

SEQ ID NO: 3438 - protein, 557 aa, Candida albicans SC5314
MLSRVILKNKSSITKNMTNIAASKLATRNKSIISLSSTTTEYPKGHTTANDEPYLTPSFVNNEFIKSESDTWFDIHDPATNNVVSKVPQSTPEELEDAIASAHKAFPKWRDTSIIKRQGIAFKFVQLLRENMDRIASVIVLEQGKTFADAQGDVLRGLQVAEAACNVTNDLKGESLEVATDMETKMIREPLGVIGSICPFNFPAMVPLWSLPLVLVTGNTAVVKPSERVPGAAMIICELAAKAGVPAGVLNIVHGKHDTVNKLIDDPRIKALTFVGGDKAGKYIYERGSQLGKRVQANLGAKNHLVVLPDANKQSFVNAVNGAAFGAAGQRCMAISVLVTVGKTTKEWVKDVVADAKLLKTGSGFDPKSDLGPVINPESLTRAEEIIEDSVQNGAVLELDGRGYKPTNDPEQKFTKGNFLAPTILTNVKPGMRAYDEEIFAPVLAVVNVDTIDEAIELINSNKYGNGVSLFTNSGGSAQYFTKRIDVGQVGINVPIPVPLPMFSFTGSRGSFLGDLNFYGKAGITFLTKPKTITSAWKLNSVDEEILKPSTSMPIQQ

SEQ ID NO: 3439 - protein, 110 aa, uncultured prokaryote
  misc_feature (20)..(20): Xaa can be any naturally occurring amino acid
  misc_feature (76)..(76): Xaa can be any naturally occurring amino acid
WTMVAGGGASVVYADTIADXAGIDDLANYGEYSGGPTTGETKFYAETLLDLMTREKDAQGREKILIIGGAIANFTXVAKTFTGIIQAFENYADKMKEIGVKIYVRRGGPN

SEQ ID NO: 3440 - protein, 1169 aa, Triticum monococcum
METTVLSVGKSVLNGAVRYAQSAIAEEVALQLGVRRDQVFITNELEMMQAFLMAANDEGDGDSKVVRVWVKQVRDLAYDVEDSLQDFAVRLEKQPWWRILLKDRRQVAKQMKGLRANVEDVSQRNMRYHLIKGSAGSNPASTDGQSAITGAMTMSSTEDARRQREKAKADLVQLIRKMDDRLRVIAVWGTSTDVGETSVIKRAFEDLKKHNRFDCHAWIKVMCPFNSVEFMRSIIRQFYINLLQDPVENMDAQVLRGMGMKKENDLVDEFKSYLNDKSYLIVIDGMSTTEEWDQIKPCFPNNKRGSRIIVSTKQVEVASLCAGPQNVAPDHKQLSIDQDTLYAFFEKGSQDGDSTEVGSSSTNSTTTASHILVNNKILTRMETTLAAFKEFQLIGREKEKSEIIQLVTNGDGRQFEVISVCGMGGLGKTTVVRDVYQSQELRGKFEKCACVTIMRPFNCDELLKNLAGQFGYEDVADMVRHLEGKKCLIVLDDLSSTREWDAIIPHFTALETSSRIIVTTRVEDIGKHCSKKRKNIYKLQGLELNDAHDLFIQKVFDKTMDLDEQYPELVEQTNMILKKCKGLPLAIVTIGGFLANQPKTALEWKKLNEHISAAELQMNPELEAIITVLNKSYDGLPYHLKSCFLYLSIFPEDYNIKLKRLLRRWIAEGYPGVVRNKSTEEVAESYFMDLISRSMLLPSQRSICDGKRIGSCQVHDLIREIGISKSMEGNLVLRLEEGCSLNTQGTARHLAISSNWERDQSAFESIVDMSRVRSITVFGEWKPFFLSDKMRLLRVLDLEDTTGLVNHHLEHIGKFLHLRYLSLRGCESICHLPDTLGNLRQLETLDIRGTSIVMLPQTIIKLQKLQHLHAGFPTKGNYLCTRHLLHTYGFNQLDACTSLCCGAATPCIMMDKDYGGVVLPGGARKLKSLHTIRGVHVAYGDAVIQEIGRLSGLRKLGVMGINEKNDVKFCSAISNLSRLESLSVQSDKGCLDDITSPPKNLRSLKLEGRLGVLPEWIKKLQNLVKLKLSFTTSSQVEQDAAMEVLGHLPNLSILRLSGCSFKGGELHFQKDAFRSIVVFDVEGLGGIKSVNFDQGAMPELEQLKVTDACKRGGIGFFGLDILVSIKEVLLSVHFKMDRAGTELEREARLKEQFRTQLARNPKKPILKME

SEQ ID NO: 3441 - protein, 426 aa, Treponema denticola ATCC 35405
MENKGKLGLLSICLLGVNAIVGTGIFLLPGKAAKLVGVSSIGVILFDAVLVILIALCFAEAGGLFKKNGGPYVYAKEAFGEFVGFEVGFMKWAIMVIAWAAMAVGFPTALGSVFPLAATPFWRSVIAVAILLFLGLMNIAGVRISKIVNNVITIGKLVPLIFFILLGIFFIKGDNFQPMQSVGALTTTSFGAAALLIFYAFTGFESIAVAAEDMDKPEKNVPLAIVLVISGVSVFYILIQVVAIGILGDGLTASEAPVADAAAKFLGPVAKAVVTTGTLVSIGGINVASSFLAPRSAVALADDGFLPKFVTKRNKKDVPYISVILTTALTALVCLTGSFSKLAAISVVSRFAQYIPTCLAILVFRKRGMKGSFRIPGVYVVSFLAVGISLWLLYNSSWDKILFGLGGLVVGAVFYVIMKLTQKKAN

SEQ ID NO: 3442 - protein, 568 aa, Vibrio fischeri ES114
MGAHDVREKTDNHSRRERKSMNGSQLVVKALRDEGIETVFGYPGGAIMPIYDALYDGGVEHILCRHEQGAAMAAIGMARASKDVAVCLATSGPGATNLITGLADAMLDSIPLVAITGQVASNLIGTDAFQEMDVIGMSLSCTKHSYLVTDINELAPVIAEAFEVAKSGRPGPVLIDIAKDVQLAEAPVTSLPYFEAPSIPVVVPEAIEAAEALLRASNKPVLYVGGGVQLAHATDSVRDFLTNNPMPSVSTLKGLGSIGRHDPHYLGMVGMHGTKAANLIVQESDLLIVVGARFDDRVTGKLESFAPHAKVIHIDIDAAEFNKLRHAHSTLRGDIKVILPQLKLEQDLTPWLEHVSSLRSEFKWRYDHPGELIYAPLLLKQLSDMMPDSAIVSTDVGQHQMWAAQHIQPRAPENYLTSAGLGTMGFGLPAAMGAKVARPDDQSILISGDGSFMMNVQELGTIKRKQIPVKMVLINNQRLGMVRQWQSLFFDGRHSETILDDNPDFVALAAAFGIPGKTITIKEEVEPALKEMLESDTAYLLHVLISEEENVWPLVPPGAANQDMVEGE

SEQ ID NO: 3443 - protein, 255 aa, Vibrio angustum S14
KVYGGVAKDFASIDNAPEERERGITISTSHVEYDTPTRHYAHVDCPGHADYVKNMITGAAQMDGGILVVAATDGPMPQTREHILLGRQVGIPYIIVFMNKCDMVDDEELLELVEMEVRELLSEYDFPGDDCPVIMGSALGALNGEKEWEDKIVELAEALDSYIPEPERAIDLPFILPIEDVFSIQGRGTVVTGRVEQGIITVGDEVEIVGIVDTIKTTCTGVEMFRKLLDEGRAGENVGVLLRGTKREKFNVVKY

SEQ ID NO: 3444 - protein, 405 aa, Rhodopseudomonas palustris CGA009
MNDTVLIAGAGHAGFQVAVSLRQAKYPGRIALINDEKHLPYQRPPLSKAYLKSGGDPNSLMFRPEKFFQDQAIELISDRMVSIDREGRKLLLASGTAIEYGHLVLATGARNRMLDVPNASLPDVLYLRTLDESEVLRQRMPDKKHVVVIGAGFIGLEFAATARAKGLEVDVVELAPRVMARVVTPEISSYFHDRHSGAGIRMHYGVRATEIAAEGDRVTGVVLSDGNTLPCDLVVVGVGVIPNVEIAAAAGLPTAAGIIVDQQLLTSDPHISAIGDCALFESVRFGETMRVESVQNATDQARCVAARLTGDAKPYDGYPWFWSDQGDDKLQIVGLTAGFDQVVIRGSVAERSFSAFCYKAGKLIGIESVNRAADHVFGRKILPLDKSVTPEQAADLSFDLKKAAA

SEQ ID NO: 3445 - protein, 103 aa, Brassica napus
  misc_feature (12)..(12): Xaa can be any naturally occurring amino acid
  misc_feature (15)..(15): Xaa can be any naturally occurring amino acid
  misc_feature (22)..(22): Xaa can be any naturally occurring amino acid
  misc_feature (29)..(29): Xaa can be any naturally occurring amino acid
  misc_feature (34)..(34): Xaa can be any naturally occurring amino acid
  misc_feature (39)..(39): Xaa can be any naturally occurring amino acid
  misc_feature (49)..(49): Xaa can be any naturally occurring amino acid
  misc_feature (54)..(54): Xaa can be any naturally occurring amino acid
  misc_feature (58)..(58): Xaa can be any naturally occurring amino acid
  misc_feature (61)..(61): Xaa can be any naturally occurring amino acid
  misc_feature (69)..(69): Xaa can be any naturally occurring amino acid
  misc_feature (74)..(74): Xaa can be any naturally occurring amino acid
MASSMLSSAAVXTSXPAQVTMXAPFTGLXKTSAXFPVTXKANNDITSIXSNGGXVSCXKVXPPVGKKKXETPPXPPLTTRSLNCVEAHYLPLIFAISATPLSR

SEQ ID NO: 3446 - protein, 114 aa, Capsicum annuum
MEGIGKIACFVLLCMVVVAPHAEALNCGQVTSAMAPCVPYLMGRGPLGGCCGGVKGLMGAAKTPADRKTACTCLKSAANSMKGIDAGKAAGLPAACGVNIPYKISPSTDCSKVQ

SEQ ID NO: 3447 - protein, 380 aa, Actinidia deliciosa
MGLPKSFVSMSLLFFSTLLILSLAFNAKNLTQRTNDEVKAMYESWLIKYGKSYNSLGEWERRFEIFKETLRFIDEHNADTNRSYKVGLNQFADLTDEEFRSTYLGFTSGSNKTKVSNRYEPRVGQVLPSYVDWRSAGAVVDIKSQGECGGCWAFSAIATVEGINKIVTGVLISLSEQELIDCGRTQNTRGCNGGYITDGFQFIINNGGINTEENYPYTAQDGECNVELQNEKYVTIDTYENVPYNNEWALQTAVTYQPVSVALDAAGDAFKQYSSGIFTGPCGTAIDHAVTIVGYGTEGGIDYWIVKNSWDTTWGEEGYMRILRNVGGAGTCGIATMPSYPVKYNNQNYPEPYSSLINPPAFSMSKDGPVGVEDGQRYSA

SEQ ID NO: 3448 - protein, 496 aa, Nicotiana tabacum
MVLSKTASESDVSIHSTFASRYVRTSLPRFKMPENSIPKEAAYQIINDELMLDGNPRLNLASFVTTWMEPECNTLMMDSINKNYVDMDEYPVTTELQNRCVNMIAHLFNAPLGDGETAVGVGTVGSSEAIMLAGLAFKRKWQNKMKAQGKPFDKPNIVTGANVQVCWEKFARYFEVELKEVKLSDGYYVMDPEKAVEMVDENTICVAAILGSTLNGEFEDVKRLNDLLIEKNKETGWDTPIHVDAASGGFIAPFLYPELEWDFRLPLVKSINVSGHKYGLVYAGIGWAIWRNKEDLPDELIFHINYLGADQPTFTLNFSKGSSQVIAQYYQLIRLGFEGYKNVMENCQENARVLREGIEKSGRFNIISKEIGVPLVAFSLKDNSQHNEFEISETLRRFGWIVPAYTMPPNAQHVTVLRVVIREDFSRTLAERLVIDIEKVLHELDTLPARVNAKLAVAEANGSGVHKKTDREVQLEITTAWKKFVADKKKKTNGVC

SEQ ID NO: 3449 - protein, 175 aa, Triticum aestivum
  misc_feature (27)..(27): Xaa can be any naturally occurring amino acid
MAPTVMASSATSVAPFQGLKSTAGLPXSRRSNGASLGSVSNGGRIRCMQVWPIEGIKKFETLSYLPPLSTEALLKQVDYLIRSKWVPCLEFSKVGFIFREHNASPGYYDGRYWTMWKLPMFGCTDATQVINEVEEVKKEYPDAYVRIIGFDNMRQVQCVSFIAFKPPGCEESGKA

SEQ ID NO: 3450 - protein, 896 aa, Oryza sativa (japonica cultivar-group)
MERLFEELAGEAVKELLRAVRGTFFCRSTAERLRRNVEPLLPLVQPQAAQGGGGWGHGRSAGELAELAAQLREALELARRAASAPRWNVYRTAQLARRMEAADTAIARWLSRHAPAHVLDGVRRLRDEADARIGRLERRVEEVAAAQQQQQAAATALPPPAISLPFALPPPPPPPKAMAMMAMDTPPTKGMAVGMEVELPFPDDEEDESMVGGGVRVGKEKVKEMVMSGGGGGWEAVGICGMGGSGKTHARHGNLQGSQNPRSVHKRQLYLILCWFLWKGYFSDRVFFETISQSANLDTIKMKLWEQISGNLVLGAYNQIPEWQLKLGPRDKGPVLVILDDVWSLSQLEELIFKFPGCKTLVVSRFKFPSLVTRTYEMELLDEEAALSVFCRAAFDQESVPRTADKKLVRQVAAECRGLPLALKVIGASLRDQPPKIWLSAKNRLSRGETISDSHETKLLERMAASIECLSGKVRECFLDLGCFPEDKKIPLDVLINIWMEIHDLDEPDAFAILVELSNKNLLTLVNDAQNKAGDLYSSYHDFSVTQHDVLRDLALHMSGRDALNNRRRLVMPRREESLPKDWQRNKDTPFEAQIVSIHTGEMKESDWFQMSFPKAEVLILNFASSVYYLPPFIATMQNLKALVLINYGTISATLDNLSAFTTLSDLRSLWLEKITLPPLPKTTIPLKNLRKISLVLCELTNSLRGSKVDLSMTFPRLSNLTIDHCIDLKELPSSICEISSLESISISNCHDLTELPYELGKLHCLSILRVYACPALWRLPPSVCSLKRLKYLDISQCVNLTDLPEELGHLTSLEKIDMRECSRLRSLPRSSSSLKSLGHVVCDEETALLWREAEQVIPDLRVQDGGTIHSAILTCSVFMQLTLQQQPKLAEKIEP

SEQ ID NO: 3451 - protein, 208 aa, Saccharomyces cerevisiae
MSSRKKNILKVIILGDSGVGKTSLMHRYVNDKYSQQYKATIGADFLTKEVTVDGDKVATMQVWDTAGQERFQSLGVAFYRGADCCVLVYDVTNASSFENIKSWRDEFLVHANVNSPETFPFVILGNKIDAEESKKIVSEKSAQELAKSLGDIPLFLTSAKNAINVDTAFEEIARSALQQNQADTEAFEDDYNDAINIRLDGENNSCSC

SEQ ID NO: 3452 - protein, 365 aa, Colwellia psychrerythraea 34H
MINTSQYSVNTQTWTNGRHDVQCVKVIDETIDARTYCFTSTEPVMHFFKPGQFVTLELEIDGMQVLRSYTISSSPSVPYSFSITVKRMPGGQVSNWLHDNLKQGDQIAVHGPVGIFNCIDITAEKVLLLSGGVGITPVMSMARWWFDTNGDVDMVFAHSARTPKDIIYRRELEYMDSRITNFNLNFICERYDIGDSWSGFCGFFDEQKLRMIAPDFLDRTIYCCGPTPYMTAVKSMLQNIGFDMANYHEESFGAPPEEAQLDAEQQMEDAAGESIDDDTLIEVAFSKTGKSVKIQPGGTVHLAASQVGLHIPKACGMGICGTCKVKKIHGEVIMSHNGGITDEDVADGYILSCCSVPQGDVSVEY

SEQ ID NO: 3453 - protein, 131 aa, Glycine max
MPPPQKKTKVEDEVPRATVASAVVSLTNWMRERAAEAPPNLLADERDDVVVLQLSLRRVPPKPTTKPHLLPLPHPVVAHSAASVCVISDDRAGSGSPAAAPILDAARSLELPVSEAIPFYALRTDYRPYES

SEQ ID NO: 3454 - protein, 979 aa, Oryza sativa (japonica cultivar-group)
MIAHVSAESAVEESTEKEQTVESEASESVEIVGVEKPTEDESNVDGGASSVVSRELAPEETKENNVGQEDEGVAEVIDREEDADDDEEIVLAAADDEDDGTNEADDDEDGVSSDRGPARVAIIESSEAAKQIMKELGEGSASVSPVSGLSSSREYTNSMDGQIVLDDSEEDGDDDDNEDDDEKGFDSAALAALLKAATGASADGNVTVSSQDGSRIFSMDRPAGLGSSAPSLRPTVPRPVARSNLFSPSELAVTAEPTEEMTEEEKKLHDKVELIRVKFLRLVYRLGATPEETVAAQVLYRLSLAEGIRHGRQTNRAFSLDNARKKAMLLEAEGKEELNFSCNILVLGKIGVGKSATINSIFGEEKSKTDAFSSATNSVREIVGNVDGVQIRIIDTPGLRPNVMDQGSNRKILASVKKYTKRCPPDIVLYVDRLDSLSRDLNDLPLLKTITSVLGSSIWFNAIVALTHAASAPPEGLNGAPMTYEVLMAQRSHIIQQSIRQAAGDMRLMNPVALVENHPSCRRNREGQKVLPNGQSWRHQMLLLCYSSKILSEANSLLKLQDPNPGKLFGFRFRSPPLPFLLSSLLQSRAHPKLSPDQGGNEGDSDIDLDDYSDIEQDEDEEEYDQLPPFKPLTKSQLARLTKEQKNAYFDEYDYRVKLLQKKQWKDEIRRLKEMKKRGKTDMDAYGYANIAGENDLDPPPENVSVPLPDMVLPPSFDCDNPTYRYRFLEPTSTVLARPVLDAHGWDHDCGYDGVSVEETLALLNKFPANMAVQVTKDKKEFSIHLDSSISAKLGEDASSLAGFDIQTVGRQLAYILRGETKFKNIKKNKTTGGFSVTFLGDIVATGLKVEDQLSLGKRLALVASTGAMRAQGDTAYGANLEARLKDKDYPIGQSLSTLGLSLMKWRRDLALGANLQSQFSIGRGSKMVVRLGLNNKLSGQITVRTSTSEQVQIALLGLIPVAASIYRSFRPSEPSFAY

SEQ ID NO: 3455 - protein, 328 aa, Methylococcus capsulatus str. Bath
MTTLVTGATGHLGANLVRALLARGEKVRAFIRRQSDVAALDGLAVERAYGDLRDRRSIRDALEGVERLYHTAAFVSIRDGDRQELFDVNVVGTRMLMQEARRAGVRRVVHTSSFGAVGINPQGASNEHWTVSPFEPGTDYERTKAVSEHDVILEAVRGLDVTIVNPAAIVGPWDFRPSLVGRTILDFAHGRMRAFVPGAFDFVPMRDVVAVELLAMDKGIRGERYLVTGEHCTIGQILQWLEELTGHPRPRLAIPPRLMQGIALLKDPLERRFFPRRTPRFNYHSIRLLNSGKRGDSSRSRRELGLVPTSTRAAFADAVAWFRERGMI

SEQ ID NO: 3456 - protein, 110 aa, uncultured prokaryote
WTMVAGGGASVVYADTIADMAGIDDLANYGEYSGGPTTGETKFYAETLFDLMTREPDPQGRGKVLIIGGAIANFTDVAKTFTGIIQAFENYKDKLKAVDTKIYVRRGGPN

SEQ ID NO: 3457 - protein, 425 aa, Zea mays
  misc_feature (198)..(198): Xaa can be any naturally occurring amino acid
  misc_feature (216)..(216): Xaa can be any naturally occurring amino acid
MDKLKGSARLMIVSDLDHTMVDHHDEENLSLLRFGALWESVYCQDSLLVFSTGRSPTLYKELRKEKPMLTPDITILSVGSEITYGEAMVPDHGWEEYLNNKWDRNIVLEETAKFSELKLQVESEQRPHKVSFLVDKKNAQGVIKSLSEKFEKRGVDAKIIYSGGQDLDILAQGAGKGQALAYLLKKLGSCGKTPNNTXLACGDSGNDAELFSIPGXVHGVMVSNAQEELLQWHAENAKDNPKVIHSNERCAAGILSAIDTFKLGPNVLPRDLQFPYAKEASFKPTDAVVKFYVLYEKWRRAEVPKSDSVIKYFKNITHANGVTIHPAGLELSLHASIDALGSCYGDKEGRKYRAWVDRLFITQTGSDSWVGRFDLWESEGDVRVCSLSSLALILKAESPEGFVLTHIQKTWLNGYSSGVEQAFKL

SEQ ID NO: 3458 - protein, 379 aa, Azoarcus sp. EbN1
MIEIVEKEQTGTVIKVIGVGGAGGNAVDHMIRENVQGVEFIVANTDAQALSRCLAPNKIQLGSSGLGAGSKPEAGRAAAQDSRDAIAAALDGAHMCFITGGMGGGTGTGAGPVVAEIAKEMGILTVAVVTKPFDFENRLRVAESGIEELTRYVDSLIIVLNDKLLEVYGDDAGFEDCFRSADNVLRSAVGGIAEIINVPGLVNVDFQDVRTAMGEMGRAMMGSAEADGLDRARIAAEQAAVSPLLEGTELSGARCVLINITASRSLKMSEVRDAVKTVQAFAAPEAFVKYGTVFDEAMEDRVRVTVVATGLGAPRTGRQPVMQVVQGTGTYGALGGNVNMANLDVPAVIRHTRRTTVEAMSANGMGTYDIPAFLRKQAD

SEQ ID NO: 3459 - protein, 624 aa, Arabidopsis thaliana
  misc_feature (372)..(372): Xaa can be any naturally occurring amino acid
MQDFFGSVRRSLVFRPSSDDDNQENQPPFPGVLADKITSCIRKSKIFIKPSFSPPPPANTVDMAPPISWRKGQLIGRGAFGTVYMGMNLDSGELLAVKQVLIAANFASKEKTQAHIQELEEEVKLLKNLSHPNIVRYLGTVREDDTLNILLEFVPGGSISSLLEKFGPFPESVVRTYTRQLLLGLEYLHNHAIMHRDIKGANILVDNKGCIKLADFGASKQVAELATMTGAKSMKGTPYWMAPEVILQTGHSFSADIWSVGCTVIEMVTGKAPWSQQYKEVAAIFFIGTTKSHPPIPDTLSSDAKDFLLKCLQEVPNLRPTASELLKHPFVMGKHKESASTDLGSVLNNLSTPLPLQINNTKSTPDSTCDDXDENFLTFDGEMSSTLEKDCHLKKSCDDISDMSIALKSKFDESPGNGEKESTMSMECDQPSYSEDDDELTESKIKAFLDEKAADLKKLQTPLYEEFYNSLITFSPSCMESNLSNSKREDTARGFLKLPPKSRSPSRGPLGGSPSRATDATSCSKSPGSGGSRELNINNGGDEASQDGVSARVTDWRGLVVDTKQELSQCVALSEIEKKWKEELDQELERKRQEIMRQAGLGSSPRDRGMSRQREKSRFASPGK

SEQ ID NO: 3460 - protein, 391 aa, Sulfolobus shibatae
DLDTLEALSQPERVIQVKIQIRGSDGKLKTFMGWRSQHNSALGPYKGGVRYSPNVTQDEVIALSMIMTWKNSLLLLPYGGGKGGIRVDPKKLTLKELEDLSRKYVQLIHNYLGSDVDIPAPDINTNPQTMAWFLDEYIKITGEVDFAVFTGKPSELGGIGVRLYSTGLGVATIAREAANKFIGGIEGSRVIIQGFGNVGSFTAKFLNEMGAKIIGVSDIGGGVISDDGIDVNKALEVVQSTGSVVNYPEGKKVTNEELLTSDCDILIPAAVENVINKFNAPKVKAKLIVEGANGPLAADADEIIKQRGIVVIPDILANAGGVVGSYVEWANNKSGGIISDEEAKKLIIDRMTNAFNALYEFHKRKFADQDLRTVAMALRVDRVVGMKARAI

SEQ ID NO: 3461 - protein, 110 aa, uncultured prokaryote
  misc_feature (20)..(21): Xaa can be any naturally occurring amino acid
  misc_feature (76)..(76): Xaa can be any naturally occurring amino acid
WTMGAGGGASVVYADTIADXXGIDDLANYGEYSGGPTTGETKFYAETLLDLMTREKDAQGREKILIIGGAIANFTXVAKTFTGIIQAFENYADKMKEIGVKIYVRRGGPN

SEQ ID NO: 3462 - protein, 400 aa, Thermoplasma acidophilum
MYEFKLPDIGEGVTEGEIVRWDVKEGDMVEKDQDLVEVMTDKVTVKIPSPVRGKIVKILYREGQVVPVGSTLLQIDTGEEAPVQQPAGRAESTVQVAEVKQVPLPEVSGHVLASPAVRRIARENGIDLSKVGGTGEGGRVTLDDLERYMKSPAPSPAPSAGKAEAVHTAPQIPAQKPAPGREEILEMHGLRRIIFDKMTKAKQIMPHFTVMEEVDVTSMVSILDSAKARNRKVTVTGFLARIVPSILKQYPYLNAIYDETRRVYILKKYYNIGIAVDTPDGLNVFVIKDADRKSMVEISAEISDKASRARENKLQLDEVQDSTFTITNVGTIGGIMSTPIINYPEVAILGVHRILEREGRKYMYLSLSCDHRLIDGAVATRFIVDLKKVIEDPNAIIYEI

SEQ ID NO: 3463 - protein, 97 aa, uncultured prokaryote
  misc_feature (79)..(79): Xaa can be any naturally occurring amino acid
WTMVAGGGASVVYADTIADFAGIDDLANYGEYSGGPTTGETKFYAETIFDLMTREPDPQGRGKVLIIGGAIANFTDVAXTFTGIIQAFENYQDKLKE

SEQ ID NO: 3464 - protein, 110 aa, uncultured prokaryote
WTMVAGGGASVVYADTIADMAGIDDLANYGEYSGGPTTGETKFYAETLLDLMTREPDPQGREKILIIGGAIANFTDVAKTFTGIIQAFENYADKMKAVDLKIYVRRGGPN

SEQ ID NO: 3465 - protein, 192 aa, Triticum aestivum
  misc_feature (69)..(69): Xaa can be any naturally occurring amino acid
MSSSSSFLGSRFPFAAVGAGAGASGGSGAGGSGSSVRPWGSSGGTSVSSSGKRIQKELLDLNASDCSAXPKGDNLYHWLSTIIGPQGSPYDGGIFFLDIVFPLDYPFKPPMVTFKTRIYHCNVDSTGAVSLEILKDGWSPALTISKVLLAIKAIITNPDPYNPLVESIARLYLTDRAKHDEIAAEWTLRFAR

SEQ ID NO: 3466 - protein, 109 aa, uncultured prokaryote
WTMVAGGASVVYADTIADFAGIDDLANYGEYSGGPTTGETKFYAETLLDLMTREKDAQGREKILIIGGAIANFTDVAKTFTGIIQAFENYADKMKEIGVKIYVRRGGPN

SEQ ID NO: 3467 - protein, 205 aa, Nicotiana tabacum
MPSPANVLKVIILGDSGVGKTSLMNQYVNKKFSNQYKATIGADFLTKEVQFEDRLFTLQIWDTAGQERFQSLGVAFYRGADCCVLVYDVNSMKSFENLNNWREEFLIQASPSDPENFPFVVLGNKVDIDGGNSRVVSEKKARAWCASKGNIPYFETSAKEGTFVEEAFQCIAKNALKSGEEEEIYLPDTLDVGTSSQPRTGGCEC

SEQ ID NO: 3468 - protein, 829 aa, Vibrio fischeri ES114
MKMTRRAFVKANAAASAAAVAGVTLPASATNLIVSSDQTKIKWDKAPCRFCGTGCSVLVGTQNGRVVATQGDPEAPVNKGLNCIKGYFLSKIMYGKDRVQTPMLRMKDGQYNKDGDFAPVSWDVALDTMAEKWKAALKKHGPTGVGMFGSGQWTVMEGYAAVKLMKAGFRSNNIDPNARHCMASAVGAFMRTFGIDEPMGCYDDFENADSFVLWGSNMAEMHPVLWTRISDRRLSHPHVKVNVLSTYYHRSFELADKGYIFEPQSDLAIANFIANYIIQNNAVNWDFVNKHTNFKQATTDIGYGLRDDDPLQMEAANPNSGAMSSISFEEYKKSVAPYTAQKASEMSGVSEEDLITLAKQYADPKTKVMSLWTMGMNQHTRGVWMNSLVYNIHLLTGKIATPGNSPFSLTGQPSACGTAREVGTFSHRLPADMVVANPKHRAISEKIWKLPEGTLNGKPGAHAVVQDRMLKDGKINAYWVMCNNNMQAGPNINTERLPGYRNPENFIVCSDPYPTATAQAADLILPTAMWVEKEGAYGNAERRTQAWYQQVQAKGEAKSDLWQIMEFSKRFKVEEVWGEELVAKAPEYRGKTMYDILFKNGQVDAFPLSEAQELNDDAKAQGFYVQKGLFEEYASFGRGHGHDLAPYDTYHTVRGLRWPVVDGKETLWRFKEGSDPYAKKGSDWDFYGKPDGKALIISAPYEAPPEVPNDEFDMWLCTGRVLEHWHTGTMTRRVPELYKAVPDALCYIHPADAKKRNLRRGDEVLISNKRGEVRVRVETRGRNRPPEGLVFVPFFDARILINKLILDATDPLSKQTDFKKCPVKITKIA

SEQ ID NO: 3469 - protein, 290 aa, Oryza sativa (japonica cultivar-group)
MAAGRAAAVAACASPAVPRRWAKSDNRRLLHVVYRVGDIDRTIKFYTECLGMKLLRKRDIPEEKYTNAFLGYGAEDNHFVVELTYNYGVDKYDIGAGFGHFGIAVDDVAKTVELIRAKGGKVTREPGPVKGGKTVIAFVEDPDGYKFEILERPGTPEPLCQVMLRVGNLDRAISFYEKACGMELLRKRDNPEYKYTVAMMGYGPEDKNAVLELTYNYGVTEYDKGNAYAQIAIGTDDVYKTAEVVKLFGGQVVREPGPLPGINTKITSILDPDGWKSVFVDNIDFAKELE

SEQ ID NO: 3470 - protein, 156 aa, Corynebacterium glutamicum
MASQQIRYPFSAVVGQDELRLALILTAISPRIGGVVIRGEKGTAKTTTVRAFAGLLGDAPLVNLPLGSTEDRVVGSLNMETVLTTGRAEYQPGLLAQADGGVLYVDEVNLLADHLVDALLDAAASGRVSIERDGISHSSPANFVLVGTMNPEEGEL

SEQ ID NO: 3471 - protein, 424 aa, Mesorhizobium sp. BNC1
MARIVMKFGGTSVADLDRIHNVARHVKREVEAGHQVAVVVSAMSGKTNELVGWVQGMPKAAGAKSPFYDAREYDTVVASGEQVTSGLLAIALQSIGIDARSWQGWQIPIRTDNAHGAARITDIDGSDIIERMERGQVAVVAGFQGLAPDNRVATLGRGGSDTSAVAVAAALRADRCDIYTDVDGVYTTDPRIEPRARRLAKISFEEMLEMASLGAKVLQVRSVELAMVHKVRTFVRSSFEDPDAPGMGDFDNPPGTLICDEEEIVEQQVVTGIAYAKDEAQISLRRVADRPGVSAGIFGPLAEANINVDMIVQNVSEDGSKTDITFTVPTGDVEKALSVLEKVRGTVGFDAIQSEAGLVKVSVIGIGMRSHAGVAATAFSALAEKGINIRAITTSEIKISILIDGPYAELAVRTLHSVYGLDKH

SEQ ID NO: 3472 - protein, 386 aa, Xylella fastidiosa
IARELRRPTLAVLSRCLQADIETSARALESATKPRLHVFLSTSPLHREHKLRMSKEQVLESVHKHVSLSRTLIDDVEFSAEDATRTEEDFLIEVTRVAIAAGATTINLPDTVGFSTPEEIRNMFTRVIANVEGANKVIFSAHCHDDLGLAVANSLAAIEGGARQIECTINGIGERAGNCALEELTMVLKVRNAFYNIDTSIHTSRIVSTSQLLQRLVGMPVQRNKAVVGANAFAHESGIHQHGMLRHRGTYEIMRPQEVGWVCSHMVLGRHSGRTAVEQRLRALGYLLEEEDLKLVFEEFKQLCEKQRLVTDVDLQVLMQDTTVQHGYRLASMTISDVGNQANALVELSNPQGQRVAETAQGNGPVDALFGALAAATGVKLELDSY

SEQ ID NO: 3473 - protein, 964 aa, Brassica napus
MATGSLKKMGSIDAQLRLIAPAKVSEDDKLLEYDALLLDRFSIFSRTCMAKKSREFVQECYEVAADYDGNRNTAKLEELGNMLTSLDPGDSIVVTKSFSNMLSLANLAEEVQIAYRARIKKLKKGDFADEASATTESDIEETLKRLLQLNKTPEEVFDALKNQTVDLVLTAHPTQSVRRSLLQKFGRIRDCLTQLYAKDITPDDKQELDEALQREIQAAFRTDEIRRTPPTPQDEMRAGMSYFHETIWKGVPKFLRRVDTALKNIGINERVPYNAPLIQFSSWMGGDRDGNPRVTPEVTRDVCLLARMMAANLYFSQIEDLMFEMSMWRCNEELRVRAEVQRCAKRDAKHYIEFWKQIPSNEPYRAILGDVRDKLYNTRERARQLLSSGVSDIPEDSVFASVDQFLEPLELCYRSLCDCGDRPTADGSLLDFLRQASAFGLALVKLDIRQESDRHTDVLDAITQHLGIGSYKEWSEDKRQEWLLSELSGKRPLFGHDLPKTEEIADVLDTFKVISELPHDSFGAYIISMATAPSDVLAVELLQRECGIIHPLRVVPLFEKLADLENAPASVARLFSIEWYRNRINGKQEVMIGYSDSGKDAGRLSAAWQLYKTQEELVKVAKEYGVKLTMFHGRGGTVGRGGGPTHLAILSQPPDTIHGQLRVTVQGEVIEQSFGEEHLCFRTLHGFTARTLEHGIDPPVSPKPEWRVLMDEMAVIATEEYRSVVFKEPRFVEYFRLATPELEYGRMNIGSRPSKRKPSGGIESLRAIPWIFAWTQTRFHLPVWLGFGSAFKRVIQKDAKNLNMLKEMYNQWPFFRVTIDLVEMVFAKGDPGIAALYDRLLVSEELQPFGEQLRVNYQETRRLLLQVAGHKDILEGDPYLRQRLQLRDPYITTLNVCQAYTLKQIRDPSFHVKVRPHLSKDYMESSKPAAELVKLNPKSEYAPGLEDTVILTMKGIAAGMQNTG

SEQ ID NO: 3474 - protein, 266 aa, Zea mays
MAASIGIMDGAYFVGRGEILHWINATLQLSLAKVEEAASGAVQCQLMDMVHPGVVPMHKVNFDAKTEYDMIQNYKVLQDVFNKLRIGKNIEVNKLVKGRPLDNLEFLQWLKRYCDSVNGGIMNENYNPVERRSKGCKERVSKGSNKPSKSLQANRLSGADPTDGGHGVGKVCNTFSEEHYIEQIQKLSEKIADLKVSVDSTEKERDFYFSKLRDIEILCQRPELEHLPMTKAVRKILYAADAKDSPLPEANDIITKSPSLFSNETE

SEQ ID NO: 3475 - protein, 232 aa, Saussurea medusa
MAPPPSSTSIQVESIVFPPSVKPPGATTTLFLGGAGVRGMEIQGNFVKFTGIGVYLEDKAIPSLAVKWKGKTAAELTDSVQFYRDIVTGPFEKFSQVTMILPLTGKQYSEKVSEMCIGVWKAQGTYTDADTATIEKFLEVFKDENFLPGSSILFTTSPTGSLTISFSKDGNIPEAATVVLENRKLAQTVIESVIGEHGVSPEAKQSLASRLSDFMTQFDEKATANVESQIGL

SEQ ID NO: 3476 - protein, 182 aa, Neurospora crassa
MSNTIETGLPEDWEVRHSQSKNLPYYFNSATKTSRWEPPSGTDVDKLKIYMAKYHSPTSQQQQQQQQQQPQGKIRCAHLLVKHNQSRRPSSWRESEITRTKQEALTTLQGFEQRIKSGSISLGELALTESDCSSARKRGDLGYFGRGDMQKEFEDAAFALKPGEISDIVDTASGLHLIERLE

SEQ ID NO: 3477 - protein, 607 aa, Glycine max
TGESGRRTQKGTLVFIVSIVFLLSFIIINLQSHEPSFENNITTVPLLPIARGVAEGVSAKSNPYLSQKASYNWTNAMLSWQRTAFHFQPQRNWMNGPLFYMGWYHIFYQYNPDSAVWGNITWGHAVSRDLIHWLYLPIALVPDKWFDISGVWSGSATLLPDGKILMLYTGNTDRNVQVQNLAYPANLSDPLLLDWVKYANNPVLVPPPGIGPKDFRDPTTAWIGPDEKWRITIGSKLNKTGLSLLYKTQDFIHYEQSDRYLHQVPGTGMWECVDFYPVSVNGPNGLDTSENGPDVKHVLKASLDDTKVDHYAIGTYFIENDTWVPDNPNEDVGIGLKLDYGRYYASKTFYDQQKQRRILWGWINESDSETADLKKGWASLQTIPRTVVFDKKTRTNLLHWPVEEVESLRLSNSEFEGVVVKPGSVVPLDIGPATQLDIFAEFEIEDLASKGIGKDNVDCGNGAVDRSAFGPFGILAIADDQLSELTPIYFHLSSTTKDGSLTTSFCVDETRSSKAPDVSKLIFGSKAPVLSDEKLSMRVLVDHSIIESFAQGGRTVITSRVYPTEAIYGAARLFLFNNATDINIKASLKIWQLNSAFIRPFPFDQKL

SEQ ID NO: 3478 - protein, 457 aa, Rhodococcus sp. DK17
MSYYATTSPLTGQRVQEFPRATDHEISDALTSSDAAYRQWRTSSLEERADVLRALAKLWHERADELAPILTLEMGKPIPQARGEVALCANIFEYYAEHGPTFMEDEVLEIAGGGEAIVRTEPIGPLVGIMPWNFPYYQVVRFAAPNIMLGNTLLLKHSRNCPQSALAIETLFVEAGLPEGVYVNVFADNAQVARMVADPRVRGVSLTGSERAGSAVGEIAGRHMKKFVLELGGSDPFIVLDDTDLDTTVAAAVNNRMANAGQACTASKRLIVLDDVYDRFLDKFTEAMRNIVPGDPTDPATTFGPLSSRSCVDEIAEQVDDALAKGAKLLTGGCRGEGPGAFYEATVLAGVTPQMRVYSEELFGPVAVVYKVATEAEAIALANESPFGLAAAIFTSDRNQARRVAEDLEVGMAWINGTSKSAPDLPFGGVKRSGVGRELGRYGFNEFANKKLVRTVR

SEQ ID NO: 3479 - protein, 1070 aa, Desulfovibrio desulfuricans G20
MKINLSISSIRLRVILVTLLVALVPVCTMTVAGLLVSMQQTASALSLQSRTALDKVSAAISRTTREAENVSRLVAGFNTLQGNPEPDSLRDMLFSRQHFWDKGFVEVFDAQGRILARSVPLRTANRQWMTPPEDPLVMQGILLHTASDIVRTPAGLAARAVAPVYRPSSLQAIGAVVTTFPLDRSMLQHIKEQTQADITLHYPDLRVESTLHDASKLPVTHDWDNTYDVMRNAEGPAQYEAQIAGSTYALSSIPLRNNAGVTQAVLSVALNRNMLRQYLHDAVQTLVLTLVLALVMAAGLGMWTAEKLTRPLHEMVQAIRRMAGGNLSVRVTEGGSDELGELAQSFNKMAGRLEEQRAHLLDALHEHEETTLRLANANKGLEYANRELLSAREEYRKIFEGSVQGIYQTTLEGRFIKANRALARMLGYGSAEELIGTVTDIGSQLYVNPADRQRLKSLLSTRSSLSDFETRFYRRDGSQVPVSISVRLVYDENDLPQYLEGALTDITERERRREAEQQREAAEAASKAKSEFLARMSHEVRTPLNAVVGMADLLWESDLTPDQRLYVDIFRKSGQTLLALLNDILDYSRLEAGRLTLERLPFSLRDTLTMTVNMHAAQAESRQLSLSLHVDETLPDNYCGDSLRLRQILGNLLSNSIKFTREGSVEVHVGPAPGQQELTAGEPVMVRICVRDTGIGIPENVQQTIFESFTQADSSITRQFGGTGLGLSICRMLTTMMGGRIWLESTQGQGTAVYVEMRLDLHDRSAAETQPEECAMPVQAAPLRILCVEDSANNRLLFRMYLKNTGHEVDEAENGEEGLRLFMLNSYDIIFMDLEMPVMDGYMATTAIRDYEQRHRMPAVPVVALTAHALEDFKQRCLAMGFTDYLTKPFRKQQLLAMLERNTGAPAPQYQADGAKRPAPEEHTAGQNAEKLAEQTAEEQAARKQTSGKQPPAAAQHTTEHMTDRQADKSATTVTTDRQAEQTSGQPPAGAAGDTATTGQSGEGTAAADAAQEVTMLENQRTGHTVIPQTGRQQTDRQQTEGTSDNDDTEPHREARKTQREPSQSPAHKT

SEQ ID NO: 3480 - protein, 250 aa, Rhodopseudomonas palustris CGA009
MVVEVDRQGAVGIVTLNLPEARNALSREMIRALAAALDELERDAAIAAIVLSGREVFCAGADIAEMRGIDLATVLAEDFSGCCDRLATCAKPLIAAVEGYAIGGGCELIEMCDLVIAGIGAKFGHPEIAFGTLSGGGGTQRLARAVGRARAMDLILTGRLISAIEAERIGLISRVVEDGEAHQAAREAAKLIAAHPVRAVRFAKQAVDRAVSAGLADGLALERRLFHLSFATGELPPRLDRFLTRRSPRR

SEQ ID NO: 3481 - protein, 568 aa, Desulfovibrio desulfuricans G20
MPQNIVVIGAVALGPKAACRFKRLCPEDNVIMIDQSDRISYGGCGIPYYVSGEVNTLEELQMTPYHTIRDAEFFRVNKDVKVLARTKVESIDRQAKKVLIRDLTTGETAELPYDKLVLAMGSAPNRPPFEGIDLEGVHTCTTLDDAQAIREAVAAGSVSGAVVVGGGFIGLEVAVSLADMWGIKTSVVEIADQILPGFLSGNMVKIATHDLRKNDVDVFCGEKVIRIEGENGKVARVVTDKRTIDAELVVMAAGIRPNTEIARAAGIELNERGAIIVNDRMQTSDPDIYAGGDCVTVPNLVTGKPGFFPLGSMANRQGRVIGTNLAGGDARFPGGVGTWAVKLFEQNAAGAGLTIESALREGFDAVNVHVEGFDRAHFYPEHTVMALDLVVERPTRRVLGIQGTSSLGDALVARINAVAPLLQNKPKLEDISNLEVAYSPPFASAMDIINTVANVAENVLEGRNHTLDPDEFAVMWQNRESGSCTFVDTRLASNAESLVEKYPGQWLSIPLEEMEQRLDEIPEDKTVVLICNTGLRSFESQLIMNRHGRKSLSVQGGMASVTKQGNEI

SEQ ID NO: 3482 - protein, 319 aa, Bordetella bronchiseptica RB50
MSTPKHAKVLILGSGPAGYTAAVYAARANLSPALITGLAQGGQLMTTTEVDNWPADVQGVQGPDLMQRFLQHAERFNTEILFDHIAKVDLSRRPFTLTGDTGNLYTCDALIIATGASAKYLGLASEQAFMGRGVSGCATCDGFFYRNKDVVVIGGGNTAVEEALYLSNICRKVTLIHRRDKFRAEPILVDKLMDKVANGNMELKLFHTLDEVLGDDSGVTGVRIRSTETDATEDLDVAGCFVAIGHQPNTGIFEGQLEMKDGYIITKSGLSGMATMTSVPGVFAAGDVQDHVYRQAITSAGTGCMAALDAQRWLENAGQ

SEQ ID NO: 3483 - protein, 170 aa, Gossypium hirsutum
MASQSSKPQSIYDFTVKDAKGNDVDLSIYKGKVLIIVNVASQCGLTNSNYTDLTEIYKKYKDQGLEILAFPCNQFGGQEPGSIEESIQNMVCTRFKAEYPIFDKVDVNGDNAAPLYKFLKSSKGGFFGDSIKWNFSKFLVDKEGNVVDRYSPTTTPASMEKDIKKLLGVA

SEQ ID NO: 3484 - protein, 498 aa, Colwellia psychrerythraea 34H
MNIIGHLINGEICTDAARTQDVFNPATGEVTRQVALASVETVEQAITAAQAAFPQWRNTPPIKRARVMFRFKELLEANSDKICEMIGEEHGKISHDAAGELQRGIENVEYACGAPELLKGEHSKNVGPNIDSWSEFQPLGVVAGITPFNFPAMVPLWMFPMAIACGNCFILKPSERDPSSTLFIAQLLKEAGLPDGVMNVVNGDKVAVDVLLSDQRVKAVSFVGSTPIAEYIYATANANGKRCQALGGAKNHAIVMPDADMDNAVNQLLGAAFGSSGERCMALSVAVAVGDVAGDALITKMTAAMASLKVGAFSDSTNDFGPVITSQHRDKVVGYINHAQEQGATIVVDGRNPEVEGYNNGFFVGGTLIDNVTADMVSYKEEIFGPVLQVVRVQTMQQAMDLINDHEYGNGTCIFTRDGEAARYFSDNIQVGMVGINVPLPVPVAYHSFGGWKRSLFGDLHAYGPDAVRFYTKRKTITQRWPSAGVREGAEFSMPTLS

SEQ ID NO: 3485 - protein, 337 aa, Debaryomyces hansenii CBS767
MVKETKLYDLLGVQPSASEQELKKAYRKLALKYHPDKPTGDTEKFKEISEAFDILSNGDKRQVYDDYGLEAARGNAPAGGNPFAGAGHAGGGGGASPFGGFSSSGGFSQADAFNIFSQMGGFGMGGGGGGSDDFGFGGFGGGSGFGGMPGGFSQGHSSRSRPEPDTVTISLPVSLEDLYHGGVKKMKLNRKGISGNKESKVMTINIKPGWKVGTKINFANEGDYQRECHARQTVQFILEEKPHPIFKREGNNLKMNLPLTFKESLCGFSKEVNTIDGRRIPLLRSSPIQPNTSTTYPGLGMPISKLPGSRGDLEIVFKVDYPVSLNAEQKQVINQYF

SEQ ID NO: 3486 - protein, 108 aa, uncultured prokaryote
WTMVAGGGASVVYADIIADLAGVKDLANYGEYSGGPTTAETQFYAETIFDLMTRYKDDRGKILIIGGAIANFTDVAKTFTGIINAFEKYADKPQEHKTKIYVRRGGPN

SEQ ID NO: 3487 - protein, 110 aa, uncultured prokaryote
WTMVAGGGASVVYADTIADFAGIDDLANYGEYSGGPTTGETKFYAETIFDLMTREPDPQGRGKVLIIGGAIANFTDVAKTFTGIIQAFENYQDSLKEVGTKIYVRRGGPN

SEQ ID NO: 3488 - protein, 479 aa, Rubrobacter xylanophilus DSM 9941
METGVKSLKNFIGGRFVEPASGELYDVVNPSTGEVFARAPMSGEEDVDRAFGAAAKAFEEWRESTPSERQRALLRIADRIEERAEELVRAECENTGKPYALTLEDEIPPMADQIRFFAGAARCLEGKSAGEYMRGMTSYIRREPVGVCAQVTPWNYPMMMAVWKFAPAVAAGNTVVLKPSDTTPVSTLLLAEIAAEFLPEGVFNVVCGDRDTGRLLVRHEVPQMVAITGSVRAGMEVAEAAAKDLKRVHLELGGKAPVIVFDDADPEAAAEAIAEAGYFNAGQDCTAATRVLAAPGVHDDFVAALTERARSTRTGPPDDEEAYYGPLNNENQLRRVSGIIERLPDHAEVVAGGGRVGERGYFYAPTVVSGLRQDDEASQTEIFGPVITVQPFSDEDEAVRWANGVRYGLASSVWTRDHGRAMRVSRRLDFGCVWINTHIPLVAEMPHGGFKHSGYGKDLSMYGLEDYTRIKHVMSNIEA

SEQ ID NO: 3489 - protein, 499 aa, Synechococcus sp. WH 5701
MNPPRWLFWHRRDLRLADNLGLAAAARATAAVTGVFVFDPALLDAPDLSPARLWFLSESLRELQGRWREAGSRLLLLRGDPAEVLPQLAQAAGAQVVAWNRDVEPDGRARDRRVAEALRAGGCKLLADWDQLLVPPDALATGAGDPYRVYGPFFRSWRRRIEQAGAEACAPVAAPASLIDLDPAALPAERRRLWDQLNWLETVPTPGDGLPGAPFAGADLCPCRPGEAAAAAQLAAFADGPLLGYEPGRNLPAEPGTSGLSAALRFGTLSPRQAWAAAQQQRPRARSEEELQSITVWEQELAWREFYQQALFHFPELAEGPYRPQWRHFPWENDEGRFAAWCDGLTGVPIVDAAMRQLNDSGWMHNRCRMIVASFLVKDLIVDWRWGERQFMRLLVDGDLAANNGGWQWSASSGMDPKPLRIFNPYTQAARFDPEATYIRRWLPELSRVATADLIRGEIAPLERRGYPGPIVDHKLQQARFKALHAASVAAPQEARLRG

SEQ ID NO: 3490 - protein, 110 aa, uncultured prokaryote
  misc_feature (22)..(22): Xaa can be any naturally occurring amino acid
WTMVAGGGASVVYADTVADLGXVNELANYGEYSGNPSRTETREYVKTVFKLMTRNKDPQGRPKILIIGGAIANFTDVAKTFDGIIDAMKEYADKLREVGVKIYVRRGGPN

SEQ ID NO: 3491 - protein, 849 aa, Brassica napus
MKGVRNIYHHSYTSFLLLFLVMILIHPALSIYINTLSSTESLTISSNRTLVSPGDVFELGFFETNSRWYLGMWYKKLPFRTYVWVANRDNPLSNSIGTLKISGNNLVILGHSNKSVWSTNLTRGIDRSTVVAELLANGNFVMRDSNNNDASQFLWQSFDYPTDTLLPEMKLGNDLKTGLNRFLTSWRSSDDPSSGEFLYELETGRLPEFYLSKGIFPAYRSGPWNGIRFSGIPDDQKLSYLVYNFTENSEEVVYTFRMTNNSIYSKLTVSLSGYFERQTWNASLGMWNVSWSLPLPSQCDTYRRCGPYAYCDVSTSPICNCIQGFNPSNVQQWDQRSWSGGCIRRTRLSCSGDGFTRMENMELPETTMAIVDRSIGVKECKKRCLSDCNCTAFANADVQNGGTGCIIWAGELEDIRNYAADGQDLYVRLAAADLVKRRNANGQIISLTVGVSVLLLLIMFCLWKRKQKRANANATSIANRQRNQNLPMNGMVLSSKREFLEEKKIEELELPLIELETVVKATENFSNCNKLGQGGFGIVYKGRLLDGQEIAVKRLSKTSVQGTDEFMNEVTLIARLQHINLVQIIGCCIEADEKMLVYEYLENLSLDSYLFGKTRRSKLNWKERFDIINGVARGLLYLHQDSRFRIIHRDLKVSNILLDKNMTPKISDFGMARIFARDETEANTVKVVGTYGYMSPEYAMHEIFSEKSDVFSFGVIVLEIVSGKKNSYNLNYKNNLLSYAWSQWEEGRALEIIDPVIVDSLPSTFQPQEVLKCIQIGLLCVQELAEHRPTMSSVVWMLGSEAKEIPQPKQPGHCIGRSPYDLDPSSSSQCDDDESWTVNQYTCSLVDAR

SEQ ID NO: 3492 - protein, 108 aa, uncultured prokaryote
  misc_feature (71)..(71): Xaa can be any naturally occurring amino acid
WTMVAGGGASVVYADTIADLAGVKDLANYGEYSGGPTTAETQFYAETIFDLMTRHKDPRGKILIIGGAIAXFTDVAKTFTGIINAFEKYADKLKEHKTKIYVRRGGPN

SEQ ID NO: 3493 - protein, 281 aa, Medicago truncatula
MAEIDLEWPKKDNRRLLHVVYRVGDLERTIKFYTEALGMKLLRQRDVPEEKYANAFVGFGDEHSHFAVELTYNYGVTSYDVGDGFGHFAIATQDVYKLVEHIRAKGGNITREAGPVQGGTTVIAFVKDPDGYTFALVQRPIVHDPFCQISLRVGDLERAIKFYEKALGLKVVRKVDNPENKYTIAILGYKEEDDATVLELTYNYGVTEYSKGTAYAQIAIGTDDVYKSADVVNLVTQELGGEITLQPGPIPGLNTKVTSFLDPDGWKTALVDNEDFLKELE

SEQ ID NO: 3494 - protein, 347 aa, Caulobacter crescentus CB15
MTQKLAVVLFNLGGPDGPDAVRPFLFNLFRDPAIIGAPALIRYPLAALISTTREKSAKANYAIMGGGSPLLPETEKQARALEAALALAMPGVEAKCFIAMRYWHPLTDETARQVAAFAPDQVVLLPLYPQFSTTTTGSSLKAWKKTYKGSGVQTTVGCYPTEGGLIEAHARMIRESWEKAGSPTNIRLLFSAHGLPEKVILAGDPYQKQVEATAAAVAAHLPPQIEWTVCYQSRVGPLKWIGPSTDDEIRRAGGEDKGVMITPIAFVSEHVETLVELDHEYAELAEEVGAAPYLRVSALGTAPEFIDGLAKAVRDSVGKAPGTVSSACGWRCGADWSKCPCREGASA

SEQ ID NO: 3495 - protein, 175 aa, Arabidopsis thaliana
  misc_feature (117)..(117): Xaa can be any naturally occurring amino acid
  misc_feature (120)..(120): Xaa can be any naturally occurring amino acid
  misc_feature (122)..(122): Xaa can be any naturally occurring amino acid
  misc_feature (129)..(129): Xaa can be any naturally occurring amino acid
  misc_feature (134)..(134): Xaa can be any naturally occurring amino acid
  misc_feature (137)..(138): Xaa can be any naturally occurring amino acid
  misc_feature (143)..(143): Xaa can be any naturally occurring amino acid
  misc_feature (148)..(149): Xaa can be any naturally occurring amino acid
  misc_feature (157)..(157): Xaa can be any naturally occurring amino acid
  misc_feature (160)..(161): Xaa can be any naturally occurring amino acid
  misc_feature (164)..(164): Xaa can be any naturally occurring amino acid
  misc_feature (169)..(171): Xaa can be any naturally occurring amino acid
MASSMLSSTAVVTSPAQATMVAPFTGLKSSASFPVTRKANNDITSITSNGGRVSCMKVWPPIGKKKFETLSYLPDLSDVELAKEVDYLLRNKWIPCVEFELEHGILCTREARETIPXYLXMXGTWQIWXFPFFXMNXXRSKFXREVKXXKKGPLGPXLGXXGFXNPKGXXXVFFK

SEQ ID NO: 3496 - protein, 288 aa, Medicago truncatula
MSGFCVGMAEIDLEWPKKDNRRLLHVVYRVGDLERTIKFYTEALGMKLLRQRDVPEEKYANAFLGFGDEQSHFVVELTYNYGVTSYDVGDGFGHFAIATQDVYKLVEHIRAKGGNITREAGPVQGGTTVIAFVKDPDGYTFALVQRPIVHDPFCQISLRVGDLERAIKFYEKALGLKVVRKVDNPENKYTIAILGYKEEDDATVLELTYNYGVTEYSKGTAYAQIAVGTDDVYKSADVVNLVTQELGGKITRQPGPIPGLNTKVVSFLDPDGWKTVLVDNEDFLKELE

SEQ ID NO: 3497 - protein, 110 aa, uncultured prokaryote
  misc_feature (17)..(17): Xaa can be any naturally occurring amino acid
  misc_feature (20)..(20): Xaa can be any naturally occurring amino acid
WTMVAGGGASVVYADTXADXAGIDDLANYGEYSGGPTTGETKFYAETIFDLMTREPDPQGRGKVLIIGGAIANFTDVAKTFTGIIQAFENYQDKLKEVGTKTYVRRGGPN

SEQ ID NO: 3498 - protein, 529 aa, Arabidopsis thaliana
MAASPKIGIGIASVSSPHRVSAASSALSPPPHLFFLTTTTTTRHGGSYLLRQPTRTRSSDSLRLRVSATANSPSSSSSGGEIIENVVIIGSGPAGYTAAIYAARANLKPVVFEGYQMGGVPGGQLMTTTEVENFPGFPDGITGPDLMEKMRKQAERWGAELYPEDVESLSVTTAPFTVQTSERKVKCHSIIYATGATARRLRLPREEEFWSRGISACAICDGASPLFKGQVLAVVGGGDTATEEALYLTKYARHVHLLVRRDQLRASKAMQDRVINNPNITVHYNTETVDVLSNTKGQMSGILLRRLDTGEETELEAKGLFYGIGHSPNSQLLEGQVELDSSGYVLVREGTSNTSVEGVFAAGDVQDHEWRQAVTAAGSGCIAALSAERYLTSNNLLVEFHQPQTEEAKKEFTQRDVQEKFDITLTKHKGQYALRKLYHESPRVILVLYTSPTCGPCRTLKPILNKVVDEYNHDVHFVEIDIEEDQEIAEAAGIMGTPCVQFFKNKEMLRTISGVKMKKEYREFIEANK

SEQ ID NO: 3499 - protein, 313 aa, Escherichia coli O6
MLDNVLRIATRQSPLALWQAHYVKDKLMASHPGLVVELVPMVTRGDVILDTPLAKVGGKGLFVKELEVALLENRADIAVHSMKDVPVEFPQGLGLVTICEREDPRDAFVSNTYDSLDALPAGSIVGTSSLRRQCQLAERRPDLIIRSLRGNVGTRLSKLDNGEYDAIILAVAGLKRLGLESRIRAALPPEISLPAVGQGAVGIECRLDDARTRELLAALNHHETALRVTAERAMNTRLEGGCQVPIGSYAELIDGEIWLRALVGAPDGSQIIRGERRGAPQDAEQMGISLAEELLNNGAREILAEVYNGDAPA

SEQ ID NO: 3500 - protein, 271 aa, Desulfitobacterium hafniense DCB-2
MKDYGTNLIGGTSPGKMGQEVHGVPVFNTVKEIVREQGDIDFSVIFVPGSALKTAVMEAADAGVKNIIPCVEGTPIHDIMEMIAYAKGKGSRLIGPGSIGILTPGEAVVGWLGGNVEWANKFFQKGHIGVFSRSGGQSGTIPWVLREGGFGVSTVIHTGTEPVLGTSMADLLPFFEEDPDTHGVAVYAEIGGTQEEECAEVIAAGKFTKPFVIYVAGAWAPEGQRFSHASNIVERGRGSAKSKMEAITKAGGFVAERPTDIPLILKEKLGK

SEQ ID NO: 3501 - protein, 151 aa, Eucalyptus glaucina
KAVAEKAACAEAKERGVDLVVINPVLVLGPLLQSTINASIIHILKYLTGSAKTYANSVQAYVHVKDVALAHVLVLENPSASGRYLCAESVLHRGDVVEILAKFFPEYNVPTKCSDEVNPRVKPYKFSNQKLKDLGLEFTPVKQCLYETVES

SEQ ID NO: 3502 - protein, 442 aa, Haloarcula marismortui ATCC 43049
MSYTALQVDPNVLAEGVNLLWVLTVSFLIFFMHAGFAMLEAGQVRSKNVANQLTKNLLTWSVGVVVFFLIGSGISSLVGTGSFAPAFGAEAANDYVGWLFGAVFAMTAATIVSGAVAGRAKLRAYITYTFLLAAVIYPVVTGLTWAGAHISLGGVVFKDFAGGMIVHGMGGIAGLTAAYVLGPRMGRYNEDGSANVIPGHSMTFAVLGTLILAFGWYGFNVGTAASVFVVEDGALALGAFATVGRVAMTTTVAMAMGAIGAALVAWLKTGKVDTLYVANGLLAGLVGITAIPDTTTWWGALIVGLLAGGQLPIVFSFMENRMKIDDVCAVFPVHGSAGVLGTIMYPLVATSGTVGSIGSALAVQVVGVAVIAGWTIVTTGLIWYGLKAAGQARVTPEHEQEGLDVSEHGVETYPEFGGGEGVVADGGKVNTNVRTDGGSKDD

SEQ ID NO: 3503 - protein, 121 aa, Haloarcula marismortui ATCC 43049
MTDETDDSEIKMVVAMVRPDKLGDVKKALAEVGAPSLTVTNVSGRGSQPAKKGQWRGEEYVVDLHQKVKVETVVADIPAEDVVDAIADGAHTGEKGDGKIFVLPVDNAYQVRTGKEGPEAV

SEQ ID NO: 3504 - protein, 372 aa, Saccharum officinarum
MTVVDAVSTDAAGAPAAAAAPVQQPGNGQTVCVTGAAGYIASWLVKLLLEKGYTVKGTVRNPDDPKNAHLKALDGAAERLILCKADLLDYDAICRAVQGCHGVFHTASPVTDDPEQMVEPAVRGTEYVINAAAEAGTVRRVVFTSSIGAVTMDPSRGPDVVVDESCWSDLEFCKKTRNWYCYGKAVAEQAAWDAARQRGVDLVVVNPVLVVGPLLQPTVNASIAHVVKYLDGSARTFANAVQAYVDVRDVADAHLRVFESPRASGRYLCAERVLHREDVVRILAKLFPEYPVPTRCSDEVNPRKQPYKFSNQKLRDLGLEFRPVSQSLYDTVKNLQEKGHLPVLGEQTTEADDKEAAPAAAELQQGGIAIRA

SEQ ID NO: 3505 - protein, 579 aa, Glycine max
LILMALPICLTVIAIFTLCCVINCNNGVEAFHDIYPDLQSISARSVSKLQRTGYHFQPRKNWINDPNGPMYYNGIYHLFYQYNPKGAVWGNIVWGHAVSKDLINWKELEPALYPSKPFDKYGVWSGSATVLPGKGPVILYTGVIDKQSNEVQLYAIPENKSDPFLRKWVKPKAFNPIVVADHSMNASVFRDPTTAWWSKDGHWRMLIGGRRKDRGMAYLYRSKDFVKWIQAKHPIHSAASTGMWECPDFYPVSLKGKNGLDISVVGSSSIKHVLKNSLDLTRYEYYTIGTYFKNKDKYIPDNTSEDGWGGLRYDYGNFYASKSFFDPSKNRRILWAWANESDSKEDDVKKGWAGIQSIPRTVWLDYGGKQLVQWPVEELNSLRKKEVKISHQKLKKGQHVEVKGITAAQADVEVTFSFSSLDRAEPFDSRWVNAQDLCSQKGSKVQGGVGPFGLLTLASEKLEEFTPVFFRIFKAPNKHVILMCSDARSSSLKRELYKPSFAGFVNVDLAKNKKLSLKSLIDHSVVESFGAGGRTNILSRVYPTLAIKKKAHLFVFNNGTEHITVEYLKAWSMKSARRN

SEQ ID NO: 3506 - protein, 159 aa, Zea mays
  misc_feature (72)..(72): Xaa can be any naturally occurring amino acid
MSDEEHQFESKADAGASKTYPQQAGTIRKNGYIVIKGRPCKVVEVSTSKTGKHGHAKCHFVGIDVFTGKKLXIVPSSHNCDVPHVDRTEYQLIDITEDGFVSLLADSGNTKDDLRLPTDEALEGQIKSGYDDGKDLLLTVMSSMGEEQICAVKEIGGKN

SEQ ID NO: 3507 - protein, 334 aa, Pseudomonas chlororaphis
MTLRIAINGFGRIGRNVLRALYTQGYRQDLQIVAINDLGDSSINAHLLKYDTVHGTFDADVQHDQESLTVNGDRIAVSAIRNPAELPWAAEKIDVVFECTGLFTDRAKAAAHLSAGARKVIISAPAKGADATVVYGVNHDILRQSHQIISNASCTTNCLAPVAQVLNRELGIESGLMTTIHAYTNDQNLTDVYHSDSVPRPFGHPNMIPSKTGAAEAVGLVLPELAGKLTGMAVRVPVINVSLVDLTVQLKRNTTAEEVNALLKSASQHSKILGYNSLPLVSSDFNHNPLSSIFDANHTKVSGGKLLKVLAWYDNEWGFSNRMLDNCLALCSAE

SEQ ID NO: 3508 - protein, 483 aa, Alkalilimnicola ehrlichei MLHE-1
MFESPLLSNLHGYIDGSWTPADSGERFPVHNPVNGDELGRVAAMGAEETRRAIDAAHAALRRGSELEERQAWLDGIVDALKAHKSELGRVLTMEHGKPLKEAQGEVLYAAGFFEFCAKNVYSLGPRTLPERPREATWTIHNRPAGVVGLVTPWNFPIGMIAKKLSAAIAAGCPSVIKPSSKTPLTMLALFTLMEREVDLPPGFVNLVTGPSGPIGDTLMADDRVRVVSFTGSTEVGRKLITASAPGVKKLALELGGNAPFIVFADTDLDRAADHLIANKFRGGGQTCVCANRILVEASVEESFADKVAERAARLKVGDGMAPDTDLGPLIDRNGYEKVRRHFNNALEQGATAVLGEDPGPIPNDWGGFFPPAVLRGVKPGMDCTREETFGPLVPIMPFRDEAQALEMANDTEFGLAAYLFTADEARAQRLIAGLEFAHVGHNTGTGPTPEAPFGGMKCSGWGREGGTEGLFEFVEPQTVPRGN

SEQ ID NO: 3509 - protein, 109 aa, delta proteobacterium MLMS-1
MASDKLVQVSDADFDSQVLQSAEPVLVDFWAPWCGPCKAIGPVVEELADEYAGKAKIAKMNVDDNPATPGKYGIRAIPTLILFKGGEVVDQVTGAVGKPQLTALIDKGM

SEQ ID NO: 3510 - protein, 435 aa, Desulfovibrio desulfuricans G20
MDFHDIDIDSSAKIKVVGVGGGGGNAVNNMITSTLKGVTFITANTDVQALHRSQAEFKIQLGEALTKGLGAGADPEVGRQAALESIEAIREALGEADMVFVTAGMGGGTGTGAAPVIAQVAKEMGALTVGVVTKPFFFEGRKRLEAAEKGIEQFRQQVDSLITIPNDRLLSLASKKATFIEMLKRADEILYFAVKGISDLIMVPGLINLDFADVKAVMGESGLAMMGAGTSSGESRAHEAAQRAITSPLLEDVSIDGARGVLMNITSSYDLTIQEVSEAAGVIQEAAHEDARIFFGTVFDENMGDEMRITVIATGIDTSSLDEMHSSGKITQIRGRAGSGSGGGGGTVSATPHAAAATAPQAAETAPRRTLDSSVPRGVATFTEGDRSIPAYLRKQQAAQPAAPAPRQAAVNADEDFTFDEDEFEIPSFIRRKPQ

SEQ ID NO: 3511 - protein, 680 aa, Burkholderia pseudomallei K96243
MTKKLNEVSVDDDANQSDDQPTAASGKGEKAKARDRRAKEKALLKEAFATSTPGTAEELEERRTKLRALIKLGKERGFLTYAEINDHLPDNFTETEALEGIIGTFNDMGVAVYEQAPDAETLLLNDNAPAASSDDEVEEEAEVALSTVDSEFGRTTDPVRMYMREMGTVELLTREGEIEIAKRIEDGLRHMVMAISACPTTIADILAMAERVANEESRVDELVDGLIDPNAADTDGFSEKDAEEIENEDAEAEEDDEEEEEDDDGAAQATANAAQLEALKRASLEKFALISEWFDKMRRAFEKEGYKSKSYLKAQETIQNELMSIRFTARTVERLCDTLRAQVDEVRQVERQILHIVVDKCGMPRSEFIARFPGSETDLDWAEKVAAEGHSYGAILSRNIPAIREQQQRLLDLQARVVLPLKDLKETNRQMAAGELKARQAKREMTEANLRLVISIAKKYTNRGLQFLDLIQEGNIGLMKAVDKFEYRRGYKFSTYATWWIRQAITRSIADQARTIRIPVHMIETINKMNRISRQILQETGLEPDPATLAEKMEMPEDKIRKIMKIAKEPISMETPIGDDDDSHLGDFIEDTNTVAPADAALHASMRDVVKDVLDSLTPREAKVLRMRFGIEMSTDHTLEEVGKQFDVTRERIRQIEAKALRKLRHPSRSDKLKSFLEGN

SEQ ID NO: 3512 - protein, 455 aa, Pyrococcus furiosus DSM 3638
MGKLFGTFGVRGTANKDITPEFALKIGMAFGTLLRREGKKKPVVVVGRDTRVSGEMLKSALISGLLSVGCDVIDVGIAPTPAIQWATNHLKADGGAVITASHNPPEYNGIKLLEPNGMGLKKEREAIVEEIFFKEDFDRVEWHEIGEVREVDIIKPYIEAIKSKVDVEAIKKRRPFVVVDTSNGAGSLTLPYLLRELGCKVVSVNAHPDGHFPARNPEPNEENLKGFMEIVKALGADFGVAQDGDADRAVFIDENGRFIQGDKTFALVADAVLRENGGGLLVTTVATSNLLDDIAKKHGAKVMRTKVGDLIVARALYENNGTIGGEENGGVIFPDHVLGRDGAMTVAKVVEIFAKSGKKFSELIDELPKYYQIKTKRHVEGDRYAIVNKVAEMARERGYTVDTTDGAKIIFEDGWVLVRASGTEPIIRIFSEAKSEEKAQEYLDLGIELLEKALS

SEQ ID NO: 3513 - protein, 299 aa, Synechococcus sp. WH 5701
MTAPAPLPDPTASDQPSAAALAGMPLGWPGDSGDLPRRFPGREALIKELAARFPQASGGASPIRGGSKPALAALEALDPVRYAASRNHLDGAVSGLSPYIRHGVVSLAQVRDLVQQRMAGGPEPVSEKLLQELAWRDYWQRLWLRLGDGLWENLEPLKTGHPEAAYAPELPGDIDEGRTGLACIDAFARQLSDTGWLHNHARMWLAAYVVHWRRVRWQAGAHWFLRHLLDGDPASNNLSWQWVASSFSAKPYLFNRANLERFGAGRHCPGCPAAENCPFEASYEDLQARLFSAPQGEVA

SEQ ID NO: 3514 - protein, 483 aa, Burkholderia thailandensis E264
MGIHVIKMPDIGEGIAEVELGLWHVKIGDRVKEDQAIADVMTDKASVEIPSPVTGVVVALGGKEGDVLAVGSELVRLEVEGDGNHKGGDGALAGAAANGDARGEAAARERIADAAHAHAGAASVRGERDFDAPRAASSDAPNAKDERDHDRADREHSDEREARNASRGAFADARPAARESASPPPARRPGERPLASPAVRKRAWDLGVELRYVHGTGEAGRILHEDLDAYLQGRGAAEPRARGGHAAYVERHDEEAVPVIGLRRKIAQRMQDAKRRIPHFSYVEEIDVTELEALRAELNRKYGDMRGRLTVLPFLARAMVIALRDFPQINARYDDEAGVVTRHGAVHLGVATQSKAGLMVPVVRHAEARDPWAIAAEIARLADAVRAGRAERDELSGSTITITSLGALGGIASTPVINSPEVGIVGVNRIVERPMFRAGAVVARKLMNLSSSFDHRVIDGMDAAEFIQAVRALLEQPALLFVE

SEQ ID NO: 3515 - protein, 933 aa, Nitrosomonas europaea ATCC 19718
MSLNTRANIIPEKNTPNEKDYPLREDIRLLGRMLGDTIRELEGETMFNLVETIRQTSVRFRRDQDEAAEHELDTILNHLSHKETIAVVRAFSYFSLLSNIAEDLHHNRRRRAHLRAGSPPQDGSVTLALQRVVKKGIDAEQLQNFFASALISPVLTAHPTEVQRRSILDYQLKIQRLLKERDRTQLTPNEMRHNEEDLRSAIQTLWQTRVLRSVRLTVQDEIENGLIYYHYTFLRQIPYIYAKLEDILERHMDKAAPRIASFLRIGSWIGGDRDGNPFVTHQIMLHAAERHSALILDFYISEVERIGQTMSLSERLIKVSSDLEGLASTAPGLPASRIDEPYRRVFLGIHARLIATSRHLGSSIRGCCQENNAEPYADSAEFVHDLDIVIRSLRQHRSDRLAQGALRDLRRAADVFGFHLAPLDMRQHSKIHEQVISELYEKNTRDDRNYLEMSRSERVEWLLAELRHPRSLVTSFSDFSDVTQGELRILKMAAEIQRRFGHAALPNYIISMATGVVHILEVALLLKEAGLLQFGDDPRSTVNIIPLFETIDDLRGCASVMDELFSLPDYRKLLLSRDNLQEVMLGYSDSNKDGGFVTSNWEIYKAEIELTRVFDRHGVRLRLFHGRGGTVGRGGGPSYQGILAQPPGSVSGQIRLTEQGEVIASKYTDPEIGRRNLETLVAATIESTLLDRDAVHYHAPHYHQIMEELSSSACAAYRDLVYKTPGFKQFFLESTPIREIAGLHIGSRPTSRKPSDKIEDLRAIPWVFSWSLNRTMIPGWYGFGTAVENFVQQAGNEQEALKQLQEMYRTWPFLQTLLSNMDMVLSKSDLGIASRYAELVTDPELRQSVFTSIRTEWELCMKWLFAITGYSELLQDNPTLARSIRIRTPYIDPLNHLQIELLRRYRSGDDDDTVRRAIHLTINGVATGLRNSG

SEQ ID NO: 3516 - protein, 308 aa, Nitrosomonas europaea ATCC 19718
MSSPKKIVIASRESQLALWQANFIRGRLLELYPQTDITILGMTTKGDQILDVSLSKIGGKGLFIKELELALEDGRADIAVHSMKDVPMIVPSGFTLAAITEREDPRDAFVSNDFSSLEELPAGSVVGTSSLRRESQLRARFPHLQVRPLRGNVQTRLRKLDEGEYSAIILAAAGLKRLELGYRISMLLPPELSLPAVGQGALGIECRDNDPDMVEWMKPLHHAATACCVEAERAMSRMLGGSCQVPLGGFAEIFEDVLTLRGFVATPDGSRMIADKLCGKPESGEQVGQQLAQNLKAHGAEEILAALA

SEQ ID NO: 3517 - protein, 388 aa, Coccidioides immitis RS
MHLKENLLRGIYAYGFESPSAIQSRAIVQICKGRDTIAQAQSGTGKTATFAISILQVIDTALRETQALVLSPTRELATQIQNVIMAVGDYMNVQCHACIGGTNVGDDIRKLDHGQHVVSGTPGRVADMIRRRHLRTRHIKMLVLDEADDLLARGFREQIYDVYRYLPPATQVVVLSATLPYDVLSMTTKFMTDPVRILVKRDELTLEGLKQYFIAVEKEEWKFDTLCDLYDTLTITQAVIFCNTRRKVDWLTDKMREANFTVSSMHGEMPQKERDSIMQDFRQGNSRVLISTDVWARGIDVQQVSLVINYDLPSNRENYIHRIGRSGRFGRKGVAINFVTSEDVRILRDIELYYSTQIDEMPMNGKPIPTPTTRTLLILTSIVADLLG

SEQ ID NO: 3518 - protein, 348 aa, Nitrosomonas europaea ATCC 19718
MASYRITFRPSGRIITTESTETILEAALHHGLSLPYGCRNGSCGTCKGKIIQGIVDYGVHSEEALTEQEKNQQLALFCCARPLSDLEIECQEIEAIKDIKIRTMPCRVHKLEHVASDVMIIYLKLPANERLQFLPGQYIDILMKDGQRRSFSLANAPANDEFLQLHTRNYAGGVFSEYVFSHMKEKDILRFEGPLGSFFLHDAPKKDTPIILLAGGTGFAPVKSMLEHIFQTENTRFTHNTIRLYWGARTRDGLYLSNLAEKWAAENENFSYIPVLSEPLITDDWQGRTGLVHQAVINDMNTLSDCQVYACGAPAMVKAAFDDFTHQRNLQSENFFSDAFVPSKPATA

SEQ ID NO: 3519 - protein, 487 aa, Halobacterium sp. NRC-1
MSSSQTRSPDAELGLLDATMIGMGAMIGAGIFVLTGLAAEIAGPAAILVFALNGVVTAFTGLSYAELAASIPKSGGGYAFVREIFGDFSSFIMGWMLWFAYMIAGALYALGFAPNFLELLHVYGLVAPPDQVGAIAVPLLDASVPAAFVLAFIAVLGLVALNAVSTAASGSAETIFTIIKVSILVVFVAFGATSPLFSGAEFQPLFGVGGGPAAILPAMGLTFIAFEGYDLITTVTEEVKNPRENIPKAIFVSLIATVIVYLAVVTVAVGTLGADGLAAAGEAGIAEAATSFMPTGLPIIQNGGALIVFGAVFSTLTALNAVVIASSRVAFSMGREGQLLPSFGQIHHRYGTPFVAIIASAVVMLASVALPTQSAGNMSSLFFLLSFIIVNVAVIRLRRERPDMNRPYEMPFYPAPPLIGIALNLVLSVVLVDYLVRTDPLALALSAAWIVLGTAAYYAHASRQSAAGDDEDTTTISADAEHTPHDH

SEQ ID NO: 3520 - protein, 520 aa, Streptococcus suis 89/1591
MRVIEFLDTTLRDGEQTPGVNFSIKEKVTIAKQLEKWGISAIEAGFPAASPDSFEAVRQIAAAMTKTAVTGLARSVKSDIDACYEALKDAKYPQIHVFIATSPIHREFKLQKTKEEILAQITEHVSYARERFEVVEFSPEDATRTELDYLLEVVQTAVDAGATYINIPDTVGFTTPQHYGEIFRHLITNVKSDREIIFSPHCHNDLGMAVANTLSAIKNGAGRVEGTINGIGERAGNAALEEVAVALEIRKDFYDVTSPIVLKEMLNTSELVSRFSGIAIPRNKAVVGGNAFSHESGIHQDGVLKNPLTYEIITPELVGVKKNSLPLGKLSGRHAFVEKLKELDLYFEEGDVASLFARFKNLADKKEKITDADIRALVAGTEISNRDGFQFKDLRLDSQSDGSIQAQVIFINQDEEEVVVAESGKGSVEAVFNAVDQFFHQEISLERYHIDAITDGIDAQARVLVAVENKATETIFNASGIDFDVVKASAIAYIHANVMVQKENSGQIDKKLSEKELPTS

SEQ ID NO: 3521 - protein, 321 aa, Burkholderia sp. 383
MSTTTLTVRVARKWQEARDICGFEFVSDDGSPLPHFDAGAHIDVHLPGGFVRQYSLCNHPEHGDRYEIAVLRDADGRGGSRAIHDDVRQGDTVRIGVPRNQFALVPDAPHHLLLAGGIGVTPILSMAQRLFSSGTPFDLHYCARSTDRMAFAERINAAAFHDRARFHVDDGAPAQRFDLAAVLAAAPAGTHLYVCGPRGFMDAVLNAARERNWAEARLHYEFFGGTVASSGSDRAFQVRIASSGKVIDVPAECTVIAALAANGVDVLTSCEQGVCGTCATRVLQGEPDHRDSYLTAEEQAAGDQFMPCCSRARSDLLVLDL

SEQ ID NO: 3522 - protein, 109 aa, Pseudomonas syringae pv. phaseolicola 1448A
MSNEKIKHVTDANFEAEVLKAEGAVLVDYWAEWCGPCKMIAPVLDEIADTYAGKLTIAKLNIDENQETPAKHGVRGIPTLMLFKNGNVEATKVGALSKSQLAAFLDANI

SEQ ID NO: 3523 - protein, 283 aa, Arabidopsis thaliana
MAEASDLLEWPKKDNRRFLHVVYRVGDLDRTIEFYTEVFGMKLLRKRDIPEEKYSNAFLGFGPETSNFVVELTYNYGVSSYDIGTGFGHFAISTQDVSKLVENVRAKGGNVTREPGPVKGGGSVIAFVKDPDGYTFELIQRGPTPEPFCQVMLRVGDLDRAIKFYEKALGMRLLRKIERPEYKYTIGMMGYAEEYESIVLELTYNYDVTEYTKGNAYAQIAIGTDDVYKSGEVIKIVNQELGGKITREAGPLPGLGTKIVSFLDPDGWKTVLVDNKDFLKELE

SEQ ID NO: 3524 - protein, 144 aa, Brassica napus
  misc_feature (70)..(70): Xaa can be any naturally occurring amino acid
  misc_feature (107)..(107): Xaa can be any naturally occurring amino acid
  misc_feature (132)..(132): Xaa can be any naturally occurring amino acid
TQASKRRRLYLNSVVFLCLVQFIPYSFIEKEDSQVEGFSPELALVTVGGGNELEEKLVVRPTSETIVNHXWVHSYRDLPLMINQANVTTWEMRTTPFIRTLEFLWQXGHTAHATPEEVEKDAKQMIEINTRXAFEQTVIPVIAG

SEQ ID NO: 3525 - protein, 481 aa, Bradyrhizobium sp. BTAi1
MSFSPIVVWFRESLRLSDHPALHAAATSGAPVICCYVYDTESAALRPLGGASRWWLAQSLRALQDELDALGVKLVIRRGPSAKAISELAREASTSAVYWNDVAQTGPRAVAAEVEAALDAIGVKSRVFADDLLIDPAELRGKDGRGPRVFTPFWKRVLALGDPPKPLPVPVRLSSPSGVASLTVDKLALEPTSPDWAGGLRTTWRAGERAAQARLAKFLETTVRGYAADRDRPDIEATSRLSPHLRFGEISPRQIWHAARFAAEQQPAFARGIDKFLSELGWREFSRHLLFNNPDLATRNLQPSFDAFPWSQDAAALRAWQRGQTGYPIVDAGMRELWHTGSMHNRVRMVAASLLVKHLLIDWRLGEQWFWDTLVDADPGSNPASWQWVAGSGADAAPYFRVFNPVLQGEKFDSSGTYVRRWVPELARLPAALIHQPWAAKPLELAEAGVVLGRSYPAPVVDHRHGRERALAAYASLRTSD

SEQ ID NO: 3526 - protein, 610 aa, Pseudomonas aeruginosa UCBPP-PA14
MCGITGWTDWSRDLGEQRSILERMTRTLAPRGPDAEGLWLSRHALLGHRRLAIIDLENGAQPMLAEAGGRVALTYSGEVYNFRELRAELETLGQVFRTRSDTEVVLRAYLQWGEASFARLRGIYGFALWDEREQSLWLVRDRFGVKPLYYYPTAGGVLFASEPKAIFANPEANPVLDASGIAELFALTTAPTPGHGLYKGLRQVRPGQALRFDRNGVRELVYWALRAERHEEGAEDSAERAGQLLREAVAEQLVADVPLGSLLSGGLDSSAISAFAVAALDGDARRLPTFSVDFPGEGRGFVPTPWQSSWDEPYAQLAANFLGTPHRTVLVAPEEVLEQDEAVLQARDLPGWGELDASLYLLFRQVREHTTVALSGESADEVFGGYPFFHDPSALAHDGFPWLAGKSGPWQLLRREVAERVAAPEYIRARYREALAEVPRLDGEDAAQRRQREVAYLALSRWLPAMLERKDRMSMAVGLEVRVPFCDHRLVEYVWNLPWALKSVAGESKSLLRRALRGHLPQAILERRKSGFPANPDPRYLALLRERVGRLLADGRSPLFELVDAGRVRQALEQGTPLPSPRASASPTAGLAYLLNLDRWLTRHGVDISL

SEQ ID NO: 3527 - protein, 837 aa, Bradyrhizobium japonicum USDA 110
MTSPKLDRRQMLKLEAAAIAAAAAGLPVPALAANLATEREVSELKWDKAACRFCGTGCSVMVATKENRVVATHGDIKAEVNRGLNCVKGYFLSKIMYGHDRLTQPMLRKANGKYDKNGDFTPVSWTEAFDIMEVKWKEAMKKRGPNGVAMFGSGQWTIWEGYAASKLFKAGFRTNNIDPNARHCMASAVAGMMRTFGIDEPPGCYDDIEATDAFVLWGSNMAEMHPILWTRLTDRRLSAPHVRVAVLSTFEHRSFDLADIGMVFKPQTDLYLLNAIANHIIKTGRVNKDFVAAHTVFRRGQTDIGYGLRPEHPLQKKATGAAKANDSTDMSYDEYVKFVSEYTLEKAAEMSGVPLNRLEALAELYADPKTKVVSFWTMGFNQHTRGVWCNNLVYNIHLLTGKISSPGNSPFSLTGQPSACGTAREVGTFSHRLPADMVVTNKEHRTKAEHIWQLPEGTIPDKPGAHAVLQSRMLKDGLINAYWVQVNNNLQAGPNANEETYPGFRNPDNFIVVSDAYPSVTALAADLILPTAMWVEKEGAYGNAERRTQFWHQLVPAPGESKSDLWQLMEFSKRFKIEEVWPEELIAKKPEVRGKTLFDVLYKNGQVDKFPVSDIEQGYLNDESKAFGFYVHKGLFEEYASFGRGHGHDLAPFDAYHKERGLRWPVVNGQETRWRFREGSDPYVKQGTDVQFYGYPDGKARIFALPYEPAAESPDGEYPFWLSTGRVLEHWHSGTMTRRVPELYKAFPEAVCFMHPDDAQEAKIRRGDEVKVVSRRGFIRVRVETRGRDRPPRGLVFVPWFDESKLINKVTLDATDPISLQTDFKKCAVRIERVNVS

SEQ ID NO: 3528 - protein, 299 aa, Rhizobium leguminosarum bv. trifolii
MTTVIDGKNVAASVIQTVKSATAALEKSSGVTTGLAVVIVGDDPASHAYVGSKGRMAKECGFKSVQHTLPADTKQEDLAALVAALNADPSIHGILVQLPLPKPLDSEAIIQSILPEKDVDGLSVVNAGKLATGDLKTGLVSCTPAGAMVFVRRTHGEDLSGLNAVVIGRSNLFGKPMAQLLLNANATVTIAHSRTKNLAEVCRNADILVAAVGRPEMVRADWVKPGATVIDVGINRVAAPERGEGKTRLVGDVAFEEVSAVASTITPVPGGVGPMTIAMLMANTVIAAHRTAGQTPPQF

SEQ ID NO: 3529 - protein, 134 aa, Zea mays
MAAPIPREWVGLQQFPAATQTKLHELLGKLKEENVSTLTILVMGKGGVGKSSTVNSIVGERVANVSAFQSEGLRPMMCSRTRAGFTLNIIDTPGLIEGGYINEQAVEIIKRFLLEKTIDVLLYVDRLDTYRMDT

SEQ ID NO: 3530 - protein, 281 aa, Arabidopsis thaliana
  misc_feature (71)..(71): Xaa can be any naturally occurring amino acid
  misc_feature (85)..(85): Xaa can be any naturally occurring amino acid
  misc_feature (110)..(110): Xaa can be any naturally occurring amino acid
  misc_feature (189)..(189): Xaa can be any naturally occurring amino acid
MTPASPTQGTHVSDPPEPRGKTLTRESNEAALPISDSSACGNRTIDAEDDVYLDNLRSHKRYLNEIVACMXNGLTVGDSLPANVXESPERSESLLYHRDDLSLQDSPMTXQSCELIFCEEPTITASTMSSKPESRPTSPVSPYRYHRPLTSIDSPQPSLIVIHHSHTWPASMSSSATSTTTPQSRQRGXSDTGRGSPSSPSDICPSGDLGRTALPRAVQMRTQPCGYSSSSGPSNIDGEERMCSKSMEEDRGYNKGEDIPYAEVSSKSKSCKALDMRLCEK

SEQ ID NO: 3531 - protein, 311 aa, Lactobacillus johnsonii NCC 533
MAEKKNYDVIVIGAGPGGLTAALYAARANLKVVILDRGIYGGQMNNTAGIDNYPGFVDIQGPELGEKMYQTATNAGAEFAYGDVQSIIQDGNKKIVKTDSGEYEAGAVVIATGAVHKHLGVPGEEEYAGKGVSYCAVCDAAFFRDEDVAVIGGGDSAIQEGLYLAQSAKSVTVIHRRDQLRAKAELQKKAFENDKMKFIWNAQTEEIVGDGNKVTGVKYKDKETGEEKEIKVAGVFIYVGIQPQTDAFRDLGITDDQGWILTDDHMRTKVDGVFALGDVRAKELRQIATAVGEGSIAGQEVYNYYQGLSEK

SEQ ID NO: 3532 - protein, 328 aa, Bifidobacterium bifidum
EQRGITINIAHIEYQTAKRHYAHVDCPGHADFVKNMITGAAQMDGAILVVAATDGPMAQTREHVLLARQVGVPRILVALNKCDMVEDEELIELVEEEVRDLLDENGFDRDCPVIRTSAYGALHDDAPDHDKWVQTVKDLMDAVDEYIPTPVHDLDKPFLMPIEDVFTISGRGTVVTGRVERGQLAVNTPVEIVGIRPTQTTTVTSIETFHKTMDACEAGDNTGLLLRGINRTDVERGQVVAKPGSVTPHTKFEGEVYVLTKDEGGRHSPFFSNYRPQFYFRTTDVTGVIELPEGVEMVQPGDHATFTVELIQPIAMEEGLTFAVREGD

SEQ ID NO: 3533 - protein, 166 aa, Triticum aestivum
MSSASNNTPLLVAGAVGVALLAYVWVSKKQEPKSIYERIGGEAAVNAAVDIFYKRVMADPKVNYFFKNTNMAVQAKKQKSFMSYAFGAPGKYSGLAMDVAHRKLVREQGMDDSHFDAIAGHLQATLEELKVDRNLINEVMTAIGGMREQVMCRGKWAQRALVYERE

SEQ ID NO: 3534 - protein, 329 aa, Bifidobacterium longum
RAARGITINIAHIEYQTEKRHYAHVDCPGHADFVKNMITGAAQMDGAILVVAATDGPMAQTREHVLLARQVGVPKILVALNKCDMVDDEELIELVEEEVRDLLDENGFDRDCPVIHTSAYGALHDDAPDHEKWVQSVKDLMDAVDDYIPTPVHDLDKPFLMPIEDVFTISGRGTVVTGRVERGQLAVNTPVEIVGIRPTQQTTVTSIETFHKTMDACEAGDNTGLLLRGLGRDDVERGQVVAKPGSVTPHTKFEGEVYVLTKDEGGRHSPFFSNYRPQFYFRTTDVTGVIELPEGVEMVQPGDHATFTVELIQPIAMEEGLTFAVREGD

SEQ ID NO: 3535 - protein, 479 aa, Solibacter usitatus Ellin6076
MSSQLFGTKSLSRIIAESEGGEHHLKKTLGPVNLVALGIGAIIGAGLFSLTGIAAADNAGPAVVLSFIVAAIGCAFAGMCYSEFSTMIPIAGSAYTYAYATMGELLAWIIGWDLVLEYAVGAATVSVSWSSYVVKLLQSFSIELPSSFIHCPWDEVPGIINLPAVLIVCAISILLMIGISESAKVNAVIVVVKVAIVIVVIAVGYSYIKPENYTPFIPPNTGTFGEFGFSGVMRAAAVIFFAYIGFDAVSTAAQEAKKPQRDMPIGIIGSLIVCTILYILFARVLTGMVNYKTFHGDASPVATVIHLFPSVALQTTIVIGIIAGYTSVILVMLLGQSRVFFSMSKDGLLPAVFSDIHPKFQTPWRCNMIFMVFVSLFSGFLPIAKLGHMTSIGTLLAFVIVCIGIIWMRKTNPNAPRPYRTPFVPVVPILGVLVCFAMMASLGAETWIRLFVWLAIGLVIYFTYGVKNSHLRKAPLNKR

SEQ ID NO: 3536 - protein, 461 aa, Solibacter usitatus Ellin6076
MATTREGGLIKGLGLVDSTTLVMGSMIGSGVFIVAADISRQVQSPGLMMMTWFVTALLTLIAALSYGELAAAMPHAGGQYVYLREAFGPLYGFLYGWTLFMVIQTGTIAAVAVAFAKYAGVFFPWISDQNYLLGAGKVGFTTQQLVAIAIIVFLTWSNTRGIRTGAMVQNIFTIAKVAAILGLIAAGFLVGRNPEAIASNFNGFWRNSGWNFDTVRLVGVAMVGSLFSSDAWNNVTFTAGEVRNPRRNLPLSLALGVCIVSALYILSNFVYLNVLTFDAIQHAPKDRVAALAAEHMLGPVALQIMAAAIMISTFGCVNGLTLAGARVYYAMAKDRLFFRRATELDPKTNAPVFSLTVQCAWSVALTLSGSYNDLLDYVIFAVLLFYILTIAGLFVLRRTRPDMDRPYKAIGYPVLPAVYILAAGLIEVLLLAYKPNYTWPGLIIVLLGLPVYFIWRGKATI

SEQ ID NO: 3537 - protein, 354 aa, Forsythia x intermedia
MAKVVNPRVEILASNGIQSIPKEYVRPQEELESIRDVFEEEMSDEGPQLPTIDLEGLDSDDKQVREKCHQELIKASKEWGVMHLVKHGISDELIDRVKMAGKAFFNQSVEKEKYANDQASGNVQGYGSKLANNASGQLEWQDYFFHCIFPEEKRDLSICPKTPTDYIPAISEYAKQLRDLTSKMLSVLSLGLGLEQGRLEKEVGGMEELLLQLKINYYPKCPQPELALGVEAHTDISALTFILHNMVPGLQLFYKGKWVTAKCVPNSIIMHIGDTIEILSNGKYKSILHRGLVNKEKVRISWAVFCEPPREKILLKPLPETVSEAEPSRFPPRTFAQHVMNKLFRKSEDSGETK

SEQ ID NO: 3538 - protein, 259 aa, Brassica oleracea var. gemmifera
LDRTIQFYTECFGLKVLRKRDVPEEKYSNAFLGFGPETSNFVVELTYNYGVSSYDIGTGFGHFAISTQDVSKMVEAVRAKGGNVTREPGPVKGGGSVIAFVKDPDGYTFELIQRGPTPEPLCQVMLRVGDLDRAIKFYEKALGMRLLRRIERPEYKYTIGMMGYAEEYESIVLELTYNYGVTEYTKGNAYAQIAIGTDDVYKSAEVVKIANQELGGKITREAGPLPGLGTKIVSFLDPDGWKTVLVDNEDFLKELNEEE

SEQ ID NO: 3539 - protein, 229 aa, Clostridium perfringens str. 13
MDGIGIGIPKMVSGTHYGNLQKVRGGKRTFGITPHIPGGFITPEQLEKIAKVTKKYNGVIKITSGQRLLITNLKGEDLPKIWDELGMEPAVKKQNSVKNVEMCPAGFCKRSKFNTIGTGMKLLNKYKHMDMPCRTKIGVAGCRNACGSVYSKDVGVIADKTGFLVTAGGSAGHNPRMADILIKDVDEKEALRIVDKIFEVYKGEGEAGEKLGDFIDRIGIEVFKEKTLA

SEQ ID NO: 3540 - protein, 212 aa, Brassica napus
MASLLANGISSFSPQPTPDSSKSPKSFHPKPDSCVRGRVGSKTLIPTTRLLKVRADVGTIESNPAGNSSSTEKLQQYFQNLDYDKKYGFVEDIDSFTIPKGLSEETIGSISTLKDEPAWMLDFRFKAYAKFLTLKEPQWSDNRYPPIDFNNMCYYSAPKKKPTLNSLDEADPQLLDYWDKLGVPLTEQKRLANVVVYAVLYSASIRTTHRKT

SEQ ID NO: 3541 - protein, 157 aa, Arabidopsis thaliana
  misc_feature (42)..(42): Xaa can be any naturally occurring amino acid
  misc_feature (95)..(95): Xaa can be any naturally occurring amino acid
  misc_feature (100)..(100): Xaa can be any naturally occurring amino acid
  misc_feature (102)..(102): Xaa can be any naturally occurring amino acid
  misc_feature (106)..(107): Xaa can be any naturally occurring amino acid
  misc_feature (109)..(109): Xaa can be any naturally occurring amino acid
  misc_feature (120)..(120): Xaa can be any naturally occurring amino acid
  misc_feature (132)..(132): Xaa can be any naturally occurring amino acid
  misc_feature (135)..(135): Xaa can be any naturally occurring amino acid
  misc_feature (137)..(137): Xaa can be any naturally occurring amino acid
  misc_feature (141)..(142): Xaa can be any naturally occurring amino acid
  misc_feature (144)..(144): Xaa can be any naturally occurring amino acid
  misc_feature (147)..(149): Xaa can be any naturally occurring amino acid
  misc_feature (153)..(154): Xaa can be any naturally occurring amino acid
MASSMLSSTAVVTSPAQATMVAPFTGLKSSASFPVTRKANNXITSITSNGGRVSCMKVWPPIGKKKFETLSYLPDLSDVELAKEVDYLLRNKWVXCVEFXFXHGFXXTXEHGKHFPGYYXWAGTCKFWRVPXFWXNXLPLXXFXGFXXXKKGXXGAF

SEQ ID NO: 3542 - protein, 409 aa, Arabidopsis thaliana [sequence omitted]

SEQ ID NO: 3543 - protein, 1171 aa, Triticum turgidum
METTVLSVGKSVLNGAVRYAQSAIAEEVALQLGVRRDQVFITNELEMMQAFLMAANDEGDGDSKVVRVWVKQVRDLAYDVEDSLQDFAVRLEKQPWWRILLKDRRQVAKQMKGLRANVEDVSQRNMRYHLIKGSAGSNPASTDGQSAITGAMTMSSTEDARRQREKAKADLVQLIRKMDDRLRVIAVWGTSTDVGETSVIKRAFEDLKKHNRFDCHAWIKLMCPFNSVEFMRSIIRQFYIDLLQDPVENMDAQVLRGMGMKKENDLVDEFKSYLNDKSYLIVIDGMSTTEEWDQIKPCFPNNKRGSRIIVSTKQVEVASLCAGPQNVAPEHKQFSIDQNTLYAFFEKDQGSQDGDSTEVGSSSTNSTTTASHILVNNKILTRMETTLAAFKEFQLIGREKEKSEIIQLVTNGDGCQFEVISVCGMGGLGKTTVVRDVYQSQELRGKFEKCACVTIMRPFNCDELLKNLAGQFGYEDVADMVRHLEGKKCLIVLDDLSSTREWDAIIPHFTALETSSRIIVTTRVEDIGKHCSKKRKNIYKLQGLELNDAHDLFIQKVFDKTMDLDEQYPELVEQTNMILKKCKGLPLAIVTIGGFLANQPKTALEWKKLNEHISAAELQMNPELEAIITVLNKSYDGLPYHLKSCFLYLSIFPEDYNIKLKRLLRRWIAEGYPGVVRNKSTEEVAESYFMDLISRSMLLPSQRSICDGKRIGSCQVHDLIREIGISKSMEGNLVLRLEEGCSLNTQGTARHLAISSNWERDQSAFESIVDMSRVRSITVFGEWKPFFLSDKMRLLRVLDLEDTTGLVNHHLEHIGKFLHLRYLSLRGCESICHLPDTLGNLRQLETLDIRGTSIVMLPQTIIKLQKLQHLHAGFPTKGNYLCTRHLLHTYGFNQLDACTSLCCGAATPCIMMDKDYGGVVLPGGARKLKSLHTIRGVHVAYGDAVIQEIGRLSGLRKLGVMGINEKNDVKFCSAISNLSRLESLSVQSDKGCLDDITSPPKNLRSLKLEGRLGVLPEWIKKLQNLVKLKLSFTTSSQVEQDAAMEVLGHLPNLSILRLPGCSFKGGELHFQKDAFRSIVVFDVEGLGGIKSVNFDQGAMPELEQLKVTDACKRGGIGFFGLDILPSIKEVLLSVHFKMDRAGTELEREARLKEQFRTQLARNPKKPILKME

SEQ ID NO: 3544 - protein, 116 aa, Thermus thermophilus
MKLIVAIVRPEKLNEVLKALFQAEVRGLTLSRVQGHGGETERVETYRGTTVKMELHEKVRLEIGVSEPFVKPTVEAILKAARTGEVGDGKIFVLPVEKVYRIRTGEEDEAAVTPVQ

SEQ ID NO: 3545 - protein, 479 aa, Campylobacter jejuni RM1221
MTTYLNYIDGKFIPHNGEFIEVLNPATKEVISRVASASLEDTKRAIEAAKKAQKVWEAKPAIERANHLKEIASLIRKNANFLTEVLMQEQGKTRVLASIEINFTADYMDYTAEWARRYEGEIIQSDRANEHIYLYKSAIGVIGGILPWNFPFFLIARKMAPALLTGNTIVIKPSSETPNNAFEFAKLVSQSSLPKGVFNLVAGKGSVVGYELSSNENIGMVSLTGSVEAGTRVMEAAAKNIIKVSLELGGKAPAIVCKDADIDLAVEAIKASRICNNGQVCNCAERAYVHTSVYDEFVDKFVKAMSKVSVGNTLKGDFDMGPLVNQAGVDNALAMLQRATAKGAIVECGGKIIDTSGYYFPASVLTNVKHEDEIMQKEIFAPILPIAKFDTLDEAIDMANDCEYGLTSSIYTQNLDIAMRASREIKFGETYINRENFEAMQGFHAGFRKSGIGGADGKHGLEEYLATHVVYLQYNTNKQ

SEQ ID NO: 3546 - protein, 102 aa, Pseudomonas putida
MQVNISGQHVEVTQPLRDYVLEKLARVESHFDKITNVQVIMKVEKLQQTVEATLQIPGGEVVANAEHEDMYAAIDALADKLDRQLKKHKEKQQSLLQGAAAR

SEQ ID NO: 3547 - protein, 690 aa, Nicotiana tabacum
MQDFIGSVRRSLVFKQSGDFDTGAAGVGSGFGGFVEKLGSSIRKSSIGIFSKAHVPALPSISKAELPAKARKDDTPPIRWRKGEMIGCGAFGRVYMGMNVDSGELLAIKEVSIAMNGASRERAQAHVRELEEEVNLLKNLSHPNIVRYLGTAREAGSLNILLEFVPGGSISSLLGKFGSFPESVIRMYTKQLLLGLEYLHKNGIMHRDIKGANILVDNKGCIKLADFGASKKVVELATMTGAKSMKGTPYWMAPEVILQTGHSFSADIWSVGCTIIEMATGKPPWSQQYQEVAALFHIGTTKSHPPIPEHLSAESKDFLLKCLQKEPHLRHSASNLLQHPFVTAEHQEARPFLRSSFMGNPENMAAQRMDVRTSIIPDMRASCNGLKDVCGVSAVRCSTVYPENSLGKESLWKLGNSDDDMCQMDNDDFMFGASVKCSSDLHSPANYKSFNPMCEPDNDWPCKFDESPELTKSQANLHYDQATIKPTNNPIMSYKEDLAFTFPSGQSAAEDDDELTESKIRAFLDEKAMDLKKLQTPLYEGFYNSLNVSSTPSPVGTGNKENVPSNINLPPKSRSPKRMLSRRLSTAIEGACAPSPVTHSKRISNIGGLNGEAIQEAQLPRHNEWKDLLGSQREAVNSSFSERQRRWKEELDEELQRKREIMRQAVNLSPPKDPILNRCRSKSRFASPGR

SEQ ID NO: 3548 - protein, 1041 aa, Pleurotus djamor
MSSLRWSVGLRIVAGVRHRPVRCPTRRFATLKPLSSLFAPLDTFPERHIGPDDRETSYMLSKLNYNSFDAFIADTVPDQIRVSDTVNNSTIPPLSESELHRRAQALGAKNEKFKSYIGMGYHNAVVPPVVLRNVMENPQWYTPYTPYQPEVAQGRLESLVNFQTMVMSLTSMDIANASLLDEATAAAEGMVMAYVNSNHKKRSFFVDSGVSPQTLAVLRTRAKGFGINIVTGNVERIVSDTALRSDLCGVLVQYPDVDGTIKDYSALADSVHSAGGLVICATDLLALTMIKPPGEWGADVVLGNSARFGVPAGYGGPHAAFFAVTDKLKRKMPGRLIGRSRDASGRPAYRLALQTREQHIRREKATSNICTSQALLANMAAMYAVYHGPEGLKRVAERIHGLTQVLKTAVEGLGFKSVNTEFFDTLTLDVSAATGTADVVHATAMAANINLRQIDDTHVGVTLDESVGPIDLLSIINVFASAVSAPVIDRSRLVLPERVAIASSLRRTSEFLPHPVFNKHHSETEMLRYINHLASKDIGLVHSMIPLGSCTMKLNSTSSMIPLTWPEFSSVHPFAPAEQVEGYLTIIKELEEDLCRITGFHAASLQPNSGAAGEYAGLCVIRAYHESRGEGHRDICLIPLSAHGTNPASAVMAGLKVVPVKALADGSLDLKDLKEKAEKHKDQLAAFMITYPSTFGVFEDGVQEACKIIHDNGGQVYLDGANLNAQIGSTNPAKCGGDVCHMNLHKTFAIPHGGGGPGVGPICVAEHLAPFLPTHPYLSTEANSQAINAVSAAPFGSSSIHLISWAYIKMLGGQGLADSSRIALLNANYMAYRLSGHYSLRYKNNNNRVAHELLIDLAEFDKAAGLKVTDFAKRLQDYGFHPPTCSWPISTCMLIEPTESETLEEIDRFCDAMIQIRQEAQDIIDGKQPKDNNLLKNAPHPAHVIALPEAEWNRPYSRETAAYPAPWLHEKKFWPTVSRIDDGGSRFLIVLSLADRYLAHSSLRRPQSHRECCTSVACSSPSLMMYLLQCDCPSVEELAHA

SEQ ID NO: 3549 - protein, 266 aa, Brassica napus
  misc_feature (14)..(14): Xaa can be any naturally occurring amino acid
  misc_feature (33)..(33): Xaa can be any naturally occurring amino acid
SLAKGIGIGKHIAXDAFTVGGYEWAIYFYPDGXNPEDNSAYVSVFIALASDGTDVRALFELSLLDQSGKGKHKVHSHFDRALESGPYTLKYRGSMWGYKRFFRRTLLEASDYLKDASLKINCTVGVVVSEIDCPRLHSIHVPASDIGSHFGMLLENEDGSDITFNVSGEKFRAHRLVLAARSPVFESEFLDVIGEAEERDIEVTDMEPKVFKALLHYIYKDALIEDAETVSSSGSSVGPSASHTLAAKLLGAADKYNLPRLSLMCE

SEQ ID NO: 3550 - protein, 186 aa, Pseudomonas fluorescens PfO-1
MLKRWCAVPALLMALTGLAQAADCPDLLQGSLPKLRAKESIDLCQRYADKPLVVINTASFCGFAPQFEGLEALNQRYKAQGLEMLGVPSNDFKQESKDSAETAKVCYANYGVTFTMTEPQKVRGDDATHLFQVLARQSSAPKWNFYKYVIDRQGKVIANFSSLTKPDDPEFLAAIEKAIASQSLKP

SEQ ID NO: 3551 - protein, 459 aa, Xanthomonas campestris pv. campestris str. ATCC 33913
MTDTPGRSDAATLERFGYAQELKRQLSLKDLLIYGLVFMVPTAPFSIFGGVFDISAGMVPLTYLVGFVAMLFTALSYQQMSQAFPVAGSVYAYVGRGLSGGMGFLAGWAILLDYLLVPTLIYVVGANAMHNVLPQVPQPAWIAFFVVLNTVVNLRGIETTARANRFFLYAQLIVLALFVVLATLAIQRGVNGAQWTLRPFYNPQAFSPQLIFSALSVAVVSFLGFDAISTLSEEARGGNRVVGRATLLALVLVAGLFVLQTWLAALLQPHLQRYPSAQASNDAFFEIGRLIAGPWMQIVIALTVAISAAIANSLVAQAATSRLLFAMARDRQLPAFLRYIHPRTGVPQRAILLVAALSMVLGEVFVGQIALLSSLCNVGALTAFVLLHVAVLWHFRAHGRKVLHGVVPVIGIVILAYVLINADLHAQLGGSAWMVVGLAVLAFLKFSGRSTEFRATDAL

SEQ ID NO: 3552 - protein, 330 aa, Brassica napus
MATLFPGDGIGPEIAESVKKVFTTAGVPIDWEEHFVGTEIDPRTQSFLTWESLESVRRNKVGLKGPMATPIGKGHRSLNLTLRKELNLYANVRPCYSLPGYKTRYDDVNLITIRENTEGEYSGLEHQVVRGVVESLKIITRQASLRVAEYAFHYAKTHGRERVSAIHKANIMQKTDGLFLKCCREVAEKYPEITYEEVVIDNCCMMLVKNPALFDVLVMPNLYGDIISDLCAGLVGGLGLTPSCNIGEDGVALAEAVHGSAPDIAGKNLANPTALLLSGVMMLRHLKLNEQAEQIHRAIINTIAEGKYRTADLGGSSTTTDFTKAICDHL

SEQ ID NO: 3553 - protein, 354 aa, Triticum aestivum
MDGNKGPVVVTGASGFVGSWLVMKLLQVGYTVRATVRDPANVEKNKPLLELPGAMERLSIWKADLSEEGSFDDAIAGCTGVFHVATPMDFDSKDPENEVIKPTVEGMLSIMRACKEAGTVKRIVFTSSAGSVNIEERQRPAYDQDNWSDIDFCRRAKMTGWMYFVSKSLAEKAAMEYASENGLDFISIIPTLVVGPFLSAGMPPSLVTALALITGNEAHYSILKQVQLVHLDDLCDAMTFLFEHPEANGRYICSSHDATIHGLARMLRDRFPEYSIPQKFAGVDDDLQPIHFSSKKLLDHGFSFRYTAEDMFDAAIRTCREKGLISLGDAPPPAAGGKLGALAAGKGQAIGAET

SEQ ID NO: 3554 - protein, 329 aa, Bifidobacterium longum bv. Infantis
RAARGITINIAHIEYQTEKRHYAHVDCPGHADFVKNMITGAAQMDGAILVVAATDGPMAQTREHVLLARQVGVPKILVALNKCDMVDDEELIELVEEEVRDLLDENGFDRDCPVIHTSAYGALHDDAPDHEKWVQSVKDLMAAVDDYIPTPVHDLDKPFLMPIEDVFTISGRGTVVTGRVERGQLAVNTPVEIVGIRPTQTTTVTSIETFHKTMDACEAGDNTGLLLRGLGREDVERGQVVAKPGSVTPHTKFEGEVYVLTKDEGGRHSPFFSNYRPQFYFRTTDVTGVIELPEGVEMVQPGDHATFTVELIQPIAMEEGLTFAVREGD

SEQ ID NO: 3555 - protein, 924 aa, Oryza sativa
MARNAADKGTSIDAQLRILAPKKLSEDDKLVEYDALLLDRFLDILQDLHGEDIRETVQECYELAAEYESKIAYRRRIKLKKGDFADENSATTESNFEETLKRLVGELKKSPHEVFDALKNQTIDLVLTAHPTQSVRRSLLQKHGRIRSCLTKLYAKDITPDEKQELDEALKREIQAAFRTDEIRRAPPTPQDEMRAGMSYFHETIWKGVPKFLRRVDTALKNIGINERVPYNAPLIQFSSWMGGDRDGNPRVTPEVTRDVCLLARMMAANLYYAQIEDLMFELSMWRCSDELRVKADQLHRCAKKNTTKHYIEFWKQVPPSEPYRVILSNVRDKLYNTRERARHLLASGFSEIPDEATFTDVEQFLEPLELCYRSLCACGDNSIADGSLLDFLRQVSTFGLSLVRLDIRQESDRHTDVMDAITQYLGIGSYREWSEEKRQEWLLSELNGKRPLFGPDLPQTDEIADALDTFHVIAELPYDSFGAYVISMATAPSDVLAVELLQRECHVKKPLRVVPLFEKLADLEAAPAALARLFSVDWYRNRIDGKQEVMIGYSDSGKDAGRFSAAWELYKAQEELIKVAKQFGVKLTMFHGRGGTVGRGGGPTHLAILSQPPDTIHGSLRVTVQGEVIEQSFGEEHLCFRTLQRFTSATLEHGMHPPISPKPEWRALMDEMAAVATKEYRSIVFQEARFVEYFRLATPELEYGRMNIGSRPSKRKPSGGIESLRAIPWIFAWTQTRFHLPVWLGFGAAFKHVLQKDIRNLQILQEMYNEWPFFRVTIDLVEMVFAKGDPGIAALYDKLLVSEDLWPFGARLRANYEETKQLLLQVAGHKDLLEGDPYLRQRLRIRDSYITALNVCQACTLKRIRDPGFHVSPRAHLSKDIMDSGKPAAELVKLNTTSEYGPGLEDTLILTMKGIAAGMQNTG

SEQ ID NO: 3556 - protein, 330 aa, Bifidobacterium catenulatum
GQQRGITIDIAHIEYQTAERHYAHVDCPGHADFVKNMITGAAQMDGAILVVAATDGPMAQTREHVLLARQVGVPRILVALNKCDMVDDEELIELVEEEVRDLLDENGFDRYCPVIHTSAYGALHDDAPDHEKWVESVKELMKAVDEYIPTPTHDLDKPFLMPIEDVFTISGRGTVVTGRVERGKLPVNSNVEIVGIRPTQTTTVTSIETFHKQMDECEAGDNTGLLLRGINRDQVERGQVLAAPGSVTPHTKFEGEVYVLTKDEGARHSPLFSTYRPQFYFRTTDVTGVITLPEAVEMVQPGDHATFTVELIQPIAMEEGLTFAVREGVL

SEQ ID NO: 3557 - protein, 169 aa, Flavobacterium sp. ATCC 21588
MSTWAAILTVILTVAAMELTAYSVHRWIMHGPLGWGWHKSHHDEDHDHALEKNDLYGVIFAVISIVLFAIGAMGSDLAWWLAVGVTCYGLIYYFLHDGLVHGRWPFRYVPKRGYLRRVYQAHRMHHAVHGRENCVSFGFIWAPSVDSLKAELKRSGALLKDREGADRNT

SEQ ID NO: 3558 - protein, 165 aa, Brassica napus
MANTVAGLSPVSAPIYSPITFNRKPINFHKPHLLSYKQNNPVSALQHRSRTVRVVEEVARKRRNRLFSVFGSLTDDDSELNPEEEGQVASVDIKLPRRSLQVEFSCNSCGVRTKRLINRLAYERGLVFVQCGGCLKHHKLVDNLGLIVEYDFRKETSKDSTTDQI

SEQ ID NO: 3559 - protein, 232 aa, Prunus avium
MDMIYSQLSDLASMENPDTSSFSDASVTARRASLSDEEVILASSCPKRRAGRRVFKETRHPVYRGVRRRNNNKWVCELRAPNNKKARIWLGTYPTAEMAARAHDVAVLAFRGKLACLNFADSAWRLPVPASTDAAEIRRAATEAAEAFRQAEDGGVDEKESKAVVSEEKGCVGMEGSSNLFYLDEDEIFEMPRLLDDMADGIMLCPPQCLDGYMDWNDVETVDDLKLWSFSI

SEQ ID NO: 3560 - protein, 159 aa, Streptococcus suis 89/1591
MSIYDFTVQKQDGTDQSMAEYQGQVLLIVNTAPGCGLAPQYKELQELYDSYRGQGFVVLDFPCNQFLNPAPGSAEDINQTCSLNYGTTFPRFAKIAVNGSEASPLYRYLKKEKSTLLGGRIEWNFTKFLVDRQGRVVKRYLPTTSPLKLKEDIELYLEK

SEQ ID NO: 3561 - protein, 329 aa, Bifidobacterium breve
RQQRGITINIAHIEYQTEKRHYAHVDCPGHADFVKNMITGAAQMDGAILVVAATDGPMAQTREHVLLARQVGVPKILVALNKCDMVDDEELIELVEEEVRDLLDENGFDRDCPVVHTSAYGALHDDAPDHEKWVETVKELMNDVDDYIPTPVHDLDKPFLMPIEDVFTISGRGTVVTGRVERGKLPINTNVEIVGIRPTQTTTVTSIETFHKQMDECEAGDNTGLLLRGLGRTDVERGQVVAAPGSVTPHTKFEGEVYVLTKDEGGRHSPFFSNYRPQFYFRTTDVTGVITLPEGVEMVQPGDHATFTVELIQPIAMEEGLTFAVREGG

SEQ ID NO: 3562 - protein, 282 aa, Brassica oleracea var. gemmifera
MAENADLVEWPKKDKRRFLHVVYRVGDLDRTIQFYTECFGMKVLRKRDVPEEKYSNAFLGFGPETSNFVVELTYNYGVSSYDIGTGFGHFAISTQDVSKMVEAVRAKGGNVTREPGPVKGGGSVIAFVKDPDGYTFELIQRGPTPEPLCQVMLRVGDLDRAVKFMEKALGMRLLRRIERPEYNTIGMMGYAEEYESIVLELTYNYGVTEYTKGNAYAQIAIGTDDVYKSAEVVKIVNQELGGKITREAGPLPGLGTKIVSFLDPDGWKQVLVDNEDFLKELE

SEQ ID NO: 3563 - protein, 112 aa, Vibrio fischeri ES114
MKKIEAIIKPFKLDDVRESLADVGITGMTVSEVKGFGRQKGHTELYRGAEYMVDFLPKVKLEIVVSDDVVDQCIDAIIETAQTGKIGDGKIFVTDVSRVIRIRTGEEDEDAI

SEQ ID NO: 3564 - protein, 446 aa, Solibacter usitatus Ellin6076
MTDSPIRLLLVILLIAVNGFFAGAEVALLSVRQSRLRQMAAEGHAGAHAALSLLSNPGRLLSVTQVGVTLASLGLGWAGEDTLYQILSAMFHPLMTPVTTKFLHGLCFFFSFLVISYFHVVFGEVVPKNLAIAKAAQLASLTAPALLLFYRATVAFVVVIERSAAAITHALHLKGEGHGNVHTSEELKLIVSSSRGLGYLPETQEDMIHRVLDLGALSVREIMIPRNDIVSISTDASLDEVLHTMNEQRHSRLPVYEKTPEKIVGLLHYKDLLPVWEERRLAIRSSRPSQSFRVSRLMRPLMFVPETKEVSAMLDEFRHGRSHMAMIVDEFGTIIGMVTVEDVLEQIVGQIEDEHDERVERQVEADDVELDGTTRIRDLESEYGIEIPPDAGFETLAGFLLFKLGEIPRVESRVEYEGRRYTVLEMERNRIARVRIEKLQPHDGVG

SEQ ID NO: 3565 - protein, 211 aa, Lotus japonicus
MAPAKGSSLTPIQVENLQFPASVTSPATAKSYFLGGAGERGLTIEGKFIKFTGIGVYLEDTAVDSLATKWKGKSSQELQDSLDFFRDIISSPSEKLIRGSKLRPLSGVEYSRKVMENCVAHMKSAGTYGEAEATAIEKFAEAFRKVDFPPGSSVFYRQSTDGKLGLSFSLDDTIPEEEAVVIENKALSEAVLETMIGEHAVSPDLKRCSFG

SEQ ID NO: 3566 - protein, 451 aa, Zea mays
MGCAQGKCCLPRHPRRGSAAVGGRGGATLGRAAVPGAGLVLEYAALAVAGLYPDSPARESQDTHLVATRFAGDPDLHLFAVFDGHGAAGASCAGFARDALPRLLLASLAAGPAAAFRDAMLAANAEMHAAPGVDDSMSGTTAVAALVAGGALHVANVGDSRAVAGVWRAGRLVAEDLSWDQTPFRADERARVKACGARVMSVEQVEGMRDPEDVGWTPNEGDPPRVWARDALYPGTAFTRSLGDLAAEAVGVIAEPEVKSVEITPSHLFFVVASDGVFEFLSSQEVVDRVAMYQDPRDACSAIAAESYKLWLEHENRTDDITIIIVHIRDMENAGSDKADYGSIGASIAGQTIQSEIPVFVQPEASNMNRSAATGMRSPSFGSPTERSLSCVAPSPTDPLLIHGRVSDASKPGQSEQRAASQPPVQTWHQIDGVTTELERSMQQSILPTSC

SEQ ID NO: 3567 - protein, 181 aa, Zea mays
MESFLLNKMCGWDSKKKKKKKKNTPESANRRAYLSLLHCTALPCHHIVREPGRERGRGMAAPKLATLALAVLLAATAVAPPAAVRAAMSCSTVYSTLMPCLPFVQMGGAMPPQPCCGGIRSLLQQANNTPDRRTICGCLKNVANGANGSGTYISRAAALPSKCGVALPYKISTNVNCNTIN

SEQ ID NO: 3568 - protein, 309 aa, Bacillus cereus ATCC 10987
LFFVYNIEMLYMNRGRDVMSKFTVASNGSLETTLRGVEVLSTPLLNKGVAFTQEEREELGLKGLLPPAVLTLEEQARRAYEQFCSQPDDLLKNVYLTALHDRNEVLFYRILTDHLREMLPIVYTPTVGVAIQRYSHEYRKPRGVYLSINDPSGIEEAFANIGATAENIDLVVVTDGEGILGIGDWGVGGINIAIGKLAVYTAAVGIDPSRVLPVILDVGTNREELLNNPFYIGNRHPRITGEAYDEFIDTFVRAVNKQFPKALLHWEDFSSRNARKILDKYRHDICTFNDDIQGTGAVSLAAVLSAVKA

SEQ ID NO: 3569 - protein, 283 aa, Brassica oleracea var. alboglabra
RGREKRSLKKVLYLSFIDYGTALSPLLNRLHFNHNALPLSPAPLPLLFHRLLPSRSAVDSNVSYYEGTVWHDRLRPVRHSFRYTVRYALFDLDKSLETPPDHLSADEARLLARTTGPIFLLTIPPSVGYEQNPLSLYYCYNLEGSSKRLSKCIAQVTNTHGGERVTFVFDPESDLVAKSLQVSPFMDMLGNWKIRANEPGDELSVSIESQHPHHGNYFSAKLKAKRIDQTRVSDPAVFFWLMPHKVAIWIYWHALKLWWRNVPFHPTPQILQTHSYREDSAKT

SEQ ID NO: 3570 - protein, 335 aa, Debaryomyces hansenii CBS767
MLAPSLSWAEAKQFLSIFWPPKPTFIPAEYPDLAGKVVIVTGGNTGVGYQTAKLMSGVCNAKVYILSRNEAKTKLAIDNIQMEIKREQNKDVNLRFIKLDLSDLPTIKQTANDFLKEEDRLDIIIHNAGVMTPPMGSKTAQDYDLQWGTNVLGPFLLQKLLDPLFIETSKKNPTNLSRVVWASSTAHLSAPDKGGIYWDDVNFEDPSKKYSNGEIYGQSKAGVIINAIQWSKRYSNENIVSISLCPGGLKTDLQRHLPGFVRSVLNLLLYDAVFGAYTEMFAAVSPEVTSENNNHRMILSFGRFGIIRKDIEEGANGENGEKYWNYAEKQVSKYL

SEQ ID NO: 3571 - protein, 466 aa, Azorhizobium caulinodans
MPVDILMPALSPTMEKGNLTKWVKKEGDTVKAGDVIAEIETDKATMEVEAVDEGILGKILIPEGTQDVAVNTPIAVILGEGEDASAASTPAPQQKVAESAAPASPVAAAAPAPQASVPSAVANPPVVTSQPDPEVPAGTEMVTMTVREALRDAMAEEMRRDGDVFVMGEEVAEYQGAYKITQGLLQEFGAKRVVDTPITEHGFAGMGVGAAMAGLKPIIEFMTFNFAMQAIDQIINSAAKTLYMSGGQVQCSVVFRGPNGAAARVAAQHSQDYAAWYSHIPGLKVVAPYTAADAKGLLKAAIRDPNPVIFLENEILYGHSFEVPKLDDYVLPIGKARIARAGKDVTLVSWSIGMTYTLKAAEELAKQGIEAEVIDLRTIRPMDVPTIIESVKKTGRCVTVEEGWPQSGVGSEIAAQLMEKAFVYLDAPSAARTGKDVPMPYAANLEKLALPNVAEVIEAVRAVTYR

SEQ ID NO: 3572 - protein, 301 aa, Solanum tuberosum
MASQVIREWVGFQQFPSATQSKLIELIRKLKQESVSTLTILVMGKGGVGKSSTVNSILGERAVAVSAFQSETPRPVMVSRSWAEFTLNIIDTPGLVEGGYVNDQALDLIKRFLLNKTIDVLLYVDRLDTYRVDNLDRQIVKAITDSFGKEIWHRGLVVLTHAQVSPPDGLSYDEFTSRRSEALSKIVRLGARIRKQEVKASSVPIVCVENSGRCNKNELDEKILPNGTAWIPNLLQTITEVVASESKGILVDQKLIEGPNPNNKGKLLIPLIAAFQYFFVVKRIQKWIKNDIARETRPSWA

SEQ ID NO: 3573 - protein, 657 aa, Caulobacter crescentus CB15
MFCRATLLSDGSEALGTFRHTLAKSEVLGAMSENRNHNVSSHAPLQARIAGVALATTVLALVAACLCFMLQQWSVARQEARANHEVLVQMAAAGAAAPLADHNMVGVYRALEAVAKAPGVAGVRIIDAKGRAVAQLGEANPSNADTLQRPIKLSSQTVGTLVLVAKRPGLAQTLARDLALTGALFFGAAGMAILLANSLARRLAQPMERLSEAMHETAVGGRFKALEETADDDVFRSLIASFNHLVARLECNDQDLRGAMAELVKARDDANAANVLKSHFLANMSHEIRTPLNGVLAMADVMAMDQLSDIQRERLAVIRESGAVLLGVLNDVLDLSKIEAGRLEIQDRPFDIAQLAQSIRETFVPQARAKGLAFEVGVAPEAQGLWRGDADRLRQILGNLISNALKFTLDGAVAVRFASAEDGSGLRIDVADTGIGISPEILPRLFDKFVQADSTTTRRFGGSGLGLAICRELAAMMNGSIKVQSREGRGSTFTVLVGLPREETLTDVHYIDDGDPIMAPPAAEPPRLRVLAADDNPTNQKVVAAVLAPLNADVTLVDDGAACVEAWKTGDFDVVLMDIHMPVMDGLEAARSIRATEQAEMRRRTPIIAVTANALTHQIEEYLSVGMDGHVAKPIEVSKLYDAIEAAMAGTRLSRAA

SEQ ID NO: 3574 - protein, 481 aa, Methylococcus capsulatus str. Bath
MSATAETLDRLIKQDYKPGFVTELETDTLPPGLNEDVIRAISKKKNEPEFMLEWRLSAYRHWLTMMEPHWAFVEYAPVDYQAISYYSAPKTTDHPKSLDEVDPKLLETYNKLGIPLYEQEKLAGVAVDAVFDSVSVATTFKDKLAQAGVIFCSMSEAIEKHPDLVRQYLGSVVPAGDNFFAALNSAVFSDGSFVYIPKGVRCPMELSTYFRINAAKTGQFERTLIVADEGSYVSYLEGCTAPMRDENQLHAAVVELVALEGAQIKYSTVQNWYPGDEEGRGGIYNFVTKRGDCRGARSKISWTQVETGSAITWKYPSCILRGDDSVGEFYSVAVTNHRQQADTGTKMIHIGKNTKSTIISKGISAGRAQNSYRGLVKILKSAENARNYTQCDSLLIGDRCGAHTFPYIEVKQPSAQVEHEATTSKISEDQLFFCQQRGLSAEDAVSMIVNGFCKQVFKELPMEFAVEAQALLGISLEGSVG

SEQ ID NO: 3575 - protein, 282 aa, Cucumis sativus
MEFPIINLEKLNGEERSSILAKIKDACENWGFFEVLNHGIDTEFLDKVEKLTKEHYKKCMEERFKEHIASKGLNDVVTEVNDVDWESTFFLRHLPVSNIADLPELSDDYKSVMKQFASKLQVLAELLLDLLCENLNLPKSYLKNAFHGSNGPTFGTKVSNYPPCPNPDLIKGLRAHTDAGGIILLFQDDKVSGLQLLKEGEWVDVPPVRHSIVVNIGDQLEVITNGKYKSVLHRVIAHPEGEGRMSLASFYNPGSDAVIFPAPSLVAEEKNEYTQNLYLRII

SEQ ID NO: 3576 - protein, 300 aa, Ehrlichia canis str. Jake
MEANIINGKAIAEDITGTLATCINDLKLQYSLVPCLIVVLVGDDPASHLYVRNKQRKAEMLGLRSETILLPSTTSESSLIDKIHELNNDDNVHGILVQLPVPKHIDKNLIINTIDPRKDVDGFHNDNVGRLFTGQKRNCLIPCTPRGCLYLIKTVTHNLSGSDAVVIGRSNIVGKPMACLLLGENCTVTTVHSATRNLSDYCSKADILVAAVGIPNFVKSSWIKPGAIVIDVGINSVEEDGVKKFVGDVNFAEAKNVASAITPVPGGVGPMTIAFLMVNTVMAACNQSGIENFVEKYLDL

SEQ ID NO: 3577 - protein, 136 aa, Thermococcus kodakarensis KOD1
MGDKTKVQVSKLKPGRYIIIDGEPCRIVNVTVSSPGKHGSAKARIEAVGIFDGKVRSIVKPTSAEVDVPIIDKRVGQIIAITPDTVQLMDMETYETFDVPIEGGVDDEVKGQLTEGITVEYWETLGRIQIKKIRGE

SEQ ID NO: 3578 - protein, 317 aa, Cucumis sativus
MAVFPIINLENINGDGRAKILEQIEDACQNWGFFELVNHGIPHEFLDMVEKMTRDHDKKCMEERFKETVLSKGLEAAQAEVNDMDWESTFFLRHLPESNISQMSDLDEEYKKIMKEFAKKLENLAEELLDLLCENLGLEKGYLKNAFYGSKGPTFGTKVSKYPPCPKPDLIKGLRAHTDAGGIILLFQDDKVGGLQLLKDGDWIDVPPMRHAIVVNLGDQLEVITNGRYKSVMHRVLITQNSGTGRMSIASFYNPGSDAVIYPAPALVEKDEEKKEVYPKFVFEDYMKLYLGVKFQAKEPRFEAMKANANLGPMATA

SEQ ID NO: 3579 - protein, 453 aa, Nitrosomonas europaea ATCC 19718
MPFIPHTEEDVAEMLTSIGARSIDELFDEIPAELKTGKLTQVPPGLSEMEISRLMYERAQQDGFYLSFIGAGAYEHHIPAAVWQITTRGEFYSSYTPYQAEASQGTLQLLYEYQTMMASLAGMDVSNASLYDGASALAEAALMAVRQHRTSRRILVPQTVHPVYRSVMRTIVRNQAIEVVEVPYDPATGQVAIDKLDQFAQEEFAALIIPQPNFFGVLEQVDALTDWAHDKQSLAVAVVNPTSLAMLKPPGEWGRRGADIAVGEGQPLGIPLSSGGPYFGFMTCKQELVRQMPGRIIGRTTDLEGKEGFALTLQAREQHIRRSKATSNICTNQGLMVTAATIYMSLLGPEGLYRVAAHSHANTVALVEQLEKLPGVKKAFHSPFFHEAALQLSVPADKVLNRLKAQGVLGGVLLENHYPDLKNTLLVCATETKTAEDLDKYTEVLRQALAASA

SEQ ID NO: 3580 - protein, 483 aa, Nitrosomonas europaea ATCC 19718
MLIFEHSRKNRRNYSQAPATRPAKNNIPDHLKRKSTPLLPEVSEMDTVRHYTRLSQKNFSIDTEFYPLGSCTMKYNPRACNSLAMLPQFLSRHPLAPEDTGQGFLACMYELQEILKDITGMAAVSLTSMAGAQGELIGITMIRAYHEAHGDTGRTEIIIPDAAHGTNPATAVMCGYKVIEIPTNRDGDVDMDALKAAVGPKTAGLMLTNPSTLGVFEKKVAEMSRIVHAAGGLLYYDGANLNAVLGKVKPGDMGFDVIHMNLHKTFSTPHGGGGPGAAPVGVAERLLPYLPVPIVAHEQGVYRWLTEEDRPQTIGRLSAHMGNAGVLLRAYIYVRLLGAEGMHRISEYATLNANYLMAELRKLGFEIAYPNRRASHEFIVTMKEIKDRTGVTAMNLAKRLLDKGFHAPTTYFPLLVPECLLIEPAETESKETLDRFVAAMKEILDEIATQPDMVKAAPHDMPLRKIDDVKAARELDLVWDPAG

SEQ ID NO: 3581 - protein, 316 aa, Leptospira interrogans serovar Copenhageni str. Fiocruz L1-130
MAHKIVIIGSGPAGHTAAIYAARANLNPVMYEGFMAGGIAAGGQLTTTTEVENFPGFPEGIDGTKLTQLFREQSIKYGTKIITQTITKVDFSSRPFKLWSDDELIEAQAVIIATGATAKRMNVIGEDIYWQRGISACAVCDGALPIYRNKELVVVGGGDSAVEEASHLTKFASKVYLVHRRDSLRASKIMQKRATTHPKIEIIWNSQVKEAKGDGKSLTSLTLENTTNGQKKELPVGGLFYAIGHKPNTDIFQGILDLDESGYIKTVPGSTKTNIEGIFAAGDVQDKIYRQAVSAAGSGCMAALDAERWLESREEE

SEQ ID NO: 3582 - protein, 241 aa, Petunia x hybrida
MSPPVSVTKMQVENYAFAPTVNPAGSTNTLFLAGAGHRGLEIEGKFVKFTAIGVYLEESAIPFLAEKWKGKTPQELTDSVEFFRDVVTGPFEKFTRVTTILPLTGKQYSEKVAENCVAHWKGIGTYTDDEGRAIEKFLDVFRSETFPPGASIMFTQSPLGLLTISFAKDDSVTGTANAVIENKQLSEAVLESIIGKHGVSPAAKCNVAERVAELLKKSYAEEASVFGKPETEKSTIPVIGV

SEQ ID NO: 3583 - protein, 180 aa, Helianthus annuus
MATQTVFDFPDDVLQQPPMPADNAFSDKDVKGQDVELSKYKGKVLLIVNVASQCGFTNSNYPELTTLYQKYKDQGFEILAFPCNQFGGQEPGSNEEIQVFACTRFKAEYPVFSKVNVNGKEADPLYKFLKSSKGGFLGDSIKWNFTKFLVDREGKVVDRYAPTTSPLSIEKDIKKLLNVA

SEQ ID NO: 3584 - protein, 326 aa, Xanthomonas oryzae pv. oryzae KACC10331
MATTVPETAAPPPRRRIGARLVSAAFATITSHCCRTHFWKPMSDKPHVFDATTDTFETEVLHKSLTTPVLVDFWAAWCGPCKSLTPILEKLAGEYNGAFELGKVDVDKEQQIAAAFQIRSVPTVFLVKGGEIVDGFPGAMPEGQVREFLTQHGVLPAEPQVAEEVPLAPLDPQAQAAALREAIAAQPDKDELKLDLALALLKTGDTAEAEQLIDALPANLATDDRAVRAKARLSFANVLKDAPDAGTLQATVDANGADLRARHLLGVRHLLDGNDEAALEQFLEMLRQDRTFDDNRPRRSLIDAFRVIEDEDLVGRYRRKMSALVF

SEQ ID NO: 3585 - protein, 130 aa, Prunus avium
MDVSQLSDSVDQPESSSLSDVSFKTRGPSWSDGEVILASSRPKKRAGRRVFKETRHPVYRGVRRRNNDKWVCEMREPNNKKSRIWLGTYPTAEMAARAHDVAALAFRGKLACLNFADSAWRLPVPASMDR

SEQ ID NO: 3586 - protein, 373 aa, Petunia x hybrida
MPLHLRCSATVCVTGAAGFIGSWLVMRLLERGYNVHATVRDPENKKKVKHLLELPKADTNLTLWKADLTVEGSFDEAIQGCQGVFHVATPMDFESKDPENEVIKPTVRGMLSIIESCAKANTVKRLVFTSSAGTLDVQEQQKLFYDQTSWSDLDFIYAKKMTGWMYFASKILAEKAAMEEAKKKNIDFISIIPPLVVGPFITPTFPPSLITALSLITGNEAHYCIIKQGQYVHLDDLCEAHIFLYEHPKADGRFICSSHHAIIYDVAKMVREKWPEYYVPTEFKGIDKDLPVVSFSSKKLTDMGFQFKYTLEDMYKGAIDTCRQKQLLPFSPRSAEDNGHNREAIAISAQNYASGKENAPVANHTEMLSNVEV

SEQ ID NO: 3587 - protein, 410 aa, Streptococcus pyogenes MGAS315
MTFKRVVVTGYGLTSPIGHDPETFWDNLKAGQIGIGPITKFDTTDYAVKNAAEIQDFPFDKYFVKKDLNRFDRYSLYALYAAKEAINHADLNIEMIDSDRFGVIVASGIGGIAEIEEQVIRLHEKGPKRVKPMTLPKALPNMAAGNVAMSLKAQGVCKSVNTACASSNDAIGDAFRAIKFGTQDVMIVGGSEAAITKFAIAGFQSLTALSTTEDPSRSSIPFDKDRNGFIMGEGSGMLVLESLEHAQERGATILAEIVGYGNTCDAYHMTSPNPEGLGARKAIHLALQEAGIEASAINYVNAHGTSTPANEKGESQAIVAVLGKDVPVSSTKSFTGHLLGAAGAIEAIATIEAMRHNYVPMTAGTQALSEDIEANVIFGEGKETAINYAISNTFGFGGHNAVLAFKCWEE

SEQ ID NO: 3588 - protein, 193 aa, Brassica oleracea
MQDQLVCHGCRNTLMYPRGATNVRCALCHIVNMVPLHPHPPPPPPPHHAHAGMDMAHIVCGGCRTMLMYTRGASSVRCSCCQTVNLVPGPPPSNQVAHINCGNCRTTLMYPYGASSVKCAVCQFVTNVNMSNGRVPLASNRPNGTAAPGTMPSTSTSTPPSQTQTVVVENPMSVNESGKLVSNVVVGVTTGQK

SEQ ID NO: 3589 - protein, 175 aa, Pantoea agglomerans pv. milletiae
MLWIWNALIVLVTVIGMEITAALAHRYIMHGWGWGWHLSHHEPHKGWFEVNDLYAVVFAALSILLIYLGSTGVWPLQWIGAGMTLYGLLYFIVHDGLVHQRWPFRYVPRRGYLRRLYMAHRMHHAVRGKEGCVSFGFLYAPPLSKLQATLRERHGVKRGAARDQRSVERDAPPGK

SEQ ID NO: 3590 - protein, 361 aa, Zea mays
MSVAAALGRADELRALDDTLAGVRGLVASGAKQVPRIFRVPYPEELLHHEQPPAAATVPMIDLSGDRAAVIDAVRGAAAGWGFFQVTGHAVPEQVMSAAVAAMRAFHEADGGEGSDKARLYSRGPGRAVKYHCNFDLYQSPVANWRDTVYLRMAPDPPAADDLPEICRDALFEYAKQVKDLGQRLFGLLSESLGLKPSYLTDIECDQGQIILGHYYPPCPQPELAIGTSRHSDSGFLTILLQDKVGGLQILHDGQWVDVAPTPGAFIVNIGDLLQLVSNDKFSSVEHRVVAKNAEPRVSIACFFSTHFHPASTRTYGPIKELLSEENPPLYRETLVREYVARYYSVGLDGKKKTALADFRL

SEQ ID NO: 3591 - protein, 400 aa, Arxula adeninivorans
  misc_feature (380)..(380): Xaa can be any naturally occurring amino acid
MADFIRTQIFGTCFEITSRYVDLNPVGMGAFGLVCSARDQLTNQNVAIKKIMKPFSTPVLAKRTYRELKLLKHLRHENLITLSDIFISPLEDIYFVTELLGTDLHRLLTSRPLEHQFIQYFLYQILRGLKYVHSAGVVHRDLKPSNILINENCDLKICDFGLARIQDPQMTGYVSTRYYRAPEIMLTWQKYDVEVDIWSAGCIFAEMLRGKPLFPGKDHVHQFSIITELLGNPPDDVIETIGSENTLNFVKSLPKRERIPLSQKFPNADPDAVDLLEKMLVFDPRKRINAADALAHPYLAPYHEPSDEPVASEKFDWSFNDADLPVDTWKVMMYSEILDFHNVDSSAVEQQQQQPQPPQPQLQQQQQPPQQPQQPQQPQXAQQPVQPVQGDYVPQVAPRS

SEQ ID NO: 3592 - protein, 166 aa, Zea mays
MSTFLTQFTIFFRIQNHCSKKKKPKMATTSTGDIEKTKSVEVKKKLNVLIVDDDPVIRKLHEIIIKSIGGISQTAKNGEEAVNIHRDGNASFDLILMDKEMPERDGLSATKKLREMKVTSMIIGVTTLADNEEERKAFMEAGLNHCLAKPLSKAKILPLINNLMDA

SEQ ID NO: 3593 - protein, 542 aa, Oryza sativa (japonica cultivar-group)
MGARASRHRQSPDQSQSQSPSPHHKHHHHHQTTRAPKPKPKPQPPPPQQPRSQPPPPPRHQPQQAPQQAAAEDGVGRVLGRPMEDVRATYTFGRELGRGQFGVTYLATHKPTGRRYACKSIAARKLARPDDLDDVRREVHIMHHLTGHRNIVELRGAYEDRHSVNLVMELCEGGELFDRIIARGHYSERAAAALCREIVSVVHSCHSMGVMHRDLKPENFLFLNKREDSPLKATDFGLSVFFKPGEQFRDLVGSAYYVAPEVLKRLYGAEADIWSAGVILYILLSGVPPFWAENEDGIFDAVLQGHIDFSSEPWPSISSGAKDLVKRMLRQDPKERLTAAEILNHPWIREDGEAPDKPLDITVISRMKQFRAMNKLKKVALKVVAENLSEEEIVGLKEMFKSLDTDNSGTITLEELRAGLPKLGTKISESELRQLMEAADVDGNGSIDYVEFISATMHMNRLEKEDHIYKAFEYFDKDHSGFITVDELEEALTKYDMGDEATIKEIIAEVDTDHDGRINYQEFVAMMKNNSPEIVPNRRRMF

SEQ ID NO: 3594 - protein, 262 aa, Ustilago maydis 521
MADLLSTKPEALNDIFDYDMKLNVANPATGAQKSFDIQDERLVRCFYEKRMSQDVEVDSLGEEWKGYVLRIGGGNDKQGFPMKQGVLLPNRVRLLLSKGDSCYRPRRTGERKRKSVRGCIVGPDIQALHLIVVKQGEKEIPGLTDAESTVPKRLGPKRANHIRKFFNLSKEDDVRQFVVRREVVSKKEGAKPYTKAPKIQRLVTAQRLQRKRHLRSLKIRKAEAQKIQKEEYEQVLAKRVAEKKQEVAAHKAARKSAKKVQA

SEQ ID NO: 3595 - protein, 262 aa, Brassica napus
  misc_feature (106)..(106): Xaa can be any naturally occurring amino acid
RPTRPELTRTIVGVVEACHSLGVMHRDLKPENFLFVSKHEDSLLKTIDFGLSMFFKPDDVFTDVVGSPYYVAPEVLRKQHGPEADVWSAGVIVYILLSGVPPFWAXVLHGDLDFSSDPWPSISESAKDLVRKMLVRDPKKRLTAHQVLCHPWVQVDGVAPDKPLDSAVLSRMKQFSAMNKFKKMALRVIAESLSEEEIAGLKEMFNMIDADQSGQITFEELKAGLKRVGANLKESEILDLMQAADVDNSGTIDYQEFIARTL

SEQ ID NO: 3596 - protein, 150 aa, Brassica napus
FALSFGVPGWDKEKEAVMATVLQMLMGGGGSFSAGGPGKGMHSWLYLRVLNQYQEFQSCTAFTSIFNNSGLFGIYGCTSPEYAAKGIELVADEMKAVAEGKVNQKHLDRAKAATKSAILMNLESRMIVAEDIGRQILTYGERKPVDAFLK

SEQ ID NO: 3597 - protein, 365 aa, Bacillus subtilis
MKKRIALLPGDGIGPEVLESATDVLKSVAERFNHEFEFEYGLIGGAAIDEHHNPLPEETVAACKNADAILLGAVGGPKWDQNLSELRPEKGLLSIRKQLDLFANLRPVKVFESLSDRSPLKKEYIDNVDFVIVRELTGGLYFGQPSKRYVNTEGEQEAVDTLFYKRTEIERVIREGFKMAATRKGKVTSVDKANVLESSRLWREVAEDVAQEFPDVKLEHMLVDNAAMQLIYAPNQFDVVVTENMFGDILSDEASMLTGSLGMLPSASLSSSGLHLFEPVHGSAPDIAGKGMANPFAAILSAAMLLRTSFGLEEEAKAVEDAVNKVLASGKRTRDLARSEEFSSTQAITEEVKAAIMSENTISNV

SEQ ID NO: 3598 - protein, 707 aa, Synechococcus sp. CC9605
MGIRLLHLHLHGLFRSHELELGRDADTGGQTLYVLELVRSLAQRAEVEQVDVVTRLIQDRRVDLDYSQRIEDIAPGARILRFPFGPKRYLRKELFWPHLEELADQLVEHLSQPGQRVDWIHAHYADAGLVGALVSQRLGIPLVFTGHSLGREKQRRLLAGGLDRSQLEQTYAISRRIDAEERALAQADLVITSTRQEADQQYSRYGHFEADQAEVVPPGVDASRFHPHGSSQEGSALQSLLQPFLREPGRPPLLAISRAVRRKNIPALVEAFGQSPVLRQRHNLVLVLGCRDDPRQLEKQQRDVLQQVFDLVDRFDLYGQVAYPKQHSRSQIPALYRWAASRGGLFVNPALTEPFGLTLLEAAACGLPMVATDDGGPRDIQHRCDNGLLADVTDPGALQEALELAGSDRSRWRRWSDNGVEAISRHFSWDAHVCQYLALMQQKVRVSPVRAMSVVRRSSPVSRLLALDLDSCLELPEERSLAHLRDRLHAESFAASTGLVILTGRSLDQACQRYRELHLPDPKAWICRAGTEIHHTSDRAEDPVWAQRISQAWDREAVLAAMGQLKEHIQLQDPDHQSPFKVSYLLRASNRGLIGLARQCLRRHGLQAEPQLRCHWFLDVLPQRASRSEAIRFLAQSWQLPLQQVLVVASQQGDGELLDGLPATVVPADHDPCLLGQRTQQRVYFSKRPSVGAVLDGLTHFRFSASR

SEQ ID NO: 3599 - protein, 576 aa, Listeria monocytogenes str. 4b H7858
MKKVKASETLVQTLKNWGIDHVYGLPGDSIDTVVDALRKEQEAIEFIHVRHEEVATLAAAAYTKLTGKIGVALSIGGPGAIHLLNGMYDAKMDHVPMLVLAGQVTTDVLNTGFFQEVNLPAIFEDVAVYNKQIDNAETLADVVDEAIRTAYKEKGVAVLTIPNDIPSQVIKASLEAKTVKFEQENPKLDEAAIQEAVARIEKAEKPVILAGLGTKHAGPELIAFSEKLKIPIIHSLPAKTIVPDNHPNALGNLGKIGTKPAYEAMQETDLLLMFGNDYPYSDYLPKKADCIQIDIDPAKISKRFPATVGLVGDAAEIIGNLTAKTAPVEERKFLQACQENMQEWWKWLEEDIAQTTDPIAPEVVMANIQKIADKDAIFSIDVGTATVWSTRYLHLTPQNDFIVSAWLGTMGCGLPGAIAAKKAFPDRQAIAIVGDGGFSMVMQDFVTAVGLNMPMIVVVLNNQQLSFIKYEQQSAGELNYAIDLPDINYAKFAESCGGIGFRVEKMADLEAAFGNAKLATKPVIIDVSVDSAAAPLPGKIVMDEALGYTKFEIQSVLEDHRFAKMPPLKTILRRFL

SEQ ID NO: 3600 - protein, 464 aa, Thermus thermophilus HB8
MCYASMEMSAPIRFGTEGFRGVIAREFTFATLHRLAEAYGRHLLERGGGLVVVGHDTRFLADAFARALSGHLAGMGLKVVLLKGPVPTPLLSFAVRHLKAAGGAMLTASHNPPQYLGVKFKDATGGPIAQEEAKAIEALVPEEARALEGAYETLDLREAYFEALKAHLDLKALSGFSGVLYHDSMGGAGAGFLKGFLRHVGLEIPVRPIREEPHPLFHGVNPEPIPKNLGVTLAVLGPETPPSFAVATDGDADRVGVVLPGGVFFNPHQVLTTLALYRFRKGHRGRAVKNFAVTWLLDRLGERLGFGVTTTPVGFKWIKEEFLKGDCFIGGEESGGVGYPEHLPERDGILTSLLLLESVAATGKDLAEQFKEVEALTGLTHAYDRLDLPLKAPLDLTPFREPRPLAGLTPKGVDTLDGVKWLYEEAWVLFRASGTEPVVRIYVEAQSPELVRALLEEARKLVEG

SEQ ID NO: 3601 - protein, 229 aa, Glycine max
MPKSKRNRQVTLSKTKKKGRDHKETIVNGIKDAAEKYGHVYVFSFENMRNQKFKEFRDQLKSSSRFFLGSNKVMQVALGRSASDEIRPGLHKVSKLLRGDSGMVFTNLSKEEVERLFKEFEEYDFARTGSNATEKVDLKEGPLEQFTHEMEPFLRKQGMPVRLNKGVVELVSDFVVCEEGKPLSPEASRILRLMGIKMATFRLSLICRWSPDEFELYIDGPDESDIECS

SEQ ID NO: 3602 - protein, 143 aa, Triticum aestivum
  misc_feature (95)..(95): Xaa can be any naturally occurring amino acid
  misc_feature (102)..(102): Xaa can be any naturally occurring amino acid
  misc_feature (114)..(114): Xaa can be any naturally occurring amino acid
  misc_feature (128)..(128): Xaa can be any naturally occurring amino acid
  misc_feature (135)..(135): Xaa can be any naturally occurring amino acid
MAPTVMASSATSVAPFQGLKSTAGLPVSRRSNGASLGSVSNGGRIRCMQVWPIEGIKKFETLSYLPPLSTEALLKQVDYLIRSKWVPCLEFSKVXGFIFREXHNASPGYYDGRXWTMWKLPISGCTDXTQVINEXVEEVKKDT

SEQ ID NO: 3603 - protein, 358 aa, Campylobacter jejuni RM1221
MKAYKVAVLAGDGIGPLVMKEALKILTFISQKYNFSFEFNEAKIGGASIDAYGVALSDETLKLCEQSDAILFGSVGGPKWDNLPIDQRPERASLLPLRKHFNLFANLRPCKIYESLTHASPLKNEIIQKGVDILCVRELTGGIYFGKQDLGKESAYDTEIYTKKEIERIAHIAFESARIRKKKVHLIDKANVLASSILWREVVANVVKDYQDINLEYMYVDNAAMQIVKNPSIFDVMLCSNLFGDILSDELAAINGSLGLLSSASLNDKGFGLYEPAGGSAPDIAHLNIANPIAQILSAALMLKYSFKEEQAAQDIENAISLALAQGKMTKDLNAKSYLNTDEMGDCILEILKENNNG

SEQ ID NO: 3604 - protein, 226 aa, Triticum aestivum
MAAAAKIAPSMLSSDFANLASEAERMVRLGADWLHMDVMDGHFVPNLTIGAPVIESLRKHTKAYLDCHLMVTNPSDYVEAFGKAGASGFTFHIEVARDNWKELIQSIKAKGMRPGVSLKPGTPVEDVFPLVEAETPVELVLVMTVEPGFGGQKFMPEMMDKVRTLRKKYPSLDIEVDGGLGPSTIDAAASAGANCIVAGSSVFGAPDPGEVISALRKSVEASQIKS

SEQ ID NO: 3605 - protein, 509 aa, Sulfolobus solfataricus P2
MKSWKFKALLIGQVILVMLLFSNILAHSQTTTNSSALQQLNQSVQSILNRTSSYPAAAVPSWLDTGSNAWMLTAATFVGLQSVPGVALYYAGLSKKKYAVNSALMIFYAFAAVLVIWIIAGYSFGFGYPALVSIHGYGIFGYPIPAWGGLFEASQTTYGPSGAHANIPTATFIFFQFVFAAITPILLAGGVLERMNFKAWMVFVPFWSLLVYSPVAYWLFAGGWLNQLGAVDFSGGYVIHVDAGVGALAAALAIGPRLASERKLEAHSLPLVLVGAGLIWLGWDGFNGGDPLGATVDAAIAVLNTNIATAVSAVVWMLMDMKFFGKPTLIGATSGAITGLVAITPAAGYVNGWEAALIGIFSGSIPWMALYWLEPKLRVDDTLGVFSTHGIAGIVGGLLTGVFANPAVTQFVAPGLTGALYGNWYQLGIQALAAVIVFVYDFAITFGLLKFIGLFIPLQAPPQELAIGDYAMHGEVAYSELLATIPESAKSKEQSVVLPKKEKEENSEE

SEQ ID NO: 3606 - protein, 193 aa, Brassica oleracea
MQDQLMCHGCRNTLLYPRGATNVRCALCNTINMVPLHPPPPPPHHAHAGMDMAHIVCGGCRTMLMYTRGASSVRCSCCQTVNLVPATPPTNQPAHVNCGNCRTTLMYPYGAPSVRCAVCQFVTNVNMGNGRVPFPTNQPNGTASSPGPMPSTSTQSTPPSQTQTVVVENPMSVNESGKLVSNVVVGVTTDKKK

SEQ ID NO: 3607 - protein, 498 aa, Mesembryanthemum crystallinum
MTLDSIPGSSGYLDSYPERRITYFGNKFVLALTVTAGIGGLLFGYDTGVISGALLYIKDEFPAVKNSSFLQETIVSMALVGAMIGSATAGWINDVYGRKKATLLADFIFAIGAVVMAAAPDPYILIVGRFLVGLGVGLASVCAPVYIAEASPTEVRGGLVSTNVLMITFGQFVSYCVNLAFTEVPGTWRWMLGVSGVPAVLQFGFMLLLPESPRWLYLKHEKSKAAAVLAKIYDPFRLEDELDLLAAAEEEEKNKPAVHISDVFTKRELRYAFIAGGGLLAFQQLAGINTVMYYSPTIVQMAGFSSNQLALLISLIVAAMNAVGTVLGIYLIDHMGRRKLALTSLSGVFVALVMLTISFMLRSSGPTSALYSWLAVLGLALYIAFFAPGMGPVPWAINSEIYPQAYRGLCGGMGATICWIVNLFVSETFLSIADAIGTGPTFLIIAGIVIVAFVFVVCFVPETKALTFEEVDQMFMDRAYGTEENTQSLLESSNRSGN

SEQ ID NO: 3608 - protein, 799 aa, Oryza sativa (japonica cultivar-group)
MWREMPRVSFYLQQGQDHGNKHQQPNELCADKSNFQKEQAKSQKQKPVKVQSGVTEESIDPYSVRVIQRRLVYIVGMPSEFASDKVLRQHNFLGQYGKIESIIIDNIGANQQIPDSGRVYVTFSREEEAFRCIEAVNGFILDGRPLKATFGVTRYCHVWLSNKVCRKPICSYVHQKAPPEDICTKDDVAVYCARLQHLLGMDTKGLRSGNTLPPPGDCVSRTTVCNGNSKDKTCSDDYGVLHNHGNKNLGTLPATTLQEEKKRNSTPNNQQGLSASVSQELPPLGPKVHHLNDQLASCGDKPQASVQSANGNLNSKQVTAAGNGTVGTLSAKQYVNVVSQGSSGSGRRFTVLTRQTASSDTRSKATGQVGNASSDSQKLTSANNEHSDRIKISRSDNVKLVSQRPEEPSQMLANHLTGAIDKTHVDTDEKNARSDINEKTVCGIQMQLKESTAAHRSTVLQSLRDNPMSNNLPTLDVKSQISVVPDKPSDSQSASKTQLQPSNHKKTAVCSSDTANASDACGIANNQVLFPGGKHQTSSQGEDHSLYKRDKSQSGDQLSSQHPGNVFSPRLLTSLSSIDITAKENKGIKRHVCPPGFEELHRPSDSDKITSVSSPTSSIMCSGPDTLVQDSCSAKDQPDFISWVSECLEDGGETTQSNRSIPSTLSSTDATWRYMQYPASCFSGASNHFLVSPYPRGLSQHTVGRIENTMNCCCSHPSVSGIANHKPEYWSGSDHSYMSTGGYDVFSQSATLGMIAGMVGTSPQQPSPPVHYNDWTTGSADSDLKSPQVDHTYPMYSLF

SEQ ID NO: 3609 - protein, 175 aa, Triticum aestivum
MAPAVMASSATTVAPFQGLKSTAGLPVSRRSGSAGLSSVSNGGRIRCMQVWPIEGIKKFETLSYLPPLSTEALLKQVDYLIRSKWVPCLEFSKVGFVFREHNSSPGYYDGRYWTMWKLPMFGCTDATQVLNEVEEVKKEYPDAYVRVIGFDNMRQVQCVSFIAFRPPGCEESGKA

SEQ ID NO: 3610 - protein, 692 aa, Vibrio fischeri ES114
MKNHSEKEQFQEILLELKRSKEREAQLHKENQVILRGVSAISDAQTKEDIFNGLLNVIKEFVEFDNAIVVSSTDKDSFSVLASTNPYFDHLTWRYNDLFHRACHDETIILFQPHKTNEFLFKNTELQSLFSSVAICGLKSHSGYAVIILACSKFGAYSTLEKEKIERFMPLVERAVIDIDYKERLNAMVSLKTKELFLSKERFQDFAETVGDWFWETDPQFNFTYLSDTKINNTSIISQNLLSLISNDFINSTIIESEKRLVPFHEVEWNPDIFNNKVWLSLSGKPFFDEFGTFVGYRGTAKDISARKKRIRDIQTAKTEAEKANKAKSQFLAMMSHEIRTPLNSILGLVDVFHSSLLSEEQLDWLNQMESSSQLLLTIISDVLDISRIEAGTFVLNEQPIDLLRSLNTSINFLDTRAKDKGITLTVTASQNVPKYVFADATRLSQVIFNLVGNAIKFTNHGHVAVKIEKLPNNSISISVSDTGIGIASTTLEQLFKPFVQADSSITRKYGGTGLGLAIIKRLVELMQGTITVESRLNIGSTFKITLPLKEISDLPKQLNNEAKELVNQRSLNILLAEDNKANQAVLQILLEKQGHHVSIVSNGEEAISIFKHQTNGCFFDVVLMDVSMPVKDGISATTELRKLGIELPIIAITAHAMETEKEMCLEAGMNDFISKPIRAKDLSDILIKYSC

SEQ ID NO: 3611 - protein, 322 aa, Exiguobacterium sibiricum 255-15
MSLKRIAILTSGGDAPGMNAAVRAVTRKAIFHGLEVFGVYNGYQGLINGDLVQLNLGSVGDIIQRGGTFLRSARCPEFRTEEGRAKAVVNLKKFEIDALVVVGGDGSYRGAQKLTGLGFPTIGLPGTIDNDIPGTDYTIGFDTALNTALEAIDKIRDTASSHERTYVIEVMGRDAGDIALYAGLAGGAESILVPERPEDLKEVLNRIQSGVNRGKKHSIVIVAEGAGRAQDVGDEIAKETGLDTRVTVLGHVQRGGAPTAADRVLASRMGAYAIDILLEGKQGRVVGVRGGKMVDLDIDEALDENKHELDLEILELSKQLSI

SEQ ID NO: 3612 - protein, 140 aa, Glycine max
  misc_feature (22)..(22): Xaa can be any naturally occurring amino acid
  misc_feature (43)..(43): Xaa can be any naturally occurring amino acid
  misc_feature (56)..(56): Xaa can be any naturally occurring amino acid
  misc_feature (61)..(61): Xaa can be any naturally occurring amino acid
  misc_feature (97)..(97): Xaa can be any naturally occurring amino acid
QQRDVAHTVGPAHHECICTVSXGIGAIEHVLYHSVTYEVTTIXASSPRFLMSRKTXSLGVXWVIFAEGLDQIFGGYMYLYEAPHKALFHQMTIGMVXALAKHDCLRDNRSTSAWGLEARVPMLVKQCVRVAMIFGPEYNM

SEQ ID NO: 3613 - protein, 430 aa, Arabidopsis thaliana
MAAFLQTNISLNAIKIVPGKYSSLTDHQFRAPYRIRCAAASPGKKRYNIALLPGDGIGPEVISVAKNVLQKAGSLEGLEFDFKEMPVGGAALDLVGVPLPEETFTAAKLSDAILLGAIGGYKWDKNEKHLRPEMALFYLRRDLKVFANLRPATVLPQLVDASTLKKEVAEGVDMMIGRELTGGIYFGEPRGITINENGEEVGVSTEIYAAHEIDRIARVAFETARKRRGKLCSVDKANVLDASILWRKRVTALASEYPDVELSHMYVDNAAMQLIRDPKQFDTIVTNNIFGDILSDEASMITGSIGMLPSASLGESGPGLFEPIHGSAPDIAGQDKANPLATILSAAMLLKYGLGEEKAAKRIEDAVVDALNKGFRTGDIYSPGNKLVGCKEMGEEVLKSVESKVPLEKVCVALGFTVTYMLIHATLYLL

SEQ ID NO: 3614 - protein, 443 aa, Prochlorococcus marinus subsp. pastoris str. CCMP1986
MLRVAVIGGGPSGSCAAEILAKSGIKTWLFERKLDNAKPCGGAIPLCMVEEFDLPETIIDRKVRHMKMISPSNREVDISLDNVYGKSDNEYIGMCRREVMDAFMRNRASELGATLINGLVTSIDTGNDNQGPYKLSYSDFSSGDKKGELKELTVDLLIGADGANSRVAKAMDAGDYKVAIAFQERIKLPKEEMSYYEDLAEMYVGTDVSPDFYGWVFPKYDHVAVGTGTMQKNQSLIKGLQEGVRNRAKKRLVNGEVIKVEAHPIPEHPRPRRVVGRMALVGDAAGYVTKSSGEGIYFAAKSGRMCAEEIVEASKNGQEIPSEKDLKNYLKKWDKKYGTTYKVLEILQNIFYRNDSAREAFVEMCDDMDVQRLTFDSYLYKRVVAMKPLQQIKLTMLTLGSILRGKALAPLKYKPVNSAVREEKEVEKMLKNYSIKGGIKVKN

SEQ ID NO: 3615 - protein, 161 aa, Triticum aestivum
MRPGAGFNATAAATKAAVAPLAAGAAHSAWHSPVPYLFGGLAPMLGLIAFALLILACSYWKLSGYLEGSAGRGDEEGSATDGAKPVASDLPPAAWEEKVLVVMAGDVEPTYLATPMSSRDRSSKGEEEEKKVSMAAMASTKDAGNSEHSQNRRERDDHHLP

SEQ ID NO: 3616 - protein, 163 aa, Methanococcus maripaludis
MIIGIISDTHIPERAKKLPKEIFEHFSDVDLIIHCGDVTSESVLNELKKISEILVVSGNMDYMNYPKEHELNIENFKIGIIHGNQIHPRGDTLKMKYLCLEKNWDVLISGHTHVPMIKELHAENKKILLLNPGSPTVPRYPLKTIMKLKIEERKIDAELISIK

SEQ ID NO: 3617 - protein, 388 aa, Avena sativa
MASATLLKSSFLPKKSEWGVTRQAAAPKPMTVSMVVRASAYADELVKTAKTVASPGRGILAMDESNATCGKRLASIGLENTEANRQAYRTLLVTPPGLGNYISGAILFEETSTSRLLMGRRLLTSLSSRVIVPGIKVDKGLVPLVGSNDESWCQGLDGLASREAAYYQQGARFAKWRTVVSIPNGPSELAVKEAAWGLARYAAISQDNGLVPIVEPESHVDGEHGIERTFEVAQKVWAETFFYMAQNNVMFEGILLKPSMVTPGAECKDRATPEEVASYTLKLLHRRIPPSVPGIMFLSGGQSVVEATLNLNAMNQAPNPWHVSFSYARALQNTCFKTWGGRPENVAAAQEALLLRAKANSLAQLGKYTSDGEAAAAKEGMFVKNYSY

SEQ ID NO: 3618 - protein, 510 aa, Nitrosomonas europaea ATCC 19718
MKEHLVIFDTTLRDGEQSPGASMTMEEKVRIARQLERMGVDVIEAGFPAASRGDFEAVRAVAEAVSNSTVCGLARAMEADIDRTGEALQVNQNVRIHTFIATSPIHMKNKLRMSPDQVIDQAIKAVKWARQYTDNVEFSPEDAGRSEIDFLCRVLEAVIDAGARTLNIPDTVGYTMPDQFGGLIRTLRERIPNSDKAIFSVHCHNDLGLAVANSLSAVMNGARQVECTINGLGERAGNAALEEIVMAVRTRQDYFPCDTRIDTTQIVPASKLVSGITGFPVQPNKAIVGANAFAHESGIHQDGVLKHRETYEIMRAEDVGWGANKLLLGKHSGRNAFRSRLKELGIGLESEEKLNAIFLRFKDLADKKHEIFDEDLHALVSDEAQIPEEHYRLLSLHAVSETGEIPSAQVVIAVGGSEKQAVSEGSGPVDATFRAIEKILDSKVELQLFSVNNITSGTDAQGEVTVRLQKAGRIVNGHGADTDIIAASAKAYLSACNKLHSSLERTHPQI

SEQ ID NO: 3619 - protein, 524 aa, Apium graveolens var. dulce
MAGAFNVSGDDSGGSKDVGSPVIFDAVKKPKRNKYAFGCAILASMTSVLLGYDIGVMSGAAIYIKDQLHVSDVKLEIVVGIINFFSLVGSALAGRTSDWIGRRYTMVLAGAIFFVGAILMGFATNYSFLMFGRFVAGIGVGYALMIAPVYTAEVSSASSRGFLTSFPEVFINIGVLLGYVSNYAFSKLPANLGWRFMLGIGAIPSIGLAIGVLGMPESPRWLVMKGRLGEARQVLDKTSDSKEESRLRLSDIKQAAGIPEECNDDIVVMPKRRNDEAVWKELLLHPTPSVRHAFIAGVGLHFFQQSSGIDAGGLYSPRIFEKAGITSTDLKLLATIAVGISKTLFILVATFLLDRIGRRPLLLTSMGGMIISLTLLGTSLAVIDHSDHTVHWAVALAIFGVLAYVGTFSIGLGPIAWGYSSEVFPLRLRAQGCSIGVAVNRGTSGIISMTFLSLYKAISIAGAFYLFAAIAGVAWIFIFTLLPETQGRSLEEMGLLFGTYFGWRKTLKGLKNREAEEAKNANVI

SEQ ID NO: 3620 - protein, 461 aa, Streptococcus thermophilus CNRZ1066
MSIFRKKDVGLSQTEMKRHLTLRDVVLLGIGAMVGTGIFTITGTAASTLAGPALIISVLISAVCVGMSAIFFAEFASRYPSAGGVYGYLYASWGEYPAWMGGWLTMIVFMNAVSSVASGWGAYLKGLLASFGLQLPKAISGPFNPSQGTYIDLLPVLVLVLVTALLLMDSKQVLRLNSLLVVLKFSALAVFILVGLFHLNPDNWANFAPFGFGQIYGGKTGIMAGASLMFFGFLGFESISMTVDEIKEPQKNVPRGIVLALIIVASLYAVVSLVLTGVVHYTKLNVDDAVAYALRYIGVSWAANYVSVVAIMTLITVCISMAYALSRMVYSLARDGFLPQTFQKVSKTHKVPHYATLLTGILSAISSGIFSLANMASLVNISTLAYLVLLAIALIILRKDKGLPQKDEFKVPFVPVLPILSIIVCLSFMSQYSWQTWSAFGIAVLIGSAIYAFYGYKHSKY

SEQ ID NO: 3621 - protein, 207 aa, Bordetella bronchiseptica RB50
MLAGFAQIGTAQISDCMGRLYGVQGLRPLHAGAARIVGRAITVKTRPGDNLMIHKAISLAGPGDVIVVDGAGETANALVGELMMMDAQSRGVAAFVIDGAVRDLDVFQQGAFGCFARAVSHKGPYKDGPGEINVPVSIGGQVVAAGDVIVGDADGVVAVPLAQAGAVLAAARRKEDAELAAKEKLRAGTYAKPWVDRIIAEKTGDAQ

SEQ ID NO: 3622 - protein, 334 aa, Desulfotalea psychrophila LSv54
MTIKIGINGFGRIGRNIFRALSKDEAFADIEIVAINDLSDNATLAHLLKYDSIMGVYDREVGSDADGIIVDGRHIAVSSHRTPADIPWGEVGADYIAECTGIFRDAESAQGHIDAGASKVVISAPAKGAVKTIVMGVNEDEYDATLHHIVSAASCTTNCLAPFAKVILDNFGISRGLMTTIHAYTGDQRLLDSPHADPRRARAAALSMIPTKTGAAAAVSLVIPELKGKFDGLAVRVPTANVSLVDAVMEVEKETSVAEVNQVLKEAANRYLGYTDLPLVSIDFQGNPHSSIIDAQSTKVIGKSVKVMSWYDNEWAYSNRMLDLILHMDARRAL

SEQ ID NO: 3623 - protein, 518 aa, Bifidobacterium longum NCC2705
MTDFTPETPVLTPIHDHAAELAKAEAGVAEMAANRNNRWYPKYHIASNGGWINDPNGLCFYKGRWHVFYQLHPYGTQWGPMHWGHVSSTDMLNWKREPIMFAPSLEQEKDGVFSGSAVIDDNGDLRFYYTGHRWANGHDNTGGDWQVQMTALPDNDELTSATKQGMIIDCPTDKVDHHYRDPKVWKTGDTWYMTFGVSSADKRGQMWLFSSKDMVRWEYERVLFQHPDPDVFMLECPDFFPIKDKDGNEKWVIGFSAMGSKPSGFMNRNVSNAGYMIGTWEPGGEFKPETEFRLWDCGHNYYAPQSFNVDGRQIVYGWMSPFVQPIPMEDDGWCGQLTLPREITLGDDGDVVTAPVAEMEGLREDTLDHGSITLDMDGEQIIADDAEAVEIEMTIDLAASTAERAGLKIHATEDGAYTYVAYDDQIGRVVVDRQAMANGDRGYRAAPLTDAELASGKLDLRVFVDRGSVEVYVNGGHQVLSSYSYASEGPRAIKLVAESGSLKVDSLKLHHMKSIGLE

SEQ ID NO: 3624 - protein, 511 aa, Campylobacter jejuni RM1221
MKDNKIIIFDTTLRDGEQALGSSLGINQKLQIALALENLGVDVIEAGFPVSSQGDFKAVQKIASKVKNSTICALSRALDKDIDMAYEALKVAKHFRIHTFIATSTLHMQDKLKKDFDEILSMAKRAIIRARSYTDDVEFSCEDAGRTPIDNLCFMVENAIKAGAKTINIPDTVGYTLPSEFANIIKILFNKVPNIDKAIISVHCHNDLGMATGNSLSAILQGARQIECTINGLGERAGNCALEEVVMAIKTRKDYLKGFYTDIKCENIFKTSKLVSAITNESIPSHKAIVGSNAFSHSSGIHQDGVLKNRQTYEIISPSAIGIHDNRMLMTARSGRAMIKTCLENLGYDENTYNLDDVYERFLRLADKKGQVYDYDLEALMFLSYENEEENEFVIEKLSVISGNIPTACVCMRIKEELKTEACTGNGPVEAVFNCIARITNLKPVLKAYSINAKSSGVDAQGQVDVDLEFKGRKFHGKGLSTDVIEASAQAFASAYNAIYRSLKVEERKMA

SEQ ID NO: 3625 - protein, 267 aa, Streptomyces coelicolor A3(2)
MADTVLYEVSDGLATITLNRPEAMNALNIETKVALRDAVRSAAADDAVRAVLLTAAGDRAFCVGQDLKEHIGLLAADRETGSGQTMSTVREHYNPIVRALAGAEKPVVAAVNGVAAGAGLGFALAADYRIVADTAAFNTSFAGVALTADSGISWTLPRVVGPGRAADLLLFPRSIRAQEAYELGIATRVVPAADLRAEAEKTARALAEGPTVAYAALKEAMAYGLTHSLSETLDKEDELQSRAGASEDHAIAVRAFVEKGKPKYLGR

SEQ ID NO: 3626 - protein, 306 aa, Streptomyces globisporus
MRTRRRWSAADVPDRTGTTAVVTGASSGIGLHLAQELARHGAHVVLAVRDPDRGVAAAARIQSRVPSAQLTVRRLDLSRLASVRAGAEELRDRFPRIHLLVNNAGVMWTDRARTPDGHELQFATNHLGHFALTGLLLDSLRAAPGARVVTISSYLHRLGRIDFSDLHGERRYSRYRAYNQSKLANLMFALELHHRLAESGAELASLAAHPGLTATGLGRDFPAPVRRLGSPLAPLFLQPAAAGMLPGLRAATDPGARGGEFYGPLGVTETRGAPGLVRPGGAAVDPRARRRLWEESEHLTGVRLRP

SEQ ID NO: 3627 - protein, 921 aa, Ustilago maydis 521
MGNANSTSFKGADGAAAASADNTIDSTFKRQYSHQTGHVQGNGVAAVHPSSTAARQTSDRLSSGSRLGRTASFFGRASSHDGATAPQSTRSRSGSLTGFLVTQRRGSTTAASVAGDVYAAVKEGNEPTSGSVPSASSSSLSASNQPNSFAQYEISNSASGSSIETAIRANPRTRRLTEGLTLPQSPGGFDPRHYVSPHPSPSVATQAHYAAGLPSHHANVVVSSGLRVSSTGIDADAMPASTFRGSEPQQVPSTAARAPSRHPLFGLGGTSLFPNVGTSIGTNPAASPPIGGSSPVLSSQPLSMGDAADESETSQRLPTALPSYLKIPTAIPSSHVSPSSPPTSIYSQHSDRFRTPSERHRSPSPSLMLPLDDARPAHMVAGAGAAAAVLNTEDVVIPPGDASKASSPIDGRDGFFETFKEGSKQRTGPDEISIDEARAADIDVTDLTSNPANTNPGSVAKLPSLDVAALTDDTERASRAPQRTSQASAEAADIAPVRSSREPTPTPSDRGARALTPTRTGAPSGLRSLSPVATSSGPPTQPISVKRSHVDVQTGGESGFNTPLLPPGLTSAPPSASVPGVTPLSQVSSPATVSDRPCPSGPPRTPSATGNASQPTTPVSAKPGTGAGPHHAQAQAQTGQQQPPLMPIVLTWRAGGREVFVTGTFANEWRSKILLHKSKRDHTCVLHLPPGTHRLKFIVDDRWRVSRDLPTATDGDGNLVNYVEIPNVGPAHPGPLSAPGEDLPGADADSGRSERNSKIESKKTTMNLIEEARRAEAMRLGLDDLFDDDGNDQEETWTSEIPAALIEAQEAEEAQREAEESGRSATHAQHGSDGNGTPLPHPPALPRQLEKVILNSSPANPSNGTSTGSTVDDNSILPAPNHVVLNHLTASSIKGGVLAVGTTTRYKRKYVTTVYYRPVQV

SEQ ID NO: 3628 - protein, 1284 aa, Ralstonia eutropha JMP134
MISKPNPPAGFWLRSSLLAYGALLILAVWLVAFAAMSMVRQNEQVSVGARLGATVNTTARQLETWASEQRRRAVSMSTLDDTVRLARPLLANGADPSPERVQEFVNWITPLYRSNGYIGYGLISMDNRIIVSDLVERNGQPLQPEAAAAALRARENGASLSAPYPGPVLADGPVGPVDRSPFQIVCSRLWDNDRVVGALCLRIDPYAVMLQILKAARFGNTGELYVIDRDGRLNSPSRFDESLVGQGLLSPGDASMFNLRVRVPHDLGDGRWRVDDDAPLTRMAQQVLHSETLQVSFGYQDYRGKRVAGAGLWIPALGSALILEQDMEEALSSYLSTRTVVASMAAAIMLLIGVAAWALRKSQHRLAQSEERLRALLDHSPAIMHLKDRNHAFLQLNPSMEKLLGLTRDQVLGKTDRELAVMPDGTRERWEIEARVMATGRAEEQIYAMEAPEGSRQLRVIRFPVHDPTSNAVVGVGAVGIDITDQERANRELKEMSQTLEHKVWERTRELAVANAELAKAKHEAESAAQAKASFLANMSHEIRTPMNAVIGMAHLALSTQLDPQQRDYVEKIQRSGQHLLGILNDILDLSKIEAGKLEIEQIDFSLERLLRTVGDLVSERAAAKQLELVVDVQPDVPDSLRGDPLRIRQVLINFTTNAVKFTERGEIVIRVARCAGEHAESRVRLHFEVRDTGIGIDADAIPRLFRSFEQADSSTTRRYGGSGLGLAISHRLVTLTGGTIGVQSELGKGSTFWFELSLLPGTRRAPALLVQPELAGRRLLVVDDHGYARQVIGSMLRGFGFRADEVESGEKALSAIQHADAIADPYHAVFIDWRMPGLDGIQTVRKLAAMSLQSQRPRPLMITANGREEVVREGERNGFETTLHKPVSPSVLFDATMRVLASEPGRMADKGAPRSVTGPSWTLPHARVLLVEDNEINREVATHLLQQAGITPDTAENGAIALELLAVQDYDLVLMDMQMPVMDGFEATRHIRANPRLASMPVVAMTANALPEDRNRCLAAGMDDHIAKPISPATFFTTLHRWLTGAPARTGGNLHDAAWHENVANPVAEIIEVVEPEAEEEEAAPDWMRALAGTGLLDVDGAVARVGGRIDTFRQLLGRLLSGYAQTPQQIGALLQAGERVEAARLAHALAGLAGNLGARQVAGAAASLECTLMGMAADDASALLNGLEQAHASLCMALRQHLPAETPEPAAPVATQVTSMTDVLDRLRRQLADGASEASLTFAANRQRLADMLAGDRFRRLCEAVENYDYESAVEVLADSAG

SEQ ID NO: 3629 - protein, 736 aa, Candida albicans SC5314
MTYSEKQPLLEYSKKIADDHEVSVRSFNFPIFENTLSLFNSINPFQNCLTPLTRKVSDISLNDTDDIDVDSDYNLSDDEDTPLPDLPYESDDFPILLPSSKLSQREKLYELRKLMKEYNIGTYIIPSEDEHQSEYTSLSDKRREYITGFTGSAGIAIVTLTNANTLTGEAILSTDGRYFLQAEKQLNPRLWKLFKQGATGYKPWHEWSVESASKNGFSKVISCDPRVVSLSIGEYFDKQAKFHKSFQFKPLLSVNLVDEIWGAEKPSRPLDPIYVLPLRYSGEHTNDKLTKIRQAMKEKNSTHYVVSELDSIAWLFNLRADKDIPFTPVFFAYALVTLDSIVLYVNNDKLPNDDAQLNEHLSSIENLTIKDYNEFFKDVSKLSELKDKESVVLPTRSATSYALYDTISKSVNKSSLYHESIIANLKIFKNKTELFNAKIAQYKDSLAFIIFSAWLDYQLVIKKKKISEYDAACKIYSIRQKLPNFKGLSYETISSTGANAAIIHYAPTKTEHSIIDPTKPYLIDSGAHYLEGTTDITRTYKFGYHGLTDRDKLYYTLVLKGHLSLAMAKFPPNSSSTGTILDAFARQPLWNKGLDFNHGTGHGVASFGPVHEGPLYISTTSGGPSKGLFQPGAILTDEPGYYVDGEVGFRIESELEVVECDGSLGKTRQGENFLGFNYLTKVPFCRKLIDTTQLSPIEIQWINEYHQSIRDDFGSKLLELNEKKVYSWLLNETEPI

SEQ ID NO: 3630 - protein, 318 aa, Musa acuminata
MDSFPVIDMEKLLGRERGAAMEILRDACEKWGFFEILNHGISHDLMDEVEKVNKEQYNKCREQKFNEFANKALENADSEIDHLDWESTFFLRHLPVSNISEIPDLDDQYRKAMKEFAAAIEKLAERLLDLLGENLELEKGYLKKAFSNGSKGPTFGTKVSSYPPCPRPDLVKGLRAHTDAGGIILLFQDDQVSGLQFLKDGEWLDVPPMRHAIVVNLGDQLEVITNGKYKSVVHRVVAQTDGNRMSIASFYNPGSDAVIFPAPALVEKEAEEKKEVYPRFVFEDYMKLYVGHKFQAKEPRFEAMKAMEAVATHPIATS

SEQ ID NO: 3631 - protein, 298 aa, Picea glauca
MAMLSGGLQKEEEMAKIDKACEEWGFFQVVNHGVPHSLMDDITRMGKEFFRLPAEEKEKYAIRDFQGYGQIFVVSEEQKRDWGDLLGLIISPPQSRNLSVWPSVPSEFRQIVEAYNMEIRSLAVKILSLIAENLHLKPDYFEQSFGNTYQKMRMNYYPACPRPDLVLGLSPHADGSGITLLLQDEKVEGLHVRKDDIWVAVQPIPYALVINIGNLLEVITNGRYKSIQHRAVTNKHKSRLSIDVFYSPGFDAEIGPAPELIDESHPCLFRKFIHEDHIKYYMSRKVDGKTSFYEYAGV

SEQ ID NO: 3632 - protein, 185 aa, Brassica juncea
MASEAKESPANNPGLSTVRDEATKGYIMQQTMFRVKDPKASLDFYSRVLGMSLLKRLDFSEMKFSLYFLGYEDTSTAPTDPTERTVWTFGRPATIELTHNWGTESDPEFKGYHNGNSEPRGFGHIGVTVDDVHKACERFEQLGVEFVKKPHDGKMKNIAFIKDPDGYWIEIFDLKTIGTTAGNAA

SEQ ID NO: 3633 - protein, 128 aa, Arabidopsis thaliana
  misc_feature (6)..(6): Xaa can be any naturally occurring amino acid
  misc_feature (14)..(14): Xaa can be any naturally occurring amino acid
  misc_feature (21)..(21): Xaa can be any naturally occurring amino acid
  misc_feature (23)..(23): Xaa can be any naturally occurring amino acid
  misc_feature (28)..(28): Xaa can be any naturally occurring amino acid
  misc_feature (30)..(30): Xaa can be any naturally occurring amino acid
  misc_feature (32)..(32): Xaa can be any naturally occurring amino acid
  misc_feature (38)..(38): Xaa can be any naturally occurring amino acid
  misc_feature (78)..(78): Xaa can be any naturally occurring amino acid
  misc_feature (97)..(97): Xaa can be any naturally occurring amino acid
  misc_feature (102)..(103): Xaa can be any naturally occurring amino acid
MASSMXSSATMVAXPAQGHMXSXPLKGXKXSXAFPATXKANNDITSITSNGGRVNCMQVWPPIGKKKFETLSYLPDLXDSELAKEVDYLIRNKWIPXVEFEXXHGFLYRHGTQPGILMGGCQGSFFSV

SEQ ID NO: 3634 - protein, 372 aa, Arabidopsis thaliana
MSRVSPKTVDDAVKALVKEGNEKSRTEKPQLLEEDGFFYLVVALKKIPQRNFTNAYRIPLPHPLINTTEDSPELCLIIDDRPESGLTEEDAKKNIKSENIPITKVVKLSKLKSDYGSFESKRKLCDSYDMFFSDRRVIPMLPKLIGKKFFQSKKTPVAIDLRHMNWKEQIEKACGAAMFFMRTGSCSAIKVAKLSMESDDIVENVTATLNGVVDVLPSRWKYIRSLHLKLSESLSLPLYQTVPYLQLKIDPLGVEEVKNGEGLAKSDVDDSSSKSVKTKKKNGKIHEVRYMDSNVSETLGDDEFDRSVGEDEVADDLNASGDKKKRKKMSSSKSAVSGKPDIVKSKNGQKSKKLKKDIDESGGGFKAKTKRR

SEQ ID NO: 3635 - protein, 353 aa, Mycobacterium tuberculosis CDC1551
MKTTDVRVRRAITAMAGGHAVVLTGDPNGDGYLVFAAQAATPRLVAFAVRHTSGYLRVALPGAECERLHLPPMCDRDTTHCVSVDVRGTGTGISASDRAWTIAALASATSVAADFQRPGHVVPVQAQADGVLGRRGPAEAAVDLARLAERRPAAALCEIVSPDNPVQMAHHAESVEFAVEHGLAMVSIGELVAYRRRIEPQVVRFTAATLPTWAGASRVIGFRDVYDLGEHLAVIVGAVGAGVPVPLHVHIECLTGDVFGSTACRCGEELNGALARMSAQGSGVVLYLRPPGPAQACGLFARGDAATDVMPETVTWILRDLGVYAIRLSDDVPGFGLVMFGAIREASTLAAAG

SEQ ID NO: 3636 - protein, 1180 aa, Xanthomonas campestris pv. campestris str. ATCC 33913
MRKHASWVLAAVLLLMGASALAAEQIETPRMRRFGPGDGLPSRMVLALAQDRQGYVWAATSDGLARYDGIGLQVWQHDPLSARSIPGNEVETLLVDDRDRVWLGINGSPLAMFDAEREGFVSFPAVSNACAGQVWALAQAQGALWIGTSNGGLCRREEDGRLTVFRATPDAPDGLPSDTIMSMLTDARGRLWIGTGSGLVMRDGERFVRIAPERLSATVFKLSKDPDGTLWVGSSKGQYRVTPAGVLEPAPWKGAENVRAGTVVHDVHGGYWVAAADGFFRVAPGETALRVMDGDRGSGFLTAESGVLDLLQDRQGGLWLGLISQGLAYLPPDWQRFSTILQTQGKPLESLYLVNAAADGDSFLVTTGDGVYRLGAQGDVVPVVHSAALGGDTVQSVLPNADGSLWIALRDDVTHYVPATGKKRRLGLQVDQDKSQRPELMARGIDGEFWLSIVGGGVQRRAADGRLLAEFRFGTDLSEPGGMVQQLTIRPDGSAWVAAGDDPWVWQGERFRRVIDDAEHEVYALAFVSPREFWTGRPGALERYGWDGHKATLLERVGHAQGMPATEIRGLALGGTDTVWATTSRGLFAYRRGQPQVRMFGQRDGLPDSEFSMRPPVTGPSGQVLALTTSGIVLFDPTRPFAPVPQAQLVIQSVQVRRNDAERPQQVPHKRPIVLQARDRDLRISARLLSFVDPGLARYRYRVDGYDERWVEQGATGERVISRLPPGDYQVQVQARAGTGDWVAAPALTLQVQPPWWMSPAAQMVAVAVCLLLFGLGVWAWRRRVRRQQEWVLARQRQQLAEQASIAKSNFLATLGHEVRTPMTGVLGMSELLLATPLDAKQRGHVDAIRKAGAHLLRLVNDALDLARIEAGKLELVQQPFEPSQLTQELADFMHPIVEARGLRFHYRNQLPAALVVVGDATRVRQILINLLGNAIKFAERGEVGLTVSQHGDCLRFKVRDSGPGIGPEQQKRLFQRFEQGEGARTNARYGGSGLGLAISQELTVAMKGKIRVRSRLGVGTQFTVDLPLPIDRSPLRPVAGEARIPAGAPLRILLVEDDPTVAEVISGLLAGRGHRVVHAAHGLAALSEAVDGEFDVALLDLDLPGLDGFALAAQLRRLGHAFPLLAVTARADGDAQTQAQAAGFDGFLRKPVTADMLVEAIAAVQAVARERDRATPLLG

SEQ ID NO: 3637 - protein, 490 aa, Oryza sativa
MAVSLKSSGSFCSTPPQWLHSTRDRILYGYSHSNAKECTCKKTKRPAPLCVKATSTKVELDFNDPSWKQKFQEDWDKRFNLPRITDIYDLKPRPTTFSLKKNRSPAGDENGTPMDKWNGYVNSDDRALLKVIKYSSPNSAGAECIDPDCSWVEQWVHRAGPRKEIYYEPEEVKAAIVTCGGLCPGLNDVIRQIVFTLETYGVKNIVGIPFGYRGFFEKGLKEMPLSRHLVENINLAGGSFLGVSRGGAKTSEIVDSIQARRIDMLFVLGGNGTHAGANAIHEECRKRKLKVSVVAVPKTIDNDILLMDKTFGFDTAVEEAQRAINSAYIEVPFTLDGEYGVLRHLEHLLKTKGFCVVCVAEAAGQELLQKSGATDASGNVILSDIGVHMQQKIKMHFKDIGVPADVKYIDPTYMVRACRANASDAILCTVLGQNAVHGAFAGFSGITSCICNTHYVYLPITEVITVPKRVNPNSRMWHRCLTSTGQPDFH

SEQ ID NO: 3638 - protein, 263 aa, Bacillus thuringiensis serovar konkukian str. 97-27
MKNERLVICSKKGSSAVITIQNPPVNALSLEVVQQLINVLEEIEMDDDIAVVIITGIGGKAFVAGGDIKEFPGWIGKGEKYAEMKSIELQRPLNQLENLSKPTIAAINGLALGGGCELALACDLRVIEEQALIGLPEITLGLFPGAGGTQRLPRLIGEGKAKEMMFTGKPITAKEAKEINLVNYITSRGEALNKAKEIAKDISEFSLPALSYMKLAIREGLAVPLQEGLQIEARYFGKVFQTEDVKEGVKAFIEKRVPRFTNK

SEQ ID NO: 3639 - protein, 80 aa, Zea mays
MAEESGRPLPKFGEWDVNDPASADGFTVIFNKARDEKKGGNGQDTDSPSKDPRTERVESYAAKPSTKKWFCCVTASPTQS

SEQ ID NO: 3640 - protein, 416 aa, Listeria monocytogenes
MAVDKITMPKLGESVTEGTISSWLVKPGDTVEKYDAIAEVLTDKVTAEIPSSFSGTIKEILAEEDETLEVGEVICTIETEEAGSSEPVAEAEQTEPKTPEKQETKQVKLAEAPASGRFSPAVLRIAGENNIDLSTVEGTGKGGRITRKDLLQVIENGPVAPKREEVKSAPQEKEATPNPVRSAAGDREIPINGVRKAIAKHMSVSKQEIPHAWMMVEVDATGLVRYRNTVKDSFKKEEGYSLTYFAFFIKAVAQALKEFPQLNSTWAGDKIIEHANINISIAIAAGDLLYVPVIKNADEKSIKGIAREISELAGKARNGKLSQADMEGGTFTVNSTGSFGSVQSMGIINHPQAAILQVESIVKRPVIIDDMIAVRDMVNLCLSIDHRILDGLLAGKFLQAIKANVEKISKENTALY

SEQ ID NO: 3641 - protein, 124 aa, Glycine max
  misc_feature (79)..(79): Xaa can be any naturally occurring amino acid
  misc_feature (104)..(104): Xaa can be any naturally occurring amino acid
PRVRLALLEAATFYPGWINPANALLGMPGRKPGPHVQDDMKSSVNEGVREEVHVKSMSAEDVDDKRWEDCTGEVYWWTXIHISGATGGDNRPGLTDHPTGGTHXRLGDARAHGSRPGWGGVPNI

SEQ ID NO: 3642 - protein, 52 aa, Oryza sativa (japonica cultivar-group)
MMLRGGRLAGLASRMVGAKPFSTEIFVSRLSFYTTEEELKNVFSPFGAVEEA

SEQ ID NO: 3643 - protein, 206 aa, Zea mays
TEYGRMNFGSRPAKRRPGGGITTLRAIPWIFSWTQTRFHLPVWLGVGAAFKFAIDKDVRNFQVLKEMYNEWPFFRVTLDLLEMVFAKGDPGIAGLYDELLVAEELKPFGKQLRDKYVETQQLLLQIAGHKDILEGDPFLKQGLVLRNPYITTLNVFQAYTLSKEFADENKPAGLVKLNPASEYPPGLEDTLILTMKGIAAGMQNTG

SEQ ID NO: 3644 - protein, 494 aa, Bacillus thuringiensis serovar konkukian str. 97-27
MSQLAVNLHEKVEKFLQGTKKLYVNGSFIESASGKTFNTPNPATGETLAVVSEAGREDIHKAVVAARMAFDEGPWSRMSTAERSRLMYKLADLMEEHKEELAQLETLDNGKPIRETMAADIPLAIEHMRYYAGWATKIVGQTIPVSGDFFNYTRHEAVGVVGQIIPWNFPLLMAMWKMGAALATGCTIVLKPAEQTPLSALYLAELIEEAGFPKGVINIVPGFGESAGQALVNHPLVDKIAFTGSTPVGKQIMRQASESLKRVTLELGGKSPNIILPDADLSRAIPGALSGVMFNQGQVCSAGSRLFVPKKMYDNVMADLVLYSKKLNQGVGLDPETTIGPLVSEEQQKRVMGYIEKGIEEGAEVLCGGNNPFDQGYFISPTVFADVNDEMTIAKEEIFGPVISAIPFNDIDEVIERANKSQFGLAAGVWTENVKTAHYVASKVRAGTVWVNCYNVFDAASPFGGFKQSGLGREMGSYALNNYTEVKSVWLNLN

SEQ ID NO: 3645 - protein, 558 aa, Agrobacterium tumefaciens str. C58
MTDASVKYRPYPTINIPDRTWPGKTIDKAPIWCSVDLRDGNQSLVNPMGHDRKARMFKLLLEMGFKEIEIGFPSASQTDFDFARWCVEEGNVPDDVSLQVLVQCRPELITRTFEALEGANKPIIHFYNSTSELQRRVVFGKDVHGIKQIAVDAAKMITDMAAKAGGGFRFEYSPESFTGTELEVALEICNAVVEVVKPTADNKLILNLPSTVEMATPNIYADQIEWMCRNIDNRENVIISLHPHNDRGTGIAATELALMAGADRVEGTLFGNGERTGNVDVVTLALNMYTQGVDPELDCRDIERIKAVYEYSNEMTIPERHPYVGELVYTAFSGSHQDAINKGMKAIKVANHPVWEVPYLPIDPKDVGRSYEAIIRINSQSGKGGIAYILQQDYGINLPRNLQVEFREDIQRITDEEGVELPAKRIYERFIERYVTQPNARIKFVDHHTYPAGDFKGVRIVAAEITDNGEVKRIEGKGTGPIDGFINALSVYLGVDLSVNDYSEHSLQHGSNASAIAYVEMEHPGGKLFGAGVNTNIVAASLEAIVSAANRVLEERAK

SEQ ID NO: 3646 - protein, 503 aa, Mesorhizobium sp. BNC1
MPAVQETIDQVRLIDVDQYKYGFETLIESDKAPKGLNEDIVRLISAKKGEPEWMTEWRLNAFRRWLTMEEPSWARVSYPKIDFQDIHYYAAPKTQAGPTSLDEVDPELLRTYEKLGIPLKEQEILAGVRKPAEGEDAGDNVYASGRVAVDAVFDSVSVVTTFKKELAKAGVIFCSISEAIREHPELVRKYLGSVVPPTDNFYATLNSAVFTDGSFVYVPKGVRCPMELSTYFRINEKNTGQFERTLIIADEGAYVSYLEGCTAPQRDENQLHAAVVELVALDDAEIKYSTVQNWYPGDKQGKGGIYNFVTKRGDCRGKNSKISWTQVETGSAITWKYPSCLLRGEGSRGEFYSIAVSNGHQQIDSGTKMIHLGKNTSSRIISKGISAGNSNNTYRGQVSVHRKAENARNFTNCDSLLIGNDCGAHTVPYIEAKNSTAQIEHEATTSKISDDQKFYVMQRGIPEEEAIALIVNGFVKDVIQELPMEFAVEAQKLIGISLEGSVG

SEQ ID NO: 3647 - protein, 390 aa, Pyrococcus furiosus DSM 3638
MRNMNIEEIRNSFLSGRPAVLIDEERENEADLVFPAEIATPKVVNFMLSAKGLLCLALDMEEGIKRGFFKLPNNGGETNFLIPVDYKDVFTGITAEERALTARKVAEGLGIENFRYPGHLPLLGGLGLNKRKGHTEASLELVEMAGFKRYALIIEILDDKGYSHNLDYAFHFAKEHDLPLIRIREIWKEFVRRKQLIHVYSKAKLPTKYGDFEIYSFKNDLDFKDHVALVKKPFKGTPLVRVHSKCLTGDTLGSLKCDCGSQLENALRTISQEGGVLIYLDQEGRGIGLREKIRAYEFQDRGLDTVEANKALGFAPDERTYEVAFQILRALGIEKIKLLTNNPSKVKALRELGIEIEDVIPLPGEINRYNFFYLKTKVEKLGHKIPGVEV

SEQ ID NO: 3648 - protein, 65 aa, Jatropha curcas
AIPWIFAWTQTRFHLPVWLGFGAAFKHIIEKDRKNLQMLQEMYNQWPFFRVTIDLVEMVFAKGDP

SEQ ID NO: 3649 - protein, 393 aa, Arabidopsis thaliana
MSSRFSLTVVCLIALLPFVVGIRLIPARITSVGDGGGGGGNNGFSKLGPFMEAPEYRNGKECVSSSVNRENFVSSSSSSNDPSLVHIAMTLDSEYLRGSIAAVHSVLRHASCPENVFFHFIAAEFDSASPRVLSQLVRSTFPSLNFKVYIFREDTVINLISSSIRLALENPLNYARNYLGDILDRSVERVIYLDSDVITVDDITKLWNTVLTGSRVIGAPEYCHANFTQYFTSGFWSDPALPGLISGQKPCYFNTGVMVMDLVRWREGNYREKLEQWMQLQKKMRIYDLGSLPPFLLVFAGNVEAIDHRWNQHGLGGDNIRGSCRSLHPGPVSLLHWSGKGKPWVRLDEKRPCPLDHLWEPYDLYKHKIERAKDQSLLGFASLSELTDDSSFL

SEQ ID NO: 3650 - protein, 444 aa, Physcomitrella patens
MMSSMVRFSSSPCSFTGSLCSTSPQSMHPMSSVAAKVTRQCGCLRAGNKLDKDQFVGDGKPLMHQQTRGWSQGRERCHAGRSVVMASMSGAKIKVIGVGGGGNNAVNRMIGSGIQGVDFWAINTDVQALQKSQAEHRVQIGEALTRGLGTGGKPFLGEQAAEESIEIIAQAVVDADLVFITAGMGGGTGSGAAPVVARVAKEAGQLTVGVVTYPFTFEGRRRSQQAVEAIENLRKSVDSLIVIPNDRLLDVSGDKTPLQEAFSLADDVLRQGVQGISDIITTPGLVNVDFADVRAVMSNSGTAMLGVGSSSGKNRAEEAAVQAASAPLIERSIEQATGIVYNITGGPDLTLQEVNTVSEIVTGLADPSANIIFGAVVDDKYTGEIHVTIIATGFSHSFQKSLVDPNVSRSERQDAPSNALEKPWKQPTPTSSRFRQGLNSKGFL

SEQ ID NO: 3651 - protein, 403 aa, Bifidobacterium longum NCC2705
MSEIAQNEFNDKTNIKVVGVGGAGGNAVNRMIAEGLQNVEFVAVNTDAKDLLRSDADVKISLSDKSSRGLGAGADPERGAKAAQDHQSDIEEALRGADMVFVTCGEGGGTGTGASPIVARAAHQQGALTIAVVTRPFSFEGPQRSASAEYGIDNLRKEVDALIVIPNDRLLELSDRSIGIIEAFKTADTALLAGVQGITDLISMNSYIHVDFNDVNSILRGAGTALFGIGSARGEDRATQAAEIAISSPLLEESIEGAHGALINIAGPTDLKLQEASAATELVRKAIHPEAQIIWGLALDDAYGDEVRVTVIAAGFDPVAAQDDDTQSTVTPVVPTAADPATPVAQPAPAPAPAAQPAATAQPAFTPAIGDSASLPFDDPTSAHPNIAVNDPAGDLDIPDFLR

SEQ ID NO: 3652 - protein, 490 aa, Pseudomonas syringae pv. syringae B728a
MARFELQKLYIDGGYVDASNPETFDAINPANGEVLAQIQRAGKDDVERAVVAAEKGQKIWAAMTAVERSRILRRAVDILRERNDELAALETLDTGKAISETRYVDIVTGADVLEYYAGLVPAIEGEQIPLRDSSFVYTRREPLGVVAGIGAWNYPIQIALWKSAPALAAGNAMIFKPSEVTSLTTLKLAEIYTEAGVPNGVFNVLTGSGREVGTWITEHPRIEKVSFTGGTDTGKKVMASASSSSLKEVTMELGGKSPLIVFDDADLDRAADIAMMANFYSSGQVCTNGTRVFVPNALKAEFEAKILERVKRIRAGNPEDENINFGPLVSFEHMESVLGYIAKGKEQGARLLCGGDRLTGGVFDKGAFVAPTVFTDCTDEMTIVREEIFGPVMSILGYDTEDEVVRRANDTDFGLAAGIVTRDLNRAHRVIHLLEAGICWINAWGESAAQMPVGGYKQSGVGRENGISSLAQYTRIKSVQIELGDYASVF

SEQ ID NO: 3653 - protein, 162 aa, Brassica napus
LLGLDSKLEKSLLIPFREIKVECTIPKDDGTLASFVGFRVQHDNARGPMKGGIRYHPEVEPDEVNALAQLMTWKTAVANIPYGGAKGGIGCDPSKLSISELERLTRVFTQKIHDLIGIHTDVPAPDMGTGPQTMAWILDEYSKFHGYSPAVVTGKPIDLGGS

SEQ ID NO: 3654 - protein, 248 aa, Glycine max
MAAKTSTNGTHHSLPEYIPNRIPDPHYVRILDTTLRDGEQAPGAAMTSDQKLQIARQLAKLGVDVIEWGFPSASQEDFNAVKMIAQEVGNNCDADGYVPVIAALCRCNERDITRAWEALKYAQRPRLMPFIAVSPIHMEYKLNKTKEEVLQIATDMIKFARGLGCTDIQFCAEDAARSDREFLYQILEEVIKAGATTLGIGDTVGITMPFEIRELVAGIKANVPGAENVIISIHCHNDLGHATANTIE

SEQ ID NO: 3655 - protein, 449 aa, Streptomyces globisporus
MRIDPPGPPLRALPGLLRKLAVDRLGMMRDAAGLGDAVRVSMGPKKLYIFNRPDYAKHVLADNSDNYHKGIGLVQSRRVLGDGLLTSDGETWREQRRIVQPAFKPGRINQQAAAVAEEAAKLVALLRGHEGGGPVDVLQEVTGLTLGVLGRTLLDSNLTAHESLAHSFEEVQDQAMLEMVSQGTVPAWLPLPPQARFRRARRELYRVADLLVADRRSRMADGGPGDDALSRIIVAADRRRDDPARARNRLREELVTLLLAGHETTASTLGWTLHLLERHPEVRDRVRAEARAALGDGVPGPEDLHRLTYTTMVVQEAMRLFPPVWILPRVAQQRDVVGGYTVSAGSDVLVCPYIMHRHPGLWEDPERFDPERFEPRQTADRPRYAYIPFGAGPRFCVGSNLGMMEAVFVTALVTRDLDLRTVAGHRAVAEPMLSLRMRGGLPMTVSTAR

SEQ ID NO: 3656 - protein, 328 aa, Aspergillus oryzae
MSTTSSTFKSSSGANCHPTALEIIQNNGLEGKLQDKVILITGCSSGIGIDTARALSVTGATLYLTARDLKKAEQALGDLIEKPNVHLLTLNLNSLASVRACAEEFLPKSSQLNVLINNAGVMATPEGRTQDGFETQFGTNHLGHFTLFYLLKPILLASSTPEFNSRVVNVSSLAHRYGEPVFDNINLEGIYEPWRAYGQSKTANIWTANEIERRYGSQGLHAFSVHPGGIRTGLQQYVPKEQKDAWDQDDAISSVWKTSEHGAATTVWAAVAKELEGKGGKYLEDCQIAEKYDPSTGTAGKGYAPWVYDEAKQAKLWEMSLNLAGLHV

SEQ ID NO: 3657 - protein, 517 aa, Zea mays
MTDLAKLISLYKNSVEMEFFTEYGEASQYQIQEVIGKGSYGVVAAAVDTRTGERVAIKKINDVFEHVSDATRILREIKLLRLLRHPDIVEIKHIMLPPSRREFQDIYVVFELMESDLHQVIRANDDLTPEHHQFFLYQLLRALKYIHAANVFHRDLKPKNILANSDCKLKICDFGLARASFNDAPSAIFWTDYVATRWYRAPELCGSFFSKYTPAIDIWSIGCIFAELLTGRPLFPGKNVVHQLDIITDLLGTPSSETLSRIRNEKARRYLSCMRKKYPVPFTHKFRHADPLALRLLERLLAFDPKDRPSAEEALADPYFASLANVEREPSRHPISKLEFEFERKKLAKDDVRELIYREILEYHPQMLEEYMKGGEQISFLYPSGVDRFKRQFAHLEEHYSKGERGSPLQRKHASLPRERVVVSKDGNTERQINDQERSADSVARTTVSPPRSEDADMDDVKPTSLSSRSYLKSASISASKCVVVRNKHPEPEDDGIPEEMEGTVDGLSEKVSRMHS

SEQ ID NO: 3658 - protein, 335 aa, Caulobacter crescentus CB15
MAVRVAINGFGRIGRLVLRSIAEHGRRDIEVVAINDLGPVETNAHLLRYDSVHGRFPGVVTSGEDWIDVGMGKIKVTAIRNPAELPHKDLGVDIAFECTGIFTSKEKAAAHLEAGAKRVLVSAPCDGADKTIVFKVNDDTLSADDLVVSNGSCTTNCLAPIAKVIHDLVGIERGYMTTIHSYTGDQPTLDTMHKDLYRGRAAALSMIPTSTGAAKALGLVLPALKGKLDGSSIRVPTPNVSVVDLKFVPGRETTVAELNDALKAAAAGPLKGVLGVTDEALVSTDFNHIAESSTAALAQTQVIEGKLGRVLSWYDNEWGFATRMSDTALVMAKFL

SEQ ID NO: 3659 - protein, 503 aa, Oryza sativa
MEGAGSDGNPLGGYRIGKTLGIGSFGKVKIAEHILTGHKVAIKILNRRKSMEMEEKVKREIKILRLFMHPHIIRLYEVIDTPADIYVVMEYVKSGELFDYDVEKGRLQEEEARRFFQQIISGVEYCHRNMVVRRDLKPENLLLDSKCNVKIADFGLSNVMRDGHFLKTSCGSPNYAAPEVISGKLYAGPEVDVWSCGVILYALLCGTLPFDDENIPNLFKNIKGGIYTLPSHLSPLGRDLIPRMLVVDPMKRITIREIREHQWFTVGLPRYLAVPPPDTAQQVKKLDDETQNDVINMGFDKNQLIESLHKRLQNEATVAYYLLLDNRLRTTSGYLGAEFHESMVSSLAQVTPAETPNSATDHRQHGHMESPGFGLRHHFAADRKWALGLQSRAHPREIITEVLKALQELNVCWKKIGHHNMKCRWSPSFPSHESMMHNNHGFGAASAMIETDDSEKSTHTVKFEIQLYKTRDEKYFLDLQRLSGPQLLFLDLCSAFLTQLRVL

SEQ ID NO: 3660 - protein, 134 aa, Solanum commersonii
DEYGNPVRQTDEYGNPIQQTGGTMGEYGTTGTGYGTQAGHTTGVLGGDQRQHGTLGGMLHRSGSSSSSSSVSEDDRHGGRRKKKGIKDKVKEKLPGGHRDHLAHSTATTTTTGYGMDGTHEKKGIMEKIKEKLP

SEQ ID NO: 3661 - protein, 685 aa, Saccharomyces cerevisiae
MTDITPVQNDVDVNGNNVNDDVSSNLKRPIDQGDPSNGLAEEENPANNQLHLKKARLDGDALTSSPAGLAENGIEGATLAANGENGYNATGSREDEQQGLKKEEGGQGTKQEDLDENSKQELPMEVPKEPAPAPPPEPDMNNLPQNPIPKHQQKHALLAIKAVKRLKDARPFLQPVDPVKLDIPFYFNYIKRPMDLSTIERKLNVGAYEVPEQITEDFNLMVNNSIKFNGPNAGISQMARNIQASFEKHMLNMPAKDAPPVIAKGRRSSAQEDAPIVIRRAQTHNGRPKRTIHPPKSKDIYPYESKKPKSKRLQQAMKFCQSVLKELMAKKHASYNYPFLEPVDPVSMNLPTYFDYVKEPMDLGTIAKKLNDWQYQTMEDFERDVRLVFKNCYTFNPDGTIVNMMGHRLEEVFNSKWADRPNLDDYDSDEDSRTQGDYDDYESEYSESDIDETIITNPAIQYLEEQLARMKVELQQLKKQELEKIRKERRLARGSKKRGKRSKGRSGSKNASSKGRRDKKNKLKTVVTYDMKRIITERINDLPTSKLERAIDIIKKSMPNISEDDEVELDLDTLDNHTILTLYNTFFRQYESSSGASNGLDGTSGVTRDASSLSPTSAGSRKRRSKALSQEEQSRQIEKIKNKLAILDSASPLSQNGSPGQIQSAAHNGFSSSSDDDVSSESEEE

SEQ ID NO: 3662 - protein, 640 aa, Oryza sativa
MDELNLLRQHQHQHQHHLVVRGLGEEIDLEIGPGDDPSFPGAALVGVTPGAHDPADDHKSLLIPCSQPVAEGQPQPTPPQVEEHDGLLRLPGQTKKKKKVVKKWREEWADTYKWAYVAVHDNTSRIFCTVCKEYGRKHRRNPYGNEGSRNMQMSALEEHNNSLLHKEALRLQTASKENAQPPEIERPVYVKALSKTAASILESILKKDPHEAEFIQSIQEVVHSLEPVLVKNSQHVQILERLLEPERCFIFRVPWVDDRGEAHVNRGFRVQFSQALGPCRGGLRFHPSMTLSVAKFLAFEQTLKNALSQYKLGGAAGGSDFDPKGKSESEIMRFCQSFMDELYRYLGPDQDFPAEDVGVGPREMGYLFGQYRRLSGHFQGNFTGPKIFWSGSSFRTEATGYGLVFFARVVLADMNKELKGLRCVISGSGKIAMHVLEKLLSCEAIPVTVSDSKGYLLDTEGFDYMKYSVLRNIKAQQRSLKEYLKSYPNAKYIDDAKPWSEKCDVAFPCASQNEIDQAEALAIINSGCRVLIECSNMPCTAQAVDILRTAKVVVAPAKATAAGGVAVGELELNPEFSLMQWSVEDFENKIQDAVKQTYDRSIKAAQDYGIMKENPESLVHGANICAFLNIAQAMTDQGCV

SEQ ID NO: 3663 - protein, 140 aa, Nicotiana tabacum
KEEFHKETCRKIKALHQYDCLRANKSTSAWGLEARVPFLDKEFINVAMSIDPEWKLIKPEQRRIEKWALRRAFDDEEHPYLPKHILYRQKEQFSDGVGYSWIDGLKAHAEQHVTNRMMLNASHIFPHNTPITKEAYYYSM

SEQ ID NO: 3664 - protein, 313 aa, Mannheimia succiniciproducens MBEL55E
MAKVATITLNAAYDLVGRLKRIELGEVNTVETLGLFPAGKGINVAKVLNDLDVEVAVGGFLGEDNVGDFEHLFQQQGLQDKFQRVAGKTRINVKITETDADVTDLNFLGYQISEQDWRKFTADSLAYCKEFDIVAVCGSLPRGVTADMFQSWLSQLHQAGVKVVLDSSNAALTAGLKANPWLVKPNHRELEAWVGHELPTLKDIIDAAKQLKAQGIANVIISMGANGSLWLSDNGVILAQPPKCENVVSTVGAGDSMVAGLIYGFVNNLSQQETLAFASAVSAFAVSQSNVGVSDRKLLDPILANVKITTIEG

SEQ ID NO: 3665 - protein, 555 aa, Brucella melitensis
MPIAGTKYAPFPAPQLDDRTWPSKRIEKAPIWCSVDLRDGNQALIDPMGHDRKERMFRLLIDMGFPEIEIGFPSASQTDFDFCRWAIEQGDVPDDVDLQVLVQCRPELITRTFEALEGAKTPIIHFYNSTSELQRRVVFAKDVGGIKQIATDAAKMIMDMAAKAGGGYRFQYSPESFTGTELDVALEICNAVIEIVKPTPDNKLIVNLPSTVEMNTPNVYADQIEWMCRNLDNRESLIISLHPHNDRGTGIAATELGLMAGADRGEGTLFGNGERTGNVDVVTLALNMYTQGIDPGLDCTDINRMKEVYEYSNQLKIAERHPYVGELVYTAFSGSHQDAINKGMKARRSANSPVWEVPYLPIDPQDVGRSYEAIIRINSQSGKGGIAYILQADYGLNLPRNLQVEFREIIQHITDEEGKELPSKRIYEEFQKLYVTQPDARIKFVDHHTYPHPEQKGRRILTAEITDNGVTKTIEGKGTGPIDGFVDALSKYLGVKMSVVDYSEHSLQQGSDASAISYVEMVYPGGKLFGVGINDNIVSASLEAVVSAANRVIAK

SEQ ID NO: 3666 - protein, 183 aa, Fagus sylvatica
MKAVREKPNLFELFLQNQYAGAAPQNDEFGNPIRSDEYGNRVRTHEFGNPTHHTQQRCCRIRNWWFDTNTLQGMRHDATTGAGHGGVDYRHDQQQQQHGLSGMLHRSGSGSSSSSEDDGFGGRRKKKGVMEKVKEKIPGVGHKDDQYHQGQTTSTITPDYYDQGQTHEKKGIMEKIKEKLPGH

SEQ ID NO: 3667 - protein, 350 aa, Glycine max
METLCSALVFPSFRITTSAFSKCGIRASIAVEQQTSQTKVALLKIGTRGSPLALAQAYETRDKLMASHPELAEEGAIQIVIIKTTGDKILSQPLADIGGKGLFTKEIDEALINGDIDIAVHSMKDVPTYLPDKTILPCNLPREDVRDAFISLSAASLADLPSGSVVGTASLRRKSQILHRYPSLNVEENFRGNVQTRLRKLSEGIVQATLLALAGLKRLNMTENVSSILSIDDMLPAVAQGAIGIACRSNDDKMAEYLASLNHEETRLAVSCERAFLEKLEGSCRTPIAGYASRNEDGNCLFRGLVASPDGTRVLETSRIGSYAFEDMIKMGKDAGEELLSRAGPGFFSR

SEQ ID NO: 3668 - protein, 516 aa, Oryza sativa
MEAPSSSPSSPSLKDHLSSPTGPLHLKVWEVICIVLGAFMVVIFFVTVWLTIRSRKRVRRASANIPITQIPAISKEIKEVRVEQVPTSDFAAHDGVLMTIQDKSSEKESDKVMVHLGVSKSKRGDESHSGSFRYMDKDLGFQSADEGGSGTFRHNSAHAITAPSPLVGLPEFSYLGWGHWFTLRDLEVATSRFSKDNILGEGGYGVVYRGQLINGTPVAVKKLLNNLGQAEKEFRVEVEAIGHVRHKNLVRLLGYCVEGTQRMLVYEYVNNGNLEQWLHGAMSHRGSLTWEARVKILLGTAKALAYLHEAIEPKVVHRDIKSSNILIDDDFDAKVSDFGLAKLLGAGKSHVTTRVMGTFGYVAPEYANTGLLNEKSDIYSFGVVLLEAITGRDPVDYGRPANEVNLVDWLKMMVASRRSEEVVDPTIETRPSTRALKRALLTALRCVDPDSEKRPKMGQVVRMLESDDPIPRGDRRSKHNRGGSTEMDSQRDNNSDTDKSDNPDSKPSRSRASSSK

SEQ ID NO: 3669 - protein, 346 aa, Brassica napus
MALEHIKIFLIVSLVSSFCFSTTLSRLLDDELIMQKKHDEWMAEHGRTYADMNEKNSRYVVFKRNVERIERLNNVPAGRTFKLAVNQFADLTNDEFRSMYTGYKGDSVLSSQSQTKSTSFRYQNVSSGALPIAVDWRKKGAVTPIKNQGSCGCCWAFSAVAAIEGATQIKKGKLISLSEQQLVDCDTNDFGCSGGLMDTAFEHIMATGGLTTESNYPYKGEDATCKIKSTKPSAASITGYEDVPVNDENALMKAVAHQPVSVGIEGGGFDFQFYSSGVFTGECTTYLDHAVTAVGYSQSSAGSKYWIIKNSWGTKWGEGGYMRIKKDIKDKEGLCGLAMKASYPTI

SEQ ID NO: 3670 - protein, 150 aa, Brassica napus
MGGSISVPEKSIHEFTVKDSSGKEVDLSVYQGKVLLIVNVASKCGFTQTNYTQLTELYRKYKDQGLVILAFPCNQFLNQEPGTSQDAHEFACTRFKAEYPVFQKVRVNGQNAAPVYKFLKSKKPSFLGSRIKWNFTKFLVGKDGQVIDRY

SEQ ID NO: 3671 - protein, 418 aa, Mesorhizobium sp. BNC1
MRRVVVTGVGLLSPLGLGAEHSWNKLLAGASGAKRIDTFEVDDLPCKIANTIPREGEGGFDPQAFLEPRELRKIADFVAYGIVAADQALADSGWQPNTEEERCATGVLIGSGIGGIDGIAENALLMQERGPRRISPFFIPGNIINMVSGQVSIRHGLKGPNHAVVTACSTGAHAIGDASRLIMFGDADVMLAGGAESPVTRLSIAGFSACKALSTSFNDTPEKASRPYDRDRDGFVMGEGAGVVVLEELEHAKARGARIYAEVVGYGLSGDAYHITAPSEDGDGAFRCMAAAVKRAGLTPAEIDYINAHGTSTMADTIELKAVERLVGNAASRISMSSTKSSIGHLLGAAGAAEAIFSILAIRDNVAPPTINLDNPEVETPIDLVPNEPCKRQIDVALSNSFGFGGTNASLVFRRYQT

SEQ ID NO: 3672 - protein, 340 aa, Iris x hollandica
MAAFKTVKLLPALALLIVAIWASQGEAGRSLGENKSMLERHEQWMAQHGRVYKNAAEKAHRFEIFRANVERIESFNAENHKFKLGVNQFADLTNEEFKTRNTLKPSKMASTKSFKYENVTAVPATMDWRTKGAVTPIKDQGQCGSCWAFSAVAATEGITKLSTGKLISLSEQEVVDCDVTSDDQGCNGGEMDDAFEYIIKNKGITTEANYPYKAADGTCNTKKAASHAASITGYEDVTVNSEAALLKAAANQPIAVAIDAGDFAFQMYSSGVFTGDCGTDLDHGVTLVGYGATSDGTKYWLVKNSWGTSWGEDGYIRMERDVDAKEGLCGIAMDASYPTA

SEQ ID NO: 3673 - protein, 532 aa, Aspergillus oryzae
MLTLSFSALLGIALAWAIHRLAWKYSRLKAICVKRDNKLATQYGCEQPPRLRNWWPLGIDRLIQIWTADSEQRLMDLFTFPFKDVGYTLEQKFLGTIAFGTIDPENLEAIMTNINVFSFGLRRHILFPLLGDGIFTQEGKSWRHSRELLRPQFTRQHYRDLNIFRPHVDRLLHYLTGNGAATDLQPLFFRLTLDTTTEYLFGKSVNSLMPGEATKGQSFANHFDMAQNYVVQRFRLLDLYWLIGGPKFWRSCSAVHRFIDEIIDTRMDSKEKDKDCNSKSIFFDAVARDSRTRRDLRDQLTNVLLAGRDTTACLLSWTFHCLARHPDVLGRLNVEIASVVGTNTDLTRDDFKRMPYLDQVLREVLRLYPPVPVNTRTAHKTTILPTGGGKDGTKPFMVREGENVAFCVYAMHRREDLYGPDAGQFRPERWDEDLPLFQNERTATWGYLPFNGGPRACLGQDFGFVEAAYTVVRILQKYPIVKPDMYKGDIQGRKWLGWSSHQPEGIEMVTEERQKMTIVLSLGDGCRVTLGR

SEQ ID NO: 3674 - protein, 219 aa, Lactococcus lactis
GGLYAPFVEPELEWDFRLKNVISINTSGHKYGLVYPGVGWVLWRDKKYLPEELIFKVSYLGGELPTMAINFSHSASQLIGQYYNFVRYGFDGYKAIHERTHKVAMFLAKEIEKTGMFEIMNDGSQLPIVCYKLKEDSNRGWNLYDLADRLLMKGWQVPAYPLPKNLENEIIQRLVIRADFGMNMAFNYVQDMQEAIEALNKAHILYHEEPENKTYGFTH

SEQ ID NO: 3675 - protein, 575 aa, Archaeoglobus fulgidus
MLINILNAFYAEKRALIGIKLKIRISKIYQTLDNDFSFKRTVFRFSKTKVAFKDIFHSFGHHRIRLLALALCILGSLANFWHSSKNNSSSNSKTNKYCSPLPILMTLPSKENFSEWYHEVIQTAEIMDVRYPVKGLYVWFPFGFKIRQLVYSKLREIMDREHDEVYFPALIPETELGKEGEHIKGFEDEVYWITHGGLTPLDVKLALRPTSETAMYPMFRLWVRNHADLPLKVYQIVNTFRYETKHTRPLIRLREITSFKEAHTVHKDFEEAAEHVKKAIGFYKEFYDFLAIPYMVIRRPEWDKFPGAAYTIAFDTIMPDGRTLQIGTVHHLADNFARTFDIKYEAPNGEHYYAHQTCYGISERCIAALISVHGDDLGLVLPFEVAPVQIVIIPILYKGKEEAVMEACRKLAEKLKAFRVVLDEGEDRPGAKYYKWELKGVPIRFEIGPRDAEKGVAVVSFRDEKRKFEVPLDEVDEGKVLEWARELKQRLRNAAAERMAEKVKFVENTGEIEEWGGVVAVYLCSDEDCGHSVEEHGKSLLGWFEEVPDWLDLEPEGKCVVCGREGRLAALAKTY

SEQ ID NO: 3676 - protein, 113 aa, Glycine max
MTMGLKFFTCLVLTVCIAASVDAALTCGTVTSSLAPCATYLSKGGAVVPGPCCAGVKKLNDMAQTTPDRQQACKCLKAAAKSINPSLASGLPGKCSVSIPYPISMSTNCDNVK

SEQ ID NO: 3677 - protein, 335 aa, Xylella fastidiosa 9a5c
MTQTITVIRGDGIGPEIMDATLLVLNTLQANLNYEFADAGLNALEKHGDLLPEATLNSISKNKVALKSPLTTPVGEGFSSINVALRRKFDLYANVRPAKSFPNTKSRFSDNVDLITVRENTEGAYLSEGQTISPDGEVATSSARVTRKGSERIVRYAFDLARTTGRKKVTAVHKANIIKSTSGLFLKTARDVASQYPEIDFQEMIVDNACMQLVMRPEQFDIIVTTNLFGDILSDLCAGLVGGLGLAPGANIGNEQAIFEAVHGSAPDIAGQGKANPCALLLGAVQMLDHIGQPQNAERLRNAIVATLNAKDSLTPDLGGNGNTMEFAKAIASRL

SEQ ID NO: 3678 - protein, 163 aa, Lactococcus lactis
GGLYAPFVEPELEWDFRLKNVISINTSGHKYGLVYPGVGWVLWRDKKYLPEELIFKVSYLGGELPTMAINFSHSASQLIGQYYNFVRYGFDGYKAIHERTHKVAMYLAEEIEKTGMFEIMNDGSQLPIVCYKLKENSNLGWNLYDLADRLFNEGMASACLSTS

SEQ ID NO: 3679 - protein, 300 aa, Campylobacter jejuni RM1221
MAYIKIKLSNNGKKAFQVLMENLKISINEAQKLIDKKRLFCDGILVEEKNEILNGLVELIVYENNPKGVEIVFENEDFAILEKESGILSHPNGRHCKYSLSDEIWHLWGKEACVAHRLDKETSGLILVAKNKKAQIDLKALFEKKLVQKEYLALANGKIEENFIIDKAINLAKNYDDVKTRMQICKEGKQAITEFEILEYFPKINATLLLCKPLTGRQHQIRVHLHYKNHTILGDPLYGLSKEQIESILDEKLTPKERLKLTGALRLCLHSYRLKFQYKNQNFNINSKINIKEIFNNSIK

SEQ ID NO: 3680 - protein, 134 aa, Solanum tuberosum
DEYGNPVRQTDEYGNPIQQTGGTMGEYGTTGTGYGTQAGHTTGVLGGEQRQHGTLGGMLHRSGSSSSSSSVSEDDGHGGRRKKKGIKDKIKEKLPGGHRDDLAHSTATTTTTGYGMEGTHEKKGIMEKIKEKLP

SEQ ID NO: 3681 - protein, 479 aa, Alkaliphilus metalliredigenes QYMF
MNCKMYIDGQWVEGKEGEKLEVVNPATGDILVYIAKAGYAETERAIESADKAFKTWSKTTAGERANYLTKLYHLMIEHKDEIAKIMTLEQGKPLQEAMGEVVYGAGFVEWYAEEAKRVYGETIPASKENKRIMVLKQPVGVVAAITPWNFPAAMITRKMAPALAAGCTVVLKPASSTPLTAIKIFELCEKAGFPKGVVNLVIGDASKIGETLMNDFRVRKLTFTGSTEVGKKLMTQAGATVKRISLELGGHAPFIVFDDADLDKAVTGALNSKLRNCGQVCVASNRFYVQEGIIDDFILKMKEKLKNYKIGSGLEEGVHLGPLIDQNAYEKVKTHIEDAVNKGAKIEFGGEGFHRGSSAAGGYFYQPTLLSNVTEEMLIMKEETFGPVIPVVSFKSEEEVIARANDTKYGLAAYFFTQSLAKGFRVSEALAYGIVGVNDGVPSTPQAPFGGFKESGIGREGGHYGIEGFLETKYVSFEI

SEQ ID NO: 3682 - protein, 320 aa, Oryza sativa
  misc_feature (144)..(144): Xaa can be any naturally occurring amino acid
  misc_feature (315)..(315): Xaa can be any naturally occurring amino acid
MDMATGAKEVVVVEAYEYEFDLENPFTSPADEPIASLLDAEGHHSPSVSAAASAARREAAGFISKVRYDGELDVHPRVAYLALNYVDRYLSKRQLACERNPWAPRLLAISCLTLAAKMQRAAAISAADIQRGEEFMFDEAKIHXQEQMVLNALEWRTRSVTPLAFLGFFLSACFPQPRHPALLDAIKARAVDLLLRVQPEVKMAEFSPSVAAAAALLAAAGEVAGAHLLGFEAGVAACPFVNSEKLRECGEVMAAACGVGPSWAAAATSAETPVTVLGHHRSASSESERTTTVGSAANSADAKRRCMGPPRQWGXGGPDE

SEQ ID NO: 3683 - protein, 1252 aa, Coccidioides immitis RS
MEKDTIKDRSQTKRQPFRDASNRLNIVHNSSRQTRYDHVALSSEKQMTSSDPPDALNGHDFPPATAENKRISAVLDYHSDPRRNSAISTTSTNSGRSRRKTHIGPWQLGKTLGKGSTGRVRLAKHSVTGQAAAIKIVSKQSAALAQSQSIAAMDKNIDVAPGSRTIPSGIEREVVIMKLIEHPNVISLYDVWENRGELYLVLEYVEGGELFDYVSERGPLPEIEAVRLFRQIIAALSCCHQYNICHRDLKPENILLDFRKNIKLADFGMAALQPAGHWLNTSCGSPHYASPEIINGQRYHGDKADIWSCGIILFAMLAGFLPFDGGDLANTLKLVKRGEYIIPPWFSPEAIDLIQRILQKRPENRISIDQMWLHPLLMKYQAHPIFANSPMDSIGPPPPLPSKDFKKIVTHRRDIDLEVLRSLQTLWHEKRKEDLIENLLNDKPNHEKLFYKALLKFREEQLENYEGPPLGYSSSDYHHISRPLFRLQRRMPSNHGESNVWRRSKFSIATNSSGMREGSSRGPTSAPTIASYDPYRSSRTAIAEPKVEYANVTIHRHQSNDSSAALNSKSSPPTGKLSMDRASVNMRSSPNGGPGTSSRRSSLASYQSRSSVGSHCQRAKSRHSYKRNVSFRHLRGHNPNRDDKRIGMPPGHSQYSLCQERNKMGKRESERVKRLSSERFSSPSLPSPPTCVRPATNKVGELEVGAKPRQSYQYWKEEARKVSQELEQICEEAFNSSSLSSSYTIETGSKYPESPVTSISTPGNLNRYYGQTNTKPVRGQTFESSSSYATRELAETRRRLIEHSKKARADGLPSHLSEVISHLDRLIEGKPSHSVAKNAALAAEAARPPHNVTRNLPSILEERHSVKDFLSGETTSSYIPPPLDLDVWEKKTIRVVPDSTNNLDNIRPLTIRKKRTTLELPTPSNESTSFSQPQRSLSQSLTRNRSTGRRSNTGRFFSGLEPIEENPKSSKKNEFRNSGDTRKWSRFKYRSQSYSDVGPPTPPKDDVPLSRQSSISHMTSGASQGTEEYPVVEDDNLNWIKKNKPVETGKKLLKLFGMKKREKAVHEFGQESNCFNISVTSLDNKDESDIFGTKNHFLSNTQNEAGSPTHPASSQNWFMKFFRIKAASKVIALNAPKARARKEVIKILREWKKYGMEGIRVDKQNSVIRGRVGELNFLRLRPVEFSAELFTVLEYGRHVSLSLIRLKQERGAASSFRKVVETLIAVLKQRKLLVEDTVKAKKMAKVLSLTGQ

SEQ ID NO: 3684 - protein, 91 aa, Prunus persica
ITCGQVSSSLAPCIPYVRGGGAVPPACCNGIRNVNNLARTTPDRQAACNCLKQLSASVPGVNPNNAAALPGKCGVSIPYKISASTNCATVK

SEQ ID NO: 3685 - protein, 520 aa, Bradyrhizobium japonicum USDA 110
MAPVNKSDKDRVIIFDTTLRDGEQCPGATMTFEEKLEVAELLDDMGVDVIEAGFPITSEGDFQAVSEIARRSKNAVIAGLSRAHPADIDRCAEAVKFAKRGRVHTVIATSPLHMRVKLNKTPEQVIETSVAMVARARNQIDDVEWSAEDGTRSEMDYLCRIVEAVIKAGATTVNIPDTVGYTVPEEYTHFMKTLIERVPNSDKAVFSVHCHNDLGMAVANSLAGVVGGARQVECTINGIGERAGNAALEEIVMAINVRNDKFPYWNKIDTTQLTRASKVVSAATSFPVQYNKAIVGRNAFAHESGIHQDGVLKDASTYEIMRPEMVGLKQSSLVLGKHSGRHAFVHKLEEMGYKLGPNQLEDAFTRMKALADRKKDIYDEDIEALVDEEMAASHDRIKLTSLTVIAGTHGPQRATMKLDVDGQIKIEEAEGNGPVDAVFNCIKRLVPHEAKLELYQVHAVTEGTDAQAEVSVRLSHDGRSMTARAADPDTLVASAKAYLGALNKIVMKRQRDTVTTAAAS

SEQ ID NO: 3686 - protein, 401 aa, Arabidopsis thaliana
  misc_feature (56)..(56): Xaa can be any naturally occurring amino acid
  misc_feature (71)..(71): Xaa can be any naturally occurring amino acid
MAAFLQTNIRLEIIPGRYSSLTDHKFRAPYRGRCAAPSPVKKRYNITLLPGDGIGXKLYNMAKNVGQKAGXSGSLEGLEFDFKEMPVGGAGLDLVGVPILLGAIGGITNWDKNEKLLRPEMGLLNIRRDLNVFANLRPATLDALTVLPQLVDASTLKKEVAEGVDMMIVRELTGGIYFGEPRGITINENGEEVGVSTEIYAAHEIDRIARVAFETARKRRGKLCSVDKANVLDASILWRKRVAALASEYPDVELSHMYVDNAAMQLIRDPKQFDTIVTNNIFGDILSDEASMITGSIGMLPSASLGESGPGLFEPIHGSAPDIAGQDKANPLATILSAAMLLKYGLGEEKAAKRIEDAVVDALNKGFRTGDIYSPGNKLVGCKEMGEEVLKSVESKVPATV

SEQ ID NO: 3687 - protein, 337 aa, Streptococcus pyogenes MGAS315
MKRIAVLTSGGDAPGMNAAIRAVVRKAISEGMEVYGINRGYAGMVDGDIFPLGSKEVGDKISRGGTFLYSARYPEFAQLEGQLAGIEQLKKHGIEGVVVIGGDGSYHGAMRLTEHGFPAVGIPGTIDNDIAGTDYTIGFDTAVNTAVEAIDKLRDTSSSHGRTFVVEVMGRNAGDIALWAGIASGADQIIVPEEEFDIEKVASTIQYDFEHKGKNHHIIVLAEGVMSGEAFAQKLKEAGDKSDLRVTNLGHILRGGSPTARDRVIASWMGSHAVELLKEGKGGLAVGIHNEELVESPILGTAEEGALFSLTEEGQIIVNNPHKARLDFAALNRSLSQ

SEQ ID NO: 3688 - protein, 542 aa, Lotus corniculatus
MAARTLSYLLSRSRSLSSSSGAASLLPSLGGKSGGWRNSNNRYSTAAVVEELITPQVSINYTQHLINGKFVDAASGKTFPAYDPRTGDVIAHVAEGDAEDVNRAVAAARKAFDEGPWPRMTAYERSRILLRFADLVEKHNDEIAALETWNNGKPYEQAAKAEVPTFVRLFRYYAGWADKIHGLTVPADGNYHVQTLHEPIGVAGQIIPWNFPLLMFAWKVGPALACGNTIVLKTAEQTPLTALVVAKLLHEAGLPPGVLNIVSGYGPTAGAPLASHMDVDKLAFTGSTDTGKVVLGLAAKSNLKPVTLELGGKSPFIVCEDADVDKAVELAHFALFFNQGQCCCAGSRTFVHERVYDEFLEKSKKRALRRVVGDPFKKGVEQGPQIDTEQFEKILRYIKSGIESNATLECGGDRLGSKGFYVQPTVFSNVQDDMLIAQDEIFGPVQTIFKFKEIDEVIRRANSTRYGLAAGVFTQNLATANTLMRALRAGTVWINCFDVFDAAIPFGGYKMSGIGREKGIYSLHNYLQVKAVVTPLKNPAWL

SEQ ID NO: 3689 - protein, 184 aa, Zea mays
  misc_feature (182)..(182): Xaa can be any naturally occurring amino acid
MKDRHLSLNQTQRVRLEAALQELQSVAPAAASAAAVTVADTIPVNQEDNILKGHGTSDQDGEVVATLCGVVERVNKLVYVRTLRARYKPEVGDIIVGRVIEIAPKRWRLEINFSQDAVLMLSSMNLPDGIQRRRTAVDELNMRSIFEENDVICAEVRGFQHDGSLHLQARSEKYGKLERGQXLM

SEQ ID NO: 3690 - protein, 116 aa, Bacillus subtilis subsp. subtilis str. 168
MSGQMFKVEIVTRPANFEKLKQELGKIGVTSLTFSNVHGCGLQKAHTELYRGVKIESNVYERLKIEIVVSKVPVDQVTETAKRVLKTGSPGDGKIFVYEISNTINIRTGEEGPEAL

SEQ ID NO: 3691 - protein, 731 aa, Solibacter usitatus Ellin6076
MRITVNSICVALLACAAGWAQKAPTMPGIDPPAAKPHAAGRGAAAPAPAAAAYPSPKDLKYPPARSPQMSPSAAFTLPNGMKVLLHEDHDLPVVYGNILVRTGSVLDPPERIGLAQLTGTVLRTGGTALKTGEQLDEVLDNLGGTIETGIGLTQGSLSFFSLKENTDAVLLLLKEMLTQPGFRPEKLDQARAQLRSSIAHRNDKPDTVAQQELRRMIYGGDNPYGWQMQYATIDRITRSDVRSFYQRYFFPANLLFGIRGDFNSAEMKASLEQLFADWTPQQKPVPEFPKVKNAPSPGIFLAEKRDLTQTNFAIGQLGVQYNDKDFAALEIMANVLGGVRGRLAERARGKGNPAEFKVRWTARHDHPGLFEITGNTRSISTVETIKAVQEEVERLRTAEISEDELRVAREAALSAAIFDAGSKDKIFTSLMGDEYYGYPKDFPQAHQKALQAVTRADVMRAAKQAVNPANLTVVVAGNAMLFGDSLDRLGPVAKLDLTIPPAKPEAAELTDATLAQGKQLLAKAQAAAGGADRLGAVRDYTMLAEYLISTAVPSIGGSKIIQMDRWVSPTNFRQDSSMPAGRVSAYTDGKIGWIATPQGWGALAGVQSKQVLGDLFRVYFRLLLSDRLEGRSVNAIDDNTLQVSDAAGQVASVDFDPQTGLIRRVSYDTPQAGGQPIFSEDIFDDFRDIGGVKIPFKITINQGGRKFSDVVVTEYKINTGLKSVDLAKRPQ

SEQ ID NO: 3692 - protein, 368 aa, Tribonema marinum
LTAAITAVLSLAGDGEANAKKYEDIDAAPEERARGITINTAHVEYETETRHYAHVDCPGHADYVKNMITGAAQMDGAILVVSAADGPMPQTREHILLSKQVGVPHIVVFLNKEDQVDDLELVELVELEVRELLSNYDFPGDDIPIVTGSALQALDAISNEPSVKKGDNKWVDKIYSLMESVDSYIPTLIRDVDKSFLMAIEDVFSITGRGTVATGKIDRGIVKVGEAVDLVGLGDTKSTTVTGVEMFQKTLDEGVAGDNVGILLRGLQKSEIERGMVLAKPGTITPHNTFESELYILTKEEGGRHTPFFPGYRPQFYVRTTDVTGEILSFLSDEGEKTLMVMPGDRVKMTAKLISLIAIEEGMRFAIR

SEQ ID NO: 3693 - protein, 558 aa, Clostridium acetobutylicum
MLYNKYVKYPKVKLDNREWPDKQIEKAPIWCSVDLRDGNQALPKPMNVDEKIKMFKMLVDIGFKEIEIGFPSASETEYEFTRKLIEDKLIPEDVTIQVLTQAREHLVKKTFEALKGVKTAIVHVYNSTSELQRRVVFKKDKDEVKSLAIKGAQMVKKYSEYTEYSESKFVFEYSPESFTGTELDYALEVCEAVLNVWKPSKENKAIINLPSTVEMATPNIYADQIEWFCKKLLNRESVILSLHTHNDRGTCTASSELGILAGADRVEGTLFGNGERTGNLDIMNMALNMYSQGVDPELEFSNLNDIVEAYEECTKMVVHERHPYAGKLVFTAFSGSHQDAIRKGLKSLKEGKNKHWEVPYLAVDPHDLGREYEEIIRINSQSGKGGTAYIMESDFGFILPKAMHPEFGKVIKKKSDELDCELSPEQIFKFFKEEYLENRSPYYLKNYKIHSIQNIEEEKNTVDIEAVISVNGKDTSIEGVGNGPVDAFFNAMNNKKYNGCKFISYDEHALNIGSHSKAVAYVQIESQDKKYFGVGISDNIDTASINAIVSALNRSKLK

SEQ ID NO: 3694 - protein, 535 aa, Burkholderia pseudomallei K96243
MLDAHLKTQLKSYLERITRPVELVASLDAGDQSRELRALLDEIAALSPQIFVTERRDAAERAPSFSVGEPGKAAGIRFAGMPMGHEFTSLVLALLQTGGHPIKLDDATIEQIRALDGDYAFETYISLTCQNCPEVVQALNVMALVNPRIRHVMIDGALFQDEVEARRIMAVPTIFLNGETFGQGRSSVKEILAKLDGGASRRAAQALAEKPVFDMLIVGGGPAGAAAAIYAARKGISTGVVAERFGGQVLDTMAIENFVSVQETEGPKFATALEQHVKQYDVDVIDVERADRLVPGRVHEIRLASGAVLKAKTVVLATGARWREIGVPGEREYRNRGVAYCPHCDGPLFKGKRVAVVGGGNSGVEAAIDLAGLAAAVTLIEYGEQLHADDVLQRKLRSLANVTVITQARTTELTGDGAKLNGLVYEDRRTGEAKRIALEGVFVQIGLVPNTEWLKETVELSRHGEIVVDTRGATSVPGVFAAGDVTTVPYKQIVIAVGEGAKASLGAFDHLIRSEAHAVQAADIEASANAEAMAA

SEQ ID NO: 3695 - protein, 222 aa, Ehrlichia canis str. Jake
MLKKKRIVEVSSSILSADFANLSKSIEVLENASVDYIHIDVMDGNFVPNITIGPVVVSAIRECTKIPFDVHLMINSPSNYIETFVNAGADMITVHAESEVHLDRVIKKIKSYGKDAGLSLVPTSHYSILEYIIFELDLVLIMTVNPGFSGQQFIVSQLDKISRVRSMIEKYSLKTKIAVDGGVNIDNAKSVIEAGADILVVGSAIFKAKNVLDYVQKLKSFL

SEQ ID NO: 3696 - protein, 206 aa, Triticum aestivum
MASRRRTLLKVIILGDSGVGKTSLMNQYVNKKFSNQYKATIGADFLTKEVQFEDRLFTLQIWDTAGQERFQSLGVAFYRGADCCVLVYDVNSMKSFDNLNNWREEFLIQASPSDPDNFPFVLLGNKVDVDGGNSRVVSEKKAKAWCASKGNIPYFETSAKDGINVEEAFQCIVKNALKNEPEEELYMPDTVDVVGGNRGQGSSGCC

SEQ ID NO: 3697 - protein, 591 aa, Streptococcus pneumoniae
MTQGKITASAAMLNVLKTWGVDTIYGIPSGTLSSLMDALAEDKDIRFLQVRHEETGALAAVMQAKFGGSIGVAVGSGGPGATHLINGVYDAAMDDTPFLAILGSRPVNELNMDAFQELNQNPMYNGIAVYNKRVAYAEQLPKVIDEACRAAISKKGPAVVEIPVNFGFQEIDENSYYGSGSYERSFIAPALNEVEIDKAVEILNNAERPVIYAGFGGVKAGEVITELSRKIKAPIITTGKNFEAFEWNYEGLTGSAYRVGWKPANEVVFEADTVLFLGSNFAFAEVYEAFKNTEKFIQVDIDPYKLGKRHALDASILGDAGQAAKAILDKVNPVESTPWWRANVKNNQNWRDYMNKLEGKTEGELQLYQVYNAINKHADQDAIYSIDVGNTTQTSTRHLHMTPKNMWRTSPLFATMGIALPGGIAAKKDNPDRQVWNIMGDGAFNMCYPDVITNVQYDLPVINLVFSNAEYGFIKNKYEDTNKHLFGVDFTNADYAKIAEAQGAVGFTVDRIEDIDAVVAEAVKLNKEGKTVVIDARITQHRPLPVEVLELDPKLHSEEAIKAFKEKYEAEELVPFRLFLEEEGLQSRAIK

SEQ ID NO: 3698 - protein, 347 aa, Colwellia psychrerythraea 34H
MNNKKTTSIKRIALLTSGGDAPGMNAAIRSVVLAAHHYHIEVIGFYHGYNGLVCEEHIAMAEPLTLLKVNSIIHLGGTILKSARCQLMHEAKGLQLAADTLNDKNIDALVVIGGDGSFSGLLALQAYWSGQMIGIPGTIDNDLDGTDYTIGFATAVNTGIEAIDKIRDTADAFERIFIVELMGRHCGHITFNVGIACAAEQVLSFENFNANEQSSKLQQLATEITTAKKNRHSSYIIVIAENLWPGGAVELARQLHLQADIECTPCILGHIQRGGSPIAKDRILATKMGVAAVQALIDGESNIMVAEQNNAMNFITLDEAIKHKKVVSKQLIDAQQNILALTAQTQC

SEQ ID NO: 3699 - protein, 430 aa, Zea mays
YCTNHDYFTVIITYELHCDPADTIWYPISVSLSIAFGLLSALLVLILKFHRQITRSFSFLLDRSSSGDTADVEKLLQKYGSLAPKRYRYAELKRITKSFQRKLGEGGYGAVYSGVLAAGAGGTRAREVAVKVLHHARPNGEEFLNEVVSIGRTSHVNIVTLLGFCLEGSKRALVYEYMPNGSLDRYIRSETESDPAGTAALGWEALQEIAAGIARGLEYLHEGCNTRIIHFDIKPQNVLLDADFRPKIADFGMAKLCNPKESILSMADARGTIGFIAPEVFSRGFGVISTKSDVYSYGMLLLEMVGGRSNAKACAADKSSGGGELFFPLWVYDHLLLEDGVGVLRGGGAGGSGEAAAGEEIARKMALIGLWCIQTVPASRPSMSRVLEMLERSVHELAIPPRPYHTSPSNSPSPSHPSSYPSSTSDFTQR

SEQ ID NO: 3700 - protein, 399 aa, Debaryomyces hansenii CBS767
MDDFDRDVDNELEFSAKSTKNIKVHATFESMNLKTDLLKGIYGYGFEAPSAIQSRAIMQIISGKDTIAQAQSGTGKTATFSIGMLEVIDTKSKDCQALILSPTRELAQQIQSVVKHLGDYMNVHTHACIGGTHVGEDIKKLQQGQQIVSGTPGRVVDMIKRRNLATRNIKMMILDEADELMTKGFKEQIYEIYRYLPPGVQVVVVSATLSREVLEVTGKFTTDPVKILVKRDDITLEGIKQYHIQCEKEDWKFDTLCDLYDSLTITQAVIFCNTKVKVNWLTDQMKKANFTVVAMHGDMKQDERDSIMNDFRTGNSRVLISTDVWARGIDVQQVSLVINYDLPTDKENYVHRIGRSGRFGRKGVAINLVTKEDVDELRDIERFYRIRIKEMPVNVNDIM

SEQ ID NO: 3701 - protein, 330 aa, Rubrobacter xylanophilus DSM 9941
MAETKTYREALREAMVHEMDRDESVVLLGEDIGVYGGTHLITDGLYDQYGPRRVIDTPISENGFTGAAIGMAMMGMRPIVEMMTWNFSFLAADQIIQNAAKVRYFSGGQVKVPLVIRGPNGGGVQLSAQHTHSLESFYGHFPGLKVVAPVTPNDAKGMMLTAIRDDNPVIFLEAGALYGTKGEVEDGDNAVPFGKARVAREGTDVTLIAYGRQVNLCLRAADTLAEEDGVSAEVIDLRSLRPFDEDAIVESVRKTHRAVAVQEQWRWFGVASEVAAIIQDKAFDYLDAPVERVSGAEVPAPYARNLELAAFPSEKAVANAARRVLYMEEK

SEQ ID NO: 3702 - protein, 808 aa, Arabidopsis thaliana
MESPHSNLLPEVDSLPDGFVDGATEPPLNSPKTQEETTNHETVAIEKTEKPRTFPVPLCETDGNEDDEVADLIQESIKLELEFEQKEKEASPPISQTLSEGSTQNSTLSKEMDSLKPKKQEVVESKRKGSKNMFKSEKEFLEFMLKYQQVLSERDSAITVRDKLESLCRELQRQNKMLMEECKRVSTEGQTLRSDLSTKFQDAIMDVSIKLDEQKNESLTQLKENEMLRTKLKHLADQFMLSEQQHEQRLKQKTLELQISALKIKQHEEKLIHEQSQMKVYADQVSQLLSTEKNLRLQLTSDGDKFQQFQDALVKSNEVFETFKQEIDKMSKAIKELRKENAFLKNKTEKSDITLIELVEERERLKKLLEKTKKQKDKLESLCRSLQAERKQKETNSSQENDSAFTKFTTDLEKNSYFNICHNDQLILCNLKPNRTEPFEPKKKRMLGILRQRAIDGASTLRRTRFALVSARSYAAGAKEMTVRDALNSAIDEEMSADPKVFVMGEEVGQYQGAYKITKGLLEKYGPERVYDTPITEAGFTGIGVGAAYAGLKPVVEFMTFNFSMQAIDHIINSAAKSNYMSAGQINVPIVFRGPNGAAAGVGAQHSQCYAAWYASVPGLKVLAPYSAEDARGLLKAAIRDPDPVVFLENELLYGESFPISEEALDSSFCLPIGKAKIEREGKDVTIVTFSKMVGFALKAAEKLAEEGISAEVINLRSIRPLDRATINASVRKTSRLVTVEEGFPQHGVCAEICASVVEESFSYLDAPVERIAGADVPMPYAANLERLALPQIEDIVRASKRACYRSK

SEQ ID NO: 3703 - protein, 1151 aa, Oryza sativa
MSSKAIREFDAKLLVNYWLPRSPLAHADLKVNADFVAPAPKVAQIAWDPTTNSITDESQLPAWVQSTKFVAKPDQLIKRRGKAGLLKLNSDWADAKAWIQERAGKAQQVESVTGTLNNFIVEPFCPHPADTEFYVCINSAREGDWILFTHEGGVDVGDVDAKALKLLIPADPAAPFPKREVWTSTLLTGVPAAKREVLTDFLIRLYSVYVDLHFAYLEINPLVATDDGQIAYLDMAAKLDQTADFICGPKWAIARDPSIVMGIAAGAAGNKGEDRGPPMYWPAPFGRDLTKEEAYIAKLDAGTGASLKLTVLNATGRIWTMVAGGGASVVYSDAIAAHGYAHELANYGEYSGAPSEGQTFEYAKTLLDLMTRGEVNPQGKLLIIGGGIANFTNVASTFKGIIRALKEYKVSLAKHGVRIFVRRGGPNYQEGLKAMRLLGEDLGVEIQVFGPETHITDIVPLALGVKTFEEVTLASQQQNALPSGAQTPVHGGANGAKAEDKAIGTVDHTTGERVQPQDQIVHFGAGAAGERPAYRPFDANTRSLVFGLQPRAIQGMLDFDFSCGRQTPSVAAMIYPFGGHHIQKFYWGTKETLLPVYTSIKEAVAKHPDADVVVNFASSRSVYSSTLEVLDCPQIRALALIAEGVPERHAREILHRAEKAGVLIIGPATVGGIKPGCFRIGNSGGMMDNILSSKLYRPGSVGYVSKSGGMSNELNNILSITTNGTYEGIAIGGDRYPGTTFIDHLLRYEQDPECKMLVLLGEVGGIEEYRVIDAVKKGIIKKPIVAWAIGTCAKMFTTEVQFGHAGSMANSDMETASAKNAAMKAAGFIVPETFEDLPQVIREVYNKLVAQGVVVPKPERPAPAIPVDYKWAQELGMVRKPAAFISTISDERGSELMYSGVKISEVFESGMGIGGVISLLWFKRRLPDYCTKFIEMALMLTADHGPAVSGAMNTIITSRAGKDLISSLVSGLLTIGDRFGGALDDAATEFSNAYDRGMTAREFVDSMRKGNKLIPGIGHKIKSVSNPDYRVQVVKEFVLKNFPSHKMLDYALAVEKVTTAKKDTLILNVDGCLAVCFVDLLRDSGAFTIEEARDYLSYGFLNGIFTLGRSIGFIGHHIDQKRLKAGLYRHPADDFHIEMATPARVMGTLKK

SEQ ID NO: 3704 - protein, 117 aa, Triticum aestivum
MARMALLAVFAVLAALAVAEMASGAVTCGDVTSAIAPCMSYATGQASSPSVGCCSGVRTLNGKASTSADRQAACRCLKNLAGSFKGISMGNAANIPGECGVSVSFPINNNVNCDTLH

SEQ ID NO: 3705 - protein, 216 aa, Thellungiella salsuginea
MNSFSAFAEMFGSEYESPVTVGGDYCPTLATSCPKKPAGRKKFRETRHPIYRGVRRRNSGKWVCEVREPNKKSRIWLGTFPTAEMAARAHDVAAIALRGRSACLNFADSAWRLRIPESTCAKDIQKAAAEAAVAFQAEMSDTMTSDHGLDMEETTVEVIVTEEEQSEGFYMDEEAMFGMPRLLANMAEGMLLPPPSVQWGHNYDCDGDADVSLWSY

SEQ ID NO: 3706 - protein, 391 aa, Brucella suis 1330
MAKSKFERTKPHVNIGTIGHVDHGKTSLTAAITKFFGEFKAYDQIDAAPEERARGITISTAHVEYETANRHYAHVDCPGHADYVKNMITGAAQMDGAILVVSAADGPMPQTREHILLARQVGVPAIVVFLNKCDQVDDAELLELVELEVRELLSKYEFPGDEIPIIKGSALAALEDSSKELGEDAIRNLMDAVDSYIPTPERPIDQPFLMPIEDVFSISGRGTVVTGRVERGIVKVGEEVEIVGIKATTKTTVTGVEMFRKLLDQGQAGDNIGALIRGVGREDVERGQVLCKPGSVKPHTKFKAEAYILTKDEGGRHTPFFTNYRPQFYFRTTDVTGVVTLPAGTEMVMPGDNVAMDVTLIVPIAMEEKLRFAIREGGRTVGAGIVSSIIE

SEQ ID NO: 3707 - protein, 365 aa, Pyrococcus abyssi GE5
MRAIIIGIGQCGGKIADIFSLVDFEAIAINTSRGDLEYLKHIPQDKRILIGESIVGGKGVNANPVLGREAMKRDLPMVMKKINSMVGYEDVDIFFLTFGFGGGTGAGGTPVLAEALKEEYPDSLVVAIGALPLKEEGIRPTINAAITIDKLSKVVDSIIAIDNNKLKESDEDISQAYERINYTIVERIASLLALIDVPGEQTLDASDLKFVLRAMGSFATVGYAKADAEKVKSLSRLIIRSFENEGLYLDVSLESALYGLVAIHGPPEVLKAKDIFEALNELTQRIRGKQIFRGFYPDPRERSVEVVTLLSGIYESKSIEDIILTAKKYAREFMKAKEEGEAKKRELLSGLPDFDDVYSGEESEG

SEQ ID NO: 3708 - protein, 591 aa, Rhodospirillum rubrum ATCC 11170
MCGVCGEIRFDGQFAGTTAVDRMTAKLAPRGPDDGGILVHGPVALGHRRLSIIDLSPKAAQPMVDSDLGLSIVFNGCIYNYPALRSELEALGYRFFSGGDTEVILKAYHAWGTACVKRFNGMFAFAIHERDSGKVVLARDRFGIKPLYLAEVDGGLLFASSLPALLATGRVDKAIDPLALRFYISFHAVVPAPRTILKGVRKLPPATLRVVSADGSSFDEVYWRLDFRALPGEDGRSAKDWEDGLFEAVRAAVARRIIADVPVGVLLSGGLDSSLIVGLLAEAGQRDVETFSIGFEEANGEKGDEFFYSDLIAERYATRHHKIFIPEADMIAALPGAIAAMSEPMVSYDNVAFYLLAREVSKRVKVVLSGQGADEIFGGYHWYRPLVGSTDPVADYAAHFFDRTPERLARHLSPAWLGTTDEARAFVAAHFAEDGAPDPVDKALRLDSTVMLVEDPVKRVDNMTMAFGLEARVPFLDHQLAEFAGRIPSSLKLAQNGKGILKEVARRVVPAAVIDREKGYFPVPGLKYIEGSRLDYVRDGLSSRAARQRGLFREDYLASLYENPRDAITPLRGSELWQVGLLELWLQEHGI

SEQ ID NO: 3709 - protein, 954 aa, Blastopirellula marina DSM 3645
MFVDAADPPKKLFLRLMEAFAVGDSLPDSVRRALPWLVREFECRFGCVSVPGDSANPQTLAAQLWHPEELIDCDDVAQRLRRRYSEAAPAEAGAAVRRAFLEQRPMIEPLDSTMSADQSLSILAIPVFLDDKPVLALELFGDSERLEDPQIDVKMADAMRGLSVLAACWRRDESYQRLAQIVDSSYDAIISRDVDDKITCWNAGADAVYGYQAEEALGKPISILFPPTRREEEPEITDARLHGKRLTQFETERRRRDGRIISVSITVSPLRDANERIIGVSTIERDISERKFAERELQKAKAAAERANRARSEFLANVSHEIRTPMNAIIGMTKLTLAEDLPEAVREYVETANSSAHTLLSLLNDILDFSKIEAGKFTIDRSEFNLRQTIDATMRALSERAFSKGLEVAIDYDPRIPEELIGDAIRLRQIITNLVSNAVKFTERGEVLLSVKLLRRFPREVRIRFTISDTGVGITPADQKRIFEPFTQVDSSSTRNFGGSGLGLTICHELLELMGGRLELNSEPGVGSRFSFALLFPRTRTAESRLRSAILPPEFAGMQVLVVDDNETNRKILRELLRSWELDAFTTSDAEEAIRLFSEKQKVGDPFDLVLIDALMPGIDGYDLCKRLGEVAGKTPPIVLMAAPSDRHHFREREEDLPIRSTLAKPITASSLHDSLVEAMSIAAPESQRSRSVEVLSSFHALRVMLVEDTAANRKLVTSLLKKRGHIVVEAHNGREALEKFRDDEFDVILMDVQMPIMDGLQTTAAIRQIEREEGYEPTPIIAMTAHAMQGDREKCLGAGMDAYISKPIDIDDLLATLESLANDFSSNMNGENESNPIKIRPQGEPLHLESTLERLGGDLELFRDFVGFYDEDSQALLSDLAAASQAGDARRLELVSHSLKGLAANVGGETAAHVAAEMEEAVRSGKMEQAQGMVDTLLVEFDRLAKALEPFRR

SEQ ID NO: 3710 - protein, 629 aa, Rubrivivax gelatinosus PM1
MQFILVLLVFPAFVFFGVQGYTGMSEGNAVVAKVAGTSITQAEWDAAHRNQVERLRAQSPGVDLKLFDTPEAKQRTLDALVRERVMLVAADKLHLTASDERLQRVFASDPQLAFLRKPDGSLNADVLAAQGMSARQFEQQLRQDLAMRQVLQGVSGTVLAPSRPTSTALDALLQQREVRIARFEAQKFVTKVNVTDADIEAYYKDGRHAAEFETPEQASIEYLVLDLDAIKSGLTVSDDDLRKYYAENESRYVAPEERRASHILIKAEKGASAEQREKARTKAATLLAEARKDPAKFAELAKKNSEDPGSAVQGGDLDFFARGAMVKPFEDAAFALKPGQLSEVVESDFGYHVILLTAVRGGEKKAFESVKAEIENEVKQQLAQRRYAEAAEIFSNTVYEQADSLKPAAEKLKLTVRTASGVARTPAQGTTGALASPKFLEALFAAETLRNKRNTEAVDLGGSQLVAGRIVEYAPSRKLPLAEVKDRVRERVVVEQSAALARKEALARLAAWKGGAEPEGLEPAMTVSRGRQQELPPALIDAVMKASPAPLPSWTGVDFGDEGYAVVRVDKLLPRDAAAGDDKRLQQQYGQIWGAAEDEAYYAALKERYKVKITGVAKSADAEQSGASR

SEQ ID NO: 3711 - protein, 207 aa, Triticum aestivum
  misc_feature (51)..(51): Xaa can be any naturally occurring amino acid
  misc_feature (66)..(66): Xaa can be any naturally occurring amino acid
  misc_feature (83)..(83): Xaa can be any naturally occurring amino acid
MHPTRWELSHMVDLQAAALVISVVAAEVGAGHSNSLLQNPNHLQLLQRALXASGDDLDFAIRSLKXTCALESAEGYLFGCCWXEPENGLSTALKLSAEGNGQWDAISGNPPATDNCQTNHHSSEWVELFVREMMSASDINDARARASRALEVIEKSIMERTGAEAVQNLHKENTMLKEQLPIALRENAVLNAGGLHSNTSAQKEFDD

SEQ ID NO: 3712 - protein, 262 aa, Zea mays
MAATLFSTSLLPQFLSLSAKPAAAAPSAAAFPSGLPQLHALSAAAVGFRPLEPVRAAATAAVTEELEAEGRSGGDEFSDDLRVFVGNLPFSVDSAQLAGLFEQAGSVEMVEVIYDKLTGRSRGFGFVTMSSVEEVEVAVDQFNGYVLDGRSLRVNSGPPPPRDRSSPSPQRPRGDANRVYVGNLSWGVDNSALANLFSEQGEVLEARIIYDRESGRSRGFGFVTYGSAEEVENAISNLDGADLDGRQIRVTVAESKPPRQQY

SEQ ID NO: 3713 - protein, 287 aa, Phaseolus vulgaris
MAATAAGIASLFSSSINSVKCLRSKHCSMMDPLMTAMLSNRIFAPVSHLVVEPLSIGGTTSHRLWGPRISAAVAQEEVVVVDDAGLVEEEKVEENEGEEVVAEQDSDESFASTKLYFGNLPYSVDSAKLAGLIQDYGSAELIEVLYDRDTGKSRGFAFVTMSCIEDCNAVIENLDGKEYLGRTLRVNFSNKPKAKEPLYPETEHKLFVGNLSWSVTNEILTQAFQEYGTVVGARVLYDGETGRSRGYGFVCFSTKEEMEAALGALNDVELEGRAMRVSLAEGKRAQG

SEQ ID NO: 3714 - protein, 160 aa, Hippophae rhamnoides subsp. sinensis
DEYGNPIHNGSTGINTTGYQQQTAGLYGTGHGSGYGTGGTQFGTTQHTAGHGTGGTLTSTAPAGHGQTKLRRSGSGSSSSSEDDGQGGRRKKGLKEKIKEKLPGGHKDQHQPGQYKSVTTTIITPDSGYYEQSGQQHQQQHDKGIMDKIKDKLPGSFSLI

SEQ ID NO: 3715 - protein, 253 aa, Zea mays
MSAAEPEAHAASDGFDRRRRELQAFDDTKAGVKGLVDAGVTAITAIFRHRPAGVPGGDDLVPAAVPHGRGRRHHPEVAARVRRAAETAGFFQVVNHGVPRELMAAALAGVRRFNEQQAEAKRRFYTRDTARKVRFTSNYDLFQSAAASWRDTLFCELAPDPPRPEELPEAVRGAMLEYGDAATELALRVLELLSESLGLPSDHLREMGCARSLNVASHYYPPCPEPHLTLGTSRHADATFLTVLLQDAMGGLQ

SEQ ID NO: 3716 - protein, 1483 aa, Pseudoalteromonas tunicata D2
MFGVNFKIALSKTSKWFLLFCSITLIIGILSANYYCQKIKNENKLDLEQKIALELNKISINVQDAIHRYEYGLQALRAAVQTVGFSDFKYQNHLTYFKSRDYHKEFPGARGFGVIKKISKKQLPEFLAQANAERSKPFELKQLDSPQDLLFIIQYIEPEEFNLQAIGLDIGSESNRRFAAITSAASGFAQLTGPITLMQADEQKLHGFLLLLPIFSNNDQHTLLGWVFSPLLINEILDVVADNNVHFKIEIADSYLNESTLFYAGDIDTTTKSAFKISKTNSIYGRQWNISITPTNDFIHSLNYRDPTQVYFQIIALTFIALVFVFFLTQLIARRIEIIKQKLSYETVVKNASESIIGVDAYFAILHWNASADHLFQFTQKNAQHKPLINWLSLFINHDKLIAIYKQVARGEQITNMAFSHMGIESTSDKFLLLNFIPMVRAGTFIGATISISDITAIKTLQTQLENHNKQLESKVTEQTQLLEQKSNFQKSVLNSSQNAIIATDKEGVITLFTQSAALLLGFEEAQVIAKKNIMSLISSDKSTLKQDTFKLWVDKTTDSTCPSLCFFQTKDGLDIPVSITISDILDEHSELSGYLIVADNLTEKKSLEHHISLVNAALDNSQDMLLWLDESGHLLHSNPYACVLLEYTQNNFNQQNIHTLLKFEQGENWAHLKQKIIKTQRLSCERNFLKATGTTIPMLISASVLTIDKKTIIYFAAKNITERLKEEAELKLALHQADAASKIKTDFIANMSHELRTPLNAINGLLQILELSKLTQEQLSTLDSAKAEVIGLNQTINDIMDLTSVERGELILEEQDFNLDELLNTIGTQLNTLADDKPIEIHFSLTEDLPLAMHGDANKLKQILWNIASNAVKFSLKGEVVLSFSVTISNRNSFWLNIAISDTGIGVNQDKLEQIFDLFTQVDNSNTRQYGGLGIGLTIASQLVKLMGGSIKVCSQLDAGSTFSCSVLMQPAKSYVPTKLTNPHLLNILIVDDNPTSLNILANTVHLLGCNATLAQSPEKGLALFKAALAKKPIFDLVLLDWKMPDIDGWQLAEQIRQCTTDEYLPLLIMVSAHGRQLLAQKNNQSNQLLNGFLSKPVTRVMLLDAISDAIAAAQHTSLKTKLISHQQPLLNKRILLVEDNPTNQLIAKTLLDSQGANTVIANGGRQALTELDNSLLPFDLILMDIQMPDIDGYETTQLIRANTKYGNLPILAITANVMENDKKKCLASGMNGHIAKPFQLEELIQHIVAATLPPSEVEPLAAAKTIDHNIDESVMLFCQKNAINIKQSLYLFNFSIPLYIKTISLFLDDLTHYKTVLNQPTEQLSHKEIKLIFHTLKSTAESLGFTDLGAFAKEIENQLNGEDEPDQLLVSQQLHTFKSLNEQALQAIPTLLQLLDPNSIKQAIVNHVTEQKINPHAFALLVEEVRTFNMRAIDSFQKISTPLRAVSNELCDELATNLNKLKFKEAKIILEQLRILIKGLH

SEQ ID NO: 3717 - protein, 436 aa, Geobacter sulfurreducens PCA
MNYVIIGNSVAAVGAIRGIRSIDQQGNITVISRERHNAYGRPLISYLLGGLVSEKRMAYLPEDFYEKNRVNLLLNSEVTGIDTAARQVRIAGGDTIGYDRLLVATGGDPFIPPIEGMADKDRIFTFTTWDDAAKLKGIASDIGRVVVIGGGLIGLKAAEGLHLIGKQITIVELADRILSAAFDRPAGRVVAKKMKANGIDVITEDTVVRIEGEGAEITGVTLRSGDFIPCDTIIVAIGVRPACGFLKGSGVEVNRGIVVDDRMETSVEGIYAAGDVAEAKDFFSGVKNPMPIWPDAYIQGDIAGVSMAGGTKAYEGGLAMNSIELFKVSTISMGITNPAEPKEYEILTYQDLENYQYRKIVIKDGLLAGAVLVGAVDRAGIFSGLIREKIAVVPFKDQLLAPDFGFANLPKDIRTALFAPAGKVTETGRPAVAVGH

SEQ ID NO: 3718 - protein, 602 aa, Lycopersicon esculentum
MASAVLASRNESSWAQSGGAGGGFMGKTPYSHTQLNPNHNPNPKKKQKQFHHTSNGRHMDDSPAVTQTASDDAYSFNQRPIESTTNVDGLNFGGYLTFNVVSYNKAEVNELRSRLMAEVEQIRNLKDRIESGQLSTTNPRSQGKSKKQSGNKRPTPSGSSKDLKKLPNGVENRNFGNPGGVDGVKAIGTESMMKECRQILAKLMKHKNGWIFNIPVDAEALGLHDYHQIIKRPMDLGTVKSNLAKNFYPSPFEFAADVRLTFNNALLYNPKTDQVNAFAEQLLGRFEDMFRPLQDKMNKLEGGRRDYHPVDELQGSSWNHIPTPERVKKPKPTPVPNISKKQERMQNHSSASTPSLPVPPPNPPARQQSPLSTPSPVRAPAAKPQSAAKVPTMGKQPKPRAKDPNKREMNMEEKHKLGVGLQSLPQEKMPQLVQIIRKRNEHLAQDGDEIELDIEALDTETLWELDRFVTNWKKMVSKTKRQALMNNLGPPSASAAASAATTSVAEADGPTTSEKNDSFKKAKKGDVGEEDVEIEDDEPATHFPPVEIEKDEGGGRDQENGGGGGSSSSSSSSSSSSGSSSSSDSDSGSSSGSDSDADDAHS

SEQ ID NO: 3719 - protein, 561 aa, Yersinia pestis biovar Medievalis str. 91001
MATPLLRTCIGVVTVANHPRAGQPAQQSDLINVAQLTSQYYVLQPDAEDPAHAVKFGTSGHRGSSVRHSFNEAHILAIAQAIAEVRHQHGISGPCYVGKDTHALSEPAFISVLEVLTANGVDVVVQQDNGFTPTPAISHVILCHNAQGKALADGIVITPSHNPPEDGGIKYNPPNGGPADTNLTSVIEKRANQLLSQNLKGVKRQTLDKAWQSNHLREQDLLQPYVEGLVDVVDIPAIQQAGLKLGVDPLGGSGIAYWQRIAEYYKLDLTLVNNAIDQTFRFMHLDHDGVIRMDCSSESAMAGLLALRDKFDLAFANDPDYDRHGIVTPAGLMNPNHYLAVSINYLFQHRPQWGAGVAVGKTLVSSAMIDRVVADLGRKLVEVPVGFKWFVDGLHDGSFGFGGEESAGASFLRFNGTPWSTDKDGIIMCLLAAEITAVTGKDPQRHYDDLAQRFGAPSYNRIQAPATQAQKNALSRLSPEMVKANTLAGDPITARLTNAPGNGASIGGLKVMTENGWFAARPSGTEEAYKIYCESFLGAEHREKIEQEAVKIVSEVLAEAK

SEQ ID NO: 3720 - protein, 228 aa, Anabaena variabilis ATCC 29413
MNAADDKTIVREYFNSTGFDRWKRIYGDGEVNKVQLDIRNGHQQTVDSVIGWLKNDGNLAELSICDAGCGVGSLSIPLATEGAKVYASDISEKMVEEGKQRALETLGNAENPTFAVQDLESLSGSYHTVICLDVLIHYPQEKADEMISHLCSLAQSRIILSFAPKTCALTLLKKIGSFFPGPSKTTRAYLHREADVIKILESNGFAIQRKEFTKTRFYFSRILEATRP

SEQ ID NO: 3721 - protein, 347 aa, Thermococcus kodakarensis KOD1
MYRVAVIPGDGIGPEVIDGAVRVLKAVTGRVRFEYYEGGVDVFQECGSPIREEDLEEIRRSDAVLFGATTTPFDLPGYRSLILTLRKELGLYANLRIIPDLRTGREIVIVRENSEGLYFGIGAVVNGRAVDVRLITREGAERIARFAVEQAKARGSFITFVHKANVLTGDKFFRRIVREVAGEEGVEVRDAIIDSFTIKLVRNPWEHGVILSENLFGDILSDLATVHAGSIGIVPSGNYGDGIALFEPVHGSAPDIAGKGIANPIGAILSGAMLLDYLGLDGSLIRAAVRGYVVNGELTPDMGGRARTEDVVRGIIGEIEDLLSMDEVWRDEIRLSRLESDISRMAG

SEQ ID NO: 3722 - protein, 2981 aa, Arabidopsis thaliana
MALGDESEVFESENCHGDETERNMKVLFGGFKRLCADKVQHEEKLESMDSVLRQVVATLERMEIREGKRVEQGEHSCQSPRHSFSSSMPQRGAGESPILLDNRSSLIRRIEMPVFDGSGVYEWFSKVERFFRVGRYQDSDKLDLVALSLEGVALKWFLREMSTLEFRDWNSFEQRLLARFDPVKIHSSPEVLMPTTLIHVVAHETESRCTEELIEEDESSVRKKSNPEIVLITQKKSFPRFQNVATIVVGEFQEGTWFFDDKSKDNEANNSSDSKLKFGAYKVLDKILIRSHNLKQRRKLSLSPKNWMFKFKNRNLQQNRSKMDPCQAIEFSNIHYMYLCFSANVGLVRKNKSFQSLRLKKQAHMSRDLKKLESISSEELQPALPIVETLGDEDMVALQSDLRRLGEANFATIDSAQLLRLDDATLMNSALKRKCSKSWHFIYKHYKVRMQNLHTGIYKTQRPWHCLVHEANNTDSHLWHRWKTKVETLQEISEFLSWGLVHSHSSEVISFLGFSHGPLVTVNGASSDKVIDAAATSIFSEAIGLQQYEKVMILCMRLFTCMTLTGMMIVLFSSGNRCIDIENLTLPHNFSCSDEESRDHLFLTCTYSAQLWLQILARIDPNRSLFVSWAELLSWLRASSVSAPSTLRKVAAQTSIYHIWKQRNNVIHNQLIISNVTVFKLINREIKNIITARQHRKRYEVASMSRTSHVNIVSLLGFCYEGSKRAIIYEFLENGSLDKFISSKKSSNMDQSALYGIALGVARGLEYLHNGCRARIVHFDIKPQNVLLDDNLCLKVSDFGLAKLCEKKESILSLLDTGGRYMLGARNKTSIEVSVSNTSSMYQNTTLDYTKTKKCGNITADFPFWGGNRHKPCGHPLLELHCNNNNITSLYISNQEFYVRQINQTSNTLTLARSDLLGSFCSSYAYNTTTLPPEIFELSPTYKSLTVLYHCDPKLSYRSSYTCPALGTFSMSQSVDYQYSCQNSFTVNVPTSFHPEERGLNLTNLESALRKGFEVKLVIDEIPCQQCSSTRGICSFNGTTQSCCNATSPSGGVSCVPYQHSADEVYRRCSESFSCGSQRDLNYPLWKPGREECGHPNFKLNCSGGFAEINIASVKFRILDSYRSLIRLARSDYIGDLCPANPLTAPFIEKFLPVLELTGETELLTLYYGCRFNSSDIPANIYVGELGCDEGRSYYVTRNLSSPLLDSSRGVLNNLREMCKRNVSVPASGPALFDLQTRPNQDNLKMALDQGFRMLITSDCERCRGSGGACGYNQTSSGFGCYCKDGKCGYEYDALGALTGVVIVFLVLLCPCFRVQIFRKRKTSDEVRLQKLKALIPLKHYTYAEVKKMTKSFTEVVGRGGFGIVYSGTLSDSSMVAVKVLKDSKGTDGEDFINEVASMSQTSHVNIVSLLGFCCEGSRRAIIYEFLGNGSLDKFISDKSSVNLDLKTLYGIALGVARGLEYLHYGCKTRIVHFDIKPQNVLLDDNLCPKVSDFGLAKLCEKKESILSLLDTRGTIGYIAPEMISRLYGSVSHKSDVYSYGMLVLEMIGARKKERFDQNSRSDGSSIYFPEWIYKDLEKANIKDIEKTENGGLIENGISSEEEEIARKMTLVGLWCIQSSPSDRPPMNKVVEMMEGSLDALEVPPRPVLQQISASSVSDSFWNSEESSSASDILVFSTNSKLESSSVRLCFSLDSMNLSWQRSDLYFSPVITLPTLNSTNNILQREETVKTENKSQESIPEVVSYAVKTSPSFSEFGLAKLCEEKESILSMLDTRGTVGYIAPEMISRVYGNVSDKSDAYSYGMDLESCKSGRHIEDGINSEENELAKKMTLVGLWCIQPSPVDRPAMNRVVEMMEGSLEALKVPPRPVLQQIPTSNLHESSILSEDVSVYTEGPLKNILVNALWCLVDNVKLFAAQVDAQRSTSPWQTLSGDAPLVIARGGFSGLFPDSSLAAYQFAMVVSVADVVLWCDVQLTKDGHGICFPDLNLANASNSEEVYPNRQKSYPVNGVTTKGWFPIDFSLTELQKVLFSLIRGILSRSGKFDENGYSISTVQNVATQMKPALFWLNVQHDEFYEQHNLSMSSFLLSTSRTVSIDFISSPEVNFFRKIAGGFGNNGPSFVFQFMGKEDFEPTTNRTYGSILSNLSFVKTFASGILVPKSYILPLDDKQYLLPHTSLVQDAHKAGLKLYASGFANDVDIAYNYSWDPVSEYLSFVDNGNFSVDGMLSDFPLTASASVDCFSHIGRNATKQVDFLVISKNGASGEYPGCTKLAYEKAIKDGSDVIDCPVQMSSDGIPFCSSSIDLVNSTTVGQTHLRNRSIIVPEISSVAGIFTFSLTWHEIQSLTPAISNPFRENGMSRNPNERNSGNLISLYEFLNLAKNSTSLSGILISLENVVYLREKKGLDVVKVVLNRLTETGYIVGTLKVMIQSTTRLVLVDFKNQSTYKTVYKIKETIGNITDSAIEDIKKFANAVVINKASVFPNSDSFLTGQTTNVLERLQKFQLPVYVELFQNEFVSQPFDFFADETVEINAYIFGAGINGTITEFPYTAARYKRNRCLGREEVPPYMLPVNPGGVLTLISTSSLPPAQDPNPIFTHDDVTEPPLPPVIAKSPTSTLGTPSTIAKPLSLFITFLLLLDQRETRLRQQKLKALIPLEHYTYAQVKRITKSFAEVVGRGGFGIVYKGTLSDGRVVAVKVLKDTKGNGEDFINEVATMSRTSHLNIVSLLGFCSEGSKRAIIYEFLENGSLDKFILGKTSVNMDWTALYRIALGVAHGLEYLHHSCKTRIVHFDIKPQNVLLDDSFCPKVSDFGLAKLCEKKESILSMLDTRGTIGYIAPEMISRVYGNVSHKSDVYSYGMLVLEIIGARNKEKANQACASNTSSMYFPEWVYRDLESCKSGRHIEDGINSEEDELAKKMTLVGLWCIQPSPVDRPAMNRVVEMMEGSLEALEVPPRPVLQQIPISNLHESSILSEDVSVYTEG

SEQ ID NO: 3723 - protein, 295 aa, Triticum aestivum
MDGNKGPVVVTGASGFVGSWLVMKLLQAGYTARATVRDPANVEKNKPLLELPGDKERLSIWKADLSDEGSFDDAIAGCTGVFHVATPMDFDSKDPENEVIKPTVEGMLSIMRACKEAGTVKRIVFTSSAGSVNIEERQRPAYDQDNWSDIDFCRRVKMTGWMYFVSKALAEKAAMEYASENGLDFISIIPTLVVGTFLSAGMPPSLVTALALITGNEAHYSILKQVQLVHLDDLCDAMTFLFEHPEANGRYICSSHDATIHGLARMLRDRFPEYSIPQKFAGVDDDLQPIHFSSK

SEQ ID NO: 3724 - protein, 640 aa, Kluyveromyces lactis NRRL Y-1140
MIKLPAKLLGSRFYSSVTNQNRYSVTRHNAPKKCPESGHYNKIPIGKEAARLQSQPKVTRLSVDGPIECPLEGFQLLNSPLFNKGSAFTLEERKAFGLDGLLPPQVNTLDEQVERAYKQLCYLKTPLAKNDFMTSMRVQNKVLFFELVRRHIRQLVPIIYTPTEGDAIAAYSHRFRKPEGVFLDITEPDSIDSRLAAYGEDKDVDYVVVSDGEGILGIGDQGIGAIRIAISKLALMTLCGGVHPGRVMPVALDVGTNNKQLARDELYMGNRFSRIRGKQYDQFLDKFIKALKHRFPNAVLHFEDFGVTTARTLLERYRNELPCFNDDIQGTGAVVMASFIAALKHTNRELVDSRILVYGAGSAGLGIADQIVNHMVTHGCTPEEARAKIYLMDRKGLILDTMENDSNPAQFLYAKPSENWEGANTQSLVDVVSKVKPTCLIGCSTQAGAFNKVVVEEMYKHNPRPIIFPLSNPTRLHEAVPEDLLKWTNYDALVATGSPFPPVDGYRISENNNCFSFPGIGLGAVLSRAKVISDKMISAAVDQLADLSPLKPGDSKPGLLPPLEEINDTSARVATAVILQALEEGSARIEEENVPGTDKKVQVPRDFNKCLEWVIKQMWKPEYRPLIKVEHDPAVHTHQF

SEQ ID NO: 3725 - protein, 375 aa, Cyanophora paradoxa
  misc_feature (169)..(169): Xaa can be any naturally occurring amino acid
  misc_feature (310)..(310): Xaa can be any naturally occurring amino acid
MEDEVAALVIDNGTGMCKAGFAGDAARRAVFPVIVGAPRHQGVMVGMGQKDSYVGDEAQSKRGILTLKYPIEHGIVTNWDDMEKIWHHTFYNELRVAPEEHPVLLTEAPLNPKANREKMTQIMFETFNVPAMYVAIQAVLSLYASGRTTGIVLDSGDGVTHTVPIYEGXALPHAILRLDLAGRDLTDYLMKILTERGYSFTTTAEREIVRDIKEKLCYVALDFETEMQTASTSSTVEKTYELPDGQVITIGNEGFRCPEVLFQPSFIGMESAGIHETTYNSIMKCDVDIRKDLYGNIVLSGGTTMYAGIXDRMQKEITALAPSSMKIKIVAPPERKYSVWIGGSILASLSTFQQMWISKQEYDESGPSIVHRKCF

SEQ ID NO: 3726 - protein, 354 aa, Triticum aestivum
MDGNKGPVVVTGASGFVGSWLVMKLLQAGYTVRATVRDPANVEKNKPLLELPGAKERLSIWKADLSDQGSFDDAIAGCTGVFLVATPMDVDSQDPENEVIKPTVEGMLSIMRACKEAGTVKRIVFTSSAGSVNIEERQRPAYDQDNWSDIDFCRRVKMTGWMYFVSKALAEKAAMEYASESGLDFISIIPTLVVGTFLSAGMPPSLVTALALITGNEAHYSILKQVQLVHLDDLCDAMTFLFEHPEANGRYICSSHDATIHGLATMLRDRFPEYRIPHKFPGVDDDLQPIHFSSRKLLDHGFSFRYTAEDMFDAAIRTCREKGLIPLGDAPPPAAAGKLGALAAGEGQAIGAET

SEQ ID NO: 3727 - protein, 376 aa, Peronospora viciae
MADDDVQALVVDNGSGMCKAGFAGDDAPRAVFPSIVGRPKHPGIMVGMDQKDAYVGDEAQSKRGVLTLKYPIEHGIVTNWDDMEKIWHHTFYNELRVAPEEHPVLLTEAPLNPKANRERMTQIMFETFNVPAMYVNIQAVLSLYASGRTTGCVLDSGDGVSHTVPIYEGYALPHAIVRLDLAGRDLTDYMMKILTERGYSFTTTAEREIVRDIKEKLTYIALDFDQEMKTAAESSGLEKSYELPDGNVLVIGNERFRTPEVLFQPALIGKEASGIHDCTFQTIMKCDVDIRKDLYCNIVLSGGTTMYPGISERMTKELTALAPSTMKIKVVAPPERKYSVWIGGSILSSLSTFQQMWISKAEYDESGPSIVHRKCF

SEQ ID NO: 3728 - protein, 632 aa, Bacillus subtilis subsp. subtilis str. 168
MCGFVGVFNKHPLAQTADQEELIKQMNQMIVHRGPDSDGYFHDEHVGFGFRRLSIIDVENGGQPLSYEDETYWIIFNGEIYNYIELREELEAKGYTFNTDSDTEVLLATYRHYKEEAASKLRGMFAFLIWNKNDHVLYGARDPFGIKPLYYTTINDQVYFASERKSLMVAQNDIEIDKEALQQYMSFQFVPEPSTLDAHVKKVEPGSQFTIRPDGDITFKTYFKANFKPVQTEEDKLVKEVRDAIYDSVNVHMRSDVPVGSFLSGGIDSSFIVSVAKEFHPSLKTFSVGFEQQGFSEVDVAKETAAALGIENISKVISPEEYMNELPKIVWHFDDPLADPAAIPLYFVAKEAKKHVTVALSGEGADELFGGYNIYREPLSLKPFERIPSGLKKMLLHVAAVMPEGMRGKSLLERGCTPLQDRYIGNAKIFEESVKKQLLKHYNPNLSYRDVTKTYFTESSSYSDINKMQYVDIHTWMRGDILLKADKMTMANSLELRVPFLDKVVFDVASKIPDELKTKNGTTKYLLRKAAEGIVPEHVLNRKKLGFPVPIRHWLKNEMNEWVRNIIQESQTDAYIHKDYVLQLLEDHCADKADNSRKIWTVLIFMIWHSINIEKRYMPEELSHQPKEVIFV

SEQ ID NO: 3729 - protein, 483 aa, Bacillus cereus ATCC 14579
MDKKATFVSIDKKAMYINGEWITLQEQIEVNNPATKEIFATVPKGGVTEAKQAVDAAHEAFKTWSKLTAADRATKLKKWFTLIDENKEEIAAIMTKEQGKPFAEALGEVNYANSFVEWYAEEGKRVYGEMIPAAHPNKRILVMKQPVGVMAAITPWNFPAAMITRKVAPALAAGCTAVVKPASQTPLTALKLAELAHEADIPKGVINIITGSAKAIADTWMEDGRVRKVSFTGSTEIGKELMASAAQTMKKVSLELGGHAPFIVMNDADLDKAVEAVIGSKFRNAGQTCICTNRVFVQEEVYEVFVEKFQKAVGQLKVGDGFGDGTTVGPLIDENAVSKVQEHIEDAIQKGGTVLYGGQKVAELEGHFIQPTVIGLANDTMLCMNEETFGPVAPVAKFKTVDEVIERANNTPYGLAAYIFTKDISQAFQISEALEYGIIGLNDGLPSVAQAPFGGFKESGIGREGGHFGIEEYLEIKYISLGL

SEQ ID NO: 3730 - protein, 93 aa, Zea mays
  misc_feature (79)..(79): Xaa can be any naturally occurring amino acid
GREADFTCGQARWAVAPCLSYARGTGSDPSESRCSGVRNLKSAGRTAADRHAACNCLKNAARTVGGGNAGNAGSIPSKXRRSMHYTIRSFTKC

SEQ ID NO: 3731 - protein, 461 aa, Escherichia coli K12
MAINSPLNIAAQPGKTRLRKSLKLWQVVMMGLAYLTPMTVFDTFGIVSGISDGHVPASYLLALAGVLFTAISYGKLVRQFPEAGSAYTYAQKSINPHVGFMVGWSSLLDYLFLPMINVLLAKIYLSALFPEVPPWVWVVTFVAILTAANLKSVNLVANFNTLFVLVQISIMVVFIFLVVQGLHKGEGVGTVWSLQPFISENAHLIPIITGATIVCFSFLGFDAVTTLSEETPDAARVIPKAIFLTAVYGGVIFIAASFFMQLFFPDISRFKDPDAALPEIALYVGGKLFQSIFLCTTFVNTLASGLASHASVSRLLYVMGRDNVFPERVFGYVHPKWRTPALNVIMVGIVALSALFFDLVTATALINFGALVAFTFVNLSVFNHFWRRKGMNKSWKDHFHYLLMPLVGALTVGVLWVNLESTSLTLGLVWASLGGAYLWYLIRRYRKVPLYDGDRTPVSET

SEQ ID NO: 3732 - protein, 331 aa, Zea mays
MATSTSQHALSSIKLLSTGCLHPDKRNCRVLSVSVGRRCPSARNLGLLCASNSQSSVIQPVQLPRSPKSGVAPKKSGESALILIRHGESLWNEKNLFTGCVDVPLTPKGVDEAIEAGKRICNIPVDVIYTSSLIRAQMTAMLAMMQHRRKKVPIILHNESEQAHMWSQIYSEETKKQSIPVITAWQLNERMYGELQGLNKQETADRFGKEQVHEWRRSYDIPPPNGESLEMCAERAVAYFKDQIIPKLVDGKHVMIAAHGNSLRSIIMHLDKLTSQEVISLELSTGIPMLYIFKEGKFIRRGSPAGPSEAGVYAYTKNLAQYRQKLDGIVQ

SEQ ID NO: 3733 - protein, 181 aa, Lycopersicon esculentum
MASSIVSSAAAATRSNVAQASMVAPFTGLKSAASFPVTKKNNNVDITSLASNGGRVRCMQVWPPINMKKYETLSYLPDFSDEQLLSEIEYLLKNGWVPCLEFETERGFVYRENNSSPGYYDGRYWTMWKLPMFGCTDATQVLAEVQEAKKAYPQAWVRIIGFDNVRQVQCISFIAYKPEGF

SEQ ID NO: 3734 - protein, 229 aa, Nicotiana plumbaginifolia
MAAFGIKSKIFQIMEMTILFLFAISIDRYCFAADEDMLQDVCVADLHSKVKVNGFPCKTNFTAADFSSFAISKPGATNNKFGSKVTTANVEQVPGLNTLGVSLARIDYAPGGINPPHTHPRASEMVFVMEGELDVGFITTANVLVSKQITKGEVFVFPRGLVHFQKNNGKIPAAVVSAFNSQLPGTQSIPITLFGASPTVPDDVLAQTFQINIEDVQQIKSKFAPAKKF

SEQ ID NO: 3735 - protein, 556 aa, Pseudomonas aeruginosa
MSMLKDPSQKYRPFSAINLPDRTWPSKTITEVPIWCSSDLRDGNQSLIEPMDAAKKMRFFKTLVQVGLKQIEVAFPSASDTDFNFVRELIEGNHIPDDVTIQVLTQAREDLITRTFESLRGAKKAIVHVYNATAPSFRRIVFNQDKQGVVDIATNAAKLIKKLAAEQPETQWSFQYSPEIFSSTELEFSVEVCNAVIDVWQPTPDNKIILNLPATVECATPNVYADQIEWFGRHVDKRDSVIISLHTHNDRGTGVAATELGLMAGADRVEGCLFGNGERTGNVDLVTLALNMYTQGLHPQLDFSDIDAVRKVVEECNQLPVHPRHPYVGDLVHTAFSGSHQDAIRKGFAQQKEDAIWEVPYLPIDPADIGRDYEAVIRVNSQSGKGGITFLLEQEYGISLPRRMQIEFSQVVQGETDRLGLEMTAQQIYSLLENEYLKATSPYVLASHRLQEENGTSAVDLEVSFDGEKQHWRGIGKGPLEALVAALPVKAEIMDYHEHAIGAGANAKAAAYIEIRLEGQRPLHGIGIDENITTASFRALFSALNRAVTQAEAKAA

SEQ ID NO: 3736 - protein, 502 aa, Silicibacter pomeroyi DSS-3
MPDLSTRLADLDRHLQRFRRDGVMNRIGGQDVPGGAGRFDSISPVDRSVICSVARGDAADMDAAARAAHAAFPAWRDMPATERRAILIRIAEGIEARAEEIALCECWDTGQAWRFMSKAALRGAENFRYFADQVVQARDGQHLKSPTLMNITTRVPIGPVGVITPWNTPFMLSTWKIAPALAAGCTVVHKPAELSPLSARLLIEIAEEAGLPPGVLNLVNGFGEDAGKALTEHPLIKAVAFVGESRTGSLIVKQGADTLKRVHLELGGKNPVIVFDDADTERALDAVIFMIYSINGERCTSSSRLLVQDTIREEFEARLVERVNNIKVGHPLDPTTEIGPLIGEEHFAKVTSYFDIARQDGATVAAGGEVVGDQGYFVRPTLFTGANNRMRIAREEIFGPVLTAIPFSTEEEALQIANDTPYGLTGYLWTNDLTRALRFTDKLEAGMIWVNSENVRHLPTPFGGVKASGIGRDGGDWSFEFYMEQKHIGFATGQHKIQRLGA

SEQ ID NO: 3737 - protein, 180 aa, Lycopersicon esculentum
MASSVISSAAVATRSNVTQASMVAPFTGLKSSATFPVTKKQNLDITSIASNGGRVSCMQVWPPINMKKYETLSYLPDLSDEQLLSEVEYLLKNGWVPCLEFETEHGFVYRENNKSPGYYDGRYWTMWKLPMFGCTDATQVLAEVQEAKKAYPQAWVRIIGFDNVRQVQCISFIAYKPEGY

SEQ ID NO: 3738 - protein, 361 aa, Thermococcus kodakarensis KOD1
MVLDSTLREGEQTPGVNFSPEDRLRIGIALDEVGVDFIEAGHPAVSGEILEGIRLLASHGLNANILAHSRALRSDIDLVLKAEAEWIGIFMCLSQRCLERRFRTDLSGALTRVEDAILYAKDHGLKIRFTPEDTTRTEWKNLTAALNLARELKVDRVSIADTTGAAHPLEFYDLVKRVVEFGIPVNVHCHNDLGLALANAIMGIEAGATLVDATVNGIGERAGIVDLSHLLAALYYHYGVKKYRLEKLYSLSRLVSEITGLQVQVNYPIVGQNAFTHKAGLHVSAVVRDPSFYEFLPAETFGRERTIYVDRFAGRETIRFHLSRFGIHDEEIIEELLRRVKASRRPFTPEMLAEEARRMMT

SEQ ID NO: 3739 - protein, 522 aa, Oryza sativa
MAVLLRKVWGSVLARAAAGAAPPEAFAAAASPRRPQAAGEYGSLGALDVLPIDVLAQILRLLGPADAARSTAVCRAWRLLASDNGLWAFFLRLGPDPWELVVFAETHLGAGPALHPGLYYDSSPQLSFKHVYTRRAVVPGSIIVDGGSGYCKYGWSKYAAPSGRCATFLEFGNIESPMYARLRHFLSTIYTRMQVKPSTQPIIVVLPLCHSDDTESARASRKQYRDTLYSVLFDMNVPAVCSVDQAVLALYAAKRTSGIVVNIGFNATSIVPIFQGRVMHEIGVETVGQGALKLTGFLKELMQQRNITFESLYTVRTIKEKLCYVAADYEAEKRKDTQASCEVDGEGWFTLSEERFKTAEILFQPQIGGVRAMGLHKAVSLCMDHCYNSEVFGDDNWYKTVVLSGGSSCLPGLSERLEKELRELLPAHISEGIRVIPPPFGTDSAWFGAKMISNVSTFTEAWCIKKKQFRQKTRRNGPSFVNVWFSFDKLHNSFGATGVSLEHGKANTDTSEFQPYETRCTK

SEQ ID NO: 3740 - protein, 408 aa, Aspergillus oryzae
MALDRISSASALLLLPPPPAASFEQCRNVYESLLSTVFTKLAELNGTNHAAILDIALFLPGLQSHTCQPRAKLFKSLQCLLANLYRLIGIVSVENNIELDAPGGINTRVILLDLDTVHPSGKDSSQASQIGPVLDLQTLATSARPWDRIYYPDNQVGQNLATAFSSIYSQFKDPNAGALHSIFGASNWTYLESIVAPDDSRGSQTNHSVIVGGTFDHFHIGHKLLLTAMALVLDPVRDTNPGKEALLTIGVTGDELLVNKKYAECLESWDERCEGVASFLTAIMDFYPPDKNATRTERVTQPGPNGKYIVMKVRSGLTLKLVQISDPFGPTITEEDISAIVVSQETRSGGAAVNEKRAEKGWKRLDVFEIDVLHSKDVPSSDFEDFASKISSTDIRRQRMEQAKNESS

SEQ ID NO: 3741 - protein, 387 aa, Ralstonia eutropha JMP134
MIRARFTGILDRVQTTRHTRPERDTAMTKPSPASFRIAAIAGDGIGNEVLPEGLRVVEAAARKFDLLIEVRHFEWANCDYYLRHGKMMPDDWKQQLDGFDAIYFGAVGWPDKVPDHISLWGSLLKFRREFDQYVNLRPVRLLPGVPCPLAGKKPGDIDFYVVRENTEGEYSSVGGRMYEGTERELVMQQSIFSRHGTDRILKYAFELAQSRPRKKLTSATKSNGIAVSMPWWDERTAAMGAQYPEIEWDSQHIDILCARFVLQPERFDVVVASNLFGDLLSDLGPACTGTIGLAGSANLNPERKFPSLFEPVHGSAPDIFGKQIANPIGMIWSGAMMLDFLGGEAGRQAHDAILAAIETVLREGPLTPDAGGKAGTSDVGKAIAEAV

SEQ ID NO: 3742 - protein, 194 aa, Oryza sativa
MGFTMNSLSNGLLKGLRRVLEQQRKPIGGLFFMFLLNFYRKSQAWSSTVSFSDIDEKSEMGGDDDYTDSRRELEPQSVDPKKGWGFRGVHRAIICGKVGQVPVQKILRNGRTVTVFTVGTGGMFDQRVVGDADLPKPAQWHRIAIHNDQLGAFAVQKLVKNSAVYVEGDIETRVYNDSINDQVKNIPEICLRRD

SEQ ID NO: 3743 - protein, 487 aa, Yersinia pestis biovar Medievalis str. 91001
MSTHLVWFRNDLRVTDNLALHAACQDPQASVIAVFIATPVQWAAHGMAPRQAAFLRQNLQHLQAALAARGIPLHYHQCDDFQASNTWLVDFCQQQQVDSLFYSQQYELNERLRDDALAVQLSERAITCQSFHDSVLLAPGTVLTGNNEMYKVFTPFRRAFIQRLLMSDNHCVPAPKARHAPPVLLSPLPFDYPQQSVDSQLFPAGEDAALQRLRRFCREQVQDYRQYRDLPAVPGTSCLSPYLVLGVLSPRQCFNRLWAESPEMLENADSGAFTWLNELIWREFYRHLLVAYPRLCQHHPFIGWTDGLVWNRSESQLKAWQQGQTGYPIVDAAMRQMNETGWMHNRLRMISASFLVKDLLIDWRQGERYFMSQLVDGDLAANNGGWQWAASTGTDAAPYFRIFNPTTQGERFDKDGVFIRRWLPELAAVPDSDIHQPWRWAERQQQHLDYPVPLVDHKQARLATLAAFEAAKRDSTRIPNRKEPSCY

SEQ ID NO: 3744 - protein, 371 aa, Aspergillus oryzae
MTIAKTYNILVLPGDGIGPEIMAEATKVLSAFNTSTVQFNTRSELIGGCSIDLHGKPITDAVKEAALASDAVLFAAVGGPKWDNMRRGLDGPEGGLLQLRKAMDIYANLRPCSADSPSRSVAREFSPFRQEIIEGVDFVVVRENCGGAYFGRKVEEDEYAMDEWAYSTSEIQRITRLSAELALRHDPPWPVISLDKANVLASSRLWRRVVEKTMAEEYPQVKLVHQLADSASLILATNPRVLNGVILADNTFGDMISDQAGSIVGTLGVLPSASLDGLPSETRRRTNGLYEPTHGSAPTIAGKNIANPVAMILCVALMFRYSLDMEREAQQIEEAVRTVLDSGIRTPDLGGKAGTTEVGDAIVAVLRGQKL

SEQ ID NO: 3745 - protein, 571 aa, Pseudomonas fluorescens Pf-5
MLAHPHTKYRPFTPVDLDSRQWPSRTITQAPIWLSTDLRDGNQALFEPMNRERKLRLFEELVRLGFKEIEVGFPAASRTDFEVVRELVEQQRIPADVTPMVMTQLREDLIRETVRSVQGARRVIVHLYNAIAPVWRRVVFGLSVDEVEALVERHVRLLRELTDQHPETEWVLQYSPETFCMAELEVSLRMCNTAIRTWDAGPGRPIIINLPTTVEVATANIFADQIEWMHKRLERRDQVTLSVHPHNDRGTGVACAEQALLAGAQRVEGCLFGNGERSGNLDLVTLALNLYTQGISPGLDFSDIAAVARVAEECTALPIHPRHPYVGDLVFTAFSGSHQDAIAKGFAAQAADGFWEVPYLPIDPQDLGRTYDSIVRVNSQSGKGGIAFLLQRDHGIVMPRRMQIEFSAIVQKLADASDAELSSDALWEVFQRTYLACAEGTAGLRYLAHRLFDAPEGQGIELRVATPGNQEACLHGVGNGPVAAALAALGLPLRIDSFEERNLGAGADAQALAIVEAVWPGVAGSRFGAGCHANIVTASVQAVINAAARFYPEQAPAFVPTQASLAERAAP

SEQ ID NO: 3746 - protein, 336 aa, Mycoplasma hyopneumoniae 232
MKKIAINGFGRIGRLALRRLFEVNDENLQVVAINDLTDASVLAHLFKYDSAHGKFNGEVEVLKDNGKNYLKIKGQKILVLSERDPKSLPWGQLGIDLVVECTGFFASKSGASQHLEAGAKKVIISAPAGNDVKTIVYNVNCDTITEDDRILSSASCTTNALAPLVNALDKEFGINHGFMTTIHAYTADQRLQDAPHGDLRRARAAGVNLVPSSTGAAKAIGLVVPSLTGKLDGIAIRVPVITGSFVDLSVELKSNPSIEEINQKMREYANESFAYCDEPIVSSDIIGDRHGSIFDATLTKYIEANGKKLYKLYTWYDNEYSFVSQFVRVIRYFVQK

SEQ ID NO: 3747 - protein, 829 aa, Vibrio vulnificus CMCP6
MKMTRRAFVKANAAASAAAVAGITLPASAANLIASSDQTKITWDKAPCRFCGTGCSVLVGTQNGKVVATQGDPEAPVNKGLNCIKGYFLSKIMYGQDRLTQPLLRMKDGKYDKEGDFTPVSWDVAFDTMAEKWKASLAKKGPTSIGMFGSGQWTVMEGYAAAKMMKAGFRSNNIDPNARHCMASAVVGFMRTFGIDEPMGCYDDFEHADSFVLWGSNMAEMHPVLWTRITDRRLSHPHVKVNVLSTYYHRSFELADSGYIFKPQSDLAIANFIANYIIQNDAVNWDFVNKHTNFKQATTDIGYGLRDDDPLQKQAKNPNSGNMTSISFEEYKKSVAPYTVEKASEMSGVAQDKLIELAKQYADPNTKVMSLWTMGMNQHTRGVWMNSLVYNIHLLTGKISTPGNSPFSLTGQPSACGTAREVGTFAHRLPADMVVANPKHRAIAEKIWKLPEGTIPPKPGFHAVLQDRMLHDGVLNCYWVQCNNNMQAGPNINGERLPGYRNPENFIVVSDPYPTATAQAADLILPTAMWIEKEGAYGNAERRTQAWYQQVGTVGEAKSDLWQVMEFSKRFKMEEVWPEELLAKAPQYRGKTMYDMLFANGQVDKFPLSEARQLNDDSHHFGFYVQKGLFEEYAEFGRGHGHDLAPYDVYHTVRGLRWPVVDGKETLWRYKEGSDPYAKKGSGWDFYGKPDGKALIISAPYEAPPESPDAEYDMWLCTGRVLEHWHTGTMTRRVPELYKAVPDAVCYIHPEDAKARGLRRGDEVLISNKRGEVRVRVETRGRNRPPQGLVFVPFFDARILINKLILDATDPLSKQTDFKKCPVKITKVA

SEQ ID NO: 3748 - protein, 112 aa, Haemophilus ducreyi 35000HP
MKKIEAIIKPFKLDDVREALTDVGITGMTVNEVKGFGRQKGHTELYRGAEYAIDFLPKIKLEIIVTDEQVESCINAIIETAQTGKIGDGKIFVYDVERVVRIRTGEENEEAL

SEQ ID NO: 3749 - protein, 336 aa, Rhizomucor miehei
MTVKAGINGFGRIGRIVLRASLLNPEVEVVAINDPFIDLEYMVYMFKYDSTHGRFKGTVEAKDGKLVVNGKPISVYAERDPCCIPGRIGAEYIVESTGVFTTKEKAGAHLTGGAKKVIISAPSADAPMFVVGVNLESYSSDMQVISNASCTTNCLAPLAKVIDDEFGIVEGLMTTVHATTATQKTVDGPSGKDWRAGRGAGANIIPASTGAAKAVGKVIPHLNGKLTGMAFRVPNPDVSVVDLTVRLEKSASYEDIKAAIKKASEGSLKGILGYTEDEVVSTDFIGDSHSSIFDAKAGISLNPNFVKLISWYDNEYGYSTRVVDLLVHIAKVDGRL

SEQ ID NO: 3750 - protein, 356 aa, Nitrosomonas europaea ATCC 19718
MKIALLAGDGIGPEIMAQAERVLRYFQQEGLQIELEPGLLGGCAVDATGEPFPEATRQLAIEADAILLGAVGGTQYDGLPREKRPEQGLLAIRKELNLFANLRPVVLYPELSNASTLKPEVVAGLDILIVRELTGDIYFGRPRGIEYRDGQKVGFNTMIYSESEIRRIAHVAFQAAGRRNGRLCSVDKMNVLECTQLWRDVVTETAQSYPDVTLSHMLVDNAAMQLVRNPRQFDVVVTGNMFGDILSDEASMLTGSIGMLPSASLDDRNKGLYEPIHGSAPDIAGKGIANPLATILSAAMMLRYSFNQETAASRIEHAVQKTLQQSYRTEDIYEAGMKKVGTVEMGDRVLANLQSR

SEQ ID NO: 3751 - protein, 474 aa, Penicillium chrysogenum
MVLLPPSLPVCQLKVTAPEFPSNFYLDGDHSGFVGIETRQNPHPSASRNPYGHDAGVTDFLSNVSRFQIIESTLREGEQFANAFFDTAKKIEIAKALDDFGVDYIELTSPCASEQSRADCEAICKLGLKAKILTHIRCHMDDARIAVETGVDGVDVVIGTSSYLREHSHGKDMTYIKNAAIEVIEFVKSKGIEIRFSSEDSFRSDLVDLLSIYSAVDKVGVNRVGIADTVGCASPRQVYELVRVLRGVVGCDIETHFHNDTGCAIANAFCALEAGATHIDTSVLGIGERNGITPLGGLMARMMVADREYVKSKYKLEKLKEIEDLVAEAVEVNIPFNNYITGFCAFTHKAGIHAKAILNNPSTYEIINPADFGMSRYVHFASRLTGWNAIKSRAQQLKLEMTDTQYKECTAKIKAMADIRPIAVDDADSIIRAYHRNLKSGENKPLLDLTAEEQAAFAAKEKELLEAQAAGLPV

SEQ ID NO: 3752 - protein, 581 aa, Bartonella clarridgeiae
MTINLHRPDIAELKPRITVFGVGGGGGNAVNNMINAGLQGVDFVVANTDAQALAMSKAERVIQLGAAVTEGLGAGALPEVGRAAADECIDEIIDHLADSHMVFITAGMGGGTGTGAAPVVANAAREKGILTVGVVTKPFQFEGARRMKTAEAGIEELQKSVDTLIVIPNQNLFRIANEKTTFSDAFAMADQVLYSGVASITDLMIKEGLINLDFADVRSVMHEMGRAMMGTGEASGDGRALAAAEAAIANPLLDDTSMRGARGLLISITGGRDMTLFEVDEAANRIREEVDADANVIFGAIDDESLEGVIRVSVVATGIDREINDVIQPSNTKFHRSATSMRKNDAGVTQTSSQSSSLRSESMVEVIEALEVEMKQPIEEPFCPKSQFFVQSTDTYTPRSMNAASYGQNIHGQTSNALRMQVGCVSQQPVAKAVNMEATAHVLDDMTRIVEQKKKQAQMQSHSMSMRMPELKDFPSSIRGQSTNFSNADQGPRNLWQRLKQSLTYREEAEPEARLEPAVNSSLCKDSHISSASSQGISQDTSVYIPRHSTELQQHASQDQNVCVSEEDELEIPAFLRRQAN

SEQ ID NO: 3753 - protein, 215 aa, Capsicum annuum
MNIFRSYYSDPLTESSSSFSDSSIYSPNRAIFSDEEVILASNNPKKPAGRKKFRETRHPVYRGVRKRNSGKWVCEVREPNKKSRIWLGTFPTAEMAARAHDVAAIALRGRSACLNFADSAWRLPVPASSDTKDIQKAAAEAAEALRPLKLEGISKESSSSTPESMFFMDEEALFCMPGLLTNMAEGLMLPPPQCAEIGDHVETADADTPLWSYSI

SEQ ID NO: 3754 - protein, 868 aa, Xylella fastidiosa Temecula1
MSASPTAERWIVLKFGGTSVSRRHRWDTIAMVVRKRLEEHGTRVLIVVSALSGVTNELTAIAQGVVDSAKRVTALEQRHRDFLVELGLDAQAVLGTRFAMLSDLLQDARAVTRSLDWQAELLGQGELLSSTLGAAYLGASGIDIGWMDARDWLTALPPQPNQSEWSQRLSVSCQWKSDVEWRTRFDAQRAQVLITQGFISRHQDGGTAILGRGGSDTSAAYFGALLGAACVEIWTDVPGMFSANPKEVPDARLLTRLDYYEAQEIATTGAKVLHPRSIKPCRDTGVPMLILDTERPDVLGTRIDAEVEPVLGVKAISRRDGIVLVSMEGIGMWQQVGFLADVFTLFKKHGLSVDLIGSAETNVTVSLDPSENLVNTDVLTALSTDLSQICKVKIIVPCAAITLVGRGMRSLLHKLSEVWATFGKERVHMISQSSNDLNLTFVIDETDADGLLAVLHFKLIESGAMPVQDRAVFGSPWREIIGHVRTRVMPWWHSARMRLLAMRDEEGIGPCYVYHLPTVRERARQLNAVAAVDQCYYAIKANPHPAILRTLIEEGFGLECVSLGELRHVFEVVPHLVPSRVLFTPSFASRVEYEQAFLLGVNVTLDNVEALRLWPEVFRERTLWLRIDLGYGDGHHEKVTTGGKTSKFGLSVTRIDEFIDVAKTLNITVTGLHAHLGSGVESGNHWSRMYDELAGFASRIGSVSTLDIGGGLPIPYRPDDEPFDVGAWGASLAEVKALHPKFQLVIEPGRFLVAEAGVLLTRVTQVIEKDDILRVGLEAGMHTLIRPALYDAWHGVENLTRLDETPHVLCDVVGPICESSDVFGRRRHLPAATASGDLMLIADAGAYGFSMASTYNLRGLPAEVVLDA

SEQ ID NO: 3755 - protein, 625 aa, Oryza sativa
MGARASRHRQSPDQSQSQSPSPHHKHHHHHQTTRAPKPKPKPQPPPPQQPRSQPPPPPRHQPQQAPQQAAAEDGVGRVLGRPMEDVRATYTFGRELGRGQFGVTYLATHKPTGRRYACKSIAARKLARPDDLDDVRREVHIMHHLTGHRNIVELRGAYEDRHSVNLVMELCEGGELFDRIIARGHYSERAAAALCREIVSVVHSCHSMGVMHRDLKPENFLFLNKREDSPLKATDFGLSVFFKPGEQFRDLVGSAYYVAPEVLKRLYGAEADIWSAGVILYILLSGVPPFWAENEDGIFDAVLQGHIDFSSEPWPSISSGAKDLVKRMLRQDPKERLTAAEILNHPWIREDGEAPDKPLDITVISRMKQFRAMNKLKKVALKVVAENLSEEEIVGLKEMFKSLDTDNSGTITLEELRAGLPKLGTKISESELRQLMEAADVDGNGSIDYVEFISATMHMNRLEKEDHIYKAFEYFDKDHSGFITVDELEEALTKYDMGDETTIKEIIAEVDPDLADVDGNGSIDYVEFISATMHMNRLEKEDHIYKAFEYFDKDHSGFITVDELEEALTKYDMGDEATIKEIIAEVDTDHDNRIDYIEYLENIGGDLVFKYAECCSAISKIMDAG

SEQ ID NO: 3756 - protein, 396 aa, Escherichia coli CFT073
MLDAQTIATVKATIPLLVETGPKLTAHFYDRMFTHNPELKEIFNMSNQRNGDQREALFNAIAAYASNIENLPALLPAVEKIAQKHTSFQIKPEQYNIVGEHLLATLDEMFSPGQEVLDAWGKAYGVLANVFINREAEIYNENASKAGGWEGTRDFRIVAKTPRSALITSFELEPVDGGAVAEYRPGQYLGVWLKPEGFPHQEIRQYSLTRKPDGKGYRIAVKREEGGQVSNWLHNHANVGDVVKLVAPAGDFFMAVADDTPVTLISAGVGQTPMLAMLDTLAKAGHTAQVNWFHAAENGDVHAFADEVKELGLSLPRFTAHTWYRQPNEADRAKGQFDSEGLMDLSKLEGAFSDPTMQFYLCGPVGFMQFAAKQLVDLGVKQENIHYECFGPHKVL

SEQ ID NO: 3757 - protein, 1041 aa, Desulfotalea psychrophila LSv54
MKRYFFSVISVCFLVVWAIPALASDLQLTPAEQSWLRAHPDIRLGVDPDYAPFESIEGGVYVGLAADYVSLVSKKLGLSLVPVPDLTWKEVMALAEQGELDLFPAVVQTPERNELWLFAKPHMAYSTVIFTRDDYWNVFGLADFAGKKVAVVRGYAILDFIRSAHPHLDIVLVDSVDMGLRQLEAGRVSAFVNDIATGVSAIQKMNLKNLKIAAYTDLKDKGLGFAVRKDWPELVAMIDKVLASITPEEHAAIHNRWIKVESFSPWQHWARWLFIGLAMVAVSLLAFTGWIYLLRKQVASRTTKLQASEAWTVAILDTASNPIITIDEDETVLSFNLGAERSFAYSAEEIIGQKVKILLPDLYEKYEDEFATSFFAKDDAHLIDMDREIDARRKNGTIFPIHLSVGEMIVSGKRMFVIILVDLSVQKQRNLELELARDAAEAAMEAKAIFLANMSHEIRTPMNAILGFLAIVLESSSLPADLRKHIVTAHGSAESLLVIINDVLDVSKFDSGRMELVFSVFHLPRTIGKALQTLYMPAQEKELNIHLNYDEDLPYCFLGDSVRLRQVIINLVANAIKFTEEGSITIEVKGTSGEDDLLLFTVVDTGIGIRPEQVARIFEPFTQADDSSTRNIGGTGLGLAICKEIVDLMGGRIWVESEKGKGSSFNFMVPLPRAECIKDCPKAGRPAETGDDCPKLAELSERAEPVSRKIFRILLAEDMKDNAELAQFRLEQQGHIVTHVWNGLEAVEAFQRDEFDLIFMDVQMPVLDGHSATRQIRKIERGAGGYIPIFALTASVMREDREKCIAAGMDVIIGKPIDFQFLFAKMEEIVSEGVGVVQRGWIDFSPVMAVAAVEQGLLTWANSVVYAGTLIDFSEAHLGDASTLQQLFQQNDIRGMQCLIHTLKGVAENLALSDLVKIISDVDSSLLMDDRERTTLLLLDLKEALKNVVVATGQLALAGEGAVQPVKKEDLKKIGDLLAELLVQLEEDNPAVVEPLVAELSQYLSQNDLLLLQKNIDDFEFVRAKLQVRKLADMLAIKLEV

SEQ ID NO: 3758 - protein, 596 aa, Campylobacter jejuni RM1221
MSIYKQRVLELRRLMKENNIDAYLILSADPHLSEYLPEYYKNRVFISGFKGSVGTVLITQEEGFLWVDGRYWLQAQKELEGSGILLQKQDAKNTFTKWLEKNLSEDQILGIDFALLPLSLQKDLKINCKANLKHIDLISPLWKDRPTLPQEKIYEHELEYCSYSRKEKLALVRQKMKNLNVTSHLISSLDDIAWLTNLRGNDVNYNPVFLSHLLILEDKALLFVDQKKVNSELEKKLNLDGFWLKNYDEIIMELEKLANTNLLIEPSKMTALLINSLDKSVKIIQEINPSTHLKAAKNTKEIAHIQDAMIEDGVALCKFFAWLEEAIENKELISELDIDVKASEFRAQSKYYISDSFATIAGFNENAAYPHYKATKESFAYLKKDGLLLIDSGGQYKNGTTDITRVVPIGKANAEQIHDYTLVLKAHIAISSAIFPKDIAMPLLDAITRAPLWKEQIDYIHGTGHGVGYFLNVHEGPQVLSYLSPVLEKTKAKEGMLTSIEPGIYKVGKWGIRLENLVIHTKVENPKNKDFGEFLYFKPVTLCPFEISCIDTKMLDEKEKEWLNNYHKEVFEKLSPKLGDYPKALVWLEKRTKAIF

SEQ ID NO: 3759 - protein, 261 aa, Persea americana
QVHPNSYALVVSTENMTLNWYSGNNRAMLVTNCLFRMGGAAILLSNRWSDRRRSKYQLVHTVRTHIGADDRAFNCVSQEEDEAGKVGVSLSKDLMVIAGEALKSNITTLGPMVLPMSEQLLFFATLAARKVFKMKIKPYIPDFKLAFEHFCIHAGGRAVLDELQKNLELSDWQMEPSRMTLYRFGNTSSSSLWYELGYSEAKGRVMKGDRMWQIAFGSGFKCNSAVWRALRSVNPAKEKSPWMDDIDSFPVHVPKVTTIQS

SEQ ID NO: 3760 - protein, 338 aa, Neorickettsia sennetsu str. Miyayama
MVEQMRIAINGFGRIGRAVLRILIGSPCDELEIVAVNTPSAVESCLHLLRYDSVHGKFECSMSLAEDNVAILNGVPVRFSSKTDISLLDWRAIGVDIVLECSGVFNSHTKASGHLKVGAKAVLVSAPVLDADSIIIYGVNQHALTPSDRIISVGSCTTNCLAPLIEVVHKNFGVEAAFMTTIHSYTNDQNVVDNSHRDLRRGRACGTSIIPTTTGVTKIVGKIFPELAGKIDGVAVRVPTPNVSMVDLTVTTSRSVTVDEVNSAFIKAESSYLGGVLSTCAEPLVSVDFNRDPHSAIVDLTGTYVVEGRLLRLGAWYDNEWGFSARMLDVARFISTKL

SEQ ID NO: 3761 - protein, 172 aa, Triticum aestivum
MATMMTMSSFVGAAVLPRGSAGGLGARSLPAQDRRALVVRAQTEGPSAPPPNKPKASTSIWDAMAFSGPAPERINGRLAMVGFMTSLAVEAGRGDGLLSQLGSGTGQAWFAYTVAVLSMASLVPLLQGESAESRAGAIMNANAELWNGRFAMLGLVALAATEIITGAPFINV

SEQ ID NO: 3762 - protein, 211 aa, Ehrlichia canis str. Jake
MGIIVSESSSFISPIEHIIEDARQGKIFILIDDEQRENEGDLVILAEKVTSDAINFMITHGSGIVCLSITEDLMCKLGLEFIPKRHVNDNSASFATSIDVRYGITTGVSAHDRASTILRVVDQNVTKDDFVTPGHIFPIVAKKGGVLERSGHTEASVEIAKIAGLAPVAVVCELMNPDGTMSRMPDIIEFSQRYNVKVTSIEKLIQYVKAH

SEQ ID NO: 3763 - protein, 531 aa, Bradyrhizobium japonicum USDA 110
MTLLRDPLLNKGTAFTEAERAALGLRGLLPPCVLTMETQVDRVLTNLRMLPTDLEKYVALNALHDRNEALFFRVVVDNIDEIQPIIYTPTVGLACQKYGLIFQRPRGMFISSRDRGQIAEILKNWPYPARLIVVTDGERILGLGDLGANGMGIPVGKLSLYSACAGVHPEHCLPIVLDVGTNNEELLNDPYYLGLRERRLTGEAYDSFVDEFMVAARKTFPGVLIQFEDFANHSAFKLLHKYRDEACVFNDDIQGTAAVALAGLFSGLRISGGKLKDQKILFLGAGEAATGIADLVVSAMMAEGATEAEALRRNWLVDSRGLVVSGRDGLSGHKLRYAHAGQAPISDFLTAIKTLKPTAIIGVAAVGGAFTPDVLKAMAGLNEHPIVFALSNPTSKAECSAEDAYRYTEGRALFACGSPYDPVKLNGRTFVPRQGNNSYIFPGVGLGVIATRSRLVTDEMFMAAAHSLADCVGKEDLAQGSLYPALPRIREVSARIAAAVADVAYQRGLADGPAPNDVKALVQSQMYEPKY

SEQ ID NO: 3764 - protein, 654 aa, Burkholderia sp. 383
MRGRAPTVQRRRAVSGLPRACSPPRHRRPPTTMHNGLPMIDRLKYSFSGLPPYDASVADTQAGLSRLLDTARLDAVLVTSQDEYVTEYLPLANNPRYAVSGFDGSAGCGIFLSAATAQALDLPPFVLFVDGRYHLQAEQQCDPARVRIEKLGMNVTIWQAMADWLVAHGSRLARVGYDALRISVGQRDRLFEQTQAASLDWTSLADREIDRAIALPGWVVERPIFEVPESATGLSVAQNLDTLNRQLAAHTGAPDGKTAFFSCASDDLAYLLNSRGYHIPNASSHLGFLFTVGQQVALFLPEGCDRCEVTLASYPALHVIRRDVAALERFLAQFDVEHVCYGYESVNCALVDAVKRVWPQAQHADFNPVEAMRAGKTPAVLDRFRDAFARSSAAIAETMRWAKAGEPGTRHTEYDLARTINDAYGARSAVALTFPSIAANGANSAFAHYTAASADVELTEGELVLLDSGAYYEAGFATDCTRVVLRRTDPDTVAQPWQREIYTVALKACIKGLVTRFPSTAKGGDVDALVRQVCRDHGHDFGHGTGHGVGIHVHEGGVRFAPGAKYGLVPNAVISVEPGIYVPGKGGVRIENIVIIHRDDAQPDTVTFENIVTVGYDWDLIDLDLLDDDERAYLRDYERLCVERGTQVTACPLL

SEQ ID NO: 3765 - protein, 827 aa, Haemophilus ducreyi 35000HP
MELSRRDFMKANAAVAAAAAAGIVLPVKNVQADDSGIKWDKAPCRFCGTGCSVLVGTKDGRVVATQGDPDAEVNRGLNCIKGYFLSKIMYGADRVQTPLLRMKDGKFHKEGDFTPVSWDQAFSIMAEKVKATLKAKGGNAVGMFSSGQTTIFEGYAKVKLWKAGLRSNTIDPNARHCMASAAVAFLRTFGMDEPMGCYNDIEKTDGFVLWGSNMAEMHPILWSRISDRRLSDNNVKVVVMSTFEHRSFELADTPIIFKPHSDLAILNYIANYIIQNDKVNWDFVNKHTKFKRGETDIGYGLRPEHPLQKAAKNVKNAGKMHDSSFEEFKKIVEPYTLEKAHEISGVPKHQLEALAKMYADPAQKLVSFWTMGFNQHTRGVWVNHMIYNVHLLTGKISTPGCGPFSLTGQPSACGTAREVGTFVHRLPADMVVMNPKHVEICEKAWKLPKGTIPTVPGYAAVMQSRMLKDGKLNFLWQMCTNNMQGGPNINEEIFPGWRNPENFIVVSDPYPSVSAVAADLILPTCMWVEKEGAYGNAERRTQFWYQQVKGPAQSKSDLWQIVEFAKYFKAEEVWNEELMAQMPEYRGKTLYEILYLNGEVDKYQVPTNIPGYLNDEADDFGFYIQKGLFEEYAQFGRGHGHDLADFETYHQARGLRWPVVDGKETLWRYREGFDPYVKAGEDFRFYGYPDGKAIILGVPYESPAESPDEEYDLWLSTGRVLEHWHTGTMTRRVPELHRSFPNNLVWMHPSDAKKRGLRHGDKVKVITRRGEMISHLDTRGRNKCPEGLIFTTFFDAGQLANKLTLDATDPISGETDFKKCAAKVVKA

SEQ ID NO: 3766 - protein, 229 aa, Arabidopsis thaliana
MEGFLRFLVAKAILLALASSFVSCYDPSPLQDFCVAVDDASGVFVNGKFCKDPKYVKAEDFFTSGLNIAGNTINRVGSNVTNVNVDKIPGLNTLGVSLVRIDFAPGGQNPPHTHPRATEILVVVEGTLLVGFVTSNQDNNRLFSKVLYPGDVFVFPIGMIHFQVNVGRTNAVAFAGLGSQNPGTITIADAVFGSKPSIMPEILAKAFQLDVNVVKYLEARFSSNYDRHY

SEQ ID NO: 3767 - protein, 328 aa, Pseudomonas stutzeri
MELLVLPNNRRLPFDSGANLLEVLREHRVGISYSCMSGRCGTCRCRVIDGSVISSAAKSGDSNRIEEHYVLACQSVLTSNCAIEIIDSDDIVTHPARIIKGMVVAVESPTHDIRRIRIRLAKPFEFSPGQYATLQFSPEHVRPYSMAGLPDDQEMEFHIRKVPGGRVTEYIFEHVREGTSIKLSGPLGTAYLRQAHTGPMLCVGGGTGLAPVLSIVRGALKSGMTNPIHLYFGVRSQQDLYDADRLNQLAAIHPQLTVHTVIATGPINEGQRAGLITDLIEKDIPSLAGWRAYLCGAPAMVDALCTVAKVLGISPEHIYADAFYPSGV

SEQ ID NO: 3768 - protein, 412 aa, Triticum aestivum
MAAAGGATTSTRRGPGGGGRPMDDENLTFETSAGVEVVGSFDAMGIREDLLRGIYGYGFEKPSAIQQRAVIPIITGRDVIAQAQSGTGKTSMISLSVCQVIETNVHEVQALILSPTRELATQTERVMQAVGNFMSVSVHACVGGKSIGEDIRKLESGVHVVSGTPGRVCDMIKRRTLRTRAIKLLVLDEADEMLTRGFKDQIYDVYRYLPPELQVVLISATLPHDILEITSKFMTDPVRILVKRDELTLEGIKQFFVAVEKEEWKFDPLCDLYDTLTITQAVIFCNTKRKVDWLTERMRTNNFTVSAMHGDMPQKERDAIMSEFRGGTTRVLITTDVWARGLDVQQVSLVINYDLPNNRELYIHRIGRSGRFGRKGVAINFVRKDDIRILRDIEQYYSTQIDEMPMNVADLI

SEQ ID NO: 3769 - protein, 508 aa, Bacillus cereus ATCC 14579
MILDADIKTQLSQYLQLMENDILLKVSAGDDNVSKDMLALVDELATMSSKITVEKVELERTPSFSVNRPGEDTGVVFAGIPLGHEFTSLVLALLQVSGRAPKVEQKLIDQIKNIQGEYHFESYISLSCHNCPDVVQALNVMSVLNPGITHTMIDGAAFKEEVESKDIMAVPTVYLNGESFGSGRMTLEEILAKMGNGPDASELSDKDPYDVLVVGGGPAGASAAIYAARKGIRTGIVAERFGGQVMDTMGIENFISVKKTEGPKLVASLEEHVKEYDIDVMNLQRAKRLEKKELIEVELENGAILKSKSVIVSTGARWRNVGVPGEAEFKNKGVAYCPHCDGPLFTGKDVAVIGGGNSGIEAAIDLAGIVKHVTVLEFMPELKADAVLQERLNSLPNVTVLKNVQTKEITGTDKVNGISYIDRETEEVHHVELQGVFVQIGLVPNTDWLGETVERVRGEIVTDKHGATNVPGVFAAGDCTNNPYKQIIISMGSGANAALGAFDYLIRN

SEQ ID NO: 3770 - protein, 398 aa, Zea mays
MSRRLYQHAAVMSAWAPAAYTLVLLLYLLAGAVVTAKTNNGVDPGPRQQEPSMPVDSSGDEALSALTCTEPSRARQLAVLSCGPYDVFIYGRRLRLHSPPKEARSPEGMATGSEASKAAEAVVDWHKQDSKRMLHAVYRVGDLDRTIKYYTECFGMKLLRKRDVPDEKYTNAFLGFGPENTNFAVELTYNYGVDKYDIGTGFGHFAIANDDVYKLAENIKSKGGKITREPGPVKGGSTVIAFAQDPDGYMFELIQRADTPEPLCQVMLRVGDLERSIKFYEKALGMKLLRKKDVPDYKYTIAMLGYADEDKTTVLELTYNYGVTEYSKGNAYAQVAIGTNDVYKSAEAVDLATKELGGKILRQPGPLPGINTKIASFVDPDGWKVVLVDNTDFLKELH

SEQ ID NO: 3771 - protein, 235 aa, Rickettsia rickettsii
MKDIEYWEKNFESCKYSDQLIERLLFLNTQVKQPIDIREVQKGIYYARKYHGEQMRQSGDPYYSHPIAVTIMVAEFVAKEVPKLFTFRMLQAALLHDTIEDTELTEEIISNIFDEEVARHVAGLTRIKPWGKISSEKSLILLIKQQRYDTALIKLFDRIHNLQTLEAKSPEKAHKIIKETLKSFLVLSEILEIPSVSELIYAECYKNNLKFNINSTFNKIINFDSFPFSQNKLLP

SEQ ID NO: 3772 - protein, 304 aa, Silicibacter pomeroyi DSS-3
MLELGQKAAPAADLIKDTNEATFMADVVEASQTVPVIVDFWAPWCGPCKTLGPALEAAVTAAKGAVKMVKVNVDENQMIAGQMRIQSIPTVYAFYQGQPVDGFQGALPASEISAFVDRVIAAAGGEAPGAQLEEAVVAAEEMLEQGAAADAAETFAAILGEDPNHAAAYGGLVRAHIALGDLDQAEAILNGAPAEISTKPELEAAHAQLELARQASNAGPVAELAAAVEADPDNHQARFDLAQALHAAGQTEQAVAELLDLFRRDREWNEGAAKAQLFTIFDALKPNDPIVLNGRRKLSSMIFA

SEQ ID NO: 3773 - protein, 499 aa, Escherichia coli K12
MTEPHVAVLSQVQQFLDRQHGLYIDGRPGPAQSEKRLAIFDPATGQEIASTADANEADVDNAVMSAWRAFVSRRWAGRLPAERERILLRFADLVEQHSEELAQLETLEQGKSIAISRAFEVGCTLNWMRYTAGLTTKIAGKTLDLSIPLPQGARYQAWTRKEPVGVVAGIVPWNFPLMIGMWKVMPALAAGCSIVIKPSETTPLTMLRVAELASEAGIPDGVFNVVTGSGAVCGAALTSHPHVAKISFTGSTATGKGIARTAADHLTRVTLELGGKNPAIVLKDADPQWVIEGLMTGSFLNQGQVCAASSRIYIEAPLFDTLVSGFEQAVKSLQVGPGMSPVAQINPLVSRAHCDKVCSFLDDAQAQQAELIRGSNGPAGEGYYVAPTLVVNPDAKLRLTREEVFGPVVNLVRVADGEEALQLANDTEYGLTASVWTQNLSQALEYSDRLQAGTVWVNSHTLIDANLPFGGMKQSGTGRDFGPDWLDGWCETKSVCVRY

SEQ ID NO: 3774 - protein, 478 aa, Kineococcus radiotolerans SRS30216
MTDTVSDTQTTAGPPELEGMGKYQYGWADSDLAGSTARRGLSEEVVRNISALKDEPEWMLALRLKALRLFGRKPMPNWGSDLSGIDFDNIKYFVRSTEKQATSWDELPEDIKATYDRLGIPEAEKQRLIAGVAAQYESEVVYHQIREDLEEKGVIFVDTDTGLREHEELFKEYFGTVIPVGDNKFASLNTAVWSGGSFIYVPKGVHVDIPLQAYFRINTENMGQFERTLIIADEGSYVHYVEGCTAPIYQSDSLHSAVVEIVVKKNARVRYTTIQNWSNNVYNLVTKRATAAEGATMEWVDGNIGSKVTMKYPAIYLMGEHAKGETLSIAMAGEGQHQDAGAKMVHAAPHTASSIVSKSIARGGGRTSYRGLIQVLEGAHHSASTVRCDALLVDTISRSDTYPYNDIREDDVVMGHEATVSKVSDDQLFYLMSRGMAEDEAMAMIVRGFIEPVARELPMEYALELNRLIELQMEGAVG

SEQ ID NO: 3775 - protein, 632 aa, Arabidopsis thaliana
MGCLRSLVRRKQFDSSNGKAETHHHHQQLAKALTFPHLIAIGVGSTIGAGVYILVGTVAREHSGPALALSFLIAGISAALSAFCYAELSSRFPSAGSAYHYSYICIGEGLLIAFAVLLMNSWYCSVAWLIGWALILEYTIGGSTVARGISPNLAMIFGGEDCLPTILARHQIPGLDIVVDPCAAVLVFIVTGLCCLGVKESTFAQGIVTTANVFVMIFVIVAGSYLCFKTGWVGYELPTGYFPYGVDGMLTGSATVFFAYIGFDTVASMAEEVKNPRRDLPLGIGISLLLCCLLYMMVSVVIVGLVPYYAMDPDTPISSAFSSHGIQWAAYLINLGAVMALCSALMGSILPQPRILMAMARDGLLPSYFSYVNQRTQVPINGTITTGVCAAILAFFMDVSQLAGMVSVGTLVAFTMVAISLLIVRYVVPPDEVLIRLELVPLPSSLQENSSSHVGTSIRSKQPLLGKVDDSVVDKENAPGSWVLNKKNRRKFAGWSIMFTCIGNFLLSYAASSFLLPGLLRYSLCGVGGLFLLVGLIVLICIDQDDARHSFGHSGGFICPFVPLLPIVCILINMYLLVNLGAATWVRVSVWLFLGVVVYIFYGRRNSSLVNAVYVSTAHLQEIRRTSGHSLA

SEQ ID NO: 3776 - protein, 153 aa, Methanococcus maripaludis S2
MAKLKYKVEADPKNTARAMGRTLRISRKHAIELCRELSGMKLDAAVAYLNRVIALETPVPFKVHNKDLPHRKGKIGTHSGRFPQKASLEILNVLDNAKKNAEQKGLNTEKLRIKHISSNRGFTIKRYMPRAFGRASPKNQETIHIQVILEEFY

SEQ ID NO: 3777 - protein, 369 aa, Arabidopsis thaliana
MSPPPQRIGLPWPELNDGLAYKDAISSSESELTTVSEFYFTKYKSSAPLLGWIQRIQNGQIQIDGEVVKDPNTLLRSGSKLVYSRLPWKEPDTPYSLEVLYEDDDLIALNKPSGLQVLPGGLFQQRTVLTQLQWCFGKNDSYIGSRESPHPVPVHRLGRGTSGILLCAKTKLAKTKLAAYFAEGTSLVGSGNLDQECGTGRKLSKIYRALADGIVEEDEVVIKQPIGVVRYPGVAQGLYVASPEGKPAFSKVFVLERDREKNCSLVKVEIQSGRPHQIRIHLAYMGHPLVGDPLYVAGGQPKCFDPDLVDDAAAFAEDGGYRRPNQAVPGDCGYHLHAHQVELPNLLNTHKVVKIVAPLPPILQTRCET

SEQ ID NO: 3778 - protein, 439 aa, Thermococcus kodakarensis KOD1
MKIVVVGSGTAGSNFALFMRKLDRKAEITVIGKEPTMQYSPCALPHVVSGTIEKPEDIIVFPNEFYEKQKINLMLNTEAKAIDRERKVVVTDKGEVPYDKLVLAVGSKAFIPPIKGVENEGVFTLKSLDDVRRIKAYIAERKPKKAVVIGAGLIGLEGAEAFAKLGMEVLIVELMDRLMPTMLDKDTAKLVQAEMEKYGVSFRFGVGVSEIIGSPVRAVKIGDEEVPADLVLVATGVRANTDLAKQAGLEVNRGIVVNEHLQTSDPEVYAIGDCAEVIDAVTGKRTLSQLGTSAVRMAKVAAEHIAGKDVSFRPVFNTAITELFGLEIGTFGITEERAKKEDIEVAVGKFKGSTKPEYYPGGKPITVKLIFRKSDRKLIGGQIVGGERVWGRIMTLSALAQKGATVEDVAYLETAYAPPISPTIDPITVAAEMAQRKLR

SEQ ID NO: 3779 - protein, 460 aa, Bacteroides thetaiotaomicron VPI-5482
MKSYNKKFVYSICLVSAMGGLLFGYDWVVIGGAKPFYELYFGIADSPTMQGLAMSVALLGCLIGAMVAGMMADRYGRKPLLLISAFIFLSSAYATGAFSVFSWFLAARFLGGIGIGIASGLSPMYIAEVAPTSIRGKLVSLNQLTIVLGILGAQIANWLIAEPIPADFTPADICASWNGQMGWRWMFWGAAFPAAVFLLLACFIPESPRWLAMKGKREKAWSVLSRIGGNRYAEQELQMVEQTSASKSEGGLKLLFSRPFRKVLVLGVIVAVFQQWCGTNVIFNYAQEIFQSAGYSLGDVLFNIVVTGVANVIFTFVAIYTVERLGRRALMLLGAGGLAGIYLVLGTCYFFQVSGFFMVVLVVLAIACYAMSLGPITWVLLAEIFPNRVRGVAMATCTFALWVGSFTLTYTFPLLNTALGSYGTFWIYSAICVFGFLFFLRALPETKGKSLETLEKDLIK

SEQ ID NO: 3780 - protein, 514 aa, Aspergillus oryzae
MVHLAQVHRNADLDSTIKRVDSIQLENTDEDGFYSSVYGTRFATEQLPQTEMPEREMPREVAYRMIKDELSLDGNPMLNLASFVTTYMEDEAEKLMTESFSKNFIDYEEYPQSAEIQNRCVNMIARLFNAPVHSEDEHPMGTSTIGSSEAIMLGTLAMKRRWQNKRKAEGKDYSRPNIVMNSAVQVCWEKAARYFDVEERYVYCTEDRYVIDPQQAVDLVDENTIGICAILGTTYTGEYEDVKAINDLLIERNIDVPIHVDAASGGFVAPFINPKLEWDFRLPKVVSINVSGHKYGLVYPGVGWVVWRSPEYLPKDLIFNINYLGAEQASFTLNFSKGASQVIGQYYQMIRLGKRGYRSIMTNITVTADFLAQELEKMGFIIMSQRRGHGLPLVAFRLPAEREGQFDEFALAHQLRERGWIVPAYTMAPNSNNLKLMRVVVREDFTKSRCDALLSDIKLGLKTLGDMDKAMLDKYTQHVRTHATHSHKSKHNHPHYKGETHSLQGKHGKTHGVC

SEQ ID NO: 3781 - protein, 406 aa, Thermococcus kodakarensis KOD1
MSFRELGLSSASVEAVERKGFSIPTDIQREVIPLLLSAESDIVGQSKTGSGKTAAFGLPILDSIDESIREVQALILTPTRELAIQVTDELRSLRGKRRIYVYSVYGGQPIGPQIRALEGGVHIVVGTPGRVLDHINRGTLNLDGVRFFVLDEADRMLDMGFQEDIEAIFRATPKEKRVLMFSATMPMDVLLLAKKYMRNPEVVIVSRDELVPGEVEQEYIEAVPHRRFDLLTKILSDESNEFYGIVFCQTKAETRELSMRLRAAGFRAEALNGDMSQPAREKTFNRFKARKTKILVATDVAARGLDVPEITHVINYSIPMNPEQYIHRIGRTGRMGKKGKAITFIAPGELRRFRYITKQAGVEVKKSELSEGIPKEYRERLRQEELEGEYRGRWGSMKPRQRRRRY

SEQ ID NO: 3782 - protein, 325 aa, Neorickettsia sennetsu str. Miyayama
MSKVAVVLLNLGGPDSLDAVRPFLFNLFCDRRIINLPNPFRFCLAWWISRKRFREACKIYSKMGGKSSILPETNMQAKLLGDLLGPQYEVFVAMRHWHPFIQQSATRINGGEFAKAILLPLYPQFSTTTSLSSIEQCLKVLRIPTQVVCCYYDNQLFIEAHVETILPIYAEACAFGKPIILFSAHGLPLSVIKAGDPYKFQVEEFVRRVVAALKIENLDWELCYQSRVGKAKWLCPDTASTIQSHSERPIVVVPIAFVSEHSETRVELDIEYALLARAGYFRVPTLSSHPKFIRCLAELCLNFCEKVESECSMKHKMCFCRFETG

SEQ ID NO: 3783 - protein, 422 aa, Streptomyces collinus
MTRRVAVTGIGIVAPGGIGVPAFWNLLAAGRTATRAITFFDPSGLRSRIAAECDFDPTAHGLDPRDVERSDRYIQFAMVAGDEAVRDAGLDLAAEDPWRVGVSLGTAVGGTTRLEHDYVLVSHGGQRWDVDHREAGPDLHRAFTPGALASTVAERFGARGPVQTVSTGCTSGLDAVGYAFHTVEEGRADICIAGASDSPISPITMACFDAIKATSPNNDDPAHASRPFDADRDGFVMGEGGAVLVLEELEHARGPRCARVLRTRRLRHFGNAYHMTGLTSEGVEMARAIDDALDHARLDPTAIDYVNAHGSGTKQNDRHETAAVKRVLGPHAYETPMSSIKSMVGHSLGAIGAIELVACVLALTHQVVPPTANYETPDPECDLDYVPREARERKLDSVLSVGSGFGGFQSAVVMNRPRETSR

SEQ ID NO: 3784 - protein, 363 aa, Rubrivivax gelatinosus PM1
MKHAPEPAHRHGGAERCAILLVNLGTPDEPSAPALRRYLAEFLSDPRVVEIPRAVWLPILHGVVLRVRPAKSAAKYASIWTAEGSPLKVWTEKQAKLLTGYLGERGHPVLVRAAMRYGQPSVATQLDALKADGATRILVLPLYPQYAAATTASVFDAVYAWAARTRRVPELRFVNHYHDDPGYILALGRCIEDHWMRNGRAERLVLSFHGVPERTLRLGDPYHCECQKTARLLTERLALKPEQVLVTFQSRFGKAKWLEPYTEPTLVQLAQQGIRRVDVACPGFTSDCLETLEEIAQEAREAYLHAGGETFHYIPCLNDRHEWIAALSDIAIRHLQGWPTQTAPDPAALQAQALRARQLGAQA

SEQ ID NO: 3785 - protein, 421 aa, Streptomyces griseus
MTARAVITGIGVVAPGRPGRENFWEMIVKGQTATRRITLFDPAPFRSRIGAECDFDPERNGLSYQEMARTDRAGQFAIVAAREAVADSGMDLGAENAHRVGVSVGNGVGNAISMEQAYRTVSDNGRRWLVDQEYAGPHLYSSVMSSSLAAEVAWATGAEGPATVVSSGCCAGIDAVGYAVDLIREGSAEVMVAGATDAPIYPITVSCFDTLRASSTSNDDPEHACRPFDRRRNGLVLGEGSAVFVVEELEHARRRGARIYCEVAGYSARANGYHMTGLRPDGREMGEAITAALDEARINPDEVDYANAHGSGTKQNDRHETAAYKRSLGEHAYRIPVSSIKSMVGHSLGSIGSIEIAASALAIDRGTVPPTANYEERDPECDLDYVPGTAREAELDVVLSVGSGFGGFQSAVVLTSPRRIA

SEQ ID NO: 3786 - protein, 492 aa, Kluyveromyces lactis NRRL Y-1140
MFRLGRNSTVGRLARGKWYSQISKNAENSQVTTLDNGVKVATSNVPGHFSALGLYVNAGSRFEDKNLKGCTHIMDRLAFKSTDHISGRDMTETLELLGDNYQCSSSRETMMYQSSVFNPDVEKMFHLMSETVRYPRITEEELEEQKTTALYEIDGVWQKHDLILPELLHQTAYSGETLGSPLLCPKELIPSISKYYLTDYRNKFYNPENIVAAFVSVPHDDAVQLTEKYFGDMKSKYPPVTKKPAKYTGGEYCIPPGPVFGGLPELYHMQLAFEGLPIDHPDIYALATLQTLLGGGGSFSAGGPGKGMYSRLYTHVLNQYYYVENCVSFNHSYSDSGLFGVSISCIPQAAPFAAEIIAQTLSNVFANDKLKLTKEEVSRSKNQLKSSLLMNLESKIVELEDLGRQVLLHGRKIPMKEMMENIEKLTVDDIKRVAETVFTGKVNNPGNGNGKVTVVMQGERESFGDIETVLRFYGLGNYPKLDVPKMKKQGWF

SEQ ID NO: 3787 - protein, 122 aa, Photobacterium sp. SKA34
MTLEITGKNIDITPAIRERFEFKFNKLEKLQVPLIKKHVVISKEPSKQFKVEAAVNVAGGQLVASAEHDDLFGAITELYQKLDRQLKKQAHKPNARRASHSEKPEVAEEKVELDEVELDDAY

SEQ ID NO: 3788 - protein, 487 aa, Zea mays
MAAPSSETKSPSSSNTQLPLKPIPGSYGMPFFGAISDRHNYFYHQGRDKFFATRIEKHNSTVIRTNMPPGPFISSDPRVVALLDGASFPILFDNDKVEKLNVLDGTFMPSTKFTGGFRVCAYLDTTEPNHALIKQFFLNVLAKRKDSFVPLFRNCLQESFAEIEDQLSKNTKADFNTVFSDASFNFMFRLFCDGKDPSQTNLGSKGPKLVDTWLLFQLAPLATLGLPKIFNYIEDFLIRTLPFPACLTKSGYKNLYEAFKTHATTALDEAEKLGLKRNEACHNVVFTAGFNAYGGLKNQFPYVLKWLGLSGEKLHADLAREVRRVVNDEGGVTFTALENMPLVKSVVYEVMRIEPAVPYQYARARENLVVSSHDASFEVKKGEMLFGYQPFATRDPRIFEDAEVFVPRRFVGEGEKMLKHVLWSNGRETEEPSASNKQCPGKNLVVLLCRLFLVELFLRYDTFEFEYTQAGFGPTITIKSLTKASTI

SEQ ID NO: 3789 - protein, 123 aa, Arabidopsis thaliana
  misc_feature (60)..(60): Xaa can be any naturally occurring amino acid
  misc_feature (79)..(79): Xaa can be any naturally occurring amino acid
  misc_feature (107)..(107): Xaa can be any naturally occurring amino acid
MAGVMKLACLLLACMIVAGPITSNAALSCGSVNSNLAACIGYVLQGGVIPPACCSGVKNXLTSIAQTTPDRQQACNCIXGAARALGSGLNAGRAAGIPKACGVNIPXYKISTSTNCKTREVMS

SEQ ID NO: 3790 - protein, 245 aa, Frankia sp. EAN1pec
MPTLVLLRHGESTWNRENLFTGWVDVDLSEKGLKEATRGGELLQEAGVLPDVVHTSLLTRAIRTAWLALDAAGRTWVPVRRSWRLNERHYGGLQGLNKAETLAKFGDEQFLLWRRSYDTPPPPIEPGQPSGVDERYADLAPDVIPLTECLRDVVVRMLPYWYDSIVPDLRSGATVLVTAHGNSLRALVKHLDGISDTDIANLNIPTGIPLRYELDDDLKVLDSGYLDPAAAETAAAAVAAQGKKK

SEQ ID NO: 3791 - protein, 80 aa, Glycine max
  misc_feature (73)..(73): Xaa can be any naturally occurring amino acid
MLEFNFMQHILYRQKEQFSDGVGYGWIDGLKAHAEKHVTDRMMLNAANIFPFNTPTTKEAYYYRMIFERFFPXVNLINHA

SEQ ID NO: 3792 - protein, 447 aa, Yarrowia lipolytica CLIB122
MLRTIRSQSMRMASASSRRMLSSAASTSMLRQTLKAPSMTAQVTRPTVMTFKPVLLSRGYADVVEVPPMAESLTEGTLTAFEKDIGDFVEADEEIATIETDKIDVAVNAPFAGTITEFLVKPDDTVTVGQPLLKIERGEGSSSGGSKPPKEKKEEKTEEKEEPAPKEESAPAPKKEEAPKKEESAPAPKKEEKKPAPKEEKKTDATEGLGGFRKEERVKMNRMRLRIAERLKESQNTAASLTTFNEVDMSSLMEMRKLYKDEMLKKTGTKLGFMGAFSKAAALAMRDVPAVNAAIEGPNGGDTIVYRDYVDISVAVATPKGLVTPVVRNVDQLDVMGIEKAIHDLGVKARDNKITLEDMAGGTFTISNGGVFGSLFGTPIINMPQTAVLGLHGVKDRAVVVDGQVVSRPMMYLALTYDHRVLDGREAVVFLRTIKELIEDPRKMLLM

SEQ ID NO: 3793 - protein, 940 aa, Streptococcus thermophilus CNRZ1066
MAFNKLESSNNQEIISEEVGILKELLDDATRGMAGEQGLTTIQHLVELYDEGDYEALTQAISEMTNDDMVFASRYFSLLPLLINISEDVDLAYEVNRKNNIDESYLGKLSETFDVVAESDNARDILENVNVVPVLTAHPTQVQRKTMLELTNHIHELLRKHRDVKDGLINKDKWYADLRRYVEIMMKTDIIREKKLKVKNEITNVMEYYNSSLIKAITKLSHEFKRLAVEKGIELDNPTPITMGMWIGGDRDGNPFVTAETLKLSATLQSEVILNYYIEKVDNLYRSFSLSSRLTEVSETVAEMAKLSPDTSVYRENEPYRRAFSYIQSKLIQTLLFFKAGNFSNERAAKRLSENVRLGSVSTGEVVADFVHDRLSQSLQAVSQQTTEFYETAEAFHDDLLAIKNSLLENDDSVLISGDFEELLQAVEVFGFYLATIDMRQDSSVHEACVAELLKSANIVDNYSELTEVEKVAVLLKELQEDPRTLSSTNVSKSETLEKELAIFRTARLLKDYLGEEVIKQHIISHTESVSDMFELAILLKEVGLVDTERARVQIVPLFETIEDLENSNEIMKQYLGYDIVKRWIKNSNNYQEIMLGYSDSNKDGGYLSSGWTLYKAQNELTNIGEERGIKITFFHGRGGTVGRGGGPSYDAITSQPFGTIKDRIRLTEQGEVIGNKYGNKDAAYYNLEMLVSATLDRMVTRQITDPDELVDFREIMDSIVQDSNRIYRDLVFGNEHFYDYFFEASPIKEVSSLNIGSRPAARKTITDISGLRAIPWVFSWSQNRIMLPGWYGVGSAFNHYIEAEEGNLEKLQHMFETWPFFRSLLSNVDMVLSKSDMNIAFHYAQLAESEEVRSVFNIILDEWQLTKNVILAIEKHDDFLEESPSLKASLGFRLPYFNVLNYIQIELIKRLRNNNLTDDEISLIHITINGIATGLRNSG

SEQ ID NO: 3794 - protein, 866 aa, Rhodospirillum rubrum ATCC 11170
MPRRMRDGLRQGLGSTLGRRVTRSLLIGIVVLEILVVAPSAILHRRSLLDDLEADARALGLAAAAPPEASLGEWGRRLGVLLGDERITGAQLLRNDFAVAGIGDRPDSHPGSQGRHADDGHSLDIAIPLTASETLTLRLDKHTITKKLWTEIGWLALMTLVMAAAVILIAAIVAGRLVLLPLLDLRRLVVDIRPGEGRGPSSEAIGRTDELGDLFRAVEDLRRRIEMSLLEAATQARFPSENPNPVIRTSDSGGLLYANASARLRPGFLDGETLHPTIIALVRETTGRGEIMTSEIRLGTRIYLLTAVPITHDRYVNIYASDVTDRVKAEIALRSLNESLEAQVLTRTRDLAESEARTRAIIATMVDGLIVMDDQGRIDLFNAAAQRIFGYDESEVVGQNAALLMSAEDAAGHAEPFGLHLWDGRSPLLNGTRKVIGRRKNGASFPLAVAISALPAPPPGGAPARRLFTGVVRDISDQIRHESDLRKVKDEAEVANRAKSDFLAVMSHELRTPLNGVLGMADLLCDTPLDAEQRRYTRTIAISAEALLVIINDILDLSKIEAGHLDLESRPFDPATLLEGVRTLMEGPARDKAIALRTSIEGAKPPLRLGDEGRLRQILLNLANNGVKFTEKGSLTLRLKAGTGGALRFEVEDTGIGIPKEKQDTLFHDFTQVSASTARRFGGSGLGLSICRRLVGLMGGRLGFDSTPGVGSLFWFEVDLPEVVASQSPPPPPFQGPPLSILVVEDNEINRQVALGLLTKLGHRVTCVDDGAAAVRVVDTMPFDLILMDVQMPGMDGYEATRLIRGKPAPVGGLPIVAMTANATSGDVAAAMAAGMTGYLSKPITRKRLAEALMAHGPGATVSTTG

SEQ ID NO: 3795 - protein, 349 aa, Bacillus cereus ATCC 14579
MNREELFDVTVIGGGPAGLYSAFYSGLREMRTKIIEFHPHLGGKIHVYPEKMIWDVGGLLPVTGDKLIEQLVQQGLTFKPEVVLDTKVESIIRNQDGTFTLKTSTGEEHFSKTVIVATGSGILKPQKLSIEGAERFEVSNLNYTVKSLKRFKGKTVIISGGGNSAVDWANELEPIAKKVYVTYRKEELSGHEAQVKQLMNSSAECFFNTSITKLIAGDNHEAIEYVELTNHETGEVSHLPIDEVIINHGYERDITLLENSELDVAIIDNYYIAGNANSESSVDGLYAAGDILKHEGKLHLIAGAFQDAGNAVNKAKQFIQPDASEYGMVSSHNEVFKKRNRELIKQMMK

SEQ ID NO: 3796 - protein, 235 aa, Rickettsia montanensis
MKDIEYWEKNFESCKYSDKLIERLLFLNTQVKQPIDIREVKKGIYYARKYHGEQMRQSGDPYYSHPIAVTIMVAEFVAKEVPKLFTFRMLQAALLHDTIEDTALTEEMISNIFDAEVARHVTGLTRIKPWGKISSEKSLILLIKQKRYDTALIKLFDRIHNLQTLEAKSPEKAHKIIKETLKSFLVLSEILEIPSVSELIYAECHKNNLKFNINSTFNKIINFDSFPFSQNKLLP

SEQ ID NO: 3797 - protein, 496 aa, Zea mays
PRVRALSVFCRAAFDQECVPRTADKRLVRQVSAECRGLPLALKVIGASLRDQPPKIWLSAKNRLSRGEAISDSHETKLLERMAASVECLSEKVRDCFLDLGCFPEDKKIPLDVLINIWMEVHDLDEPDAFAILVELSNKNLLTLVNDAQNKAGDLYSSYHDYSVTQHDVLRDLALHMSGRDPLNKRRRLVMPRREETLPKDWQRNKDTPFEAQIVSIHTGEMKGSDWFQMNFPKAEVLILNFASSLYYLPPFIASMQNLKALVLINYGTSSAALDNLSAFTTLNGLRSLWLEKIRLPPLPKTTIPLKNLHKISLVLCELNSSLRGSTMDLSMTFPRLSNLTIDHCIDLKELPASICEIGSLETVSISNCHDLTELPYELGKLHCLSILRVYACPALWRLPASVCSLKRLKYLDISQCINLTDLPEELGHLTSLEKIDMRECSRLRSLPRSSSSLKSLGHVVCDEETALLWREAEQVIPDLRVQVAEECYNLDWLAD

SEQ ID NO: 3798 - protein, 281 aa, Zea mays
  misc_feature (237)..(237): Xaa can be any naturally occurring amino acid
MAPAPAALSAANALSLLAPARVSSGRWSSLSVSVSARPVTGVVSVAAATAQRRLVAAAAATEMAPAASGEEGSKPFVEEMRAVAMKLHTKDQAREGEKEPQAPPVAKWEPSVEGYLRFLVDSKLVFQTLEAIVERAAVPWYAEFRNTGLERSEALKNDLEWFRQQGHTIPEPSAPGTTYASLLEELSEEDPQAFICHFYNVYFAHTAGGRMIGKKVSEKILNNKELEFYKWEGNLSXLLQNVRNKLNQVASSWSREEKDHCLEETEKSFSYSGGLLRHIFT

SEQ ID NO: 3799 - protein, 303 aa, Bacillus thuringiensis serovar konkukian str. 97-27
MIYTVTLNPSIDYVVQVNSLDLGAVNRAEKDMKFPGGKGINVSRILHRLGVENVALGFTGGFTGRFIKDVLQTEGVITNFVQVDGDSRINVKIKGQEETELNGQGPSVTNEQFEQLMKQIESMQKGDYVVLAGSVPASIPTTFYESIAAFGAEKGIRVVVDASGSALQHVVKNKPFLIKPNHHELGELFGVEISTAEDILPYGRKLIEQGVEHVIVSMAGDGALLFTAEGIYEATVPKGVVINSVGAGDSLVAGFVGKYEQTKDIEKAFQYGVATGSATAFSADLCEKEKVEELLSQVIVTKR

SEQ ID NO: 3800 - protein, 209 aa, Triticum aestivum
  misc_feature (186)..(186): Xaa can be any naturally occurring amino acid
MAAAAPAMRAGLAAFLLLLAASGAGAVGAEGALPRFAEAPEYRNGEGCPAAVAGAGVCDPGLVHIAMTLDAHYLRGSMAAIYSLLKHASCPESLFFHFLAADGAAPGVAELRSALAASFPSLRFEIYPFRADAVTGLISASVRAALEAPLNYARNYLGDLLPKCVPRGIYLDSDVLAVDDVRRVWXKRAWPAAAVFAAPEYCPRPTSSR

SEQ ID NO: 3801 - protein, 154 aa, Arabidopsis thaliana
MALCATTQRTIRIAATLRRVARPFATDAVVESDYKRGEIGKVSGIPEEHLSRKVIIYSPARTATQSGSGKLGKWKINFVSTLKWENPLMGWTSTGDPYANVGDSALAFDSEEAAKSFAERHGWDYKVKKPNTPLLKVKSYSDNFKWKGNPQPEN

SEQ ID NO: 3802 - protein, 502 aa, Gibberella zeae PH-1
MSPPSIPLIAPNGVKWSQPTGLFINNEFVSSSSSRTLTSIDPATENEIATVQAADAQDIDKAVKAAKAALRHPSWKDLPASDRGQLMARLADLIEAKRELFATIDAWDNGKTYIETLENDLVEAVGVIRYYSGWADKTFGQTINTTPQKFAYTIRQPIGVIAQIIPWNYPLSMATWKLGPALACGNAVVIKAAEQTPLSLLVLGELIKEAGFPPGVVNIVNGLGKDTGAALVQHPLVDKIAFTGSTATAANIMGVAAKTLKNITLETGGKSPLIVFDDAEMDQAVKWSHFGIMSNQGQICTATSRILVQETIYEEFIKKFIDTLNTVSKVGDQWDKTTYQGPQVSKVQYERILEYIEIGKKEGATLAAGGGPLKINGSDKGFYISPTVFTDVKPSMRVFREEIFGPVVVVSTFKTEEEAIELANDTTYGLGAAAFTTNLEKAHRVAAAIEAGMVWINSSQDCDPRVPFGGVKQSGIGRELGEAGLEAYTQIKSVHINMGNRL

SEQ ID NO: 3803 - protein, 179 aa, Glycine max
MSVTRVSWFTEFLPKAIMSDEGERTCPLCAEEMDLTDQQLKPCKCGYEICVWCWHHILEMAEKDDTEGRCPACRSPYDKEKIVGMAANCERLVAEVHMEKKMKNQKAKSKSSEARKQLSSVRVIQRNLVYIVGLPLNLADEDLLQQREYFGQYGKVLKVSMSRTTAGVVQQFPNNTCSV

SEQ ID NO: 3804 - protein, 110 aa, Anaplasma phagocytophilum HZ
MAHVTEIGDSDFADKVERKSGIVVVDFWAPWCGPCVAFAPQLDKIAERYSGKIDVYKLNVQDHQETPIKFGVSAVPTLIVFKNGVESARIVGVNLQQLLSAIDGAIGSQN

SEQ ID NO: 3805 - protein, 952 aa, Silicibacter pomeroyi DSS-3
MAFKLTDYEAYDFANRRHIGPSPREMADMLQVIGFKTLDQLIDATVPPSIRQKEALDWGPAMTERDALYHMKQVASKNKVLTSLIGQGYYGTTTPAPILRNILENPAWYTAYTPYQPEISQGRLEALLNFQTMVSDLTGLDVANASLLDEATAAAEAMAMAKRSSRSKANNAAFFVDKNCHPQTVAVIRTRAEPLGVDVQVGDPSELEAGAVFGAIFQYPGTYGHVRDYTAEIAALHEHNAIAIVAADILSLALLKSPGEMGADIAIGSTQRFGVPMGYGGPHAAYMATTDKLKRAMPGRIIGVSIDARGNKAYRLALQTREQHIRREKANSNVCTAQALLAVMASMYAVYHGPDGIKAIAQSVHRKTSRLAAGLEEHGFKVAPEVFFDTITVDVGPLQKTVIEAAVARGVNLRKVGSDRIGISLDEQTRSETIEAVWGAFGIDKKDDSVKNRAYRLPDYALRETPYLTHPIFHKNRAEAEMTRYMRRLADRDLALDRAMIPLGSCTMKLNATIEMIPVTWPEFANLHPFVPEDQAQGYLEMIDDLSEKLCQITGYDAISMQPNSGAQGEYAGLMTIRNYHAAQGQGHRNICLIPTSAHGTNPATAQMVGYQVVPVRSDDHGNIDLADFRAKAEQHSANLAACMITYPSTHGVFEETVREVCDITHEHGGQVYIDGANMNAMVGLAQPGEIGGDVSHLNLHKTFCIPHGGGGPGMGPIGVKAHLAEHLPGHPEYGTAVGPVSAAPFGSPSILPVSWAYVLLMGGAGLTQATKVAILNANYIAARLKDAYPILYTSATGRVAHECILDTRPLNDEGGVSVDDVAKRLIDSGFHAPTMSWPVAGTLMVEPTESEPKDELDRFCEAMLSIRAEAQQIIDGKIDPENNPLKHAPHTVRDLVGDWDRPYSREQACFPPGNLGVDKYWPVVNRVDNAYGDRHLVCTCPPMDAYEEAAE

SEQ ID NO: 3806 - protein, 150 aa, Aspergillus oryzae
MCGIGAFLDFHNHSQPVSHQQLESEIDNGLDFIKHRGPDARGKWVNADGRVGLGHIRLSIVDPSPSGNQPFHDSRGDIHAVVNGELYDHERYREQLASEFDFKGNSDCEIVIALYKHYGASFLSHLRGEFALVLWDAKRELFFAARDRRN

SEQ ID NO: 3807 - protein, 333 aa, Neorickettsia sennetsu str. Miyayama
MNTDVIIIGAGPVGIFTAFQAGMLGMRAHVIDSLLSIGGQCTALYPEKFIYDIPGYKQITAAALISNLAEQAERFNPTYHTDQFATHMDRLDTSFVVKTSKEIEITAKAVIIAAGAGAFDYNRIPIESSHVYEGKSLFYSVKDPSIFTSKVVVIAGGGDSAADWGLILSKLARKVYLIHRRSKFRCSDSTFKDLKSLEETKKLKILTPYQITGLRGSGGQISHIELGGLTGESVTLEADYLLAFFGLKPSLRHLEEWGIEITHNCINVDPLTCSTNIKGVYAVGDVAHYDSKLKLILSGFSEAATACHHIRETIIGGDVYNFRYSTNMNEVFR

SEQ ID NO: 3808 - protein, 332 aa, Ehrlichia canis str. Jake
MKSLTVREALCAAIREEMERDHTVLIMGEEVGEYQGAYKVTQELLAQFGPERVIDTPITEHGFAGIGVGAAFGGLKPIVEFMTFNFAMQAIDQIINSAAKTNYMSGGQLNCPIVFRGPNGAAARVGAQHSQCYASWYAHVPGLKVISPYFAADCKGLLKAAIRDPNPVIFLENEIAYGHKHEIEDEVLTSDYTTEIGKAAIVKEGMDITITAFSIQVKNALAAAELLEKEGINAEVIDLRTLRPLDTETILCSIKKTNRIITVEEGWPYSGIGSEIAALIMEQAFDDLDAPVIRVTGKDVPLPYAANLEKLSLPQVTDILEAARILCLRNYK

SEQ ID NO: 3809 - protein, 525 aa, Polaromonas sp. JS666
MSQSMKRLRCDQTPAWAALQASFEAGGKSFDLREAFAGDAERFFRFSQEAPYVFADLSKNLLDVTSEALLLDLAVQCQLEQHRDAMFAGDRINSTEQRAVMHFLLRQPALPALEQAQSAIKNTAHELSQVHATLDAMLAYAEEVRADEAITDVVNIGIGGSDLGPQMAVLALGEFATTGKRFHFVSNVDGQELAGVLAQCQPHSTLFLVASKTFTTNETMSNAHSAKRWFEAGGGRDINRHFAALTTNVVAANAFGIRSTFGFWDWVGGRYSLWSAIGLPVAIAIGAVGFRELLAGAHAMDEHFRTAALARNLPVRLGLLDVWYRNFHGFGSRSIAPYSSALRRLPAYLQQLEMESNGKRVDTDGQPLPFATAPVLWGEPGTNGQHAYFQMLHQGTSVVPIEFVAVRKAAHGLPGHHEQLLANVLAQAQALMQGKNDEGGHRHFPGNRPSTFLLLDQLTPASLGALIALQEHRVFVSGALWGINSFDQWGVELGKVLAKDIEPRLRSGDTSGLDGSTAGLLQRLR

SEQ ID NO: 3810 - protein, 396 aa, Xylella fastidiosa 9a5c
MAQDKFKRTKLHVNVGTIGHVDHGKTTLTAALTKVGAERFGGEFKAYDAIDAAPEEKARGITISTAHVEYETEVRHYAHVDCPGHADYVKNMITGAAQMDGAILVCSAADGPMPQTREHILLARQVGVPYIVVFLNKADMVDDAELLELVEMEVRELLSKYDFPGDDTPIVRGSALKALEGDQSEIGVPAIIRLAEALDTHIPNPERAIDRPFLMPVEDVFSISGRGTVVTGRVECGVIKVGDEVEIVGIRPTSKTIVTGVEMFRKLLDQGQAGDNAGLLLRGTKRDEVERGQVLAKPGSIKAHKEFEAEVYVLSKEEGGRHTPFFNGYTPQFYMRTTDITGKVCLPEGVEMVMPGDNVKVTVSLINPVAMGEGQRFAIREGGRTVGAGVVSKVIG

SEQ ID NO: 3811 - protein, 554 aa, Burkholderia pseudomallei K96243
MHSMSNPRLRFSSVVYGLIALAACASFAAHASGARCAASPAKSADGTPQWRPALHYTPRRNWMNDPNGLVYENGVYHLFYQYNPHGNFWDDMSWGHATSRDLVHWDEQPVAMPANAREDIFSGSIVADARNTSGLGTPNAPPLVALYTSVYKAGSGHEPGTQAQSLAYSIDHGKTWRPYAHNPVLTLAPESRHFRDPNVTWYAPGGYWMMTAVVADAPVVKLYRSSDLIRWDFLSDFTLPDVPHRGALWEMPELLPMPLDGDAARMKWVMIVNVNPWSIAGGSGAMYFIGEFDGRTFTPDRAAPANADPAQYSWLDHGADYYAAGTFANAPGEGPVAIAWMSNWDYAERIPTTPWKGAMALPRELALKTIDGRPRVTVAPARAFDAFARTRPAVRIGSLAVASATRELGADARGTVQRIAVTIEPRSARRAGLIVRRSANGRVGTRIVYDSSAHTLSVDRSASGETNFSNAFSQRHIVALPLVNGKLRLDVIVDRDSVEVFDGDGRTVITDLVFPSPADNRLAVFAEGGDATFGDVVVTNLDETAGERRGCPTS

SEQ ID NO: 3812 - protein, 421 aa, Zea mays
MPDAIPACFRAAAAPSGRASPAPSGSGSGSGAGTSLATSVYDTRLGLATLSWSRAPLGLSLRAVLRVSAGPAPAPSPSASDYGDGEVEYDDEEEEATVAVRVRPWLLWRRRGSKRFRVRERRVELAWDLSRARFPPSGSPEPSSGYFVAVVVDGEMAVVAGDMADEAYRKTRARRPAGPGPVLVSRREHVSMRDGAGGGGRCHRTCVVVRGREREISVDLVSRAQGQGRERDRAEVGMSVSVDGDRVLHVRRLRWKFRGTERVDLGGGDRVLVSWDLHNWLFPARDASPPDAAAAAPVPPAHAIFVFRFELADAGEERDPADAKEEELLDKAGTGGGGWPGYVSGWGRGDWSESSSNGGEKRRKRGQASRLAKASSSSSASVASSSASWASGSTVMDWGSAEEAQLQSGDGFSLLVYAWKN

SEQ ID NO: 3813 - protein, 399 aa, Candida albicans SC5314
MDDFDRDLDNELEFSHKSTKGIKVHRTFESMNLKPDLLKGIYAYGFETPSAIQSRAIMQIISGRDTIAQAQSGTGKTATFSIGMLEVIDTKSKECQALILSPTRELAIQIQNVVKHLGDYMNIHTHACIGGKNVGEDVKKLQQGQQIVSGTPGRVIDVIKRRNLQTRNIKVLILDEADELFTKGFKEQIYEIYKHLPPSVQVVVVSATLPREVLEMTSKFTTDPVKILVKRDEISLSGIKQYYVQCEREDWKFDTLCDLYDNLTITQAVIFCNTKLKVNWLADQMKKQNFTVVAMHGDMKQDERDSIMNDFRRGNSRVLISTDVWARGIDVQQVSLVINYDLPTDKENYIHRIGRSGRFGRKGTAINLITKDDVVTLKEFEKYYSTKIKEMPMNINDIM

SEQ ID NO: 3814 - protein, 311 aa, Pyrobaculum aerophilum str. IM2
MVTWIRGEELHARTKEWARSHVKRLEEVGITPKLAVLLLNDDPVELETQRRFVTLKARDVREIGGEVEIYELYSAPPERRTKEALRLIESLNRRDDVTGVIIQKPLPPFVDEKALFSALSPEKDVDALTPENKKRLLTDFDLDRDVLPCTPAGILELFKLYGIDVRGKDVVVVGKGELVGKPLAVMLMQLDATVTVLHALSKEREPYVKRADIVISAVGRPPELYKDNPWRLTGDMIKEGAVVVGVGGKVDPATKRWFFDVDEKSVAEKASYLTPNIGGVGLATRARVLKNLIRTTYQVAQRVLSPRLYEV

SEQ ID NO: 3815 - protein, 290 aa, Ralstonia metallidurans CH34
MAVLIDQHTRVICQGFTGAQGTFHSEQALAYGTKMVGGVTPGKGGETHLGLPVFDTVSAAAHATGADASVIYVPPPFAADAILEAVDAGIGLIVCITEGIPVIDMVRVKRALSGSASRLVGPNCPGVITPGQCKIGIMPGHIHKPGRIGVVSRSGTLTYEAVAQTTATGLGQSTCIGIGGDPVNGTNFIDSLELFLADDQTEGIIMIGEIGGSAEEEAAQFLRDARTRKPVVGFIAGSTAPPGRRMGHAGAIISGGTGTAEAKIEAMREAGIHVAASPAELGNTMAAAMR

SEQ ID NO: 3816 - protein, 214 aa, Zea mays
  misc_feature (150)..(150): Xaa can be any naturally occurring amino acid
MGSWEENVRQFLLEEEEDDDELFFVILPAIIPYLSEEKRPIHTTSLTGAKKVKEINEGHESWCKSGFRMEKEIFKATSNFLRRENLLCDTRGVSTEEQLGMFMYMISHNASNQMLQKAFQHSGDTIHRKISEGFEIVPILTQRFVKLSSXVQTHARIATGSRFMPFFSGELQLQTHNGPVLFATSHQHISIFVPSMQNCLGAIDGTYVPRPRPR

SEQ ID NO: 3817 - protein, 112 aa, Burkholderia sp. 383
MKRITAIIKPFKLDEVREALAEVGLTGLTVTEVKGFGRQKGHTELYRGAEYVVDFLPKMKIEVVVAEAQVDQVIDAVIGAARTGKIGDGKIFVSDVERVIRIRTGEENEAAV

SEQ ID NO: 3818 - protein, 408 aa, Photobacterium sp. SKA34
MIVLSAYFSSSETGMMALNRYKLRHMANQGHKGAKRVEKLLSRTDRLIGLILIGNNLVNILASAIATILGMRLYGDAGVAIATGALTILILVFAEVTPKTVAALYPERVSYASSIILNILMKVLYPLVWFVNGITSAFLFILGLKNSNNSSSKLSSEELRTIVNEAGGLIPRRHQDMLLSILDLENVTVEDLMVPRSEIAAINVNDDWKSIVRQLSHSAHGRIVLYRDNIDEVVGMLRVREAYRLMMDKNDFSKENLLRAADEVYFIPEGTPLNIQLLKFQRNKERIGLIVDEYGDIQGLITVEDILEEIVGEFTTSIAPTLAEEITAQSDGSLMIEGSANIRDLNKSLNWKLPTDGPRTLNGLILEHLEYIPDNKVSFMIANHKMEIVEVSGNMIKLIKVLPNTQNK

SEQ ID NO: 3819 - protein, 364 aa, Alkaliphilus metalliredigenes QYMF
MIMKKFKIAVIPGDGIGNEVTAEGVKVLNTYAEIKGNVEFSYEYFPWGCEYYLKTGKMMDDDGLKTLEAFDAILLGAVGDPSVPDHISLHGLLINIRQGFNQSINLRPIKLLQGAPCPLKDKGPQDIDFTVIRENVEGEYAGVGGFRFPGRPEEVALQTSVFSRKNTEKVMDYAFKLARKRKKFNKVTNVTKSNALNYSMVFWDKIFEEIATNYKDIKTETTHVDAVSMYFIQKPEVYDVLVASNLFGDIITDLGAALQGGLGFAASANLNLEKEYPSMFEPVHGSAPDIKGKQLANPIAMIWTAKMLLDFLLEEDDTEMIIDAITAVLQEEKTLTPDLKGKAKTHEVGDAICGKLKEIMNAKI

SEQ ID NO: 3820 - protein, 954 aa, Pseudomonas syringae pv. phaseolicola 1448A
MTDRIELTTANEFIARHIGPRAADEQAMLQTLGFDSIEALSESVIPESIKGTSVLNLPAGQSEADALASIKAIASKNQLFKTYIGQGYYNTHTPAPILRNLLENPAWYTAYTPYQPEISQGRLESLLNFQTLISDLTGLPIANASLLDEATAAAEAMTFCKRLSKNKGSQQFFASSHCHPQTLDVLRTRAEPLGITVVVADEAELGDVSDYFGALLQYPASNGDVFDYRELVERFHAANALVAVAADLLALTLLTPPGEFGADVAIGSAQRFGVPLGFGGPHAAYFSTRDAFKRDMPGRLVGVSVDRHGKQALRLAMQTREQHIRREKATSNICTAQVLLANIASMYAVYHGPRGLTQIAKRVHQLTAILAEGLSTLGLKAEQAFFFDSLTLNTGSRTAALHAAARARHINLREIDDQHLGLSLDETTSQSAVETLWEIFASDGQNLPDFTALAASVPSRLPATLLRQSAILSHPVFNRYHSETELMRYLRKLADKDLALDRTMIPLGSCTMKLNAASEMIPVTWAEFGNLHPFAPAEQSTGYQQLTDELEAMLCAATGYDAISLQPNAGSQGEYAGLLAIRAYHQSRGDEHRDICLIPSSAHGTNPATANMAGMRVVVTACDARGNVDIEDLRAKTVQHRDQLAAIMITYPSTHGVFEEGIREICGIVHDNGGQVYIDGANMNAMVGLCAPGKFGGDVSHLNLHKTFCIPHGGGGPGVGPIGVKSHLAPFMPGHARMERKEGAVCAAPFGSASILPITWMYIRMMGGEGLKRASQLAILNANYISRRLEEHYPVLYTGTNGLVAHECILDLRPIKDSSGISVDDVAKRLIDFGFHAPTMSFPVAGTLMIEPTESESREELDRFCDAMIKIREEIRAVENGTLDKDDNPLKNAPHTAAEIVGQWSHPYSREQAVYPVDSLIENKYWPPVGRVDNVFGDRNLVCACPSIESYQEA

SEQ ID NO: 3821 - protein, 127 aa, Triticum aestivum
MAASMITSPIVAPTSVPSLSRRGSSFAVVCSGGKKIKVDKPLGLGGGLTVDIDANGRKVGKKGVYQFVDKYGANVDGYSPIYTPEEWSESGDRYAGGTTGLLIWAVTLGGLLGGGVLLVYNTSALAG

SEQ ID NO: 3822 - protein, 230 aa, Bordetella bronchiseptica RB50
MSNVVPTPVSPLFAQPFATRLERALQHLRIGRPVILMDDFDRENEADLIVAADKLTVPVMAQLIRDGSGIVCLCLPGETLDRLELPPMVDSNRSRYSTAFTVSIEAREGVTTGVSAVDRVTTIRAAIAPGARSGDVVSPGHVFPLRAQPGGVLTRRGHTEGSVDLAALAGLRPAGVLCELMNADGTMMRGASLERYAAKEGLVALAIDELAAHLQARGATGAPAELAVAA

SEQ ID NO: 3823 - protein, 882 aa, Alkalilimnicola ehrlichei MLHE-1
MSIQDSDAALRDDIRLLGEMLGDTLKEQEGTDLFDTVERIRALAKQARAGDQGAAEALEQELGSLDEHQIMPVARAFSQFLNLANIAEQHHRVRRSREWARSPDASPLKGSLAEAFPRLLQGETDPEALYHAACELDIELVLTAHPTETQRRTMLQKYNRIARLLDGRDRLDLTPDETEEVTAGLRREIIGAWQSDEIRRRRPTPVDEARWGLAVMEQVLWDAVPRYLRNLDRSLREHTGRALPLDAAPIRFGSWMGGDRDGNPNVTARVTREVCLAGRWMAATLYEKEIQTLINTLSMTRCDQALRELVGDAWEPYRVLLKRLRARLRLTQRWVEARLAGKRPPEGEVLLDKEDLLRPLLTCYHSLHRCGAGQVAEGELLDTIRRVSCFGLTLTRLDIRQHADRHADALSEITSALGLGRYDQWDEEARQRWLLSELASRRPLIPDDLEPGEEAAEVLETCRTLAELGSDGLGAYIISMAEHPSDILAVELLQKACGVTQPLRSVPLFETRDTLQNAAETMRVLFEQPWYRDRIGGHQEIMIGYSDSGKDAGHLTAAWTLYQAQEALVALAEENGIQLTLFHGRGGSIGRGGGPTHAAVLSLPPGSVKGTLRVTEQGEVIQSKFGLPGIALRNLEIYTAAVLEATLQPPAEPRPEWREVMDRLSDTACGAYRGLVKETPEFIEYFQAATPVREIGQLAIGSRPAKRNQKALTVDNLRAIPWIFAWTQTRLMLPAWLGVGDALSEALEEDLGDTLREMFQQWPFFEAFLDMVEMVLAKGDPGVASLYDRRLVPEELHGMGEQLRGRYRKTLDAVLSVTGHERPLADFPVVRRAVDVRNPYVDPLNLLQAELLYRSRLCDDEQLRRVLMVAINGIAAGMRNTG

SEQ ID NO: 3824 - protein, 334 aa, Kineococcus radiotolerans SRS30216
MTTRVGINGFGRIGRNFFRAALAQNADFEIVAVNDLTDAKALAHLLKHDSILGKLAEDVRVEGDSIVVGSRTIKVLADRDPANLGWGDLGVDVVVESTGFFTDGEKAKAHLTAGAKKVVVSAPATNDDVTVVMGVNDSDYDGSKHAIISNASCTTNCLAPLAKVLDDAFGIERGLMTTVHAYTADQNLQDGPHKDLRRARAAALNIVPTSTGAAKAIGLVLPQLKGKLDGYALRVPVPTGSATDLTVTVGREVTVDEVNAAYRAAADGPLKGYLTYSDEPLVSSDIVTDPSSCIYDSGLTKVIGNQVKVVGWYDNEWGYSNRLVDLVTLVGASL

SEQ ID NO: 3825 - protein, 553 aa, Arabidopsis thaliana
MDVSNTMLLVAVVAAYWLWFQRISRWLKGPRVWPVLGSLPGLIEQRDRMHDWITENLRACGGTYQTCICAVPFLAKKQGLVTVTCDPKNIEHMLKTRFDNYPKGPTWQAVFHDFLGQGIFNSDGDTWLFQRKTAALEFTTRTLRQAMGRWVNRGIKLRFCPILETAQNNYEPVDLQDLILRLTFDNICGLAFGKDTRTCAPGLPENGFASAFDRATEASLQRFILPEFLWRLKKWLGLGLEVSLSRSLGEIDGYLDAVINTRKQELLSQRESGVQRHDDLLSRFMKKKDQSYSETFLRHVALNFILAGRDTSSVALSWFFWLITTHPTVEDKIVREICSVLIETRGTDVSSWTAEPLEFDEVDRLVYLKAALSETLRLYPSVPEDSKHVVNDDILPDGTFVPAGSSVTYSIYAAGRMKSTWGEDCLEFKPERWISPDDGKFVNHDQYRFVAFNAGPRICLGKDLAYLQMKTIAAAVLLRHRLTVAPGHEVEQKMSLTLFMKNGLLVNVHKRDLEVMMKSLVPKERNDVVVLNGKCNGGIGEGVAVNAAVAVAV

SEQ ID NO: 3826 - protein, 440 aa, Streptococcus thermophilus CNRZ1066
MSFSFDSASVQGAVIKVIGVGGGGGNAINRMIEEGLSGVEFIAANTDIQALSSSKAETVIQLGPKLTRGLGAGGQPEVGRKAAEESEETLTEALTGADMVFITAGMGGGSGTGAAPVIARIAKSLGALTVAVVTRPFGFEGNKRSSFAIEGIQELREQVDTLLIISNNNLLEIVDKKTPLLEALSEADNVLRQGVQGITDLITNPGLINLDFADVKTVMANKGNALMGIGIGSGEERIVEAARKAIYSPLLETTIDGAEDVIVNVTGGLDMTLTEAEEASEIVGQAAGNGVNIWLGTSIDDTLKDEIRVTVVATGVRQERAEKVSGMKAQPRKVTTAPSQSSVPNQQVAQEQQRLGSQASFERQPNFDYNETHSMSQPGVRPTMAAPQQEQSAFGNWDLRRDNISRPKTGELDSQLTMSTFSSDVEDDDELETPPFFKNR

SEQ ID NO: 3827 - protein, 235 aa, Gibberella zeae PH-1
MPATIPQNNFDSIPDSIEAFRNGEFLVVLDDPSRENEADLIIAAEDVTTEKMGFLIRHSSGYVCVPLSPELTKSLDLPQMVPNNQDPRGTAYTISVDSADPSVTTGISATDRALACRTLADPKARPDSFRRPGHVLPLRARPGGVRQRPGHTEAATEFCRLAGKAQAAAICEIIDDGEETPGQALVQNHGMLRGEACITFARKWGLKVCTIADLVAYVEKTEGKLESNGAETEGN

SEQ ID NO: 3828 - protein, 565 aa, Escherichia coli K12
MEPKTKKQRSLYIPYAGPVLLEFPLLNKGSAFSMEERRNFNLLGLLPEVVETIEEQAERAWIQYQGFKTEIDKHIYLRNIQDTNETLFYRLVNNHLDEMMPVIYTPTVGAACERFSEIYRRSRGVFISYQNRHNMDDILQNVPNHNIKVIVVTDGERILGLGDQGIGGMGIPIGKLSLYTACGGISPAYTLPVVLDVGTNNQQLLNDPLYMGWRNPRITDDEYYEFVDEFIQAVKQRWPDVLLQFEDFAQKNAMPLLNRYRNEICSFNDDIQGTAAVTVGTLIAASRAAGGQLSEKKIVFLGAGSAGCGIAEMIISQTQREGLSEEAARQKVFMVDRFGLLTDKMPNLLPFQTKLVQKRENLSDWDTDSDVLSLLDVVRNVKPDILIGVSGQTGLFTEEIIREMHKHCPRPIVMPLSNPTSRVEATPQDIIAWTEGNALVATGSPFNPVVWKDKIYPIAQCNNAFIFPGIGLGVIASGASRITDEMLMSASETLAQYSPLVLNGEGMVLPELKDIQKVSRAIAFAVGKMAQQQGVAVKTSAEALQQAIDDNFWQAEYRDYRRTSI

SEQ ID NO: 3829 - protein, 406 aa, Mannheimia succiniciproducens MBEL55E
MKRAVITGFGVISSIGNNKEEVLASLKAGKSGIEIVPSFVEMGMRSHVAGTVKLNPAELIDRKIYRFMGDAAAYAYLSMKEAIEDAGLSEDQVSNERTGLVIGAGIGSAHYQVKAADAARGSRGVKAIGPYAVTKTMSSSVSACLATPFKIKGVNYSISSACATSAHCIGNAFELIQLGKQDIVFAGGAEELSWEGAAQFDAMGAVSTKYNETPEKASRAYDADRDGFVIAGGGAVVVVEELEHALARGAKIYAEIVGYGATSDGYDMVAPSGEGAERCMKQAMANIDTPIDYINVHGTSTPVGDVKELGAIRNVFGEAKPAISSTKSMTGHSLGAAGAHEAIYTLLMLHNDFIAPSINIETLDEQAEGLNIVTETKENAGLQTVMSNSFGFGGTNATLVFKRYAK

SEQ ID NO: 3830 - protein, 341 aa, Amycolatopsis methanolica
MRVGVLTGGGDCPGLNAVIRAVVRKGIEAHGWEIVGFRSGWRGPLTGDSRPLGLDDVEEILIRGGTILGSSRTNPYKEEGGVEKIRAVLADQGVDALIAIGGEDTLGVAKKLTDDGIGVVGVPKTIDNDLAATDYTFGFDTAVHIATEAIDRLRTTAESHYRAMVVEVMGRHAGWIALHAGLAGGANVILVPERPFSVEQVVEWVERRFEKMYAPIIVVAEGAVPEGGAEVLRTGEKDAFGHVQLGGVGTWLADEIAERTGKESRAVVLGHTQRGGTPTAYDRVLATRFGLHAVDAVADGDFGTMVALRGTDIVRVKLAEATAELKTVPPERYEEAEVFFG

SEQ ID NO: 3831 - protein, 353 aa, Rhodobacter sphaeroides 2.4.1
MVRPRLNWAAEPWSDSEELECAMVIPETETCATFAFRAPSGAWFDYQPGQFLTLDLPVPGGRVQRTYTISSSPSRPLSLSVTVKAQPGSIGGRWMLDKLKPGMRIKAYGPAGQFTSLRHRSPKYLFISAGSGITPMMSMTTWAWDSGEMPDIVFVHAARSPAEIIFRRRLEQFARRVPGLQLRFTVKEEDPFSVWTGYRGRLSQIMLGLMAPDYLEREVFCCGPEPFMQAVREMLVSLGYDMDRYHEESFAAPALEELPVDIPEPAAVSELCFAASGVRVACDGTETVLAVARRAGLNIPSGCNFGLCGTCKVQKIEGEVAMVHNGGISDEEIAAGTILACCARPQGRVTLDL

SEQ ID NO: 3832 - protein, 328 aa, Triticum aestivum
TSNTLAGAYAGARQLEVTINGIGERAGNASLEEVVMAIKCRRELLGGLHTGINSQHITMTSKMVQEHSGLHVQPHKAIVGANAFAHESGIHQDGMLKFKGTYEIISPDDIGLTRANEFGIVLGKLSGRHAVRTKLVELGYEINDKEFEDFFKRYKEVAEKKKRVTDEDIEALLSDEIFQPKVIWSLGDVQATCGTLGLSTATVKLITIDGEEKIGCSVGTGPVDAAYKAVDQIIQIPTVLREYSMTSVTEGIDAIATTRVVIAGDVSADKPALTSNSNRSFSGSGAAMDVVVSSVRAYLSALNKMSSYVGAVKASSEAPETISVQTTE

SEQ ID NO: 3833 - protein, 479 aa, Sulfolobus tokodaii str. 7
MPEEKFSLDINEIINATIEAKNNNLSQSEFHKRVVESGLSKDVIVEISKLKKEPEWMLRLRLKSLELFEKLPTPNWLPDFLSELDVSKMEIYIKPDVERTSNWDEVPPEIRKYYEQLGIPQSEQQYLGGLVATFESESIYSNVKQELAKKGVIMMPPEEAIQKYPDIIKEYFTKIFPVSDHKFAALHGALWSGGVFVYVPKGVKITTPVEGFFIIGSEMEGQFEHTLIIADEGSYIHFIEGCSAPQFKKFSFHDGMVELYAKKNAYIKFTTVQNWSKNVINFNNKRAWADENSTVEWVEGSLGSKYSFVYPSTILRGRNASSTSLVVTLASGEGEWKDSGSKMIHAAPNTKSKVINKNIGFNGGVNIYRGLIRVNKGATGAKAFVKCDSLMLDEKTKAYTFPHNQVFEEDADVAHEAHTFRMNEDQLFYLMNRGIDEKESVSMLVLGFIDEIMKELPFEYATMLNKVIKLELDKLGAVA

SEQ ID NO: 3834 - protein, 317 aa, Aspergillus oryzae
MPQYNAPTTAEEVANDCRASIANKTILVTGVTLGSLGAGFATAIANYAPSLIILAARDVTKAQQTATEISIINPSVKTRILHLDLGSQVQIREAAKEVLEYEEHIDVLVNNAGVMAPPFSLTQDGVESQFGINHIGHFLFTNLIMSKLVTPGKSSRVVNISSDGHRLGPIRFDDWNFDDGNTYDPWLAYGQSKTANMLFSVSLAQKLGTKGLISVSLHPGVVSTQILRHDVDESVKALDETAICYYYIRYESVAANLTEIISEFASSRLQKALSEAYRTIRRLRPIVERDRRDGSGACYRELKQHLSPGTFKATSGL

SEQ ID NO: 3835 - protein, 140 aa, Zea mays
MAASTVASLSVPVTTTTFAAAGGGDVLIVVPRRAGAKRVVWFPAAARRGGGRLVAVRSSGPATPPEISDKVSESIKQAEETCADDQKGDAECAAAWDEVEELSATASHARDSLKETNANDPLEKYCKDNPDSEECRIYDN

SEQ ID NO: 3836 - protein, 772 aa, Geobacter sulfurreducens PCA
MVGSLVTYLKKCAASVLGAPYTLLCRLLPRITADLRYGSGYRALFEHAIDGIFIMDAEGHYLDVNPAICSAIGYTRDEFLALDWGVLSRGVDSGWAAASLARIVGGEPLREERTVWTRNGDQLTVELSAHLLPDGKILGIARDVSERKRMEESLRSTSEFLDTILDEAPLPIYITSVDGTLRLANNAWERETGIPRNAAVGRRLNELFPAAMCDQFSEINRRVVESNATAVQDEFLDFGAGVRVFHTIKFPLRDAAGGVVDVGGISIDITDRSKMEGELRAAHAAAVDSSRAKIDFLANMSHEIRTPMNGVIGTLELLRETDLDPRQREYAEIARESAESMLAVINMVLDYSKIESHQLVLEAVPFAIREAVERAVKPFRAVAARKGVMVAADVPPHVPETVVGDPVRFSQIVANLVGNAVKFTEQGAITVQLGAAAVDDCRIDVSCSVGDTGAGISPEKFDTIFDPFVQADGSTTRIHGGTGLGLAIVRRLVEAMDGVISVASEPGMGSTFSFRVRLRGAPDDIASPPPATGWAVAEKSVAVRPLSVLLVDDSAVSRKVVSLLLESDGHRVTFAGDGVEALAAIGREAFDLVLMDVQMPVMDGFEAMRAIRAGEAAGGARLPIIALTARALAGDRELCLEAGADDYLAKPVNFSELRRVISRHCCRESKPSALSAENRPDAAGATPPAGTFGELMDELGASVGDRDEDAVERCTRMLKRAASHLGRTRLVDEIFRLQLASRRGDWERADELLGVVAELLPTTAGACGPPEA

SEQ ID NO: 3837 - protein, 430 aa, Streptomyces coelicolor A3(2)
MTVETEPLSENTADVIVVGAGPAGSTTAYHLARSGLDVLLLEKTAFPREKVCGDGLTPRAVKQLVAMGIDISEEAGWLRNKGLRIIGGGSRLQLDWPDLASFPDYGLVRKRDDFDEQLARQAQKAGARLYERCNVGAPIVDDRTGRITGVHAKLGEDKREVTFHAPLVVAADGNSTRLSLAMGLHRREDRPMGVAVRTYFTSPRHDDDYLESWLELWDRRGPQDRLLPGYGWVFGMGDGTSNVGLGVLNTSAAFKELDWREILKAWCASMPEDWGYTPDNMTGPIRGAALPMAFNRQPHYTKGLLLVGDAGGLVNPFNGEGIAYAMESGQIAADVVVQAHARATPAQREIALQRYPRVLKDTYGGYYNLGRAFVKLIGNPKVMQIATQRGLTHPILMKFTLKMLANLTDPTGGDAMDRIINGLSKVAPKA

SEQ ID NO: 3838 - protein, 247 aa, Treponema denticola ATCC 35405
MRLVLVRHGESEWNKLNLFTGWTDVDLSEKGVEEAKEGGTYLKKEGFDFDICYTSYLKRAIHTLNYILSQMDREWLPVIKTWKLNERHYGGLQGLNKAETAEKYGEDQVKIWRRSFDIAPPVLEEGDKRCPYLQEQYRGIEKSELPLTESLKDTIARAVPFFEKTIKPQMLEGKRILITAHGNSLRALVKYFENLSDEEIISVNIPTGVPLVYEFDKNFKVLSKRYLGDQEKINAKINAVANQGKKK

SEQ ID NO: 3839 - protein, 451 aa, Arabidopsis thaliana
LLTREENPNFQLWSKIGRMRRRRCDLQPKRTRMCDLQPKRTSMCDLPPKLVGEKILTRIPITSLRAVRSTCKLWNALTKDRVLGKAAAQFLGFMTMDSKVCSVRFHLRRSKEEEEDTMDLSIKQVDLLNQVEISRVYHCDGLLLCVAKDNSRVVVWNPYLGQTRWIRPRTESNIGDSYALGYDINRNHKILRMVQTRNVSVYRYEIYDLRSNSWRVLEVTPNGEMDPNHPLYGVSVKGNTYFFAHEDSSSGEIDEDGDIIDLEDFLLCFDFTTETFGLRLPLPFHSTIDATVTLSCVRDQQLAVLYHNEGLHSDDRFTTVEFWVTTSIEPNSVSWSKFLTVDMRPLALTGVRFDNDMGATFFIDEDEKVAVVFDLDGYLSTESARYHTAFISGKDGFFKPVTLGVAPNVGEPCPRTGHIPTTYRPPLVCSSTYLPSLVQVNQQRKRKERHV

SEQ ID NO: 3840 - protein, 330 aa, Polaromonas sp. JS666
MARRTITYREALREALREALYADPRVFLMGEDVGRYGGTYAVSRGLLDEFGPERIRDTPLSELGFVGAGVGAALGGMRPIVEVMTVNFSLLALDPIVNTAAMLHHMSGGQLSVPIVIRMATGAGRQVAAQHSNSFENWYAHVPGLTVLAPATVEDARGMLAAALADPDPVVIFEHAQLYNMEGEVPDGEWPGVDIRSARVRRAGTDVSLITHGGSLPKALRAAEELEQQGISAEVIDLRVLRPLDDATLMASVRKCRRAVVIDEGWRSGSLAAEVMARIMEQAFFDLDAPLARVCSEEVPIPYARHMEEAALPQVPKIVAAARALLGSAP

SEQ ID NO: 3841 - protein, 260 aa, Chromobacterium violaceum ATCC 12472
MLERDVVRSKAEDGIARLELHRPDCLNAMNRQLLRQLLAALEWAAANDAVRAVLITGHGRVFSAGADIRYLNRAPAAEVRELARLAVAVTGRIEALGKPVLAALNGDALGGGLEIAEACTLRVAASHARFGHPEVKIGAVAGFGGTTRLPRLIGKGRAAEMLLTGRLIDADEACRLGLVNRVVPADDLIAESEALLSEVLAQSPLAVRLSWEAMHRGLSLSEDESARLGADYFGLAAQSEDFRIGTRAFLDKRAPKFKGR

SEQ ID NO: 3842 - protein, 287 aa, Glycine max
MAETTQSNAELLEWPKKDKRRFLHVVYRVGDLDRTIKFYTECFGMKLLRKRDIPEEKYANAFLGFGPEQSHFVVELTYNYGVTSYDIGTGFGHFAIATPDVYKLVEDIRAKGGNVTREPGPVKGGKSVIAFVKDPDGYAFELIQRPSTPEPLCQVMLRVGDLERSIKFYEKALGLRVVKKTDRPEYKYTIAMLGYAEEHETTVLELTYNYGVTEYTKGNAYAQVAIGTDDVYKSAEVVNIVTQELGGKITRQPGPIPGLNTKITAFLDPDGWKTVLVDNQDFLKELE

SEQ ID NO: 3843 - protein, 618 aa, Xylella fastidiosa Temecula1
MSNERTAQQSDIKQLISKGLEQGYLTYAEVNDHLPEDLVDPDQIEDIIGMINGMGIEVHEVAPDAETLLLNEGNTGNREVDDTAAEEAAAALSALDTEAGRTTDPVRMYMREMGTVELLTREGEIAIAKRIEEGLSEVQAALGAFPLSTELLLSEYELHKEGKRRLTEVVVGFNDLIEEDNSVTSSVDVTDESIVEVDEEDDDSVGNDEDAPMIGPDPAEVASRIESLSTEYAKFKKLYAKHGPEHKAVIKVREDVAAIFVTFKLSLPLTDLLVQQLQNMVNSVKDHERKVLHLATNVAKMPRKDFIRSWENNQTNLEWVEDAIKRKQKWSSALRDIKDQITAEQQASIDLEKVNSLTLADIKEINRMMVYGEAKASKAKKEMVEANLRLVISIAKKYTNRGLQFLDLIQEGNIGLMKAVCKFEHRRGFKFSTYATWWIRQAITRSIADQARTIRIPVHMIETINKLNRISRQMLQQFGREATPEELAKEMDMPEDKIRKVMKIAKEPISMETPIGDDEDSHLGDFIEDPNVESPVDTTTNVNLSETVREVLAGLTPREAKVLRMRFGIDMNTDHTLEEVGKQFDVTRERIRQIEAKALRKLRHPSRSEQLRSFLDID

SEQ ID NO: 3844 - protein, 316 aa, Neisseria gonorrhoeae FA 1090
MSQHRKLIILGSGPAGYTAAVYAARANLNPVIITGIAQGGQLMTTTEVDNWPADADGVQGPELMARFLAHAERFGTEIIFDQINAVDLQKRPFALKGDMGEYTCDALIVATGASAKYLGLPSEEAFAGKGVSACATCDGFFYKNQDVAVVGGGNTAVEEALYLANIAKTVTLIHRRSEFRAEKIMIDKLMKRVEEGKIILKLESNLQEVLGDDRGVNGALLKNNDGSDQQIAVSGIFIAIGHKPNTDIFKGQLEMDEAGYLKTKGGTADNVGATNIEGVWAAGDVKDHTYRQAITSAASGCQAALDAERWLGSQNI

SEQ ID NO: 3845 - protein, 226 aa, Debaryomyces hansenii CBS767
MSLTDDQVNTELRKMKAFIEKEAQEKAKEIRLKADEEYEIEKASIVRSETAAIDSTYEQKLKKASLAQQITKSTIGNKTRLRILSKKEEVLNNIFEAAEKELSKTTSNKSAYKPVLTSLIEEGTLALLEGKVTIRVREADVALAKEAAPDAAKEYEAKSKSPVEITVDEENFLSKDSLGGVIVVNESGKIEVNNTLEERLKILSEEALPGIRLELFGISETRKFFD

SEQ ID NO: 3846 - protein, 284 aa, Thiobacillus denitrificans ATCC 25259
MSARILDGKAMADTILAVIHDKVAEREVQGKRRPGLAVILVGGDPASAVYVRNKKRACERAGVNSVSHDLPETTTQPELLALIDTLNSDAAIDGILVQLPLPVHIDAETVIERIRPDKDVDGFHPYNIGRLAVKMPTLRPSTPRGIMTLLRATNEELRGKNAVMVGASNIVGRPMSLELLLAGCTITVCHSATRDLESFVRSAEVLVVGVGRPRMIPGDWVREGAIVIDVGINRLADGKLVGDVDFDTAVERAGWITPVPGGVGPMTVATLLENTLEAALMHNP

SEQ ID NO: 3847 - protein, 376 aa, Glycine max
MLVTLAAGKLVRRHLPLFFRLFHLQNRGLGSSKSKRISIRYHINTSSSSPKPLSVSEHKAMVALLVATTSDPASINPANALLGMPGWKPGPHFQDDMKSYVNEGVRVLVHGKSIVAEDELDKRWEEVTGEVIDEVIFFSKHTAASNKPALTVHPIGVPHLRQGDVPPQGGRPGWAALPNPRMGPWLRLLKNLAQAHNLVPEFEITLEATHHGPLTNKPTMFLEIGSTEDYWKRQDAAQVMAQLVWEGLGLGGVSDVGNWSRENDNKKILLGIGGGHYAPRHVDVVLKDNVWVGHLLSGYSLPMEDPNQSKGEKNVEIGGTWRQSIKAAYEATYSAFPGGEILAHLDHKSFKGWQKNAITGFLAEQNIKIGKPNNFY

SEQ ID NO: 3848 - protein, 447 aa, Escherichia coli K12
MDQTYSLESFLNHVQKRDPNQTEFAQAVREVMTTLWPFLEQNPKYRQMSLLERLVEPERVIQFRVVWVDDRNQIQVNRAWRVQFSSAIGPYKGGMRFHPSVNLSILKFLGFEQTFKNALTTLPMGGGKGGSDFDPKGKSEGEVMRFCQALMTELYRHLGADTDVPAGDIGVGGREVGFMAGMMKKLSNNTACVFTGKGLSFGGSLIRPEATGYGLVYFTEAMLKRHGMGFEGMRVSVSGSGNVAQYAIEKAMEFGARVITASDSSGTVVDESGFTKEKLARLIEIKASRDGRVADYAKEFGLVYLEGQQPWSLPVDIALPCATQNELDVDAAHQLIANGVKAVAEGANMPTTIEATELFQQAGVLFAPGKAANAGGVATSGLEMAQNAARLGWKAEKVDARLHHIMLDIHHACVEHGGEGEQTNYVQGANIAGFVKVADAMLAQGVI

SEQ ID NO: 3849 - protein, 496 aa, Prochlorococcus marinus str. NATL2A
MTTALQSPPRRTTSRLQDASLLNGPMLLLRSIKGFRRSQSWAWLASIPLALLGLGVFTFSARAEVALSDLTGPQAASFLADNLWLFIATILVIFMNAGFAMVEAGMCRQKNAVNILAKNLFVFALAVTAYWVIGYSLMYGGSVIDGWLYFQGLFVDPDPSGALECAAAGDTGCLVPAVDFLFQSAFAGTAATIVSGLVAERVKFGEFVVFSIVLTAFIYPIAGSWQWNGGWLAELGFIDFAGSSIVHSVGGWAGLVGAMLLGPRIGKFVDGKAQAMPGHNMAIATLGALILWIGWYGFNPGSELAMDQYVAYVAVTTTLAAAGGAIAATVLSTITSGKPDLTMIINGILAGLVSITAGCGNMTFAGSWLAGAVGGLIVVVAVAALDSAGIDDPVGAFSVHGVCGVWGTVVIGLWGVDGMDPGAAGIGLLNGGGINQFFIQALGAAAYGIWTVVTCWIAWQIIGGFFGGIRVSEAEETQGLDIGEHGMEAYPDFASS

SEQ ID NO: 3850 - protein, 504 aa, Lycopersicon esculentum
MSSRGGGIAESPYLRNYRVGKTLGHGSFGKVKIAEHLLTGHKVAIKILNRRKMKTPDMEEKLRREIKICRLFVHPHVIRLYEVIETPTDIYVVMEYVKSGELFDYIVEKGRLQEDEARKFFQQIIAGVEYCHRNMVVHRDLKPENLLLDARRNVKIADFGLGNIMRDGHFLKTSCGSPNYAAPEVVSGKLYAGPEVDVWSCGVILYALLCGTLPFDDENIPNLFKKIKSGVYTLPSHLSPLARDLIPRMLIVDPMKRISVADIRQHQWFKIHLPRYLAVPPPDARQHLKKLDEEILQQVTRMGLDRDQLLDSLQKRIQDDATVAYYLLYDNRSMASSGYLGAEFQESVDGYSSGLFPNLDLQLSSGNGVSEESLRRPFRKEKTWLVGLQSPANPKEIMNQVLGTLLELNVRWKKIGHYNMKCLWCHDLHLHSMASNHMNDDDHFISNATAISTHLQPLPTVKFEMQLYKTEDEKYLLDLQRISGPQFLFLDFCAGFIRQLEGPQ

SEQ ID NO: 3851 - protein, 253 aa, Yarrowia lipolytica CLIB122
MTDRVVYVGSIPYDQTEEQMLDIFKSVGPVISLKLMFDKETGRSKGYGFAEYPDADTARSAIRNLNGFQVGSRQLRVDHSHEGQVREFFASQNRFPNPNVSKNGRPGLPAGVPLRQGLEPAQQVSETMNGYTKSQMVAVVTDLMSMSKNSPQLLADLFAQAPQLAYAAVQCLLNLGLVDEQRVLSVVRGNPALNAGGNPPSAPAQSTPDPVAGNAALIQQVMALSEADINALAPEHQRSIRELRDRIQRGEVI

SEQ ID NO: 3852 - protein, 592 aa, Bacillus cereus G9241
MAETLAKRGPDDNKVWIKGNVAFGHKRLIVVDPEGGKQPMTCLKDEANYAICYNGELYNTEDIRKELLRRGYTFKGHSDTEVLLASYMEWKEECVDHLNGIYAFAVWDEQKEQVFIARDRLGVKPLFYKYDSGRLLFGSELKAILAHPDVKVEVTLEGLSEIFGLGPSRTPGHGIYAGIKELRPGHAMTFSKNGLCIWRYWNVESKKHEDSFEETVEKTRFLLQDAITRQLVSDVPLCTFLSGGVDSSAITAIAAKEYERSGKGQLHTYSIDYEDNDKYFKANAFQPNSDAPFIHLMTETFQTIHHRCVISNEQLAQYLTEAVLVRDLPGMADIDSSLLWFCREIKQDFVVGLSGECADEIFGGYPWFYREDDLQSSAFPWMRSTEAREQLLKKEWRNKLNLQQYVQRRYEESIQEVPILEGESPIEAKRRQLFYLNMVWFMTTLLDRKDRMSMGASLEVRVPFADHRLVEYAWNIPWEMKMYKNREKGLLRKALEGLLPNEILYRKKSPYPKTHNPHYTKAVTVWLQDLLTDKGSILHELFDKEQLSGLIESGGSAFQSPWFGQLMTGPQLLAHLAQIHVWFKEYGVNIKE

SEQ ID NO: 3853 - protein, 545 aa, Yarrowia lipolytica CLIB122
MLGRTLLVSDHCVDITASIFPGSSHPFTTTNPAMNTFHLLIALATFVVVYILSSSFVYQRRTNALEKQWKCGKPLYYASFPRSLWHFYVFLRESRKHKLLEGFQRSFEAKKPFLTNKVNIFGKDIFNTCDPENLKAMLATQFKDFCLGERHAQLFPVLGDGIFTLDGNGWQHSRAMLRPQFARDQVSDVHMVETHLKFLTSRITGSKPVDMQELFFNLTLDTATEFLFGQSVGCQIAESDPGAYSSDMPLDLRKSFQKDFNKAQEHLGERVRLQMLYWLWNPKELQTAGARVHAFVDHYVSKALVEAEEKVDDDKYVFLRELARETKDPKVLRDQALNILLAGRDTTASLLSWCFYLMARDDRVWQKLRSEVIEHFGDGENLENITFESLKRCDYLRYVLNEVLRLYPSVPANMRFATKDTTLPRGGGPVGQDPIVIRKGNVISYHVFTTHRLTQYWGEDAEEFVPERWAEGKARGWEYLPFNGGPRICLGQQYALTEAGYVLVRLAQMYDTLENADDKPEPPVKLHALTMSHLTGVHVKLYKKN

SEQ ID NO: 3854 - protein, 319 aa, Bacillus cereus G9241
MKKKKIGLLVMAYGTPESLEDVEAYYTHIRHGRKPSEEALQDLIGRYKAIGGISPLAKITKEQAHKLTDSMNNMFTEYEFNCYLGLKHIAPFIEDAVEEMKRDGIKQAISIVLAPHYSTFSIKAYNDRAIRLSEEIGGPAIEPIEQWYDEPKFISYWANQIKEMFTKIEDKEKAVVIFSAHSLPEKIIAAGDPYVEQLQHTADLIAEAADIQNYTIGWQSAGNTPDLWIGPDVQDLTRDLFEEHRYESFIYCPVGFVAEHLEVLYDNDYECKVVTDEINAAYFRPNMPNSQSIFIDCLSEIVSKKMKEVVDKDLVLNNN

SEQ ID NO: 3855 - protein, 171 aa, Oryza sativa
MVKYSREANNPTKSSKAMGRDLRAHFKNTRETAFAIRKLPLGKAKRYLEDVIAHKQAIPFRRYCGGVGRTAQAKSRHSNGQGRWPAKSARFILDLLKNAESNAEVKGLDVDTLYVSHIQVNQAQKQRRRTYRAHGRINPYMSSPCHIELILSEKEEPVKKEPESQIAARKA

SEQ ID NO: 3856 - protein, 295 aa, Yarrowia lipolytica CLIB122
MGLSVAEIKKLMADLEKASGEAVYDILQVLHKEVEPTEKLLRETKLGIAVNKLRTSSDSRISDLVKKMIKSWKDTVTAQKRDASKKVEGKKETKEESRPVKSSSASSGNATSYTPPSGQRTPAKDGVSTEIYSDKVRNRCIDVTYTALAVGMTAHPNEVLACAKAIENEVYKMENGTGGNYRPKMRSLYINLKDPKNPGLRGNVISGKISAERLCRMSPQEMASDELKKEIEEMEKQNLFAARGATEQRAVTDRFTCGKCKQKKVSYYQMQTRSADEPLTTFCTCENCGTRWKFS

SEQ ID NO: 3857 - protein, 427 aa, Dianthus caryophyllus
QAYHLQSWLVKHRKNYNALGEKEKRFAIFRDNLEFIDQHNNNNNGGGGGEFELGLNKFADLTNDEFRRIYFGVKRPEKAESVKSDRYAVKEGDELPESVDWRKKGAVSHVKDQGQCGSCWAFSAIGAVEGINKIVTGDLITLSEQELVDCDTSYNSGCDGGLMDYAFRFIINNGGIDTDKDYPYKATDGSCDSNRKNAKVVTIDGLEDVPANNEKALQKAVAHQPVRLAIEAGGRDFQLYKSGVFTGSCGTSLDHGVVAVGYGTTDDGKDYWIVRNSWGDDWGEDGYIRMERNTESKSGKCGIAIEPSYPVKTSPNPPNPGPSPPSPPPAPKVVCDSYSSCPSATTCCCVYEYGPYCYMWGCCPLEAASCCDDDSSCCPHDYPVCNTQQGTCSKSKNNPFTVKALKRTPLHSTLISGGFKDLKKTSS

SEQ ID NO: 3858 - protein, 378 aa, Burkholderia sp. 383
MRHIRTSAPRPAWRQAGRRLQARAGRGVRATIVRSSIPSFDVPAMNSETPAAGPQQAQLPATLTIASRESRLAMWQAEHVRDALRKLYPACDVNILGMTTRGDQILDRTLSKVGGKGLFVKELEAALADGRADLAVHSLKDVPMALPDGFSLAAIMEREDPRDAFVSNDYASLDALPAGAVVGTSSLRREAMLRSRYPHLEVLPLRGNLDTRLSKLDRGDYAAIILAAAGLKRLGLETRIRALLDVEASPPAAGQGALGIEIASHRSDVAAWLAPLHDPQTALAVEAERMVSRALGGSCEVPLAAHAVWRAGELYLTGRVSTTDGKRVLTAEECGAVVTVADALALGRAVSDELEAQGALDIVQALLAGSPPAGKGDA

SEQ ID NO: 3859 - protein, 222 aa, Arabidopsis thaliana
MRFSKSLILITLSALVISFAEANDPSPLQDFCVAIGDLKNGVFVNGKFCKDPKQAKAEDFFYSGLNQAGTTNNKVKSNVTTVNVDQIPGLNTLGISLVRIDYAPYGQNPPHTHPRATEILVLVEGTLYVGFVSSNQDNNRLFAKVLNPGDVFVFPIGMIHFQVNIGKTPAVAFAGLSSQNAGVITIADTVFGSTPPINPDILAQAFQLDVNVVKDLEAKFKN

SEQ ID NO: 3860 - protein, 289 aa, delta proteobacterium MLMS-1
MTAQIIDGKAVSTTIRDELRERVKRRIAGGQRPPGLAVILVGNDPASQVYVRNKRRTCDALGVRSFSHDLAETVPQPDLLALIDRLNDDPDVDGILVQLPLPKHIDPETVIERIDPAKDVDGFHPYNVGRLAVRLPVLRPCTPRGVMALLESTGIDIRGMDATIVGASNIVGRPMALELLLAGCTVTICHRFTRDLADKVARADIVVAAVGKPGLVKGEWIKEGAIVIDVGINRTDDGQLIGDIEFETASQRAGHITPVPGGVGPMTIAMLLKNTVDAADGLLIRGTSC

SEQ ID NO: 3861 - protein, 355 aa, Pyrococcus abyssi GE5
MRIDRFVKLLNEMNFDGAFISPGSNLYYLTGLKLHEVGERPTILVVSADGEYKLLAPSLYSNVITNFPVTFWRDGENPYAKLSTILGELKLYRGRFLVEDTMRADWLIGILKLGNFEFHPLSSLIRLMRMRKDREEIENMKHAARIADKVFEEILSWDILGMSEKELALKIEVRIRELSDGVSFSPIVASGENSANPHHEPGERKIRKGDIVILDYGARWRGYCSDITRTIAVGRPDEKLIEVYEIVKEAQEKAYRAVREGIKAKEVDKVAREVISEAGYGEYFTHRTGHGLGLDVHEEPYIGPDGEVTLENGMTFTIEPGIYIPGLGGVRIEDDVVVEGKGKRLTKAGRELITV

SEQ ID NO: 3862 - protein, 1008 aa, Burkholderia sp. 383
MKSSGSARTARRNAALSSSDASTDTVATAANGRAKTATKPKDPIRQTKRTAKAAGPAARTAARTAAAPKSGTRTREDKDGPLFDDIRFLGRLLGDVVREQEGDTVFDVVETIRQTAVKFRREDDSEAAQTLEKKLRKLTPEQTVSVVRAFSYFSHLANIAEDRHHNRRRRIHALAGSASQPGTVAYALEQLKTTGNASKRLLQRFFDDALIVPVLTAHPTEVQRKSILDAQHDIARLLAERDQELTGRERQYNESMLRARVTALWQTRMLRDARLTVGDEIENALSYYRATFLDELPALYGDIEAALAEHGLSARVPAFFQMGSWIGGDRDGNPNVTAPTLEEAINRQAAVILEHYLEQVHKLGAELSVSNLLVGANDAVKALAAASPDQSPHRVDEPYRRALIGIYTRLAASARVRLGEGTVPVRSAGRGAAPVRATPYADSEAFVADLKVLTASLDEHHGTSLAAPRLAPLVRAAEVFGFHLASIDLRQSSDIHEAVVAELFARAGVEADYAALAEEDKLRVLLAALADPRPLRSPYFEYSALAQSELGVFEKAREVRAQFGARAVRNYIISHTETVSDLVEVLLLQKETGLLDGALGVPGGDAKNSLMVIPLFETIPDLRDAARIMREYFALPGIDALIAHQGAEQEVMLGYSDSNKDGGFLTSNWELYRAELALVDLFRDRKITLRLFHGRGGTVGRGGGPTYQAILSQPPGTVNGQIRLTEQGEVIASKFANPEIGRRNLETVVAATLEATLLPQNNAPAQLPAFEAAMQTLSDSAMAAYRALVYETPGFTDYFFSSTPITEIAELNIGSRPASRKLQDPKQRKIEDLRAIPWGFSWGQCRLLLTGWYGFGSAVSAYLDGAQDDAERTKRVALLKKMNKTWPFFANLLSNMDMVLAKTDLAVASRYAQLVSDRKLRKHVFERIVAEWERTSQALAEITGHEGRLATNPLLARSIKNRFPYLDPLNHLQVELIKRHRAGDTNARLRRGIHLTINGIAAGLRNTG

SEQ ID NO: 3863 - protein, 228 aa, Zea mays
MAGASLLSPSCTLLRLIPSASHICCSSHFKRFDRVRRFAPAAMATSSGPKEAPANNPGLQTEVDPATKGYFLQQTMLRVKDPKVSLDFYSRVMGMSLLKRLDFEEMKFSLYFLGYEDVTLAPDDHIKRTEWTFRQKATLELTHNWGTENDPEFKGYHNGNSDPRGFGHIGVTVDDVHKACERFERLGVEFVKKPDDGKIKGIAFIKDPDGYWIEIFDQTIGTVTSSAS

SEQ ID NO: 3864 - protein, 537 aa, Brucella suis 1330
MARERIYIYDTTLRDGQQTPGVDFSVEDKKSIVTLLEELGVDYVEGGYPGANPTDTAFFKRRQTARAKFVAFGMTKRAGVSVSNDPGLSSLLQASADAVCFVAKSWDYHVRLALGCTNEENLESITASVTAARMAGREALVDCEHFFDGYKANPEYALACAKAAYSAGARWVVLCDTNGGTQPLEVAAIVEAVKAVVPGESLGIHAHNDTEQAVAVSLAAIDAGVRHVQGTLNGIGERCGNANLVSLIPTLVLKPYWAERFELGIKPASLKSITRISRAFDDILNRPATEQAPYTGTSAFATKAGIHASALMKEPQTYEHIPPESVGNSRRVMVSDQGGKSNFIAELERRGIRVAKDDVRLDTLIALVKEREAEGYAYEGADASFELLARGMLNPQPEFFKVESFRCLVERRFDANGMLKTVSEAVVKVEVDGEMHMSVAEGHGPVNALDIALRKDLGRFQAEIEDLELVDFKVRILNGGTAAITRVLIESGDATGARWRTVGVSDNIIDASFQALMDSVNYKLMKNRAMAGLAAAE

SEQ ID NO: 3865 - protein, 319 aa, Alkalilimnicola ehrlichei MLHE-1
MSETKHCKLLILGSGPAGYTAAIYAARANLNPVLVTGLEMGGQLTTTTDVDNWPGDAEGVQGPELMERMKRHAERFETEVVFDHIHTAHLKAKPFRLEGDAGSYTCDALIIATGATAKYLGLDSEQAFMGKGVSACATCDGFFYKNQPVAVIGGGNTAVEEALYLSNIASHVTLVHRRDSLRAEKILQRQLMERVEAGKVSIVWDHNLDEVLGDDAGVTGLRLKHTQTGETRQVDVHGVFIAIGHAPNTGLFQDQLEMNGGYIVVKSGLNGNATATSIPGVFAAGDVMDHVYRQAVTSAGTGCMAALDAEKYLDALHLE

SEQ ID NO: 3866 - protein, 172 aa, Triticum aestivum
  misc_feature (136)..(136): Xaa can be any naturally occurring amino acid
  misc_feature (151)..(151): Xaa can be any naturally occurring amino acid
  misc_feature (161)..(161): Xaa can be any naturally occurring amino acid
MATVMAMSSFAGAAVLPRGSASRFGARSLPALGRRALVVRAQTEGPSAPPPNKPKASTSIWDALAFSGPAPERINGRLAMVGFVTALAVEAGRGDGLLSQLGSGTGQAWFAYTVAVLSVASLVPLLQGESAEGRAXAIMNRNAELWKRRFXMLGLVALAAXEIITGAPFIHV

SEQ ID NO: 3867 - protein, 233 aa, Spinacia oleracea
CVAQTSEWEQEGSTNAVLEGESDPEGAVSWGSETQVSDEGGVEGGQGFSEPPEEAKLFVGNLPYDVDSEKLAGIFDAAGVVEIAEVIYNRETDRSRGFGFVTMSTVEEAEKAVELLNGYDMDGRQLTVNKAAPRGSPERAPRGDFEPSCRVYVGNLPWDVDTSRLEQLFSEHGKVVSARVVSDRETGRSRGFGFVTMSSESEVNDAIAALDGQTLDGRAVRVNVAEERPRRAF

SEQ ID NO: 3868 - protein, 318 aa, delta proteobacterium MLMS-1
MSNVMVTGATGFIGSTLVARLAREARFSPAAAVRRAATFDEGVEVVPGASLEPDADWSGALQGAEMVVHCAARVHVMDEAAADPLAEFRRVNVEGTLALARQAAEAGVRRFVFVSSIKVNGEQTVPGAPFTAQDEPAPEDPYGLSKAEAEAGLFALGRETGMDIVAVRPALVHGPGVGGNFARMLQWVARGVPLPLGAVDNRRSLVGLDNLVDLLVRCIDHPAAAGQVFLAGDGEDVSTTELLRRVARAMDRPARLLPVPPMALRAGARLLGKGEMARRLLDSLQVDITHTRETLGWEPPVSLDEGLRRAVAPLVSGG

SEQ ID NO: 3869 - protein, 249 aa, Gloeobacter violaceus PCC 7421
MANLPFLFVSDLDDTLVGSLPEDREALRVLNAVLAEPEVTVIYATGRSPASALTLIAEAELLIPDALVTSVGTAIYYSEDPDRPDHRWWELLKDGWQTEAIEAVAGLFPELWPQPSAEQGPFKRSYFLDPAHAYRIAELEAQLLKAQLRTRVVYSSFRDLDILPAKGNKGSAVRYLQERWNFDSRNTVVCGDSGNDQSLFETGNLGIAVGNARSELVAWMTGQPKLPIYAAKGRCAEGIAEGLRHWQLI

SEQ ID NO: 3870 - protein, 113 aa, Rickettsia montanensis
MTGRIKHPISILYKLYRKGIKLEELTDIFVISIVVIDEEKCYKALKAVHDLYEYEKDKLKNYILNPKPNGYQSLHTIITTEDNYKIEIQIRDHKMHYHADSGEAAHWKYKNSF

SEQ ID NO: 3871 - protein, 157 aa, Triticum aestivum
RPRRASETETEIQTPDPPKRLRSSARRDAKIGTDAPAPAPAAARKRPGGQDAAAAADSKRRRAEHPSSGSRDRNPHHRPQQKPGDEGKGKRETMRASHILIKHEGSRRKASWRDPDGVAISATTRDDAADLARALRDQIAAGELQFDAAARDNSDCN

SEQ ID NO: 3872 - protein, 124 aa, Corynebacterium glutamicum ATCC 13032
MNVGFPRSPVIVNLGETMSNVVAVTEQTFKSTVIDSDKPVIVDFWAEWCGPCKKLSPIIEEIAGEYGDKAVVASVDVDAERTLGAMFQIMSIPSVLIFKNGAKVEEFVGLRPKNEIVEKLEKHL

SEQ ID NO: 3873 - protein, 401 aa, Acinetobacter sp. EB104
MQTIVIIGASHAAALAASLRPDGWQGEIVVIGDEPYLPYHRPPLSKTFLCGAQLVDELLIRPAAFYQKNQIEFRHGRVVAIDRAARSTLQDGSTLAYDQLALCTGARVRTVSLAGSDLAGVHYLRNSDVQANQPFVQPNGKAVVIGGGYIGLETAAALTEQGMQVVVLEAAERILQRVTAPEVSDFYTRIHREQGVTIHTGVSVTAITGEGRAQAVLCADGSMFDADLVIIGVGVVPNIELALDAGLQVDNGIVIDEYCRTSAPEIVAIGDCANAFNPIYQRRMRLESVPNANEQAKIASATLCGLQRTSKSLPWFWSDQYDLKLQIAGLSQGYDQIVIRGDVQQRRSFAAFYLQAGRLIAADCVNRPQEFMLSKKLITAGTAVDPLRLADESIAVQALMG

SEQ ID NO: 3874 - protein, 292 aa, Xanthomonas campestris pv. campestris str. ATCC 33913
MSEDDSSQTSESPEKRRSWLERLSAAFSGEPHTRDELVALLRTAEQDGLIAADTLRMMEGAISVSELTVGDVMISRSQMVSLPVEARFLDLMKQVVESGHSRFPVHGENKDEVLGILLAKDLLRGVVADNGPGNVRELLRPAVLIPESKKLNVLLKEFRLSRNHMAIVVDEYGGVAGLVTIEDVLEQIVGEIDDEHDDAEEENSLIAIQADGRYVVDALTPIEDFNERFGADFPDDEYDTVGGLVTDAIGHLPETGEELTLGRFAFRVAKADARRVHAFHVTILPPDPQDDA

SEQ ID NO: 3875 - protein, 522 aa, Kluyveromyces lactis NRRL Y-1140
MLLRTTTAGTRLAFKSQTAAFAHALRYYSHLPLKVKVDLPNGISYEQPTGLFINNQFVPSKQGKTFEVLSPSTEEEITHVYEGREEDVDAAVEAADKAFKSGVWSKVDPLVRSQCLSKLADYIEKDLDTIASIESLDNGKAISSAKGDVQLVVNYLRSAAGYADKVDGRVIDTGSTHFSYTVREPLGVCGQIIPWNFPLLMWAWKIAPALATGNTVVLKTAESTPLSALYVSQYIPKAGIPDGVVNIVSGFGKIVGEAITTHPKIKKVAFTGSTATGRHIYQNAGVNLKKVTLELGGKSPNVVFADANLKSAVQNSLLGIYYNSGEVCCAGSRLYVEESIYDDFLKEIKSASEALKVGDPFDAETFQGAQTSQNQLDKILKYVEIGKNEGATLITGGERIGDKGYFVRPTIFADVEESMRIVKEEIFGPVVTVTKFKTIDELIEKANDSEYGLAAGIHTSNINTAIQVSNRLNAGTVWINTYNDFHHCVPFGGFNASGIGREMGSEALDNYTQVKAVRVKLE

SEQ ID NO: 3876 - protein, 178 aa, Zantedeschia aethiopica
MASSMMVSTAAVSRTSPAQSNMVVPFAGLHSSAAFPVTRKFADSSKLPSNGLRVRCMQVWPPEGKKKFETLSYLPPLTREQLGQEVDYLIRNGWIPCIEFCKVGFVYREYHNSPGYYDGRYWTMWKLPMFGCTDSSQVLKEVDECSKAYPDYFNRIIGFDNTRQVQCISFLTYKPEGN

SEQ ID NO: 3877 - protein, 449 aa, Sulfolobus tokodaii str. 7
MDMHPWLPNIKYIEEMLKSIGVNSIDDLFIDVPEEIKLKKELDLDYKKPLSEYEIILKLQELQNKNKRLKMPPFLGGGLCPHYVPEVVKFIIKRSEFYTAYTPYQPEISQGLLQALFEYQSLIAELFEMEVVNASLYDWGSALAEAIMMANRINKKKTVLVPKLMNPYHKEVVKTWTYGKGIKLVEIPPNERGTIDVSKLESMINEDDVSAIYIQQPNFYGIFEDEIEYIVDIAKKKKIITIMGVSPLALGLIKPPGEYEIDITVGDGQELGLSLNFGGPLLGILATRWDGQLVRQMPGRIVGLTKDSEGKRGFTLILQTREQFARREKATSNITTNEALMAIAAAVYLSLLGRNGIKELAKEIYIRSHYAKKRLEELGVNTVYNGDFFEEFAVDFRTDYDIIHSRLLEKNIHGGLKLGKTQALFCVTEVHTKSMIDELIESIREVFSG

SEQ ID NO: 3878 - protein, 381 aa, Zea mays
MAMATAKLSSPATSLLAGGRARRATVIRAAAGSYSDELVSTAKSVASPGRGILAIDESNATCGKRLSSIGLDNTEPNRQAYRQLLLTTAGLGEYISGAILFEETLYQSTTDGRKFVDCLKDQNIMPGIKVDKGLIPHEGSNNESWCQGLDGLASRCAEYYKQGARFAKWRTVVSIPCGPSALAVKEAAWGLARYAAIAQDNGLVPIVEPEILLDGDHGIERTLEVAEKVWSEVFFYLAQNNVLFEGILLKPSMVTPGADHKEKASPEAIAKYTLTMLRRRVPPAVPGIMFLSGGQSEVEATLNLNAMNQSPNPWHVSFSYARALQNSVLKTWQGRPENVEAAQKALLVRAKANSLAQLGRYTGEGESDEAKKGMFQKGYTY

SEQ ID NO: 3879 - protein, 327 aa, Oryza sativa
LLFSHEVLLFEALREALIEEMKEDPTVCVFGEDVGHYGGSYKVTKGLAEMFGDLRVLDTPIAENSFTGMGVGAAMKGLRPVVEGMNMGFLLLAYNQISNNCGMLHYTSGGQFKIPIVIRGPGGVGRQLGAEHSQRLESYFQSIPGLQMVACSTPYNAKGLMKAAIRSENPVVLFEHVLLYNLKEKIPDEEYVLCLEEAEMVRPGEHVTILTYSRMRYHVMQAAKTLVNKGYDPEVIDIRSLKPFDLHTIGNSIKKTHRVLIVEECMRTGGIGASLRSAIIDNFWDYLDAPIMCLSSQDVPTPYAAPLEDATVVQPAQIVAAVEQICQ

SEQ ID NO: 3880 - protein, 473 aa, Roseovarius nubinhibens ISM
MTNPTLLWLRRDLRLSDHPALRAAVARGGPVIPVMIRDDQMHGLGAAPKWRLGLGIEAMGRALAEKGSRLILRSGQAAEVLSALVEETGAGAVYWTRAYDPESIARDRGVKETLVAAGVEAQSHAGHLLFEPWEVETGQGSYYKVYTPYWNAVKSRDVAAPLTAPAEITAPAHWPESEDLDDWALGAAMQRGAAVCLPHQHVGEATAQGRLGAFMAQGIAEYRARRDLPGEAGTSGLSENLSLGEISIRQCWHAAMRARQEGAAGAETWAKELVWREFAYHLIYHTPRLASGNWREEWDGFPWREAGDSPEVMAWKQGRTGVEFVDAAMREMYVTGKMHNRARMVVASYLTKHLLTHWRVGQRWFEEHLSDWDVASNALGWQWVAGSGPDAAPFFRVFNPDTQAEKFDKGGAYRRAWIAEGQDAPPDTALAYFEAIPQSWNLSASRRYPDSPIVGLKEGRQAALAAYEARKPG

SEQ ID NO: 3881 - protein, 112 aa, Yersinia pestis biovar Medievalis str. 91001
MKKIDAIIKPFKLDDVREALAEVGITGMTVTEVKGFGRQKGHTELYRGAEYMVDFLPKVKIEIVVADDIVDTCVEAIMQTAQTGKIGDGKIFVFDVSRVVRIRTGEQDEEAI

SEQ ID NO: 3882 - protein, 1037 aa, Arabidopsis thaliana
MERARRLAYRGIVKRLVNDTKRHRNAETPHLVPHAPARYVSSLSPFISTPRSVNHTAAFGRHQQTRSISVDAVKPSDTFPRRHNSATPDEQTHMAKFCGFDHIDSLIDATVPKSIRLDSMKFSKFDAGLTESQMIQHMVDLASKNKVFKSFIGMGYYNTHVPTVILRNIMENPAWYTQYTPYQAEISQGRLESLLNFQTVITDLTGLPMSNASLLDEGTAAAEAMAMCNNILKGKKKTFVIASNCHPQTIDVCKTRADGFDLKVVTSDLKDIDYSSGDVCGVLVQYPGTEGEVLDYAEFVKNAHANGVKVVMATDLLALTVLKPPGEFGADIVVGSAQRFGVPMGYGGPHAAFLATSQEYKRMMPGRIIGISVDSSGKQALRMAMQTREQHIRRDKATSNICTAQALLANMAAMYAVYHGPAGLKSIAQRVHGLAGIFSLGLNKLGVAEVQELPFFDTVKIKCSDAHAIADAASKSEINLRVVDSTTITASFDETTTLDDVDKLFKVFASGKPVPFTAESLAPEVQNSIPSSLTRESPYLTHPIFNMYHTEHELLRYIHKLQSKDLSLCHSMIPLGSCTMKLNATTEMMPVTWPSFTDIHPFAPVEQAQGYQEMFENLGDLLCTITGFDSFSLQPNAGAAGEYAGLMVIRAYHMSRGDHHRNVCIIPVSAHGTNPASAAMCGMKIITVGTDAKGNINIEEVRKAAEANKDNLAALMVTYPSTHGVYEEGIDEICNIIHENGGQVYMDGANMNAQVGLTSPGFIGADVCHLNLHKTFCIPHGGGGPGMGPIGVKNHLAPFLPSHPVIPTGGIPQPEKTAPLGAISAAPWGSALILPISYTYIAMMGSGGLTDASKIAILNANYMAKRLEKHYPVLFRGVNGTVAREFIIDLRGFKNTAGIEPEDVAKRLMDYGFHGPTMSWPVPGTLMIEPTESESKAELDRFCDALISIREEIAQIEKGNADVQNNVLKGAPHPPSLLMADTWKKPYSREYAAFPAPWLRSSKFWPTTGRVDNVYGDRKLVCTLLPEEEQVAAAVSA

SEQ ID NO: 3883 - protein, 396 aa, Yersinia pestis biovar Medievalis str. 91001
MLDTQTIAIVKSTIPLLAATGPKLTAHFYERMFKHHPELKNIFNMSNQSSGDQREALFNAICAYATNIENLAALLPTVERIAQKHTSLNIQPEHYPIVGEHLIATLDELFSPGQAVLDAWAKAYGVLADVFIQRESQIYQQSETETGGWRTLRRFRIIKKEQQSEVICSFVLAPEDGGQVLHYKPGQYLGIYIEHESLEFQEIRQYSLTTAPNGKTYRIAVKREEQGTVSNLLHRELNEGDIVRIAPPRGDFFLDVSPDTPVALISAGVGQTPMLSMLNTLYSQQHAAPVHWLHAAENGRVHAFADEVSAIAAKMPNLSRHVWYREPDLQDKHGEDYHSQGLMDLSSYQWLADDPKRHYYFCGPLPFMQFIGRQLLAQGIAPEQIHYECFGPHKVI

SEQ ID NO: 3884 - protein, 819 aa, Mycobacterium sp. KMS
MTRRRLVVIGNGMAGVRAIEEILARGGADMFEITVFGDEPYGNYNRILLSNVLSGSDDTSEIYLNPLDWYTGNGIDLRAGVRVVRIDRYARLVHADDGTALHYDELIVATGSRSFFPPITGLWADDKTLADGVFGFRTLDDCLGMIHEAEHRTKAVVIGGGLLGLEAARGLQNRGLTVDVVHAGATLMNAQLDDTAGAILRRSVERLGITVHMDKRTTEALLGEDGKLRGIGFSDGSTVDCDMLVVAAGIRPNVGLAQRAGLTVERAIVVDDHMRSIDDDHIHVVGECAQHRGQVYGLVAPLWEQAGVLAAHLTGTDPTAAYHGSRTATKLKVAGVDVAAMGLKAPELPDDEFVQYSEPRHGVYKTIVIRDGKLVGATLLGDVSKVSFLTQAFDTGLPLPEERVSLMFDIGTPDVEVGVAELADDAQVCNCNGVSKGTLVGCVRDGEASVSGVMAKTKAGKGCGSCKELVGQIVEWAAGGAVTEDPSASWYVPGVPYDKPTLMRHIRELRLHSVSSVFAALAPDGREDAGSKMALASLLEMMWADEFVDERDARFINDRVHANIQRDGTFSVVPQMKGGVTNPWQLRRIADVADKYSIPMIKLTGGQRIDLLGVRKEDLPAVWADLDMPSGYAYGKSFRTVKTCVGSDFCRFGVGDSTALGIAIEDRYKGLASPAKMKLAVTGCPRNCAESLCKDLGVVAIDGGRWEIYVGGAAGAHIRKGDLLATVDSPDEVMTLTGRFLQYYRENANWLERTYAFVPRVGIEKIRDAIAEDAEGLDQRMQKSVDAYRDPWHDGRAPATEGQFRSSLPLLPLPQVPVR

SEQ ID NO: 3885 - protein, 377 aa, Anabaena variabilis ATCC 29413
MNKVLINDTTLRDGEQAAGVVFTLEEKVAIAKFLDTIGVPELEVGIPAMGEEEMRAICAISNLGLKANLLAWNRAVISDIKASVACGMERVHIAIPVSGIQIAAKFHGQWRVSLQRLKDCISFAVDQGLWVAVGGEDSSRADENFLLDVALYAQEWGASRFRFCDTVGVLDPFTTYGKVKLLVSALTIPVEVHTHNDFGMATANALAGIKAGAASVNTTVIGLGERAGNAALEEVVMAIKRIYGVDMGIDTPRLLELSQLVAAASGANVPPWKAIVGENTFAHESGIHAHGVLQNPDTYEPFAPEEVGWERRLVVGKHSGRHSVSNLLEQHGIFLNPEETQSVLDAVRQQSVKKKRSLTTEELLNLVKEQRYSHAAR

SEQ ID NO: 3886 - protein, 498 aa, Oceanobacter sp. RED65
MSSQRTFEYWKEQAASLSINGQAFINGQSVDAKSGETFETISPIDGRVLANVASCDEADVNEAVKLARAAFDSGVWSQKAPAERKQVLLKFADLIEANQEELALLETLDMGKPISDALSADIGGTLRAVRWTAEAVDKVYDEIAPTSENEIGMITREPVGVVAAIVPWNFPMIMASWKFSPALAMGNSVILKPSEKSPLTAIKLGQLAKEAGIPDGVFNILPGFGHTAGKALALHMDVDTLVFTGSTNVAKQLMIYAGQSNMKRIWSEAGGKSPHVVFADAPDLDLAADAAAAAICFNQGEVCTAGSRLLVEDSIYDEFMEKVRQSLGKWKAGNPLDPETNVGAIVDEDQLNRVLSFIEKGKEEGANLTVGGNRVELAEGGYFLEPTIFEDAQPHMSIVKEEIFGPVLSVIRFKTDEEALQLCNDSIYGLASGVWTNNLTRAHRFAKGIKAGMVWINEYDQGDMTAPFGGYKQSGNGRDKSLHAFEKYSEVKATWIKI

SEQ ID NO: 3887 - protein, 806 aa, Ustilago maydis 521
MSAQNDSRYDPYIPSGNASSDPSGGGANFSNSKTARIHSEIDNTISIMRDNINKACAQCSDLLTLFSCIDCYEMQSLYGVVNERGENLNSLQDKTDNLAVSAQGFRRGANRVRKQMWWKDMKMRSEFCSGASPMHINCPTRADHVSAPFVQLKRIKCNFAPSQLSSQVSNLSSYSPYIVEVQALISSHLASTSALIHVNRQSASSSFSALSSFPLSSSTECDTLHCASLGLDEAVPFCTPFPATLSSAWELVVDAPTHIYRTRMRNASVSLQFVLWESQPETANHESFSPEIRFKLPRRRLGAAFIRIIFLQTTQHITSQFGMCVIHDCDSFELASFTPTSIHVIHPSYAATELTIKSVRACFQASTRFQYQKSDAFLCLKLITSSSRTMLATSSRTRVADVIATAKMAQSVTLQRTLATAARSANKPPTGVLLMNMGGPSTSTHEEVGDFLSRLFHDRELIQLPFQSRLAPLIARRRTPKIVDQYEKIGGGSPILRWTRTQGKAMTELLDELHPETAPHKVYVAFRYARPLTEEALDEMAEDGVTRAVGFTQYPQYSCSTTGSNLNELYREIQRRKERGAPEANISWSLIDRWPTHPLLVEAFTNRIQAVLDTYPEEKRNQVPIMFSAHSLPMQIVSGRGDPYPAEVAATVAAVMTRLKWSNPYRVTWQSQVGPAAWLGPQTSDTIKGWAKQGHKDAIVVPIAFTSDHIETLYEIDIELQEEAEEHGITLKRAESLNDEPTFIRAMAEICASHLSAVEGTPSRIPEEKRGEDVWSQGYTSKQMLLRCPGCVNSICGEQKAFFGRT

SEQ ID NO: 3888 - protein, 495 aa, Oceanobacter sp. RED65
MNNITHFINGQITAASERNAPVYNPATGEQTGVVSLAPASLVEEAIANAKEAFEEWSKVTPLNRVRILFKFKMLLEERMDELAEAITKEHGKVFEDAKGEIIRGMEVVEFACGIPSALKGEITEQVGRDVDAYSVNQPLGVVAGISPFNFPAMVPMWMWPVAIACGNTFVMKPSEKDPTATLMVAEWLKECGLPDGVLNIVNGDKEAVDVLLTHPDIQAVSFVGSTPIAEYIYSTASAHGKRVQALGGAKNHMIVMPDADIDGAVNALMGAAFGSAGERCMAISVAVAVGDIADELVDKLAAKTKELKIGNGINRGLDMGPLVTKEHHAKVKGYVDLGVEEGAKLVVDGRDVKVDGGENGYFLGGCLFDNVTTDMKIYQEEIFGPVLCVVRVEDYATAAKMINDHEYGNGTSIFTRSGAVARKFAHDIQVGMVGVNVPIPVPMAFHAFGGWKRSLFGSNHVHGPEGVRFYTKRKAVTMRWPEGDLDAEFVMPTMK

SEQ ID NO: 3889 - protein, 431 aa, Mycobacterium smegmatis
MWLRRDLRLGDLPALQAARGTDDSSVLLCFVVDPRLARSSGERRLAFLFDSLRELDDKLDGRLLVVRGRPDEEIPRLARAVDAEAVHISADFTPFGRRRDEAVAEALGEVPLEATGSPYLVSPGRITKDDGEPYKVFTPFFRRWRDHGWRRPAESSVPSSAVVDPADIANSGRIAVPTAPVKLSFPAGEDAARQRWAEFVDADLADYDEIRDDPAADATSRMSAYLKYGNIHPRTLAVDLGKGKGAQAYLRELAFRDFYADVLWHWPHSLWHNWNRRFDAIELDTDDAAYERFEVWKAGRTGFPLVDAGMRQLNETGWMHNRVRMITASFLVKDLHLPWWWGAEYFLEQLVDGDMASNNHGWQWAAGTGTDAAPYFRVFNPQTQAKKFDPKGEYVRRWVGDVEADDYPGPIVDHSAERAEALRRYGEIGEA

SEQ ID NO: 3890 - protein, 247 aa, Kluyveromyces lactis NRRL Y-1140
MPKLVLVRHGQSEWNEKNLFTGWVDVKLSAKGEQEAARAGELLKENNVNPDILFTSKLTRAIQTANIALEKADRLWIPVVRSWRLNERHYGALQGKDKAATLEQYGEEQFTTWRRSFDIPPPVIEDDSPFSQSNDPRYGDVDPSVLPKTESLALVIDRLLPYWQDSISSELLQGKTVMITAHGNSLRALVKHLEHISDADIAKLNIPTGIPLVFDLDENLKPTKPSYYLDPEAAAAGAAAVAAQGKK

SEQ ID NO: 3891 - protein, 319 aa, Candida glabrata CBS 138
MNHKKVVIIGSGPAAHTAAIYLARAEIKPTMYEGMLANGIAAGGQLTTTTEIENFPGFPDGMTGSELMDRMRAQSTKFGTEIITETIAKVDLSSRPFKLWTEFNEDGEPITTDAIVIATGASAKRLHIPGEETYWQQGISACAVCDGAVPIFRNKPLAVIGGGDSACEEAQFLTKYGSKVYLIVRKDHLRASTIMQRRAEQNDKIEILYNTVTLEAQGDGKLLNNLRIKNVKTNEETDLPVNGLFYAIGHTPATKIVEGQVETDETGYIKTIPGSSLTSVPGVFAAGDVQDSKYRQAITSAGSGCMAGLDAEKYLTELE

SEQ ID NO: 3892 - protein, 502 aa, Anthurium andraeanum
MGNGRITVLLLSVVLLSVAPSGSCSAGEWPSSGQGPEDVGAGGVEGGQELFERWMEKHRKVYAHPGEKARRYANFLSNLAFVRKRNAEGRRAPSSGQGVGMNVFADLSNEEFREVYSSRVLRKKAAEGRGARRRAGEGRVVAGCDAPASLDWRKRGAVTAVKNQGDCGSCWAFSSTGAMEGINAITTGELISLSEQELVDCDTTNEGCDGGYMDYAFEWVINNGGIDSEANYPYTGQADSVCNTTKEEIKVVSIDGYEDVATSESALLCAAVQQPVSVGIDGSSLDFQLYAGGIYDGDCSGNPDDIDHAVLVVGYGQQGGTDYWIVKNSWGTDWGMQGYIYIRRNTGLPYGVCAIDAMASYPTKQFAPAATPPSPAPPPPSPPPPPTPPSPSPSQCGDYSYCPSDETCCCLVELGGFCLIYGCCAYQNAVCCTGTVYCCPQDYPICDVPDGLCLQHLGDVVGVAARKRKLAKHKFPWTKAGDTPQQYYQPLLWKRDGVAALR

SEQ ID NO: 3893 - protein, 365 aa, Gentiana triflora
MGSLLPSRVESLAISGIKTIPKEYIRPKEELASIGNIFEEAKNNNETTQIVPTIDLKDMDSLDNNKDVQTQCHGELKNAAMEWGVMNLVNHGISQELINRVKSAGQAFFDLPIEEKEKYANDQASGNVQGYGSRLANNASGQLEWEDYFFHCIYPERKRDMSIWPKTPHDYIPATIEYAKQLRDLATKVLAVLSVGLGLEPDRLENEVGGMEEMILQKKINYYPKCPQPELALGVEAHTDVSALTFILHNMVPGLQLFYQGKWITAKCVPDSIIMHVGDTLEILSNGKYKSILHRGLVNKEKVRISWAVFCEPPKDKIILKPLPETVSEIEPARFPPRTFAEHIKHKIFRKTEEAIKDNNIANGN

SEQ ID NO: 3894 - protein, 131 aa, Brucella suis 1330
MAKAIHTMIRVLDADKSVAFYNQAFGLDIAERIDFETFTLIYLRNEEADFEVELTVNKGRTEPYNLGDGYGHLAVAVDDVDAEHARFRELGFKVGNLVDFRNNGALLARFFFVEDPDGYKIEVLQRAGRYV

SEQ ID NO: 3895 - protein, 233 aa, Rubrivivax gelatinosus
MDNTSYQNRRGEVEHYFDRTAAQTWARLTSDAPVSGVRATVRAGRDRMRTTLLSWLPQDLRGRRVLDAGCGTGAASIELARRGAEVVAIDLSPTLVGYARERLPESLGPGSIDFRSGDMLDPALGRFDHVIAMDSVIHYDAPDAVAALSRLAERTSTSMVFTFAPRTALLSLMWTVGKVFPRGDRSPAIVPVAPEQLRALMAAHPGLKDWQWGRSERISSGFYTSQATEWKRT

SEQ ID NO: 3896 - protein, 112 aa, Xanthobacter autotrophicus Py2
MKKIEAIIKPFKLDEVKEALQDVGLQGITVTEAKGFGRQKGHTELYRGAEYVVDFLPKVKIEVVLSDDMVDRAVDAIRRAAQTGRIGDGKIFVSSIEEAIRIRTGESGLDAI

SEQ ID NO: 3897 - protein, 490 aa, Bacillus subtilis subsp. subtilis str. 168
MSQTLFIDGEWISAEKEQIRSIINPFNQEEIATVSEGGREDAIKAIAAARRAFDKGEWSSLSGLERGKIVLKIAELIRRDLEELAELESLDTGKTLEESKADMDDIANVFQYYAGLADKDGGEIISSPIPDSESKIIREPIGVCGQITPWNYPLLQASWKIAPALAAGNTIVMKPSEITPLTTIKVFKLMEEAGVPKGVANLVLGPGATVGDELAVNKDVDLISFTGGIETGKKIMRAASGNVKKIALELGGKNPNIVFKDADLEVAVDQALNAVFFHAGQVCSAGSRLLVEDAIHDQFLAELVKRAKRIKLGNGFHAETESGPLISAEHRAKVEKYVEIGIEEGAKLETGGKRPEDPELQNGFFYEPTIFSNCNSDMRIVQEEVFGPVLTVETFSSEEEVIELANDTIYGLAGAVWSKDIEKCERVAARLRMGTVWINDFHPYFAQAPWGGYKQSGFGRELGKIGLEEYTEVKHVYRNTKPAAVNWFNS

SEQ ID NO: 3898 - protein, 114 aa, Xanthomonas axonopodis pv. citri str. 306
MRMKLITAIIRPFKLDEVREALSAAGVSGITVTEVKGFGRQKGHTELYRGAEYVVDFLPKIKIETVVTDDRLDAVVEAIQNAAGTGKIGDGKIFVTAIEQVVRIRTGEIGADAL

SEQ ID NO: 3899 - protein, 108 aa, Triticum aestivum
  misc_feature (85)..(85): Xaa can be any naturally occurring amino acid
MARGAAIPLVLVAMVATMLLVATDAAISCGQVTSALSPCISYARGNGANPTAACCSGVRSLAGAARSTADKQAACKCIKSAAGGXLNAGKAARHPLQCGRQRPYAIKR

SEQ ID NO: 3900 - protein, 498 aa, Gloeobacter violaceus PCC 7421
MSTPIHCLNYIDGQWQPAQSGETLEDLNPADRREVVATFPRSGAADVEAAVTAARKAYRGWRLVSAPARAEIVFRIGEILRGRKEALAQLMSREMGKTIVEARGDVQEAIDCAFYYAGEGRRLFGQTTPSEMDNKFAMSVRSPVGVCSLITPWNFPVAIPCWKALPALVCGNTVILKPAEDTPACATALIDVFREAGLPAGVANLVHGTGEETGRALVAHPGVDLVSFTGSSVVGAEVASVCGRTHKRVCLEMGGKNAQIVMEDADLELALKGALWGAFGTTGQRCTATSRLILHRDIKQVFTEKLIEQARQLRLGPGIDPNTEVGPLINESQLSRVHEYIEIARQEGLKILLGGEPVRSEELVHGHFFEPTILDEVPPASRLAREEVFGPVVVLMTVDSFEQAVELLNDTPYGLSSSVYTRDVNRAFRAIRDIEAGITYINGPTTGAEVHLPFGGVKQTGNGHREAGAAVLDVFSEWKTVYVDFSGQLQRAQIDNRS

SEQ ID NO: 3901 - protein, 360 aa, Pseudomonas syringae pv. phaseolicola 1448A
MSKQILILPGDGIGPEIMTEAVKVLELANEKYQLGFELTHDVIGGAAIDKHGVPLADETLDRARAADAVLLGAVGGPKWDTIERDIRPERGLLKIRSQLGLFGNLRPAILYPQLADASSLKPEIVAGLDILIVRELTGGIYFGAPRGTRVLDNGERQAYDTLPYSESEIRRIAKVGFDMAMVRGKKLCSVDKANVLASSQLWREIVEQVAKDYPEVELSHMYVDNAAMQLVRAPKQFDVIVTDNLFGDILSDQASMLTGSIGMLPSASLDTANKGMYEPCHGSAPDIAGKGIANPLATILSVSMMLRYSFNLTDAADAIEKAVSVVLDQGIRTGDIWSEGKVKVGTQEMGDAVVAALRNL

SEQ ID NO: 3902 - protein, 582 aa, Medicago truncatula
MVLFNVSRIETTPFDGQKPGTSGLRKKVKVFVQTHYLENFVQASFNALTEEKVRGATLVVSGDGRYYSEQAIQVITKMAAANGVRRIWVGLNGLLSTPAVSAVIRERVGVDGSKATGAFILTASHNPGGPNEDFGIKYNMENGGPAPEGITNKIYEYTTTIKEYLIAPDLPNVDITTVGVTNFTGPEGPFDVEVFDSASDYIKLMKSIFDFGSIRKLLSSPKFTFCFDGLHGVAGAYAKRIFVDELGAQESSLLNCVPKEDFGGGHPDPNLTYAKELVARMGLGKSESEGEPPEFGAAADGDADRNMILGKRFFVTPSDSVAIIAANAVEAIPYFSAGLKGVARSMPTSAALDVVAKHLNLKFFEVPTGWKFFGNLMDAGLCSVCGEESFGTGSDHIREKDGIWAVLAWLSILAYKNKDNIEDKLVTVEDIVRQHWAKYGRHYYTRYDYENVDAGAAKELMAHLVKLQSSLSEANGIVKGASSDVSNVVHGDEFEYNDPVDGSISSHQGIRYLFEDGSRLIFRLSGTGSEGATIRLYIEQYEKNPSKIGRLSHEALAPLVEAALKLSKMEEFTGRSAPTVIT

SEQ ID NO: 3903 - protein, 502 aa, Bacillus cereus E33L
MVTPAKLGPYLGTRAFLYFLEGGRLTMAKEQVQAITKMEEDFAQWYTDIVKKAELVDYSSVKGCMILRPYGYALWENMQKVMDEKLKATGHENVYMPMFIPESLLQKEKDHVEGFAPEVAWVTHGGDEKLAERLCIRPTSETLFCEHFSKIVQSYNDLPKLYNQWCSVVRWEKTTRPFLRTTEFLWQEGHTIHETAEESQAETLNILNLYASFCEDYLAIPVIKGQKTEKEKFAGAKATYTIESLMHDGKALQTGTSHNFGTNFSEAFDIKFLDRTGKWQYVHQTSWGVSTRMIGGLIMVHGDNNGLVMPPKVAPVQVVIVPIAQHKEGVLAKAIELQGHIQKVARVKIDASNKTPGWKFNEYEMKGIPIRLEVGPKDIEKNQVVLVRRDTKEKEFISMDQLEERIPALLEEIHNSLFNKAKVFRDENTYSVTNFEEMKKIADEKQGFIKAMWCGELACEEKLKEEVGVSSRCMPFEQEHLADECVCCGKEAKQMVYWGKAY

SEQ ID NO: 3904 - protein, 503 aa, Arabidopsis thaliana
MASLLLTSSSMITTSCRSMVLRSGLPIGSSFPSLRLTRPYDKATLFVSCCSAESKKVATSATDLKPIMERRPEYIPNKLPHKNYVRVLDTTLRDGEQSPGAALTPPQKLEIARQLAKLRVDIMEVGFPVSSEEEFEAIKTIAKTVGNEVDEETGYVPVICGIARCKKRDIEATWEALKYAKRPRVMLFTSTSEIHMKYKLKKTKEEVIEMAVNSVKYAKSLGFKDIQFGCEDGGRTEKDFICKILGESIKAGATTVGFADTVGINMPQEFGELVAYVIENTPGADDIVFAIHCHNDLGVATANTISGICAGARQVEVTINGIGERSGNAPLEEVVMALKCRGESLMDGVYTKIDSRQIMATSKMVQEHTGMYVQPHKPIVGDNCFVHESGIHQDGILKNRSTYEILSPEDVGIVKSENSGIVLGKLSGRHAVKDRLKELGYEISDEKFNDIFSRYRELTKDKKRITDADLKALVVNGAEISSEKLNSKGINDLMSSPQISAVV

SEQ ID NO: 3905 - protein, 202 aa, Crocosphaera watsonii WH 8501
MIVQVMGRDAGHLALRGGIAGGADVILIPELTPYLSLDVLDGCCHQLLRLQKLGRHFGLLVIAEGVKTQNKEKDPHIADYLLRQIKEYSQILCHEKHEDFCLLKDIDMRTTVLGHLQRSHPPVAWDRLLSTAFGIKAVELIQAENYDHLVVWQKGQVSSEPLSTVTATIKERHQQKICTSPVEKYDCMVKTARSLGIYLGDG

SEQ ID NO: 3906 - protein, 168 aa, Salmonella typhimurium
MRQTKTGILLANLGTPDAPTPEAVKRYLKQFLSDRRVVDTSRLLWWPLLRGVILPLRSPRVAKLYQSIWMDGGSPLMVYSRQQQQALAARLPDTPVALGMSYGCPSLESAVDELLASDVDHIVVLPLYPQYSCSTVGAVWDELGRILAPKRRIPGISFMRDYADDGAY

SEQ ID NO: 3907 - protein, 550 aa, Cichorium intybus
MSNSSNASESLFPATSEQPYRTAFHFQPPQNWMNDPNGPMCYNGVYHLFYQYNPFGPLWNLRMYWAHSVSHDLINWIHLDLAFAPTEPFDINGCLSGSATVLPGNKPIMLYTGIDTENRQVQNLAVPKDLSDPYLREWVKHTGNPIISLPEEIQPDDFRDPTTTWLEEDGTWRLLVGSQKDKTGIAFLYHSGDFVNWTKSDSPLHKVSGTGMWECVDFFPVWVDSTNGVDTSIINPSNRVKHVLKLGIQDHGKDCYLIGKYSADKENYVPEDELTLSTLRLDYGMYYASKSFFDPVKNRRIMTAWVNESDSEADVIARGWSGVQSFPRSLWLDKNQKQLLQWPIEEIEMLHQNEVSFHNKKLDGGSSLEVLGITASQADVKISFKLANLEEAEELDPSWVDPQLICSENDASKKGKFGPFGLLALASSDLREQTAIFFRVFRKNGRYVVLMCSDQSRSSMKNGIEKRTYGAFVDIDPQQDEISLRTLIDHSIVESFGGRGKTCITTRVYPTLAIGEQARLFAFNHGTESVEISELSAWSMKKAQMKVEEP

SEQ ID NO: 3908 - protein, 591 aa, Zea mays
MCGILAVLGVAEVSLAKRSRIIELSRRLRHRGPDWSGLHCHEDCYLAHQRLAIIDPTSGDQPLYNEDKTVVVTVNGEIYNHEELKAKLKTHEFQTGSDCEVIAHLYEEYGEEFVDMLDGMFSFVLLDTRDKSFIAARDAIGICPLYMGWGLDGSVWFSSEMKALSDDCERFITFPPGHLYSSKTGGLRRWYNPPWFSETVPSTPYNALFLREMFEKAVIKRLMTDVPFGVLLSGGLDSSLVASVASRHLNETKVDRQWGNKLHTFCIGLKGSPDLKAAREVADYLSTVHHEFHFTVQEGIDALEEVIYHIETYDVTTIRASTPMFLMSRKIKSLGVKMVISGEGSDEIFGGYLYFHKAPNKKEFHEETCRKIKALHLYDCLRANKATSAWGVEARVPFLDKSFISVAMDIDPEWKMIKRDLGRIEKWVIRNAFDDEERPYLPKHILYRQKEQFSDGVGYSWIDGLKDHASQHVSDSMMMNAGFVYPENTPTTKEGYYYRMIFEKFFPKPAARSTVPGGPSVACSTAKAVEWDASWSKNLDPSGRAALGVHDAAYEDTAGKTPASADPVSDKGLRPAIGESLGTPVASATAV

SEQ ID NO: 3909 - protein, 222 aa, Francisella tularensis subsp. holarctica
MKHIQINPSILSADLARLGDDVKAVLAAGADNIHFDVMDNHYVPNLTFGPMVLKALRDYGITAGMDVHLMVKPVDALIESFAKAGATSIVFHPEASEHIDRSLQLIKSFGIQAGLALNPATGIDCLKYVESNIDRVLIMSVNPGFGGQKFIPAMLDKAKEISKWISSTDRDILLEIDGGVNPYNIAEIAACGVNAFVAGSAIFNSDSYKQTIDKMRDELNKV

SEQ ID NO: 3910 - protein, 766 aa, Aspergillus nidulans FGSC A4
MGSFLKSFRKDVGSAAPSVGAPPAKKEPQPLPMTPLEKMLTELGPIRGDGSDKFYGMENFGNTCYCNSILQCLYYSVPFREAVLNYPKRTPIEDLEAALAKALRYQDPNARLEAEALAEKQKAANSPRPGQPPNPQQKPEDKDSPEYKKKLALQTLPLLETTDNSVSYGIPESLFSSLKDMFESIVGSQSRIGIIRPQHFLEVLRRENEMFRTAMHQDAHEFLNLLLNEVVVDVEKAAAKLLESPQPASDVSDSVIPSSSSGSRTPNTTRWVHELFEGLLTSETQCLTCEKASQRDEVFLDLSVDLEQHSSVTSCLRKFSAEEMLCERNKFHCDNCGGLQEAEKRMKIKRLPRILALHLKRFKYTEDLQRLQKLFHRVVYPYHLRLFNTTDDAEDPDRLYELYAVVVHIGGGPYHGHYVSIIKTQDRGWLLFDDEMVEPVDKNYVRNFFGDKPGLACAYVLFYQETTMEAVMKEQEQENTEPPVEVNASTLKQNGFSSSATLAHAHSASQVPTYEDHDRFTGLKRAPTAPQLSTHPEHTTTDSESLPSPAPDPAPLTSLPPIPPIPETPPAPLTSRKSDLQSKKERVKEEKERKAAEKEKEKQRRKEIETRLKDRQRREDDDLKAALEASKVSKEDEDRRNHAENGTSKKNAGGLGRFRSLSQRLSTKESRTSLSRIPPLPNGNHTLSKVPDESEQTHPKSPTPPAPLSRPASQPLNDDLLGSPRADTLAVPTEQEHIKNSKHDRSSHGKWRSFSLRKKSFNILSS

SEQ ID NO: 3911 - protein, 581 aa, Cichorium intybus
MKKSLSSFIVLCFLVIILETGRVKATSRNLNDVIMLANQQIEQPYRTGYHFQPPSNWMNDPNGPMLYQGVYHFFYQYNPYAATFGDVIIWGHAVSYDLVNWIHLDPAIYPTQEADSKSCWSGSATILPGNIPAMLYTGSDSKSRQVQDLAWPKNLSDPFLREWVKHPKNPLITPPEGVKDDCFRDPSTAWLGPDGVWKIVVGGDRDNNGMAFLYQSTDFVNWKRYDQPLSSADATGTWECPDFYPVPLNSTNGLDTSVYGGSVRHVMKAGFEGHDWYTIGTYSPDRENFLPQNGLSLTGSTLDLRYDYGQFYASKSFFDDAKNRRVLWAWVPETDSQADDIEKGWAGLQSFPRALWIDRNGKQLIQWPVEEIEELRQNQVNLQNKNLKPGSVLEIHGIAAPQADVTISFKLEGLKEAEVLDTTLVDPQALCNERSASSRGALGPFGLLAMASKDLKEQSAIFFRVFQNQLGRYSVLMCSDLSRSTVRSNIDTTSYGAFVDIDPRSEEISLRNLIDHSIIESFGAGGKTCITSRIYPKFVNNEEAHLFVFNNGTQNVKISEMSAWSMKNAKFVVDQSVKSAA

SEQ ID NO: 3912 - protein, 835 aa, Geobacter sulfurreducens PCA
MTPKKHAQSLKNRLLRINLLLLCVASLAIVLVVNVAQKQLALIDAGRDAERILARYLAIHTYFNQQLKPRLLALTKPLRDKEYFDPAWMSSTYAVREIDKIFQTRHGKGYYYKECAINARSPLNEADSFERAFLERAGRDAAVTSFNGVRKIDGKPFFVSMVRGETMEKPCLLCHSSPEKAPAGLVHNYGAERSFGRHEHELVSAVSIRIPLASTYAEANSFSLKLSALLFGIIAALFAVQNRIFERLVLKPLAVVTEGARRIAHDRRYLGEQLPLDHGREMNELAASFNVMSTELHTFIHNLEEKVEEKTAELILARKDAEEASRAKSDFLATMSHEIRTPMNAIIGINQLLVDTPLTQEQRRLLDDSTTAAESLLIIINDILDLSRVEARRLELFPEAVELRSFVESLRRLFAVQATRKQISLSVSVGEGTPRFVWCDPARLRQILTNLLSNALKFTPTGGVVTMVADQAPAGAGLVFTVSDTGIGIDKAKQESIFEMFRQADSSTTRIYGGTGLGLAITKGLVELMGGTIAVESEPGSGATFSVCLPLEPADGPQFHDCAAENQEQDRELPSLEVLLVEDNDLNRTVAVGLLTALNQRVTAVTNGREAIDVLRDRDFELVFMDISMPEMDGIEATWAIRRGEAGERARSTPIVFLTAHALAADRERCLEADVTGYLTKPLLREELRRMILLCAEGEQMHPPVGTTPPSGDPARFFPFDLEFQRRQFTEAGLDHAVEELLSTFAQSAFKLCDRIDECLAAGDYAGAAAAAHTLKGAAATVGAPLVASCAAKVEAAVRSSDGAAASRRLSRLRGEVTRAQAAIIPASDHARSWH

SEQ ID NO: 3913 - protein, 357 aa, Staurastrum punctulatum
MNTQLVEQTQRPVFPFTAIVGQEEMKLALLLNVIDPKIGGVMIMGDRGTGKSTTVRALVDLLPEIEVVLDDPFNSDPKDPELMSEEVRDRIRSKENLPTGKTKISMVDLPLGATEDRVCGTIDIEKALTEGVKAFEPGLLAKANRGILYVDEVNLLDDHLVDVLLDAAASGWNTVEREGISISHPARFILIGSGNPEEGELRPQLLDRFGMHAQVGTVKDAELRVQIVEQRANFDKDPVSFREMYEKAQSNLREQIKQARERLPNVQLEHDLRVNISKICAELNIDGLRGDIVTNRAAKALAALGGRLQVTPKDILTVIPLCLRHRLRKDPLESIDSGLLVKEKFSQVFGYISKANS

SEQ ID NO: 3914 - protein, 360 aa, Methanococcus maripaludis S2
MKFLKNIAQTDFLEPASEQLSDIDRELLELIEQSKARITVVGCGGAGNNAINRLIAESIDGARIVAINTDAQQLVKTHADHKVLIGKNLTKGLGAGGNPVKGEESAKENSEEVKKAVQDSDLVFVTCGLGGGTGTGSAPVVAEISKKVGALTVAVVTLPFSMEGKVRMSNAIEGLNKLKEVADTIVIIPNDKLLEIVQNVPLRTAFKVADEVLMNSVRGMVELVNNAGDIHVDFADVRAVMNNGGIAMMGIGESDSEKRAREAIQIALNSPLLCVDVDGATGALIHITGPEDMSLEEAKEIVSTVSDRLDEKATIIWGTTIDETLENSLRVLLIVTGTKSTGDYTVDVTKKRYLIDIPKI

SEQ ID NO: 3915 - protein, 450 aa, Geobacter sulfurreducens PCA
MSPHQVDEKLQGIYQDVLKRNPGEVEFHQAVAEVLESLGPVVTKHPEYLERKIIERICEPERQIIFRVPWQDDKGQVHINRGFRVEFNSALGPYKGGLRFHPSVYLGIIKFLGFEQIFKNSLTGMPIGGGKGGSDFDPKGRSDDEIMRFCQSFITELYRHLGEHTDVPAGDIGVGGREIGYMFGQYKRITNRWEAGVLTGKGLKWGGSLVRTEATGYGATFFINEALKVRKDSFDGKICTVSGSGNVAIYTIEKIHQLGGKCVACSDSNGVIFHEKGLDLDLIKQLKEVERRRIEDYASYHKDAKYIAGGNIWDIPCQVAMPSATQNEINGKDAKTLVKNGCIAVGEGANMPTTPEGVKVFLDAKIAYGPGKAANAGGVATSALEMQQNAQRDSWSFEDTEKKLENIMKGIHRLCHETAEEYGATGNYVLGANIAGFTKVADAMVAHGLV

SEQ ID NO: 3916 - protein, 635 aa, Chromobacterium violaceum ATCC 12472
MSPIYPFAAIVGQEQLKQALLICAVDPTVGGVLVRGDKGSAKSTAARGLAAVLPPIRRAAGCGYNCEPDHPLPLCPVCSGGARELHDGPVPFINLPLGATEDRVLGSLDFEKALQGGKQAFKPGLLAGAHRGMLYIDEVNLLADHLVDVLLDAAAMGVNTVEREGLAVSHPARVTLLGTMNQEEGDLRPQLLDRFGLMVDVAAPREPGLRAEVVRRRLAFEADPAGFAAQWQTDSEALRENIAAARALLPHTRLSDQLFHFVSELCCEFEVSSLRADIVLNKAARALAALDGRIDASAEDIRDAARLVLPHRRRRKPFEQSGLDQDKLERMTRQASTPPPLPQDQGEATQPPPDADGEQEPKPTGHGSEQIFAAAPAGDIARIRVQAPSTGDAAGRRSDGASRQRGHYVRAEANPQPAQLAVDATLRHAILRDPDHFAVTRADLHDKVRVAKQGNLILLVVDASGSMAARQRMEQVKGTVLSLLEDAYRRRDQVALIAFRGQKAELLLPPCNRVEQAEAALRELPTGGRTPLAHALALAADTLSRQLGGPAPLLVILSDGRANVALDGDGDPWRQALDLAGQLAGAPALVLDTEQDFVRLGRARELAEALGAEYLACDALTGEQLTLTIQQRLGR

SEQ ID NO: 3917 - protein, 373 aa, Candida maltosa
MSVKTKTITILPGDHVGTEIVNEAIKVLEAIEAATPYQKIHFDFKHHLIGGAAIDATGVPLPDDALESAKKSDAVLLGAVGGPKWWTGALRPEQGLLKIRKELNLYANIRPCNFASDSLLELSPLRPEVVKGTNLIIVRELVGGIYFGDREEQEESEDKQTAWDTEKYTVDEVTRITRMAAFMPLQDNPPLPIWSLDKANVLASSRLWRRTVDKVISEEFPTLSVQHQLIDSAAMILIQNPTKLNGIIITSNMFGDIISDEASVIPGSLGLLPSASLASLPDTNTAFGLYEPCHGSAPDLPANKVNPIATILSAASMLRLSLDCVKEAEALEEAVKQVLDKGIRTADLRGTRSTTEVGDAIVEAVTKILKEKA

SEQ ID NO: 3918 - protein, 187 aa, Corynebacterium glutamicum
SRPSSRKQTSSVEDLRAIPWVLSWSQSRVMLPGWFGVGTALEQWIGEGEQATQRIAELQTLNESWPFFTSVLDNMAQVMSKAELRLAKLYADLIPDTEVAERVYSVIREEYFLTKKMFCVITGSDDLLDDNPLLARSVQRRYPYLLPLNVIQVEMMRRYRKGDQSEQVSRNIQLTMNGLSTALRNSG

SEQ ID NO: 3919 - protein, 486 aa, Prochlorococcus marinus str. NATL2A
MKKKKLNLTKEKISFGTDGWRGILGVEFTLERLLKVAAAAAQELAYVKEKKNNKIIIGYDRRFLAEEMAEAVASAVRGVDLVPLLASSALPTPSCSWGIVEENALGALVITASHNPCEWLGLKIKGPFGGSVDSSFTDSVQKRLDAGGISIPIEGVTERVDFRKQHLLGISQKFDMHLISDGLRKLGVKIFVDPMHGSAAGCMSELFGVDSEDLIYEIRTEIDPCFGGNPPEPLKAYLSQLIQEVQDESQAGELSMGLVFDGDGDRIAAIDEKGRYCNTQLLMPVLIDHLARVRNMPGCVVKTVSGSDLMRLVAEDLGREVLEKPVGFKYIAEEMLSREVLIGGEESGGVGFGHHLPERDALFTALLLMESIVADGKCLGEKIDSLHARFGKSHFERIDLTLKDMEMRRSLEDFLKQKTPSSIGHKSVLEVISTDGIKLILDKSHWLMFRFSGTEPLLRIYCEAPSSAEVTSTLYYAKQLIDNSFG

SEQ ID NO: 3920 - protein, 460 aa, Anthurium andraeanum
MGVLRAPMMVLLLLLALVAASSRGIVAERTEEEVRLLYEGWLVGNGKAYNLLGEKERRFEIFWDNLRYIDDHNRAENNHSYTLGLTRFADLTNEEYRSTYLGVKPGQVRPRRANRAPGRGRDLSANGDDLPQKVDWREKGAVAPIKDQGGCGSCWAFSTVAAVEGINQIVTGDLIVLSEQELVDCDTAYNEGCNGGLMDYAFQFIISNGGIDTEEDYPYKERDGLCDPNRKNAKVVSIDSYEDVLENDEHALKTAVAHQPVSVAIEGGGRSFQLYKSGIFDGRCGIDLDHGVVAVGYGTESGKDYWIVRNSWGKSWGEAGYIRMERNLPSSSSGKCGIAIEPSYPIKKGQNPPKPAPSPPSPVKPPTECDNYYSCPESTTCCCVYEYGKYCFAWGCCPLVNAVCCDDHSSCCPHDYPVCNVKQGICLASKNNPLGVKMLKRTPAKPHQAFSGAEGGRSSI

SEQ ID NO: 3921 - protein, 523 aa, Mycobacterium sp. KMS
MRYAQQGGCGSDSVGPMTALASNASASNSVASSWIDGAPVQTGGGSFQIVNPATGAVVTEYARAANVDVDVAVAAARAALPGWATATPAERSAVLAKLAKLADEHTDVLVAEEVSQTGKPVRLAREFDVPGSVDNIDFFAGAARHLEGKATAEYSGDHTSSIRREAIGVVATITPWNYPLQMAVWKVLPALAAGCTVVIKPCELTPLTTLTLARLAGEAGLPPGVLNVVTGFGADVGTALAGHPGVDLVTFTGSTVVGRKVMSAAAVHGHRTQLELGGKAPFVVFDDADLDAAIQGAVAGSLINSGQDCTAATRAIVARDLYDDFVAGVAEVMGKIVVGDPEDPDTDLGPLISTAHRDKVAGMVSRAPAEGGRVVTGGTIPDLPGSFYRPTLIADVGEQSEVYREEIFGPVLTVRSFTDDDDALRQANDTDYGLAASAWTRDVYRAQRASREINAGCVWINDHIPIISEMPHGGVGASGFGKDMSDYSFEEYLTIKHVMSDITGVADKEWHRTVFKKRSGLNH

SEQ ID NO: 3922 - protein, 543 aa, Brucella suis 1330
MTVKTIATTPYQDQQPGTSGLRKKVPVFQQPNYAENFIQSIFDVLEGFKGKTLVVGGDGRFYNREVIQKLIKIAAANGFGRIMVGQGGILSTPAASNMIRKYKAFGGMILSASHNPGGPTQDFGIKYNIGNGGPAPEKITEAIFARSKVIDQYKIADAADIDIDKIGTSKIGDTEVVIFDPVADYAELMESLFDFAAIRAMIKGGFQMKFDAMHAVTGPYAKEIFERRLGAPEGSVVNFVPLPDFGGHHPDPNLVYAKDLYDLLMSSHAPDFGAASDGDGDRNLILGRGIFITPSDSLAMLAANAHLAPGYKGGIKGIARSMPTSAAADRVAEKLGIGMYETPTGWKFFGNLLDSGKVTICGEESSGTGSDHVREKDGLWAVLLWLNILAVRKESVKAIADDHWARFGRNYYTRHDYEAVDSDIATKLVADLRGKLAGLPGTSVNGLRIEKADDFAYHDPVDGSTSEHQGIRIYFEGGARIVLRLSGTGTSGATIRIYIERYEADPAKHNLDTQATLAPLIDAAEQIAEVKKRSGRTEPSVVT

SEQ ID NO: 3923 - protein, 1072 aa, Vibrio vulnificus CMCP6
MTESISLTLTNNESSRFLIRQRLLSILQAFGYDACRCDIHMLRLGEFVRITLADIQRFTLSFELDDDSLKVILASSELDPQTCSFPACVHTFQREKAIGVSIPSLIPLSDEILNQLTQFLAKPSRDELMSELKAKNQELAVHQAGLEKEIELRTADLKASEELSRTIIDGAPSSVAIVDESLSISLWNSTAQNVYGYSSEEATGENILTLLNMSLPDALSHVLSAPLALQNQPDVEGGFFEVETTTKEGHMVPIDLGVSIFELNGACHAALFLRDVTSRKAVEKELNDAKAKAEEAVEVKSMFLANMSHEIRTPMNAIIGMSHLALKTDLTPKQHDYVSKIHSSATLLLGIINDILDFSKIEAGKLSIETTEFYLDDVFHNVSMVTGQKAFEKGLELIFDLPRETPRCLLGDPLRLGQIIINLVNNSVKFTEKGEITVSVHHIRNVEDLVELEFRISDTGIGMTDKQMKSLFTAFTQADGSTTRKYGGTGLGLSICRRLVELMGGQIRVESEAGKGSHFIFNVLVKADPANSSAPSIVPQSLEKIRILVVDDNEHALEIMQEMLSTLPGKVALANSGQQAVDCIRKASEQREKFDLIFMDWNMPEMDGIETSRLIRESFASEYQPQIVIVTAYDKEDVLDATNDLDIAGFLSKPVGQSYLFDLLVELFGRDRNPTTQIRKKELPTHDSKNDLKGLKVLLTEDNEINQQIAVELMEGNGLLVTVANNGQEALEHLEAMEKGESHFDIVFMDLQMPVMDGYEASHRIRANSSYDTIPLIAMTAHAMVEERERCLNLGMNDHISKPIDPEILFNTIRKWCPRTLNEKDESPVDVEQSQTQQLDSSIESAATPKSTERAAAEKRTLETLESLDYKNGLLRVAGNQTLYRRLLSQLMDKEISAPERLTIALDKQDTEQAIIIAHSLKGSASNLGAIRLSDIASRLEMAIQHGKERAEIDKLNKELDGYLEHFFQDLALALGRPKPSSDKRLELKDEELMIIHTLDSLLDSLDAYAIEFLDEHYVLLNTLLKSEDFEACCRCVNDCDFESASKSLRKAVSIYPLDLGKLSGEKNGRES

SEQ ID NO: 3924 - protein, 278 aa, Mycobacterium sp. JLS
MAGRTIVITGASDGVGAAAAKRLSRSGENVVVVGRSPQKTAAVADALEADSFVADFSDLAQVRDLAQRLLDAYPRIDVLANNAGGMVNTRETTVDGFEKTFQVNHLAPVLLTTLLLDRLVQCRASVLNTSSMANKFVRTGFDDLDAVQKQSGSVAYSSSKLANILFTKELHRRYHGAGISTAAFHPGPVASNFSAEVDNPMFGVIYRSPLRHLALIGTEQGSDELVWLASATPGVDWRSGEYYHKHKVAKANKLADDAGMAERLWENSLELLGERAVS

SEQ ID NO: 3925 - protein, 339 aa, Methanococcus maripaludis S2
MRNTPKICVINGDGIGNEVVPETVRVLNELGDFEFIHAHAGYECFKRCGDAIPENTIEIAKESDCILFGSVTTPKPTELKNKSYRSPILTLRKELDLYANIRPTYNFDNLDFVIIRENTEGLYVKKEYYDEKNEVAIAERIISKFGSSRIVKFAFDYAVQNNRKKVSCIHKANVLRVTDGLFLEVFEEMSKHYEKLGIKSDDYLIDATAMYLIRNPQMFDVLVTTNLFGDILSDEAAGLIGGLGMSPSANIGDKNGLFEPVHGSAPDIAGKGISNPIATILSAAMMLDHLKMNKEAEYIRKAVKKTVECKYLTPDLGGNLKTFEVTEKIIESIRSQMIQ

SEQ ID NO: 3926 - protein, 595 aa, Photobacterium sp. SKA34
MQAVIAQRIEQIRQWLEAQQLDALLIPHEDEYLGEYIPDHNERLHWLTGFTGSAGAAVITRDRAAMFVDGRYVVQVRKQVPGDVFEYCHLIEQPPVHWVLENLAAGSKVAIDNRLHSAAWLKNVTTTLDGELELVSVNENPIDELWLDRPAPKLSDAELMGLEYVGQSSEEKREQIAALLKKQKADAAFLSQLDSIAWLLNVRGDDVHCLPVLLSAAVIHSDASVDFYIDHHRLPEGFATHVGNGVNIREPEQLAAGLAALSGKRVQFDSANSNAWAAQQLTDAGAQLIEAANPTLLPKAAKNTTEINGMKACHIRDGVAISKFLAWVDNQVASGNLLNEAELSDQLWQFRQQDPSCRDVSFDTISASAGNAAMCHYNHIDQPQPGKLQMDTVYLVDSGGQYPDGTTDITRTIAIGNPGNEVKQAFTLVLKGHISLASARFPKGTTGSQLDALARQHLWAHGFDYDHGTGHGVGHFLSVHEGPQRISKVANPTALLPGMVLSNEPGYYRADAFGIRIENLELVVDIETQGDMNVMGFESLTRAPIDKRLIDPALLTDVELAWLNNYHQTVFNVISLSLTGSDLEWLTQATSPLSR

SEQ ID NO: 3927 - protein, 493 aa, Prochlorococcus marinus str. NATL2A
MTKFQSIFWHRRDLRFGDNIGLFEASKNSKSLIGVYVLDPKLLDLNRTTSEAKNWFLGESLIELQKNWEIRGSRLLILNGDPIELISKLAELVHAECIYWNENIEPYEINRDKQIAEKLSKEKRKVYTFLDQLIVNPSNIKTNNDEPYKVYGPFYRKWIDLINITKSSENNLIQTSETAKQLTGLNERELSSIKNSDLNYCITNKSKSIYELLSLNRFNKTNLCPCKPGESESIKQLNSFIHSGVINSYNKARDIPSLENTSHLSAALSLGTISCRVVWNGAQVSKNATDDEYKINSIDTWIKELAWREFYQNALINFPELEKGPYREKWLDFPWQNRPDWFEAWGDGLTGIPIIDAAMRQLKCSGWMHNRCRMIVASFLVKDLLIDWRLGELFFMKSLVDGDLAANNGGWQWSASSGMDPKPMRIFNPFRQASKFDEDGEYIRKWIPELSHISTPNLLSGEISSAERNSYPKPIISHKNQTSIFKELYSNIK

SEQ ID NO: 3928 - protein, 307 aa, Borrelia burgdorferi B31
MIYTLTLNPSVDYKIVLKEFQEESLNYALNNNFFAGGKGINVSTVLKNLGKPSTALGFLGGFTGDYIRFSLDSRGIKNDFIKIKYDTRLNIKMIANGRETEINANSPDISENEFELLKNKLKNLANNSTLVMSGSVPAALGEDAYNEIANSISNDVKLIIDTSGKPLRKILRLNPFLIKPNIYELEDLFNAKFDSTKELIKIGKNLVESGVQNIIISMGSDGAIFIGGKNVAFRAFVPKINFVSTIGAGDSVIAGFVYAFDNGSTLEDSFKFGVAAGTATALKGNLCEFQDVKKMLCQIRVEDIYTS

SEQ ID NO: 3929 - protein, 124 aa, Triticum aestivum
  misc_feature (76)..(76): Xaa can be any naturally occurring amino acid
  misc_feature (106)..(106): Xaa can be any naturally occurring amino acid
MGGGGAHAASTLALLVAALVLSAAPAPAEGAVSNCGQVVSYLAPCISYAMGRVSAPGCSCCIGVRCLNAGGGTPAXRKTTCTCLKHQASGIGWINPNLFFGIPVKXGGNIPYAIIQWTDCFKGR

SEQ ID NO: 3930 - protein, 656 aa, Medicago truncatula
MRTLFIILFTIISFSTILPLSNSQKNDTFSTCNESYFTCGTNTNVSFPFWGKNRPNICGKNEFKLTCMHNQNTSVQIGSQKFNVLNINQTASTMKIVRTNLINDICSSNFTNTSLNGSPFTFLPNVQNLTVFYNCPIENSSIIGKNINSFTCENNGSNKHVFYVVKNETQLQNQFSNLQNCGASVQVQVSMDGVSESGVEVVQEGFDVKYDEGAGWSSECEVCRESGGTCGTNQNDSSQFSCYCPGGTHAANCSARKSSKRTKVLKLVLGFVGTGMLLPLIAVIICRNKAKIWKVIKTQFSKITRNNQHIEDFLESQGPLNIKRYSYSDIKKMTESFKVKLGEGGYGSVYKGKLLNGGSVAVKVLSESKGCGEDFINEVATICKTSHVNVVTLLGFCLDGTKKALIYEFMSNGSLEKFIQNHNKESEKAEKTKTSPSLSWENLHQIAIGIARGLEYLHKGCNTRIFHFDIKPHNILLDETYRPKISDFGLAKLSTSNESIISMSNARGTVGYVAPEVFNKSFGGVSHKSDVYSYGMMLLEMVGGRKNVNIVEASRSSELYFPHLVIYKKLEKGNDLELDDGVMSNEENEIAKKLTMVGLWCIQTIPTHRPTISKVIDMLDGSMDSLEMPPKPVMFSPPRSIPEFSTSSKSLESFSS

SEQ ID NO: 3931 - protein, 497 aa, Photorhabdus luminescens subsp. laumondii TTO1
MSDINLLQPVMAFLQHNHGHYINGQPVSGQGSETFSVINPATDEIIATVNQGGKAEVNAAMQAAQAAFHGVWAQTSPMERGHCLNRLADLLLAHREELAQLETLCSGKTIQLSRMLEIDSSAQFLRYFAGWSSKISGETLNVSLPSFKGEQYTAFTRREPIGVVVGIIPWNFSIMIAIWKMAAALTCGCTIVLKPSEYTPLTMLRVAELAKQAGIPDGVINVINGSGSVLGPALIGHPLCAKVTFTGSVPTGIAVGKSAMEQGLTRATLELGGKNGAAFLADMSVEKIVDGILEAGYLNQGQICAAAERFYIPASHMDDVLKLLSERLAAMKIGSPLDDSTEMGPLANKAHYDKILSLFEQARQEGSEIVYGGHALAGPGFFVAPTVIRANSPEDSLMKEETFGPVGTFLSYNDEEELIGLMNSTPFGLAASLWTNDLSKAMRMIPRIEAGTVWVNMHTFLDPALPFGGTKSSGIGREFGSAFIEHYTELKSVMVRY

SEQ ID NO: 3932 - protein, 128 aa, Brassica napus
KLFPLLGALGAFGTKGKFVGVPPPGLEKTFFPPPKGVPFPPGSKKQGLFFGFPKAPPFFFEKLAPLGKPFSFLGGFLPGKGALAPPPLWGGFPIPKFAPPPLFNGAFFFPGGFYPGKGKFLPFLGEKS

SEQ ID NO: 3933 - protein, 240 aa, Arabidopsis thaliana
MTDPHTARTIVGIVGNVISFGLFCAPIPTMVKIWKMKSVSEFKPDPYVATVLNCMMWTFYGLPFVQPDSLLVITINGTGLFMELVYVTIFFVFATSPVRRKITIAMVIEVIFMAVVIFCTMYFLHTTKQRSMLIGILCIVFNVIMYAAPLTVMVRVIKTKSVKYMPFFLSLANFMNGVVWVIYACLKFDPYILIPNGLGSLSGIIQLIIYITYYKTTNWNDDDEDKEKRYSNAGIELGQA

SEQ ID NO: 3934 - protein, 461 aa, Kluyveromyces lactis NRRL Y-1140
MSAEPYEPEFQQAYNEVYNCLKDSTLFDKKPVYKKVLPVVSVPERIIQFRVTWENDKGEQEVATGFRVQFNSAKGPYKGGLRFHPTVNLSVLKFLGFEQIFKNALTGLSLGGAKGGLCFDPKGRSDSEIRRVCYAFMKELSRHIGQDVDVPAGDIQVGGREIGYLFGAYRHYKNSWEGVLTGKDLNWGGSLIRPEATGYGLIYYTEAMIKYASQGKESFEGKRVVISGSGNVAQYAALKCIELGATVLSLSDSKGSVISETGITAEHIYAIQDGRAAWKTLEQIVGEASVFSGSSVKYIAGARPWVHVGKVDVALPCATQNEVSGAEAEHLVANGVKFVAEGSNMGSTQEAIDVFEGVRLQTASASAPAVWYAPGKASNMGGVAVSGLEMAQNSARVSWTRETVDAELKKIMTTCFDDCVTTAKEYSNESNVEALPSLVKGANLTGFIRVADAMLHQGDVF

SEQ ID NO: 3935 - protein, 282 aa, Shewanella sp. MR-4
APVVAQIAREEGFLTVAVVTKPFPFEGKKRMAYAEQGIAELAKHVDSLITIPNEKLLKVLGRGTSLLDAFAAANNVLLGAVQGIAELITRPGLINVDFADVKTVMSEMGNAMMGTGVARGEDRAEEAAEAAVASPLLEDIDLAGARGVLVNITAGMDMSIEEFETVGNHVKAYASDNATVVVGAVIDPEMSDELRVTVVATGIGAEKRPDIQLVSKPAPRPEPVVVEPKVEAYVEEATHVSYAAPKGNVLPASPAPAPAPAPSTKHELDYLDIPAFLRKQAD

SEQ ID NO: 3936 - protein, 373 aa, Candida maltosa
MSVKTKTITILPGDHVGTEIVNEAIKVLEAIEAATPYQKIHFDFKHHLIGGSAIDATGVPLPDDALESAKNSDAVLLGAVGGPKWGTGALRPEQGLLKIRKELNLYANIRPCNFASDSLLELSPLRPEVVKGTNLIIVRELVGGIYFGDREEQEESEDKQTAWDTEKYTVDEVTRITRIAAFMALQHNPPLPIWSLDKANVLASSRLWRRTVDKVISEEFPTLSVQHQLIDSAAMILIQNPTKLNGIIITSNMFGDIISDEASVIPGSLGLLPSASLASLPDTNTVFGLYEPCHGSAPDLPANKVNPIATILSAASMLRLSLDCVKEAEALEEAVKQVLDKGIRTADLRGTSSTTEVGDAIVEAVTKILKEKA

SEQ ID NO: 3937 - protein, 536 aa, Aspergillus nidulans FGSC A4
MAALRRLHATAQQFAPSTTSAASTATEYPTTHEAIANPIDTTNFLNNEFVPSKASTWIDLYDPATNNLVTRVPQSTDEELRAAVEAAQKAFPAWRATSIMARQQIMFKFVNLIRANWDRLAASITLEQGKTFADAKGDVLRGLQVAETACGITTQITGEVLEVAKDMETRSYREPLGVVAAICPFNFPAMIPLWCIPIATITGNTMVMKPSERDPGAAMILAELAREAGFPPGVINIIHGSAKTVDFILDAPEIKAISFVGGNRAGEYIYTRGSANGKRVQANLGAKNHAAVLPDANKNQTINAIVGAAFGAAGQRCMALSTLVTVGETKEWLPEMAERAKALNVNGGFEEGADLGPVISPESKKRIEDLIASAEEEGATILLDGRGYKPEKYPNGNFIGPTIITGVTPGMKCYKQEIFGPVLVCLEVETLDDAIELINKNEYGNGAAIFTRSGPTASRFQKDIEAGQVGINVPIPVPLPMFSFTGNKKSIAGGGANTFYGKPGLQFYTQQKTVTSLWRAEDAVSTKAHVVMPTHS

SEQ ID NO: 3938 - protein, 529 aa, Geobacter sulfurreducens PCA
MNAHELWQRYQTYLLFDADTGLILDVSRMAFSDDFFASMEPAMQRAFDAMERLEAGEIANPDENRMVGHYWLRSPELAPDPAIAAAIRETVDRVTAFAADVHNGVVTAPRARLFRNVLVIGIGGSALGPQFVADALGGHGDRMRPFFFDNTDPDGMDRVLETLGADGLAETLAIVISKSGGTKETRNGMLEAEAAYRRAGLDFSRHAVAVTGAGSELDRTAEAGGWLCRFPMWDWVGGRTSETSAVGLLPAALQGIPIRDFLDGARTCDTLTRRRETLRNPAALLALMWHHATRGSGSRDMVVLPYKDRLLLFSRYLQQLIMESIGKELDLDGTVVNQGLTVYGNKGSTDQHAYVQQLREGTNNFFVAFIEVLKDREGASLAVEPGFTSGDYLSGFLQGTRTALSEKGRESLTITIPAITPRTVGVLVALFERAVGLYASLVNINAYHQPGVEAGKKAAGGVLALTGEALAFLRREGGTLSATEIAAALGRPEEAETIFRSLLHAAANPDHGVVMEAASPLTRSRFSAR

SEQ ID NO: 3939 - protein, 312 aa, Triticum aestivum
  misc_feature (271)..(271): Xaa can be any naturally occurring amino acid
  misc_feature (278)..(278): Xaa can be any naturally occurring amino acid
  misc_feature (282)..(282): Xaa can be any naturally occurring amino acid
  misc_feature (287)..(287): Xaa can be any naturally occurring amino acid
  misc_feature (302)..(302): Xaa can be any naturally occurring amino acid
FRASSKWSGGSRSTPRQYDGSSHNDDLELPIFDLGTIAVATDGFSIDNKLGEGGFGPVYKGKLEDGQEIAVKTLSKTSVQGLDEFKNEVMLIAKLQHRNLVRLLGYSISGQERLLIYEYMENKSLDYFLFAEKSNSIQLDWQVRYSIIEGIARGLLYLHQDSRYRIIHRDMKASNVLLDKEMIPKISDFGMARMFGSEETEINTCKVVGTYGYMAPEYAMDGVFSRQSDVFSFGVLLLEIISGRRNRGVYSYSNHPNLLGHAWSLWNEGKXVELADEXMNGXVHSDXVLKCTRVGLLCVQEXPRYRPLMSQC

SEQ ID NO: 3940 - protein, 420 aa, Escherichia coli CFT073
MIIILIIMVVISAYFSGSETGMMTLNRYRLRHMAKQGNRSAKRVEKLLRKPDRLISLVLIGNNLVNILASALGTIVGMRLYGDAGVAIATGVLTFVVLVFAEVLPKTIAALYPEKVAYPSSFLLAPLQVLMMPLVWLLNAITRILMRMMGIKTDIVVSGSLSKEELRTIVHESRSQISRRNQDMLLSVLDLEKMTVDDIMVPRSEIIGIDINDDWKSILRQLSHSPHGRIVLYRDSLDDAISMLRVREAWRLMSEKKEFTKETMLRAADEIYFVPEGTPLSTQLVKFQRNKKKVGLVVNEYGDIQGLVTVEDILEEIVGDFTTSMSPTLAEEVTPQNDGSVIIDGTANVREINKAFNWHLPEDDARTVNGVILEALEEIPVAGTRVRIGEYDIDILDVQDNMIKQVKVFPVKPLRESVAE

SEQ ID NO: 3941 - protein, 224 aa, Cryptococcus neoformans var. neoformans B-3501A
MSKAIISPSVLASDLSDLSNECRRMMANGCDWLHMDVMDGHFVPNITMGAPILEHVYKNVPNIFMDCHMMVSNPSQWVPEVAKAGGKLYTFHYEATEEPEKVIELVHSHNMLAGLAISPETPASAITDSLGKAADLLLVMTVRPGRGGQKFMPECLEKVKELRERFPGKNIQVDGGVGSGNACQCAQAGSNVLVAGTAIFGAKDPKQTIQEMRTAVDGAIAQQK

SEQ ID NO: 3942 - protein, 112 aa, Synechococcus sp.
MKKIEAIIRPFKLDEVKIALVNAGIVGMTVSEVRGFGRQKGQTERYRGSEYTVEFLQKLKLEIVVEDAQVDTVIDKIVAAARPGEIGDGKIFVSPVDQTIRIRTGEKNADAI

SEQ ID NO: 3943 - protein, 664 aa, Chromobacterium violaceum ATCC 12472
MEARSQALQQANVQLTEARDAAEAANRAKSEFLAVMSHEIRTPLNGVIGMTDLLQRTRLDDRQRHYVSVVHRSGEDLLAIISDILDFSKIEAGKFELDRQPFCLNLLVEEIVERLAPVAYGKGLELMCALPLMPVEVVGDGKRLGQVLTNLVGNAIKFTESGHVLAKVDRAGESDAGVTCRISVKDTGIGIAPDQQKRLFKPFSQADSSTTRRFGGTGLGLVISQRLVGMMGGRIELESEPGSGSEFHFTLTLPRASDSQLCPPAEDVARMRVLVLDDNVTNLEILEQQLASWHCRVAAFHRPREALDWLTAGNEVDLIISDMMMPEMDGLMFLGEARERLGEAAPPAIILSSAADDFQKLTGASRLARQVLTKPIRRSDLYNALLQLGSAAAKVEPAPDGHDQPRLSGRVLLVEDNLVNQELATAMLRNLGCEVELARNGEEALRLCEAGGFDLALMDCEMPVMDGWQATGAIRARERPGGARLTIVALTANAGLGERERCLQAGMDDYLSKPFTQNELGAVLSRWLSPGEEAEASAEPAGIAARDDGEWVDAGALDAIRAIQQDLLPRMLAAWMSEGPMLLAGIREAIDAVDGPALFRAAHALKNCAGSVGAQPLASLCMELERLGKGEDLAGAANLLPELDQAFGCSMAALKAVDEGSGLA

SEQ ID NO: 3944 - protein, 167 aa, Citrus sinensis
MASQSKTSVHDFTVKDAKGQDVDLSIYKGKLLLIVNVASQCGLTNSNYTELSQLYDKYKNQGLEILAFPCNQFGAQEPGDNEQIQEFACTRFKAEFPIFDKVDVNGDNAAPLYKHLKSSKGGLFGDSIKWNFSKFLVDKEGNVVERYAPTTSPLSIEKDIKKLLETA

SEQ ID NO: 3945 - protein, 717 aa, Prochlorococcus marinus str. NATL2A
MVSSGLNNNNMSSTSKDIAVKDRANLAFPLAAITGHGTLKLALMLAAVDPGLGGVIIAGGRGTGKSVLARGLHALLPPIEIIDLDELANTEDGDDSFIYPAGRNLDPSFSGEWDDLTKKLFTKKIGSYENTDDLENIPTKVVSAPFIQVPLGVTEDRLVGAVDVAASLSSGTPVFQPGLLAEAHRGVLYIDELNLLDDGIVNLLLASVGAGENRVEREGLSLSHPCRPLLIATYNPEEGGLRDHLLDRFAIVLSADQLITNEQRVEITQSAISHGQSSEAFSKKWSEDTESLSTQLLLARQWLPDVQISEDQIEYLVVEAIRGGVEGHRSELYSVRVAKAHAALCGRDSVDAEDLKAAVRLVIAPRAMQMPSEEEMEPPAPEDQQPPPPPPEDSDDNNDQEEDQEEDQEEEQDEESSPPIPEEFMLDPEACAVDPDLLLFSSTKSKSGNSGSRSAVLSDNRGRYVKPIIPRGPVRRIAVDATLRAAAPYQKARREREPNRKVIVEEGDLRAKLLQRKAGALVIFLVDASGSMALNRMQSAKGAVIRLLTEAYENRDEVSLIPFRGDQAEVLLPPTRSITAAKRRLEAMPCGGGSPLAHGLTQAARVGANALATGDLGQVVVVAITDGRGNVPLSTSLGQPILEGETPPDLKQEVLDVASRYRALGIKLLVIDTERKFIASGMGKDLADASGGKYVQLPKASDKAIASIAMDAINSVT

SEQ ID NO: 3946 - protein, 492 aa, Arabidopsis thaliana
MGGDLKSQLSRESHVFGLKVWEVIGIAVALLIIAILSVLSCCLTSKKKSRRSKTGLPVIQTPPVVSKEIREVRVEHVSASNFAPGEGILLTIQDKNSKDSEKVMVHLDMRKKRSSSGRSGSFHHLEIIDKHSESAEEVSASSSLYNIATPSPLSGLPESHLGWGHWFTLRDLETATNRFSKENVIGEGGYGVVYRGELMNGTPVAVKKILNQLGQAEKEFRVEVDAIGHVRHKNLVRLLGYCIEGTHRILVYEYVNNGNLEQWLHGAMRQHGYLTWEARMKVLIGTSKALAYLHEAIEPKVVHRDIKSSNILINDEFNAKVSDFGLAKLLGAGKSHVTTRVMGTFGYVAPEYANSGLLNEKSDVYSFGVVLLEAITGRDPVDYGRPAHEVNLVDWLKMMVGTRRSEEVVDPNIEVKPPTRSLKRALLTALRCVDPDSDKRPKMSQVVRMLESEEYPIPREDRRRSRTREGSMEINSDTDMSTPVSRSQSKRQ

SEQ ID NO: 3947 - protein, 479 aa, Medicago truncatula
MSEGAEIDDRVDLDEENYMEEMDDDVEEQIDDDGVDGGEDENAEGSVEEHEYEETAAEAGQKDQFPEGEKSDHGAEEDELKPALIDEEEREKHDELLSRPPHGSEVFIGGLPRDTSDDDVRELCEPMGDIVEIKLIKDRETGESKGYAFVGYKTKEVAQKAIDDIHNKEFKGKTLRCLLSETKHRLFIGNIPKTWTEDEFRKAVEGVGPGVESIDLIKDPQNQSRNRGFAFVLYYNNACADFSRQKMSSVGFKLDGITPTVTWADPKTSPDQSAAASQVKALYVKNIPENVTTEQLKELFRRHGEVTKVVMPPGKASGKRDFGFIHYAERSSALKAVKETEKYEIDGQALEVVIAKPQAEKKPDGGYAYNPGLHPNHLPHPGYGNFSGNLYGSVGAGYGVAAAAAYQQPMIYGRGPMPAGMQMVPMVLPDGRIGYVLQQPGVQVPGPRPRRNDRGNGPGGRGGGGGNDDGNRNRRYRPY

SEQ ID NO: 3948 - protein, 155 aa, Treponema denticola ATCC 35405
  misc_feature (35)..(35): Xaa can be any naturally occurring amino acid
MGIYNYTVKDSLGNDFSFNDYKDYVILIVNTACEXGLTPHFQGLEALYKEYRDKKFLVAAFPCNQFGGQDPGTNEEIRNFAQSKYGVSFPIMAKIEVNGENTEPIFSFLKKASNGEDIKWNFAKFLVDKTGERVTAYAPTVAPEDLKKDIEKLLN

SEQ ID NO: 3949 - protein, 255 aa, Mycobacterium sp. KMS
MAEQPVRYEVVDSVAWLTINRPEARNALNNAVRTGLFDAVRRFNDDDAAKVLVLTGVGDKAFCAGGDLKEMAQNALKVPPKDFAPQFGRNIDVAKPTIAAVNGVAFAGGFLLAQQCDLVVAAEHATFAVSEVKVGRGSPWAAPLSWLVPPRVAMQILLTGDPITAERAHQVGLVNEVVPADQLRERTRQLALSIAANAPLSVLASKRTVYLSAQHHLAAAYDLADEIWEPVYLSDDAQEGPTAFREKRAPQWKGR

SEQ ID NO: 3950 - protein, 108 aa, Chromobacterium violaceum ATCC 12472
MSDLILHVTDDSFENEVLKADRPVLVDYWAEWCGPCKMIAPILDEVAKEYDGKLKIAKLNIDQNEQTPPKFGIRGIPTLMLFKDGQVAATKVGALSKSQLTAFIDSQL

SEQ ID NO: 3951 - protein, 328 aa, Staurastrum punctulatum
MSEMLLFEALREGLQEEMDRDPKVLVMGEDVGHYGGSYKVTKGFAEKYGDLRLLDTPIAENSFTGMAIGAAMTGLRPVVEGMNMGFLLLAFNQIANNAGMLHYTSGANFTIPIVIRGPGGVGRQLGAEHSQRLESYFQSVPGLQLVACSTPINAKGLIKSSIRSENPVILFEHVLLYNLKETIPDNEYLVCLEKAEIVRPGTDITILTYSRMRHHVLQATKSLVYKGYDPEIIDIVSLKPVDLGTISTSIKKTHKVLIVEECMRTGGIGASLRATIMEHLFDFLDAPIMCLSSQDVPTPYSGPLEELTVIQPAQIVQAVEQLCNNGNN

SEQ ID NO: 3952 - protein, 555 aa, Borrelia burgdorferi B31
MNTSLFKQERQKYIPKLPNILKKDFNNISLVYGENTEAIQDRQALKEFFKNTYGLPIISFTEGESSLSFSKALNIGIILSGGPAPGGHNVISGVFDAIKKFNPNSKLFGFKGGPLGLLENDKIELTESLINSYRNTGGFDIVSSGRTKIETEEHYNKALFVAKENNLNAIIIIGGDDSNTNAAILAEYFKKNGENIQVIGVPKTIDADLRNDHIEISFGFDSATKIYSELIGNLCRDAMSTKKYWHFVKLMGRSASHVALECALKTHPNICIVSEEVLAKKKTLSEIIDEMVSVILKRSLNGDNFGVVIVPEGLIEFIPEVKSLMLELCDIFDKNEGEFKGLNIEKMKEIFVAKLSDYMKGVYLSLPLFIQFELIKSILERDPHGNFNVSRVPTEKLFIEMIQSRLNDMKKRGEYKGSFTPVDHFFGYEGRSAFPSNFDSDYCYSLGYNAVVLILNGLTGYMSCIKNLNLKPTDWIAGGVPLTMLMNMEERYGEKKPVIKKALVDLEGRPFKEFVKNRDKWALNNLYLYPGPVQYFGSSEIVDEITETLKLELFK

SEQ ID NO: 3953 - protein, 814 aa, Buchnera aphidicola str. Sg (Schizaphis graminum)
MKLLKFGGTSLANAKKFLCVADIIEKKNKKEQIAVVLSAPAKITNYLATIIENKIDDEVLKKINLAKNIFIELIQDIKRIQPLFPYENTKSTIEIEFNKLKKIINGILLIKQCPEGIKPIIISRGEILSVDIMKNILQSRNHEVTILNPVTNLLSIGNYLDSTIDIKESKKRIKKINIDQKNIILMAGFIAGNKEGELVVLGRNGSDYSAAILASCLNAKCCEIWTDVDGVLTADPRIVSNTYLLDYISYQEAMELSYFGAKVLHPRTIEPISQFQIPCVIKNTNNTESKGTWIGKENNPSDNSLKGVTYLDNIIMFNISGSCLKDSGNTIARIFTILSRESMKIILIIQSSSENQINFCTFEKDIDYILLILKKEFTLEIKEGLLNDFNIVKNLTILSVIGSNISEKNNIASKIFSSLGSSKINVLAIAHGSSKHSISIVIKKENLLQGIQNIHNTLFFKKTIINVFLIGIGGVGKALLKQILKQEKFLDQKNIKIQFRMIANSKKLLFLKNSINLNNWEENFKKSKEKFNLTILNELLKNTCDSNSVIIDCTSDYILSKQYISFIKKGFHIITSNKKANTDSLKYYSEIRTTALKENKKFLYETNVGAGLPVINTLQSLFSTGDCLISFKGILSGSLSFIFGKLEEGVLLSEATKEAKKLGFTEPNPFDDLSGIDVARKLLVLAREIGYSIELKDISIEPILPERFKKYQNSEEFLFKLKELDSFFSERVNKARDIGNVLRFIGSIEKNGKCSVKIEEINSNNPLYKVKNGENALTFYTNYYQPIPLVLRGYGAGNDVTASGVFSDLLRIIL

SEQ ID NO: 3954 - protein, 451 aa, Mycobacterium sp. JLS
MSPETSSEATEQVQDEPATGGKLKRKITGSLLFLFILGDVLGAGIYALMGVLAQDVGGVLWAPLLVALLLALLTAGSYAELVTKYPKAGGAAVFAERAFKRPVVSFLVGFSMLAAGVTSAAGLALAFAGDYLSTFIDVPAIPAAMVFLGLVAALNARGINESVKSNVVMTVIELSGLLIVIVAVAMMVGGGRGEVGRVVEFPDGATPALAILAGAIVAYYSFVGFETSANVAEEIRNPSKVYPTALFGALIAAGVVYALVGVASAVALPADQLSESSGPLLDVVSAAGVGVPDWLFSAIALVAVANGALLTMIMSSRLTYGMAEHGLLPSVLSRVLPQRRTPWVAIVATTVVAMCLTLVGELSTLAETVVLLLLFVFISTNVAVLVLRRDHVGHDHFRVWTAVPVLGVASCVLLMTQQTAKVWAFAAIMLAVGAVLYGLARIATKREGTAV

SEQ ID NO: 3955 - protein, 210 aa, Glycine max
MAITGDIFRQSITEMLAESPSGAPELHVLAVDDSLVDRKVIERLLKISSCKVTVVESGTRALQYLGLEGENGSLGFDSVKVNLIMTDYSMPGMTGYELLKKIKESSVFREIPVVIMSSENVLTRIDRCLEEGAEDFLLKPVKLSDVRRLKDFIMKGKVKEGEKISNKRMRSIDCSPPLTATCSPVSLPCDPPSSSSSSLLSPLSSKKARL

SEQ ID NO: 3956 - protein, 288 aa, Mycobacterium sp. KMS
MSGVGAITLDGKATRDEIFVDLKERVAALTEQGRTPGLGTVLVGDDPGSQAYVRGKHSDCAKVGINSIRRDLPADISQAELDATIDELNANPECTGYIVQLPLPKHLDENAALERIDPGKDADGLHPTNLGRLVLNEPAPLPCTPRGIVHLLRRYEVEIAGAHVVVIGRGVTVGRPLGLLLTRRSENATVTLCHTATRHLPQFTREADIIVAAAGVPHMVTAEMVRPGAAVIDVGVSRDDNGKLVGDVAPDVWEVAGHVSPNPGGVGPLTRAFLLTNVVERAEALARG

SEQ ID NO: 3957 - protein, 494 aa, Bacillus cereus G9241
MLTKNIELKPKVKAFLNEEIKMFINGEFVPSISGKTFETYNPATEDVLAVVCEAQEEDIDVAVKAARSAFESGPWAEMTTAERAHLIYKLADLIEEHGEELAQLEALDNGKPYQVALDDDIAATVENYRYYAGWATKIIGQTIPISKDYLNYTRHEPVGVVGQIIPWNFPLVMSSWKMGAALATGCTIVLKPAEQTPLSLLYTAKLFKEAGFPDGVVNFVPGFGPEAGAAIVNHHDIDKVAFTGSTVTGKYIMRQSAETIKHVTLELGGKSPNIILEDADLEEAINGAFQGIMYNHGQNCSAGSRVFVHRKHYETVVNELVKMANNVKLGAGMEKETEMGPLVSKKQQERVLHYIEQGKAEGATIAAGGERAFEKGYFVQPTVFIDVTDDMTIVKEEIFGPVVVVLPFDSTEEVIERANRSSYGLAAGVWTQNIKTGHQVANKLKAGTVWINDYNLENAAAPFGGFKQSGIGRELGSYALDNYTEVKSVWVNIK

SEQ ID NO: 3958 - protein, 526 aa, Rhodospirillum rubrum ATCC 11170
MLDSNLKAQVKTYLENVTQPIELVASLDESAKSEEMLDLLEDIAGLSDKITLIGRDDEGRKPSFSINRAGTDIGVRFAGLPMGHEFNSLILALLHVGGHPSKTAPEVVEQIESLDGDYNFETYFSLSCQNCPDVVQALNLMSALNPRIKHTAIDGALFQDEVESRQVMAVPAIYLNGEPFAQGRMTLEQILAKLDTGAAERTAAKLKDKEAFDVLVIGGGPAGAAAAIYAARKGIRTGVAAERFGGQVLDTMGIENFISVAHTEGPKLAAALESHVKDYAVDIMNLQRAEKLIPAKTPGGLVEVQLASGAALKARTVILSTGARWRQMNVPGEDAYRNKGVAYCPHCDGPLFKGKRVAVIGGGNSGVEAAIDLAGIVAHVTLIEFDARLRADQVLQTKLASLNNVTIITSALTSEVHGDGAKVVGLSYKDRTTEEFHRIDLDGIFVQIGLVPNTEWLKGTVALSPRGEIEIDARGQTSLPGVFAAGDATTVPYKQIIIAMGEGSKAALSAFDYLIRLPQAEETAAA

SEQ ID NO: 3959 - protein, 482 aa, Bradyrhizobium japonicum USDA 110
MTAILKNFIGGEWVDGSGVTRNINPSNTNDLVGEYAKADKAQTEKAIAAAKAAFPGWAQSTPQVRYDALNKISLEILARKEELGRLLAREEGKTLPEGIGEVARAGQIFAFFAGEALRLIGEKGASVRPGLDVELTREPMGVVGMITPWNFPIAIPAWKIAPALCYGNTVVFKPAELVPGSAHALSEIITRSGIPAGVFNLVVGSGSVVGQTLLDHPDVAAISFTGSVQTGRKIAQACVLSNPMKKFQLEMGGKNPLVVLDDADLKTAVEVAVNGSYFSTGQRCTASSRLIVTEGIHDRFVAAMAERLKGLSVDDALKAGVHIGPVVDQSQLDQDLRYIKIGQDEGAKLAFGGELLQRETPGHYLQPALFTEANNNMRIAREEIFGPVAAVIRAKNYEEALAISNDTEFGLASGICTTSLKYASHYKRNSESGMVMVNLPTAGVDYHVPFGGRKGSSYGAREQGSYAREFYTTVKTAYTYPG

SEQ ID NO: 3960 - protein, 337 aa, Oryza sativa
QGFTHFLYNSPASLSATAGVVFMCLVWIMHRRKQTLGFIIHHKYTGNESNTEEELKRYQSLSPKRYRYSDLKKITKCFKEKLGEGGFGTAFKGNLKDGRMVAVKLLKGAKGNGEEFLNEVTSIGRTSHVNIVNLLGFCLERSKRALVYEYMANGSLGKYIYSESLRLAIGLESLQKIAIGVARGLEYLHQGCSTRIIHFDIKPHNVLLDEDLCPKIADFGLAKLCHLKDSAISMAEARGTIGFIAPEVFSRGFGVVSTKSDVYSYGMMLLEMVEGRKNVKTNTDNSSAYFPNWIYDHLAKDLQSHEVTCENEEIARKITLVGLWCIQTAPRKSSFNE

SEQ ID NO: 3961 - protein, 335 aa, Glycine max
EYYDLMHEFMTAVKQNYGEKVLVQFEDFANHNAFELLAKYGTTHLVFNDDIQGTASVVLAGVVAALKLIGGTLPEHTFLFLGAGEAGTGIAELIALEMSKQTKAPIEESRKKIWLVDSKGLIVSSRKNSLQHFKKPWAHEHEPVNSLLEAVKVIKPTVLIGSSGVGRTFTKEVVEAMTSNNDKPLILALSNPTSQSECTAEEAYQWSEGRAIFASGSPFDPVEYKGKVYASGQANNAYIFPGFGLGLVISGAIRVHDDMLLAASESLAKQVSEENYKNGLIYPPFSNIRRISANIAANVAAKAYELGLATRLPRPQNLVKCAESCMYTPVYRNYR

SEQ ID NO: 3962 - protein, 575 aa, Xanthomonas axonopodis pv. citri str. 306
MAKKRTLARFLAETLQSAGVERIWGVTGDSLNGLTDALREMQTIEWMHVRHEEVAAFAAGAEAAVTGQLAVCAGSCGPGNLHLINGLFDCHRSRQPVLAIAAHIPSSEIGLSYFQETHPQELFRECSHFVEMVTNPAQLPEVLHRAMRTAILQQGVTVVVIPGDIALLEVDKHVSSAWPALRQPRVLPAAEDVRQLVELLQQSKAVTLLCGSGCAGAHDAVVALADTLGAPVVHALRGKEYVEWDNPFDVGMTGLIGFSSGYHAMLNCDTLLMLGTDFPYRQFYPKDATIVQVDRDPSALGRRTPLQLGIAADVGETIAALLPQLQRREERGFLEKSLAHYRKAREGLDDLAVPADPGQPLHPQFVTRLISQIADQDAVFTCDVGTPTVWAARYLRMNGKRRLLGSFNHGSMANAMPQALGAQAAFPGRQVISLSGDGGFAMLMGDFISLAQLHLPVKVVVFNNASLGFVAMEMKAAGYLDTGTELRNPDFAAMSNAMGILGIRVDESSQLERALRQAFAHSGPALVDVRVATQELAVPPAIKLEQAKGMGLYLLKAVMSGRGDEVIALVKTNLR

SEQ ID NO: 3963 - protein, 187 aa, Triticum aestivum
MSTSSGAKEAPANNPGLQAEADPATKGYIMQQTMFRVKDPKVSLDFYSRVMGMSLLKRLDFPEMKFSLYFLGYEDLSAAPADPVQRTGWTFGQKATIELTHNWGTESDPEFKGYHNGNSDPRGFGHIGVTVDDVYKACERFESLGVEFVKKPDDGKMKGIAFIKDPDGYWIEIFDLKRIGEVTAAAS

SEQ ID NO: 3964 - protein, 87 aa, Triticum aestivum
MAKKRKRSSDALAPAAVEKPDDSAPERPERTLFGFKDSSDEPASKDAGPFFRNKEKVLITCSRRIIYRYRHLMQNVVSLLPHAKKDS

SEQ ID NO: 3965 - protein, 186 aa, Arabidopsis thaliana
MAEVMLPRKMEILNHSSKFGSPDPLHVLAVDDSHVDRKFIERLLRVSSCKVTVVDSATRALQYLGLDVEEKSVGFEDLKVNLIMTDYSMPGMTGYELLKKIKESSAFREVPVVIMSSENILPRIDRCLEEGAEDFLLKPVKFSDVKRLRDSLMKVEDLSFTKSIQKRELETENVYPVNSQLKRAKI

SEQ ID NO: 3966 - protein, 358 aa, Agrobacterium vitis
MREYKIAAIPADGIGPEVIAAGLQVLEALEQRSGDFKIHTETFDWGSDYYKKHGVMMPADGLDKLKKFDAIFFGAVGAPDVPDHITLWGLRLPICQGFDQYANVRPTKILPGITPPLRNCGPGDLDWVIVRENSEGEYSGHGGRAHRGLPEEVGTEVAIFTRVGVTRIMRYAFKLAQARPRKLLTVVTKSNAQRHGMVMWDEIAAEVATEFPDVTWDKMLVDAMTVRMTLKPETLDTIVATNLHADILSDLAGALAGSLGVAPTANIDPERRFPSMFEPIHGSAFDITGKGIANPIATFWTAAQMLEHLGERDAAARLMGAVERVTEAGILTPDVGGTANTSQVTEAVCNAIAGSNII

SEQ ID NO: 3967 - protein, 189 aa, Zea mays
MRPLDENETTVVFEKIFKFVGNNLKNIVENPSHEGPGPKPEAGRYCFRLQKSRVYYVSESLVKRATNISRKNLVSLGTCIGKYTHAGSFHLTIMSLNLLAANAKHKVWLKPTSEMSFLYGNHVLKGGLGRITDSIVPGDGVVVFSMSDVPLGFGIAAKSTQDCRKLDPNGIVVLHQADIGEYLRDEDEL

SEQ ID NO: 3968 - protein, 364 aa, Agrobacterium vitis
MREYKIAAIPADGIGPEVIAAGLQVLEALEQRSGDFKIHTETFDWGSDYYKKHGVMMPADGLDKLKKFDAIFFGAVGAPDVPDHITLWGLRLPICQGFDQYANVRPTKILPGITPPLRNCGPGDLDWVIVRENSEGEYSGHGGRAHRGLPEEVGTEVAIFTRVGVTRIMRYAFKLAQARPRKLLTVVTKSNAQRHGMVMWDEIAAEVATEFPDVTWDKMLVDAMTVRMTLKPETLDTIVATNLHADILSDLAGALAGSLGVAPTANIDPERRFPSMFEPIHGSAFDITGKGIANPIATFWTAAQMLEHLGERDAAARLMSAVERVTEAGILTPDVGGTANTRQVTEAVCNAIAGSNILKMAAAE

SEQ ID NO: 3969 - protein, 205 aa, Arabidopsis thaliana
MAQTMLLTSGVTAGHFLRNKSPLAQPKVHHLFLSGNSPVALPSRRQSFVPLALFKPKTKAAPKKVEKPKSKVEDGIFGTSGGIGFTKANELFVGRVAMIGFAASLLGEALTGKGILAQLNLETGIPIYEAEPLLLFFILFTLLGAIGALGDRGKFVDDPPTGLEKAVIPPGKNVRSALGLKEQGISQHFYFYLCYNDIALNNQCK

SEQ ID NO: 3970 - protein, 545 aa, Shewanella sp. MR-4
MTILTQSTTWQALAAHSHQIPHMRELFAGDPARFSNMSLSTCGLFLDYSKNRATPETLNLLQTLAQEAKLDAKIKAMFAGDIINTTEKRAVLHTALRSTAEQSIVAEGQDIVPEVQQTLNKMQQFVTSVTSGQWKGFTGKAITDIVSIGIGGSFLGPKIVSQALRPYWITGLNCHFVANVDGTSISEKLKLLDPETTLFIMSSKSFGTQETLTNTLTAKAWFLAKGGSQSDVAKHFVAVTSNVAKATDFGIDADNIFPMWDWVGGRYSLWSAIGLPIALLIGMDNFRSLLKGAHQMDTHFANAPLAENMPVIMGLFSLWYGNFFNAQSHVVLTYDHYLRGLPAYFQQLDMESNGKSVTLNGTHVDYSTGPVIWGGEGTNGQHAYHQLLHQGTALIPADFIMPLQSHNPIGEHHDQLASNCFGQTQALMQGRTLDEALAELSKSSLSDEEKLLIAKHKVMPGNKPSNTLLMDKLTPETLGALIALYEHRTFVQGAIWDINSFDQWGVELGKSLGNDVLARIGAEQDATALDASSNGLINLYRQGKI

SEQ ID NO: 3971 - protein, 358 aa, Agrobacterium vitis
MREYKIAAIPADGIGPEVIAAGLQVLEALEQRSGDFKIHTETFDWGSDYYKKHGVMMPADGLDKLKKFDAIFFGAVGAPDVPDHITLWGLRLPICQGFDQYANVRPTKILPGITPPLRNCGPGDLDWVIVRENSEGEYSGHGGRAHRGLPEEVGTEVAIFTRVGVTRIMRYAFKLAQARPRKLLTVVTKSNAQRHGMVMWDEIAAEVATEFPDVTWDKMLVDAMTVRMTLKPETLDTIVATNLHADILSDLAGALAGSLGVAPTANIDPERRFPSMFEPIHGSAFDITGKGIANPIATFWTAAQMLEHLGERDAAARLMSAVERVTEAGILTPDVGGTANTSQVTEAVCNAIAGSNII

SEQ ID NO: 3972 - protein, 476 aa, Bacillus cereus ATCC 14579
MAKEQVQAITKMEEDFAQWYTDIVKKAELVDYSSVKGCMILRPYGYALWENMQKVMDEKLKETGHENVYMPMFIPESLLQKEKDHVEGFAPEVAWVTHGGDEKLAERLCVRPTSETLFCEHFSKIVQSYNDLPKLYNQWCSVVRWEKTTRPFLRTTEFLWQEGHTIHETAEESQAETLNILNLYASFCEDYLAIPVIKGQKTEKEKFAGAKATYTIESLMHDGKALQTGTSHNFGTNFSEAFDIKFLDRNGKWQYVHQTSWGVSTRMIGGLIMVHSDNNGLVLPPKVAPVQVVIVPIAQHKEGVLAKATELQAHIQKVARVKIDASNKTPGWKFNEYEMKGIPIRLEVGPKDIEKNQVVLVRRDTKEKEFVPMDQLEERIPALLEEIHIALFNKAKAFRDENTYVATNFEEMKKIADEKQGFIKAMWCGELACEEKLKEEFGVSSRCMPFEQEHLAEECICCGKEAKQMVYWGKAY

SEQ ID NO: 3973 - protein, 328 aa, Pseudomonas aeruginosa
MELLVLPNNRRLPFDSGANLLEVLREHRVGISYSCMSGRCGTCRCRVIDGSVISSAAKSGDSNRIEEHYVLACQSVLTSNCAIEIIDSDDIVTHPARIIKGMVVAVESPTHDIRRIRIRLAKPFEFSPGQYAMLQFSPEHVRPYSMAGLPDDQEMEFHIRKVPGGRVTEYIFEHVREGTSIKLSGPLGTAYLRQAHTGPMLCVGGGTGLAPVLSIVRGALKSGMTNPIHLYFGVRSQQDLYDADRLNQLAAIHPQLTVHTVIATGPINEGQRAGLITDLIEKDIPSLAGWRAYLCGAPAMVDALCTVAKDLGISPEHIYADAFYPSGV

SEQ ID NO: 3974 - protein, 526 aa, Dechloromonas aromatica RCB
MNPIDSPAWRALAAHAEAIRPLHLRDLFATDPQRFELFSLHHDGLLLDYSKQRVSVETMALLRAYAETADVTGWRRRMLDGESINHTEGRAVRHMSLRAGDQAPAEVRAALARQQAFCESIHNGVWRGFSGERITDVVNIGIGGSDLGPRMAALALSARQQPDIAVHFIANVDSADIAPLLASLNPRTTLFIVASKTFTTLETLTNARTARDWLLATAGQESAIARHFVAISTNLELTKQFGIADDNVFEFWDWVGGRFSIWSAIGLSLALAIGWKNFEQLQAGARAMDRHFIDTPADENLPLTLALLSLWNTNFLGASTEAMLPYSQSLHLFPAYLQQLEMESNGKQIDRDGKPLNIATSPVIWGESGTNGQHSFYQLFHQGGHLIPADFVALREADFPLPGHHASLLANCLAQSAALAFGQTAEEVRAAGIPEALIPYKVFPGNQPSNTLLLPSLDPYTLGQLLALFEHKVFCLGVLWNLNAFDQWGVELGKQLAGQLTPLIEGNGDLSAFDSSTRGLITALKG

SEQ ID NO: 3975 - protein, 480 aa, Oryza sativa (japonica cultivar-group)
MVLSVRAVSGKSDLDFSDPSWKEKYQEDWNRRFSLPHITDIYDLKPRLTTFSLKKNRTDGGSLSADKWNGYVNKDDRALLKVIKYASPTSAGAECVDPDCSWVEHWIHRAGPRKEIYYEPAEVKAAIVTCGGLCPGLNDVIRQIVFTLEIYGVKNIVGIQFGYRGFFEKGLKEMPLSRKVVENINLSGGSFLGVSRGGAKTSEIVDSIQARRIDMLFVIGGNGSHAGANAIHEECRKRKLKVSVVAVPKTIDNDILFMDKTFGFDTAVEEAQRAINSAYIEARSAYHGIGLVKLMGRSSGFIAMQASLSSGQIDVCLIPEVSFTLDGEHGVMRHLEHLLEKKGFCVVCVAEGAGQDLLQKSNATDASGNVILSDFGVHMQQKIKSHFKDIGVPADVKYIDPTYMVRACRANASDAILCTVLGQNAVHGAFAGFSGITSGICNTHYAFLPITEVITKPKRVNPNSRMWHRCLTSTGQPDFH

SEQ ID NO: 3976 - protein, 320 aa, Yersinia pestis biovar Medievalis str. 91001
MSTAKHSKLIILGSGPAGYTAAVYAARANLKPVLITGMEKGGQLTTTTEVENWPGDPEGLTGPALMERMHEHAEKFQTEIIFDHISSVDLQNRPFRLFGDGAEYTCDALIIATGASARYLGMASEEAFKGKGVSACATCDGFFYRNQKVAVVGGGNTAVEEALYLANIAAEVHLIHRRDTFRSEKILIDRLMEKVKNGNIVLHTDRTLDEVLGDDMGVTGVRLKSTHSDETEELAVAGVFIAIGHSPNTGIFSDQLALENGYIKVQSGLQGNATQTSIPGVFAAGDVMDHIYRQAITSAGTGCMAALDAERYLDGLANDK

SEQ ID NO: 3977 - protein, 170 aa, Medicago truncatula
MAEEHRCQAAQRLCANNCGFFGSPAMQDLCSKCYRDLQMKEQRSSSAKLVLNQTLIPQQSNSSSLDTGIIHPSSTSPSVMIVSSSTPTVELVAAAAGPSEAEPPKVQPNRCGTCRRRVGLTGFKCRCGLTLCGTHRYPEQHGCGFDFKGMGREEIKKANPVVKGEKLNKI

SEQ ID NO: 3978 - protein, 145 aa, Triticum aestivum
  misc_feature (74)..(74): Xaa can be any naturally occurring amino acid
  misc_feature (82)..(82): Xaa can be any naturally occurring amino acid
  misc_feature (90)..(90): Xaa can be any naturally occurring amino acid
  misc_feature (99)..(99): Xaa can be any naturally occurring amino acid
  misc_feature (115)..(115): Xaa can be any naturally occurring amino acid
  misc_feature (128)..(128): Xaa can be any naturally occurring amino acid
AAAAEADPQLPSSKVVAPWVPPRHLPLGAARRSSSAGLSRTEPPTRRDRSGGGRERWRRRPGGKETMRAPHILXIKHKGSRXKGSWKDPXGRVISATTXAPVRIGELHDQILAGXASFVDLAAQDSVXSSARRNGGDLGCYCYTI

SEQ ID NO: 3979 - protein, 146 aa, Phaseolus vulgaris
  misc_feature (146)..(146): Xaa can be any naturally occurring amino acid
MSSTEVATTTKKGGRGKPKTTKSVSRSSKAGLQFPVGRIARYLKAGRYAQRVGSGSPVYLSAVLEYLAAEVLELAGIAARDNKKSRIIPRHIQLAVRNDEELSKLMGSVTIASGGVLPKNSSKICCPRKTGKGEGEVWIYLVKGFX

SEQ ID NO: 3980 - protein, 400 aa, Thermotoga maritima
MAKEKFVRTKPHVNVGTIGHIDHGKSTLTAAITKYLSLKVLAQYIPYDQIDKAPEEKARGITINITHVEYETEKRHYAHIDCPGHADYIKNMITGAAQMDGAILVVAATDGPMPQTREHVLLARQVEVPYMIVFINKTDMVDDPELIDLVEMEVRDLLSQYGYPGDEVPVIRGSALKAVEAPNDPNHEAYKPIQELLDAMDNYIPDPQRDVDKPFLMPIEDVFSITGRGTVVTGRIERGRIRPGDEVEIIGLSYEIKKTVVTSVEMFRKELDEGIAGDNVGCLLRGIDKDEVERGQVLAAPGSIKPHKRFKAQIYVLKKEEGGRHTPFTKGYKPQFYIRTADVTGEIVGLPEGVEMVMPGDHVEMEIELIYPVAIEKGQRFAVREGGRTVGAGVVTEVIE

SEQ ID NO: 3981 - protein, 344 aa, Mesembryanthemum crystallinum
MGGKVSIPSPVLPEGLGCVIYDQNGVYGNRDQIIAGSVHSQKGGKGVNQDAAILCQGFGSEDGVFCGVFDGHGKFGHVVSKIVRQRLPVLLLDEKIAVAPADTESDDDSTQGGLSSSEKKFFDWEEACVKTFEEMDKELKHTKKADFSFSGTTAVVVLKQAQDFFIANLGDSRAVLGTKTENGVTPLQLTTDLKPGTPDEADRIRKSNGRVFALREEPGVERAWLPRIQCPGIAMSRCFGDFVMKKHGLISTPVVTHHSITSDDLFIVLATDGVWDVLSNEEVISIVTKVEKEEMAAQALVDAALVAWKTKLPYGKPDDCTALCLFLQNKDQTQSTTPQSSLSR

SEQ ID NO: 3982 - protein, 423 aa, Aeropyrum pernix K1
MEVLALQPTDPLEEARAQLRRAVDLLGYDDYVYEVLANPDRVLQVRVTIKMDDGTVKTFLGWRSQHNSALGPYKGGVRYHPNVTMNEVIALSMWMTWKNSLAGLPYGGGKGGVRVNPKILSPRELELLSRKYFESISDIVGVDQDIPAPDVYTDPQVMSWFLDEYNRVKRGQFFGVVTGKPVELGGLNARIVSTGYGVAVSTRVAAEKFLGGLEGRTVAVQGYGNVGYYAAKFLAEMGAKIVAVSDSRGGIYDPEGIDPEEALKVKRSTGTVANYQRGKKISTMEILELPVDILVPAAIEEVITDENADRIKAKIISEGANGPTTTAAEKILVKKGVLVLPDILANAGGVIMSHIEWVNNRMGGWITDEEALKKLEQKMVENTKTVITYWEKNLKPEENSLRDAAYMIAVERVFRAMKLRGWI

SEQ ID NO: 3983 - protein, 157 aa, Candida glabrata CBS 138
MAEEEHTFETADAGSSTTYPMQCSALRKNGFVVIKGRPCKIVDMSTSKTGKHGHAKVHLVAIDIFTGKKLEDLSPSTHNMEVPVVKRTEFQLLDIDDGFLSLMNMDGDTKDDVRHPEGELGDQMQAAFDEGKDLMVTIIAAMGEEAAISFKEAPRSD

SEQ ID NO: 3984 - protein, 466 aa, Mycoplasma gallisepticum R
MPISKKILNKKYQYGFYDKDTSIFETTKGISREIVKKISKLKNEPEWMLKIRLEAFDTFMKMPNPSWGPDLSFIDYDNAVMYSKAVDNPQYSWDQVPKKIKNTFKKLGILEAEAKFLNGVSTQYDSQAVYHSIEKELAENGVIFTDTDTAVQKYPELVKKYFGSIVSTNDNKFAALNTAFWSGGSFVYVPKGVEIRKPLQAYFRINGRRVGQFERTIIILEEGAKCHYVEGCTAPVYSEDNLHCAVVEVFLHKNSVGRYTTIQNWSDNVLNLVTKRSIVYENAKMSWIDGNIGARINMKYPSSILAGEYASSDCISIAVANKGIIQDAGAKMIHLAPHTKSRIVSKSVSFNGGDTCYRGLVKIGKDAHYSSSKVECDTLLIDNISRTDTLPTEIIENKYSSLEHEAKVSNISEEQLFYMMSKGVPKDVAENLIVLGFIEPFTKELPMEYAIELNRLITMDMEGSVG

SEQ ID NO: 3985 - protein, 180 aa, Arabidopsis thaliana
  misc_feature (112)..(112): Xaa can be any naturally occurring amino acid
  misc_feature (133)..(133): Xaa can be any naturally occurring amino acid
  misc_feature (147)..(147): Xaa can be any naturally occurring amino acid
  misc_feature (149)..(149): Xaa can be any naturally occurring amino acid
  misc_feature (152)..(153): Xaa can be any naturally occurring amino acid
  misc_feature (155)..(155): Xaa can be any naturally occurring amino acid
  misc_feature (162)..(163): Xaa can be any naturally occurring amino acid
  misc_feature (166)..(166): Xaa can be any naturally occurring amino acid
MASSMLSSTAVVTSPAQATMVAPFTGLKSSASFPVTRKANNDITSITNNGGRVSCMKVWPPIGKKKFETLSYLPDLSDVELAKEVDYLLRNKWVPCVEFRVGSTGLCNVSTXNTPGTMVGRYWAMWGLPLSGXTGSGQVFKGVENPXGXPGXXIXGTGFGKXXSQXLVYSNPKFGNPGTV

SEQ ID NO: 3986 - protein, 579 aa, Glycine max
MCGILAVLGCSDSSQAKRVRVLELSRRLKHRGPDWSGLHQYGDNYLAHQRLAIVDPASGDQPLFNEDKTVVVTVNGEIYNHEELRKQLPNHTFRTGSDCDVIAHLYEEHGENFVDMLDGIFSFVLLDTRDNSFIVARDAIGVTSLYIGWGLDGSVWISSELKGLNDDCEHFESFPPGHLYSSKERAFRRWYNPPWFSEAIPSAPYDPLALRHAFEKAVVKRLMTDVPFGVLLSGGLDSSLVAAVTARYLAGTNAAKQWGTKLHSFCVGLEGAPDLKAAKEVADYIGTVHHEFHYTVQDGIDAIEDVIYHIETYDVTTIRASIPMFLMSRKIKSLGVKWVISGEGSDEIFGGYLYFHKAPNKEEFHQETCRKIKALHKYDCLRANKSTFAWGLEARVPFLDKDFIRVAMNIDPEYKMIKKEEGRIEKWALRRAFDDEEHPYLPKHILYRQKEQFSDGVGYGWIDGLKAHAEKHVTDRMMLNAANIFPFNTPTTKEAYHYRMIFERFFPQNSARLSVPGGPSVACSTAKAVEWDAAWSNNLDPSGRAALGVHASAYGNQVKAVEPEKIIPKMEVSPLGVAI

SEQ ID NO: 3987 - protein, 411 aa, Buchnera aphidicola str. Sg (Schizaphis graminum)
MKKVHIEVKMPDIGLEEVEVTEILVKIGEEIKLDQGLITVEGDKASMEIPSPISGIVKDITIKIGEKVKTSSIIMIFKVNNLNSIKNEKDLNYIKTEKKLNENFLEEKKDIKKIVLVHATPVVRRLARHLNVDLKNITPSGPKNRILKEDIELYIRNNTSNKSSFNIEKNNTTNFHKDLFNEIPITNIQQIIGKNLHQNWVNIPHVTQFDEVNITLLEEFRHKYNTEKKQKNNMCSKITILPFIIKSVAYGLLEFPIFNSSLSVNKKTIFLKKYVNVGIAVDVQNALFVPVLKNVDKKNIANLSSELIFLSKKAHENKLDASDMKDGCFTISNLGGIGGSWFSPIINSPEVAILGVSKALIKPLWNGKEFIPSLMLPLSLSYDHRVINGADAARFLTFIGKMLSDIRFLIM

SEQ ID NO: 3988 - protein, 361 aa, Escherichia coli K12
MMKTMRIAAIPGDGIGKEVLPEGIRVLQAAAERWGFALSFEQMEWASCEYYSHHGKMMPDDWHEQLSRFDAIYFGAVGWPDTVPDHISLWGSLLKFRREFDQYVNLRPVRLFPGVPCPLAGKQPGDIDFYVVRENTEGEYSSLGGRVNEGTEHEVVIQESVFTRRGVDRILRYAFELAQSRPRKTLTSATKSNGLAISMPYWDERVEAMAENYPEIRWDKQHIDILCARFVMQPERFDVVVASNLFGDILSDLGPACTGTIGIAPSANLNPERTFPSLFEPVHGSAPDIYGKNIANPIATIWAGAMMLDFLGNGDERFQQAHNGILAAIEEVIAHGPKTPDMKGNATTPQVADAICKIILR

SEQ ID NO: 3989 - protein, 815 aa, Haemophilus influenzae
MRVLKFGGTSLANPERFSQAAKLIEQAHLEEQAAGVLSAPAKITNHLVALSEKAALNQSTDTHFNEAIEIFYNIINGLHTENNQFDLNGTKALIDAEFVQIKGLLEEIRQAGKVEDAVKATIDCRGEKLSIAMMKAWFEARGYSVHIVDPVKQLLAKGGYLESSVEIEESTKRVDAANIAKDKVVLMAGFTAGNEKGELVLLGRNGSDYSAACLAACLGASVCEIWTDVDGVYTCDPRLVPDARLLPTLSYREAMELSYFGAKVIHPRTIGPLLPQNIPCVIKNTGNPSAPGSIIDGNVKSESLQVKGITNLDNLAMFNVSGPGMQGMVGMASRVFSAMSGAGISVILITQSSSEYSISFCVPVKSAEVAKTVLETEFANELNEHQLEPIEVIKDLSIISVVGDGMKQAKGIAARFFSALAQANISIVAIAQGSSERSISAVVPQNKAIEAVKATHQALFNNKKVVDMFLVGVGGVGGELIEQVKRQKEYLAKKNVEIRVCAIANSNRMLLDENGLNLEDWKNDLENATQPSDFDVLLSFIKLHHVVNPVFVDCTSAESVAGLYARALKEGFHVVTPNKKANTRELVYYNELRQNAQASQHKFLYETNVGAGLPVIENLQNLLAAGDELEYFEGILSGSLSFIFGKLEEGLSLSEVTALAREKGFTEPDPRDDLSGQDVARKLLILAREAGIELELSDVEVEGVLPKGFSDGKSADEFMAMLPQLDEEFKTRVATAKAEGKVLRYVGKISEGKCKVSIVAVDLNNPLYKVKDGENALAFYTRYYQPIPLLLRGYGAGNAVTAAGIFADILRTLQH

SEQ ID NO: 3990 - protein, 250 aa, Oceanicola granulosus HTCC2516
MAGVEHIRGQTYHGRRGGTRNAFRYAVDYLLLDAEADLRGPRLFSRNRRNLFALFDSDHGGPPGDGRGAPWVREVLAAHGLAAPARIELLAQPRVLGHVFNPVSFWLCHGADGTLRAVIAEVTNTYGDRHSYLCHRDGAVIGSEDRLSARKLLHVSPFQPVAGEYTFTFRIEPEEVAIHIDYRSGNGGLVATLTGPRRPLTDGAILRTALRRPFGSRRVLALIHWQALKLWWKGARFRGRPAAPMEEVSR

SEQ ID NO: 3991 - protein, 310 aa, Photobacterium sp. SKA34
MSNQLIRIATRKSPLAMWQAEFVKAEIEQAHPGISVELVPMITKGDIILDTPLAKVGGKGLFVKELEVAMLEGRADIAVHSMKDVPVEFPEGLGLVTICEREDPRDAFVSNKYNNIDELPQGAIVGTSSLRRQCQLRAQRPDLIVNDLRGNVNTRLRKMDEGQYDAIILACAGLKRLKMEDRIRSEIAPEVSLPAVGQGAVGIECRLDDTRVRQLLTALSDQATTTRVLCERAMNNHLQGGCQVPIGSYAELEGDQVWLRALVGEPDGSKIVRAEIRGPIEQAEQLGETLAEQLLNDGARDILDRLYGNA

SEQ ID NO: 3992 - protein, 924 aa, Oceanicola granulosus HTCC2516
MSETISFTLDGRAVDAAPGETIWQVAKRVGTTIPHLCHKDAPGYRSDGNCRACMVAVDGERNLVASCIRTPVEGMTVTTDGAREVQTRKLVMELLLADQPEQPAAHDRSAHLWEMADAQGLAESRFPAMDADHVPLLDDSHVAMRVNLDACIQCGLCVRACREVQVNDVIGMAGRGHQAFPVFDLDDPMGDSTCVACGECVQACPTGALMPASVLNEVQEGDSQDYDREVESVCPFCGVGCQVSLKVKDDRIVYVDGIDGPANEGRLCVKGRFGFDYVHHPHRLTKPLIRRDDAPAKGLNVDPANPLSHFREASWEEALDAAAGGLARLRETRGGAAVAGFGSAKCTNEEAYLFQKLIRQGFGHNNVDHCTRLCHASSVAALMENVGSGAVTATFNQIEHADVAIIIGANPVENHPVAATYFKQFAKRGGKLIVMDPRGVGLRKFASHMLQFRPGADVSLLNAIMHVIVDEGLYDEQYIQAYTENWEAEKAHLAGFAPEDMAGICGIDAEVIRDVARTFATAERGMIFWGMGVSQHIHGTDNSRCLISLALMCGHVGRPGTGLHPLRGQNNVQGASDAGLIPMFLPDYQPVGDDGVRSAFAEIWGGAEFSAEKGLTVTEIMDAVHDDRIAGMYILGENPAMSDPDVDHARAALAKLEHLVVQDIFLTETANYADVILPASAFAEKTGTVTNTNRQVQMGRPALPPPGEAREDWAITVDLARRLGLDWSYSHPSEVFDEMARTMKSLANITWERLEGEAVTYPSLSPDDPGQPIVFGDGFPRAGGRAKFTPAAVIPPDETPDAEYPMILTTGRQLEHWHTGSMTRRSKVLDAVEPEANCSLHPSTLRKLGVAAGEMVRLTTRRGSIELMAREDRAVAPDMVFVPFAYVEAAANVLTNPAIDPYGKIPEFKFAAVRIEKGSALAAE

SEQ ID NO: 3993 - protein, 476 aa, Robiginitalea biformata HTCC2501
MSKFELKLPQMGESVAEATLTSWLKEVGDAIEADEAVFEIATDKVDSEVPSEVDGVLVEKRFEVDDVVKVGQVVAVIELNGESDQPDAGREAAGSPDAEASPGSSDTPGKQAAAKESSGQAEAAAAFVEQGEKTARPAPAPVSHGDRFYSPLVRNMAREEGIGQEELDRIPGTGKEGRVTKSDMLAYLESRGQEGAVRSESEPREAAATEAAGPAMAAAPEKGQAPKPAAAATGSPVSISEGDEVIPMSRMGKLIAKHMAESVSTSAHVQSFVEVDVTRIVEWRDRVKADFEKREGEKLTFTPIFMEAVAKALKKFPMMNISVDGDRVIKKKQINLGMAAALPDGNLIVPVIRNADQLNLVGMARAVNDLATRARNNALKPDEVRDGTYTVTNVGSFGSVFGTPIINQPQVGILALGAIRKVPAVIETPSGDFIGIRSKMFLSHSYDHRVVNGALGGLFVKAVADYLEAWDTERDV

SEQ ID NO: 3994 - protein, 122 aa, Zea mays
  misc_feature (9)..(9): Xaa can be any naturally occurring amino acid
  misc_feature (90)..(90): Xaa can be any naturally occurring amino acid
  misc_feature (93)..(93): Xaa can be any naturally occurring amino acid
  misc_feature (101)..(101): Xaa can be any naturally occurring amino acid
  misc_feature (104)..(104): Xaa can be any naturally occurring amino acid
  misc_feature (106)..(106): Xaa can be any naturally occurring amino acid
DYGGALKVXSTLVIGVHGLVSAPMASEAAISCGAVASNLGQCINYLTRGGFVPRGCCSGVRRLNSMARTTRDPATACRCIQGAARALGSXLNXGRAARLPXGLXRXRIAYPISAKNNCNQVR

SEQ ID NO: 3995 - protein, 537 aa, Glycine max
MAALNLCRMALRSSKLLSRPYHRLSVQLQMQMQPSSPPLTRKMSMDAQSVASQLNSSGLLRTQGLIGGKWSDAYDGKTIKVYNPATGESIVDVACMGGRETNDAISAAYDAYGSWSKTTAAERSKLLRKWYDLLMVHKEELAQLITLEQGKPLKESVGEIVYGAGFIEFAAEEAKRIYGDIVPAPFSDRRLFVLKQPVGVVGAITPWNFPLAMITRKVGPALACGCTVVIKPSELTPLTALAAVELSIQAGIPPGVVNVVMGNAPDIGDALLASPQVRKITFTGSTAVGKKLMAGSAETVKKVSLELGGNAPCIVFDDADLDVAVKGTLAAKFRNSGQTCVCANRIIVQEGIYEKFANALRDAVQNMKVGDGFSEGVSQGPLINEAAVKKVESLIHDATSKGAKVILGGKRHSLGLTFYEPTVISDVNSDMHISREEAFGPVAPLLRFKTEEEAIRIANDTNAGLGSYVFTNSIQRSWRVAEALEYGLVGVNEGVISTEVAPFGGFKQSGLGREGSKYGMDEYLEIKYVCFGNMNKE

SEQ ID NO: 3996 - protein, 170 aa, Arabidopsis thaliana
  misc_feature (66)..(66): Xaa can be any naturally occurring amino acid
  misc_feature (140)..(144): Xaa can be any naturally occurring amino acid
  misc_feature (146)..(146): Xaa can be any naturally occurring amino acid
  misc_feature (148)..(148): Xaa can be any naturally occurring amino acid
TPPQTTMATTVTLKSFTGLRQSSTEQTNFVSHVPSSLSLPQRRTSLRVTAARATPKLSNRKLRVAXVIGGGPAGGAAAETLAQGGIETILIERKMDNCKPCGGAIPLCMVGEFNLPLDIIDRRVTKMKMISPSNIAVDIXXXXXEXGXLGWGDFGCFCGGGVFHFLLSSF

SEQ ID NO: 3997 - protein, 481 aa, Xanthomonas campestris pv. campestris str. ATCC 33913
MFPGEPMSSVSIDGAPDAGENTRFIILISCVATIGGFLFGFDSGVINGTVDGLKQTFQSSAAETGFEVASMLLGCAIGAFFAGRLADRWGRRAVLIISAALFLLSAIGAGASHSSGFFIFARVMGGFAVGAASVISPAYIAEVASARYRGRLATMQQIAIISGLFCAFLSNYLLANAAGASTEPLWGGQAAWRWMFWMQAIPSLLFLLLLLVIPESPRYLVVKGRREQALVVLKRLYGNAAAQTKLGEISASMSADQHKPKFSDLISKTTGKIRPIVWIGVGLAVFQQLVGINVVFYYGAVLWQAVGFSEQDALLINVLSGGLSIGACLVTVMLVDKIGRKPLLWIGSAGMAVSLALVTYAFATASLDPNGKLAMSDAMGMLALVAANVYVVFFNASWGPVMWVMLGEMFPNQIRGSGLAIAGAAQWTSNFAITVSFPILLGSIGLAGAYGIYTVAAFISVFFVLKYVYETKGKELEQMEG

SEQ ID NO: 3998 - protein, 449 aa, Zea mays
  misc_feature (398)..(398): Xaa can be any naturally occurring amino acid
ARDHYLEHPNRNFKVAAELGSDSLGAYVISMASNASDVLAVELLQKDARLAVSGDLGRPCPGGTLRVVPLFETVKDLQAAGSAIRKLLSIDWYREHIIKNHNGHQEVMVGYSDSGKDAGRFTAAWELYKAQEDVVAACNEFGIKVTLFHGRGGSIGRGGGPTYLAIQSQPPGSVMGTLRSTEQGEMVQAKFGLPQTAVRQLEIYTTAVLLATLRPPHPPRDANWRNVMEEISRVSCAHYRSTVYEDPEFITYFHEATPQAELGHLNIGSRPAKRKPAGGISSLRAIPWVFAWTQTRLVLPAWLGVGTGLQDALDRGHGEELRAMYAEWPFFQSTVDLIEMVTAKADAPMAAHYEEMLVARERRGVGAGLRRELARTERCVLAVSGHSKLTAHNRSLRXLIESRLAYLNPINMLQVEVLRRLRRDDDNRRLRDALLITINGIAAGMRNTG

SEQ ID NO: 3999 - protein, 880 aa, Neurospora crassa
MATTLSSGAAAELPIRSQSVRTRRPPTTSRPEPPLPRSESTNRAEASRPHRRSSQRSASGATTAATTTTTTSTATSSRHHPHPSQQQQQYHHQQQPDMSAAAAAAAAPHGHASAGDDHRNGADAGVSTHRSATGTTKQRYRTVIPAPSGNYAFIKTIGQGSMGKVKLAKKEGTNELASQPIKCDISLVACKIIERVSPDDGRQSREEREKADAAREDRNAREAAIVSLLNHQYICGLRDNLRTRWHWYMLFEYVNGGQMLDYIISHGKLKEKQARKFARQIASAVDYCHRNSIVHRDLKIENILISKTGDIKIIDFGLSNLFSPEEDRKLKTYCGSLYFAAPELLQARPYTGPEVDVWSFGVVLFVLVCGKVPFDDQYMPALHQKIKKGAVDYPNWLSSECKHLISRMLVTDPKQRATMQEVMNHPWMLKGYNGPPDNYLPRREPLTLPLDPEVISQMTGFKFGPPEYITAELTKRIKSPKYQAAVRRLEKERERPEPIAKDAEKKRGFGFDFYKRRNSVTSKDTLTAASSEGLSLGDDPLNAFDPLISIYYLVREKLERERNHVYIDLQQPSKAQQPPPSSSQTVMPVPPSPVIRPKEKHSLADIVPPQPVHNAEPRSRQRTRSHSEDQPREPIQGGLLSPDMVPAKKESTAAGILRRLSTRDRRKEPPATASSTDGKPPLRGSMSMRAKSLGHARRESIQMRRAKREAEAAAAQQAQSQTTEPQRSYQSHHHSVREETDAELVDSDIRGETSGGSNERLEPEDPDLVKPVFLKGIFSVSTTSTKPLSEIRADIKRVLRVLGVEFNEIKGGFSCRHTPSINHAERQPTVMTEGGNEIEFEILIVKVPIVSLHGVQFKRLAGNTWQYKALAEQIVRELRL

SEQ ID NO: 4000 - protein, 318 aa, Carica papaya
MENFPVIDLSKLNGEERASTMELIHDACENWGFFELVNHGISHDLMDTVERLTKEHYKKCMEQRFKEMVESNGLEAVQSEINDMDWESTFFLRHLPASNMHEIPDLEDDYRKAMKEFAVGLQKLAEQMLDLLCENLGLEKGYLKKVFYGSKGPNFGTKVRNYPPCPKPDLIKGLRAHTDAGGIILVFQDDKVSGLQLLKDDQWVDVPPMKHSIVINLGDQLEVITNGKYKSVMHRVIAQTDGNRMSLASFYNPGDDAVIYPAPSLVEKEAEKNQIYPKFVFDDYMKLYVGLKFQAKEPRFEAMKAMESTVTPGAIATV

SEQ ID NO: 4001 - protein, 483 aa, Pseudomonas aeruginosa
MNTKLFINNVWINSSDQQTFERKHPVSGEVMTECANSTVMDALKAAQAAQEAFQTWKTVGPSERRRLLLRVAEVMESKTPEFIEVMAKEVGASALWAGFNVQMSANVFREAASLATQIQGETIPTDKSDTLSMTLRQPVGPILSIVPWNGTAVLAARAIAYPLVCGNAVVFKGSEFSPATHALITQCVQEAGLPAGVLNYLNSSPDRSPEIADALISAKEIRRINFTGSTRVGSIIAQKAAQHLKRCLLELGGKSPLIVLDDADIDAAVKAAVFGSFLFQGQICMSTERLIVDEKIADEFVAKFVEKTKRLSAGDPCVTGDCIIGPMVSPNSGERINGLFKDAIDKGAKVVCGGLAQGALMPATILDHVKSDMRIYDEETFGPITVVIRCKGEAEAVRIANDSVYGLSSGVFGRDINRALRVGMSIEYGSVHINGSTVQNEAQAPYGGTKNTGYGRFDGRAVIDEFTEIKWLTIEPFEQQYPF

SEQ ID NO: 4002 - protein, 360 aa, Hypocrea virens
MSRSNPPNNASASRKISFNVSEQYDIQDVVGEGAYGVVCSAIHKPSGQKVAIKKITPFDHSMFCLRTLREMKLLRYFNHENIISILDIQKPRSYDSFNEVYLIQELMETDMHRVIRTQDLSDDHCQYFIYQTLRALKAMHSANVLHRDLKPSNLLLNANCDLKVCDFGLARSAASQEDNSGFMTEYVAARWYRAPEIMLTFKEYTKAIDVWSVGCILAEMLSGKPLFPGKDLTFPDHHQLTLILDVLGTPTMEDYYGIKSRRAREYIRSLPFKKKVPFRTLFPKTSDLALDLLEKLLAFNPVKRITVEDALKHPYLEPYHDPDDEPTAPPIPEEFFDFDKHKDTLSKEQLKQLIYQEIMR

SEQ ID NO: 4003 - protein, 298 aa, Fusobacterium nucleatum subsp. nucleatum ATCC 25586
MKKNIIIGSRGSILALAQANLVKDRLQGNYPNLSFEIKEIVTSGDKDLKSNWENSDISLKSFFTKEIEQELLDGEIDIAVHSMKDMPAVSAKSLICGAIPDREDPRDVLVSKNGLLVTLPQGAKVGTSSLRRAMNLKTVRPDFEIKHLRGNIHTRLKKLETEDYDAIVLAAAGLKRTGLADKITEYLNGEVFPPAPAQGVLYIQCRENDEEIKEILKSIHNEAIAKIVEIEREFSKIFDGGCHTPMGCYSQVNGDKIKFTAVYLDEGKQIRAVVEDDLAKGKEIAYMAAEEIKNKIVK

SEQ ID NO: 4004 - protein, 324 aa, Stellaria longipes
MENFPIINMENIERKNTRDMIKDACENWGFFECVNHGIPHSLLDKMEKMEKLTKDHVRECLEERFKEMVASKGLEGVESEVTDLDWESIFFLKHLPVSSISELPDLDEEYREVMIDFSKRKEKKAETKKDKKCENKGKEKSYLKNTFYGSKRPNFGTSVSNYPPLPKPDLIKGLSAHTDAGGIKLLSEDDKVSGLELLKDSDWIDVPPMRHSIVVNLGDELEVITNGKYWSVMHRVQIDTNITRMSTASFYVPGNDRVIAPAEALPKEFKDDEVYPKFVFKSYMKAYAKLIRQSGLKFEAKEPRFEAMKAHRIGSSCNSHLEHD

SEQ ID NO: 4005 - protein, 287 aa, Alkalilimnicola ehrlichei MLHE-1
MTNSPYIVDITMDNFQSEVLEGSMQQPVLVDFWAEWCEPCKTLMPLLEKLAEEFRGAFRLARVNCDEQQAIAAQVGVRSLPTVILVSQGQVLDQFTGALPEGELRRFLEQHVEPPQADPLEQAREHLAAGEPQAAVPLLEALHGQRPDDQDVALELAHALMQAGEPDRAEAIVAELPDEARHDPRCKGIKARRAFAEQLADLPGREALAARVEQDPRDSEARHGLALHQVLAGEHDAALENLLWIVRHDRAWDNDRGRQTLLAVFDLLGADDPLVRQYRSRLFQSLY

SEQ ID NO: 4006 - protein, 447 aa, Sulfolobus tokodaii str. 7
MKVIKIGGSIQKDEKDYELILDKLKKEIDYNDKNIIVTSAIKNITNQLLDIIKNTDKAMDIVTDIYDRHVRLLSKLTNGIEFERSFGEISKLADELFKIAWSVRVLDEVTPRVKDYILSFGERFAVILLSAFLRSNNIQSSYILDPPLITDENFGEANVLLQQSKENLTKKIDGINGNVIVIPGFIGKSTQNKFTTIGRGGSDYTATIVGKILGAKEVKLITEVPGIMTADPKKIPQAKTIPRLALEEAIELSQLGAKKLHPRTFDPIFNTNLKVVIEGLYEEGSTVIEGNCTKDDILKGIATRNNLELITIESTNIVGKIGSAATIMSEARNANVNLIAISQPVSETVIQLVIESQDKDRLIERLNNLNNLIEDIQSRKVSAISIVGCGLRNKEISAKVINKASSLDPIFISRGLKGVSLTFIVDEKDENSLAKELHEVILEWQTK

SEQ ID NO: 4007 - protein, 307 aa, Mycoplasma pulmonis
MSQNKIYDVAIIGAGPGALTAAIYTSRGNLDTVFIDNAAPGGKLIYASKIENWPGDTIVKGTDLAIRFFEHAQAFGAKYEYGKVVDLINIKDDLKELVLEDGKKIQAKSVIIASGMVSRKPREILNYDEFENRGVSYCVICDGPMYGHNPAIIIGGGNSAVEEGTFLSSIASKVYVIVRDSDFIAEKALVNDLKSRKNIEVLFNASVKELHGKDALEYAIVNHNGKEVKLEVASLFPYIGFLPSAEYAKNAGVLEPNGFIKTDEFMETKVPGIYAIGDIRIKDIRQILTATSDGTIAGKILTNRIKK

SEQ ID NO: 4008 - protein, 304 aa, Anaplasma phagocytophilum HZ
MGIVMVIRIGTRGSLLAMQQARIVKTAIETNYAELSTRIITIKTSGDMNTHVPLYDIGGKGLFIKEIEEALLDNIIDVAVHSAKDVPGIYSEDLDIPCILPRASALDAFLSSKYDSIASLPLNAKIGTSSVRRKVQLLTMRPDLEIIPMRGNVETRISKMQMGECDGIVLAEAGLYRVSKDNLISEVLQPEVMLGAVGQGAICVQCRRYDRRILEILKKLNCHKSYTTVSAERSFMRAVDGSCNTPLAAMAKYIDMDILTMKCMLADDARNMVFTERVFAEQNAESAGYEMGTLLKNELHLHRL

SEQ ID NO: 4009 - protein, 251 aa, unidentified bacterium
MNTGDLAWVLISAALVWLMTPGLALFYGGLGERRNLLHTMFVPILIIGIATMVWFTVGYSLAFGGAGDIIGNFKHLFLSGVSFTHSTKSLTIPDGAFALFQGMFPIITAAIITGSVIGRVRIKAMIVFITLWLIFIYTPLAHMVWGGGLLAKLGAIDFAGGTVVHISSGVTGLVLALMIGHRHNDKHVPVRPSYVLIGGALLWVGWFGFNSGSALAANGIAVLALVNTWLASAAGVLTWGLAEYKMHGPGI

SEQ ID NO: 4010 - protein, 371 aa, Ralstonia solanacearum
MPFLPEPLFQHGQPDRTAILLVNLGTPDGTSPREVGRYLRQFLSDPRVVEIPRAAWWFILNVLILPLRSRASAHKYETVWLREANMTGSPLLVYSERQAHALQQLLDAQGHDVVVACAMRYGNPSIPSVMQTLRKQGVERILVLPMYPQYSGTTTATAFDEVFRVMGQMRNQPELRLVKHFHDHPAYINALHQQVGAYWAQHGAPDFARGDKLLLSFHGVPRRTLELGDPYHCACLKTGRLLGEALGLQPGQYLVTFQSRFGRAEWLQPYTAPTLEELGRVGTGRVDVFCPGFPADCLETLEEIAMEGQSTFRVAGGKDFHYIPCLNDSEPWIAGLADIAQAHLQGWPLALPHPHVLEASRTRAQSKGAAA

SEQ ID NO: 4011 - protein, 209 aa, Anaplasma phagocytophilum HZ
MSFEPSAAVFSSIEEVVRDAAEGKVFVLLDDEERENEGDLVALADRVSPEAINMMIRYGSGIVCLAFSEYHAKKLGLGLMSRRNANDGCPAFAESIDARHGITTGVSASDRAATILKAVSDDSSADDIVTPGHVFPIVANPGGVLKRGGHTEAGVDIAKLAGAAHAAVICELMNPDGTMARLPEIMEFASANGIKVTTIKKLREYLSSS

SEQ ID NO: 4012 - protein, 1323 aa, Arabidopsis thaliana
MEVCNCIEPQWPADELLMKYQYISDFFIAIAYFSIPLELIYFVKKSAVFPYRWVLVQFGAFIVLCGATHLINLWTFTTHSRTVALVMTTAKVLTAVVSCATALMLVHIIPDLLSVKTRELFLKNKAAELDREMGLIRTQEETGRHVRMLTHEIRSTLDRHTILKTTLVELGRTLALEECALWMPTRTGLELQLSYTLRHQHPVEYTVPIQLPVINQVFGTSRAVKISPNSPVARLRPVSGKYMLGEVVAVRVPLLHLSNFQINDWPELSTKRYALMVLMLPSDSARQWHVHELELVEVVADQVAVALSHAAILEESMRARDLLMEQNVALDLARREAETAIRARNDFLAVMNHEMRTPMHAIIALSSLLQETELTPEQRLMVETILKSSNLLATLMNDVLDLSRLEDGSLQLELGTFNLHTLFREVLNLIKPIAVVKKLPITLNLAPDLPEFVVGDEKRLMQIILNIVGNAVKFSKQGSISVTALVTKSDTRAADFFVVPTGSHFYLRVKVKDSGAGINPQDIPKIFTKFAQTQSLATRSSGGSGLGLAISKRFVNLMEGNIWIESDGLGKGCTAIFDVKLGISERSNESKQSGIPKVPAIPRHSNFTGLKVLVMDENGVSRMVTKGLLVHLGCEVTTVSSNEECLRVVSHEHKVVFMDVCMPGVENYQIALRIHEKFTKQRHQRPLLVALSGNTDKSTKEKCMSFGLDGDGCPMPQRSNSAPAFFSRKTSEADVLWFNCVHIRDCRSVLDDILKQKGNNKIETLNRYVSVAISVIEEQDGGALRRLVEQQQWRYLVSQSTRSPKLIHGFFSFSSKTNPNPNKQQQILIDYISKSLQSNDTWETLSTKFSSIDLSDSLIETILLRFKNPETAKQALSFFHWSSHTRNLRHGIKSYALTIHILVKARLLIDARALIESSLLNSPPDSDLVDSLLDTYEISSSTPLVFDLLVQCYAKIRYLELGFDVFKRLCDCGFTLSVITLNTLIHYSSKSKIDDLVWRIYECAIDKRIYPNEITIRIMIQVLCKEGRLKEVVDLLDRICGKRCLPSVIVNTSLVFRVLEEMRIEESMSLLKRLLMKNMVVDTIGYSIVVYAKAKEGDLVSARKVFDEMLQRGFSANSFVYTVFVRVCCEKGDVKEAERLLSEMEESGVSPYDETFNCLIGGFARFGWEEKGLEYCEVMVTRGLMPSCSAFNEMVKSVSKIENVNRANEILTKSIDKGFVPDEHTYSHLIRGFIEGNDIDQALKLFYEMEYRKMSPGFEVFRSLIVGLCTCGKVEAGEKYLKIMKKRLIEPNADIYDALIKAFQKIGDKTNADRVYNEMISVR

SEQ ID NO: 4013 - protein, 384 aa, Buchnera aphidicola str. Sg (Schizaphis graminum)
MFEPVELSNNAVIKVVGVGGGGGNAVEHMVRERIEGVEFFAINTDAQALRKVEVGQTIQIGNNITKGLGAGANPEIGRTSAEEDKELLKSALDGSDMVFIAAGMGGGTGTGAAPVVAEIAKELGILTVAVVTKPFNFEGKKRMMVADQGVLELSKHVDSLITIPNDKLLKVLSRGISLLDAFGAANNVLKGAVQGIAELITRPGLMNVDFADVRTVMVEMGYAMMGTGISSGENRAEEAAEIAISSPLLEDIDLSGARGVLVNITAGFDLKLDEFETVGNTIRSFASDNATVVIGTSLDPDMNDTLRVTVVATGIGMEKYSDVNQTKNKSSKEILMDYRYQYLNISPTAIDKKNVKNEIKETDNKKRKEPEYLDIPAFLRKRSD

SEQ ID NO: 4014 - protein, 330 aa, Neocallimastix frontalis
MISNQVSSSAKVAASAVSKRLYSTAYEQTLKNLLINKNTKVITQGFTGKQGTFHAKNALAYGTKMVGGVSPKKAGTTHLGLPVYKSVQDACNALHPEASVIYVPPPGAASAILEAIEAEVPLVVCITEGIPQQDMVKVVDALNSQSKTRLVGPNCPGVIKAEECKIGIMPGHIHTKGRIGIVSRSGTLTYEAVNQTTKAGLGQTLVYGIGGDPFNGTNFIDALKIFLNDESTDGIILIGEIGGSAEEEASEFLKQYNLTRKVPKPVVSFIAGRTAPPGRRMGHAGAIVAGGKGGADDKVKALRSAGVVVSASPAQMGEKLKATFVARNLL

SEQ ID NO: 4015 - protein, 359 aa, Arabidopsis thaliana
MTMMSDISQDLLEEILSRVPITSLRAVKSTCKRWKDLLNDPSFSKKYGGKRDNEFLAIMTSGSRASLMSVNLHGPRDNKDLEDPFIKQIGELNQDQIFKVFHCDGLLLCITNEDNTRLVVWNPYLAQTRCIQPIDKFYIYDWYCLGYDKDKNHKILVVYSPMFGRIEYEIYSFLSKSWIVLSFPTDWQISRDECLSLKGNTYFIAYKKMEVEEVGFQEFLLCFDFTNERFGPLLPLPFQCYNQTSLVLSTVQEEQLAVLCKRCDAYETKIWITTKIEPNAVSWSYFLKFDFKVDISGGSFFVDVEEKVAVLFCINREKEKGINNKTYMIGEDGYYKEVDLGESNWCPSMCSYVPSCVQV

SEQ ID NO: 4016 - protein, 407 aa, Yersinia pseudotuberculosis IP 32953
MKRAVITGLGIVSSIGNNQQEVLASLQEGRSGITFAQEFKDAGMRSHVWGDVKLQSEPKDLIDRKVLRFMSDASIYAYLAMQEAIADSGLSDSQVSNFRSGLVVGSGGGSPRNQVAGSDAMRTPRGLKGVGPYMVTKAMASGVSACLATPFKIKGVNYSISSACATSAHCIGHALELIQLGKQDVVFAGGGEELCWEMACEFDAMGALSTKYNDTPAKASRTYDQDRDGFVIAGGGGMVVVEELEHALARGAHIYAEIVGYGATSDGADMVAPSGEGAVRCMQMAMAGVDTPIDYMNVHGTSTPVGDVKELGAIREVFGNNTPAISSTKAMTGHSLGAAGVHEAIFSLLMVEHGFIAPSINIDNLDEQAQGMNIITETTQRELTTVMSNSFGFGGTNATLVMRKYQK

SEQ ID NO: 4017 - protein, 394 aa, Spinacia oleracea
MASASLLKTSPVLDNPEFLKGQTLRIPSVAGVRFTPSGSSSLTVRASSYADELVKTAKTVASPGRGILAMDESNATCGKRLASIGLENTEANRQAYRTLLISAPGLGQYVSGAILFEETLYQSTTDGKKMVDVLIEQGIVPGIKVDKGWLPLPGSNDESWCQGLDGLACRSAAYYQQGARFAKWRTVVSIPNGPSALAVKEAAWGLARYAAITQDNGLDPILEPEIMLDGEHGIDRTFRVAQQVWAEVFFNLAENNVLLEGSSLKPSMVGPGALSARKGPPEQVADYPLKLLHRRRGPVVPGIMVLSGGQSEVEATLNLNAMNQSPNPWHVSFSYARALQNTCLKTWVEGQENVKAQDFACAKSNSLAQLGKYTGEGESEERKKDMFVKATLTY

SEQ ID NO: 4018 - protein, 479 aa, Thermoanaerobacter tengcongensis MB4
MVESSGAKGVLRKKLPEHAMELAQEEKYRLKRELGWFELMLFVLGATIGAGIFVLPGVAAAKFAGPAIMISYALGGIVTIAVALAYTEFASMVPVAGSAYTYSYVALGEIFAWIVGWDLIFEFTMIASTVAVGWGGYFNSFLETVFGITLPQAISHDITHGGIVNLPAILGLLIVAWIALTGIRASGIANALFTTAKVFAILFVLTVGVFHIKLENWTTPFAPYGLAGIMTGAALTFFAYTGFDGITSLLEEVKRPERDIPIALIGGISLCALFYVAMSAVITGMVHWTKLDVPNPAAFVLMQVGIPWGGALISISVLFGLIATMLGNSLSASRILFAMGRDGLLPEWFAFVHPTRRVPRNAAYVIYTAAIIFAGFLSISELAELANIGGLTAFTLVTISVMVMRYTDPERKRIFKVPAIWVIGPIGIIGSLALIASLPVVTFIRFTVWLIIGLIIYFSYGYKHSKEGTGYYIGKENQK

SEQ ID NO: 4019 - protein, 127 aa, Blastopirellula marina DSM 3645
MGRVISDLVNRVPNIDQAVISVHCHNDLGLAVANSLAAVEAGAGQIECTINGIGERAGNCALEEIVMAMRTRNDYYNVDSRINTERLVPTSRLVSSVTGMQVQRNKAIVGRNAFAHEAGIHQDGMLK

SEQ ID NO: 4020 - protein, 133 aa, Arabidopsis thaliana
MAVPLLTKKVVKKRSTKFIRPQSDRRITVKESWRRPKGIDSRMRRKFKGVTLMPNVGYGSDKKTRHYLPNGFKKFVVHNTSELELLMMHNRTYCAEIAHNVSTKKRKAIVERASQLDVVVTNRLARLRSQEDE

SEQ ID NO: 4021 - protein, 532 aa, Photorhabdus luminescens subsp. laumondii TTO1
MAIKIKVPDIGADEVEVTEIMVKVGDTVEAEQSLITVEGDKASMEVPSPQAGVVKEIIIAVGDKVETDKLIMIFDSAEGAVEAAPAEAPAAVTLSSRMAEPEPVASAAMKVHVPDIGGDEVEVTEVMVKVGDAVEAEQSLITVEGDKASMEVPAPFAGIVKEIQIKAGDKVETGSMIMVFEVAGAAPVAPVASAPAPTAEPEKAAVPVIASRSFAEEDKNDFAENSAYVHATPVIRRLAREFGVNLAKVKGTGRKGRVLREDVQAYVKDAVKRAESAPASAGGGLPGMLPWPKVDFSKFGEIEEVELGRIQKISGANLSRNWVVIPHVTQFDETDITEVENFRKQQNQEAEKKQLGVKITPLVFIIKAVAKALEEMPRFNSSISEDGQKLTLKKYINIGVAVDTPNGLVVPVFRDVNKKGIIELSRELTEMSKKARAGKLTASDMQGGCFTISSLGGIGGTAFTPIVNAPEVAILGVSRSSMKPVWNGKEFVPRLMLPLSLSFDHRVIDGADGARFITFINHAMSDIRRLVM

SEQ ID NO: 4022 - protein, 511 aa, Cylindrotheca fusiformis
MAEFDNTFILDFCSGGNESSSDVQALCQVAGLANGTSASAAGLVEGINTFFLLFAGALVFLMQAGFAMLCAGSVRQKNVKNIMLKNMLDACGGAIGFWTIGYAFAYADNSSGDKTFIGGKNFFVNQLDESGGAWIGFFFQFAFAATAATIVAGTVAERCKMSAYLCYSVFLTGFVYPVVVHSIWSADGWLTAFRDDPWKGVGVIDFAGSGVVHMTGGATALVAAIVLGPRKGRFYDEDGNALETPASFPAHSVALQVLGTFLLWFGWYGFNPGSALVIDNAASASTSALCAVTTTLAAASGCVCAMFTDTIIEMMATGEASYDLTMAMNGALGGLVAITAGCSVVTPWASIIIGIIAGWVYIAFSKLLVKLKIDDAVDAVPVHFANGMWGVLAVGFFAEPDAMVTAGYNDVPGVFYKGDGKLLLCQFVAIIWICAWIFFLMTPFFVVLNILGMFRVDPLEEEVGLDISHHRGAAYDMTSAKKEDVEELMEHRSSKHGKVEVPKEVQKEDTA

SEQ ID NO: 4023 - protein, 141 aa, Triticum aestivum
RRTRGGGTSRSPRRPPPRAPPSSCPSPASPGSLDLFDYYIRTDERHVFSQELRLDTKVFYFHIGEDKTGRYLQVSEASLNRHRSTIIVPAGSSGEEGWEAFRNVLLEINDEASRLYVLPNHPSQQHLEPPERLPGLSDDVG

SEQ ID NO: 4024 - protein, 504 aa, Xanthomonas campestris pv. campestris str. ATCC 33913
MTHTNGFDALHAHAQRLRGAAIPALLAAEPQRPTQYARQVGPLYFNFARQKYDRAALDALFAIARERDLAGAFQRLFRGEQVNVTEQRAALHTALRGDLTDAPVASDAYATAAEVRQRVGALIQQLEGTDVTDIVSVGIGGSDLGPRLVADALRAPSGARFRVHFVSNVDGAAMQRTLATLDPARTAGILISKTFGTQETLLNGSILHAWLGGSERLYAVSANPERAAKAFDIAPGRVLPMWDWVGGRYSLWSAVGFPIALAIGFERFEQLLDGAAQFDAHVLNTPLEENVAVLHGLTAVWNRNLLGSATHAVMTYDQRLALLPAYLQQLVMESLGKRVKLDGAAVDSDTVAVWWGGAGTDVQHSFFQALHQGTSVVPADFIGTVHNDDPYAENHVALMANVLAQTEALANGQDSSDPHRSYPGGRPSTVILLDALTPQALGALISMYEHSVYVQSVMWGINAFDQFGVELGKQLASQLLPALKGEAADVADPVTRELLAKLRG

SEQ ID NO: 4025 - protein, 1003 aa, Rubrivivax gelatinosus PM1
MLRPLALPLAALEHTTDFAGRHIGIDPADEQHMLSVIGAASRQAMIEAIVPRSIARARPMVLPEPVGEVQALAELKAIAAKNRVYRSYIGQGYHGTHTPGVILRNILENPAWYTAYTPYQAEISQGRLEALVNFQTMVCDLTGMAIANASMLDEATAAAEAMTLARRSVKSKSATVIVASDCHPQTIEVIRTRARPLGIEVLVGLVPELMAQHEYFAVIAQYPATGGIVHDMKPYVDAAHASGAAFVVAADLLALTLLTPPGEWGADIAIGSTQRFGMPMGAGGPHAAFLACRDEFKRSMPGRLAGVSVDAHGRPAYRLALQTREQHIRREKATSNICTAQVLPAVVASMYAVYHGPQGLKRIAQRVASYTAILAHGLRAMGFELAGDSAFDTLCVETGIETNAIARRARDAGANLRRLSATQLGITLDETTTREDLTALWSWFARSEGMVPNVAAFAHGADPLIPSELRRTSAYLTHPVFNSHHSETEMLRYLRSLADKDLALDRTMIPLGSCTMKLNATSEMIPITWPEFAHIHPFAPAEQLAGYAELDAQLRQWLCEATGYAGISLQPNAGSQGEYAGLLAIQAWHASRGDAQRDVCLIPESAHGTNPASAQMAGMRVVVTKCDAEGNVDLDDLRAKCEQHSSQLAAVMVTYPSTYGVFDPHIKALCALVHQHGGRVYVDGANMNALVGVAAPGEFGGDVSHLNLHKTFCIPHGGGGPGVGPVCVVEDLVPFLPTHRTGASASSVDAYVGSAVEPTPGRPKVASALSGGSEVPAGPSVGAVSASPLGNAAVLPISWMYVRMMGAAGLTAATETAILSANYIAARLADHYDIHFSGEVDGLKGGGVAHECILDLRPLKDSSGVSAEDVAKRLIDYGFHAPTLSFPVAGTLMVEPTESESLHELDRFCDALIAIRAEIARVEQGHWPQDDNPLKHAPHTAEALLKADWPHPYSREEAAYPVSSLRRQKYWAPVGRVDNVHGDRNLFCSCVPLSAYAEADKQA

SEQ ID NO: 4026 - protein, 543 aa, Candida tropicalis
MSSSPSIAQEFLATITPYVEYCQENYTKWYYFIPLVILSLNLISMLHTKYLERKFKAKPLAVYVQDYTFCLITPLVLIYYKSKGTVMQFACDLWDKNLIVSDPKAKTIGLKILGIPLIETKDPENVKAILATQFNDFSLGTRHDFLYSLLGDGIFTLDGAGWKHSRTMLRPQFAREQVSHVKLLEPHMQVLFKHIRKHHGQTFDIQELFFRLTVDSATEFLLGESAESLRDESVGLTPTTKDFDGRNEFADAFNYSQTNQAYRFLLQQMYWILNGSEFRKSIAIVHKFADHYVQKALELTDEDLEKKEGYVFLFELAKQTRDPKVLRDQLLNILVAGRDTTAGLLSFLFFELSRNPEIFAKLREEIENKFGLGQDARVEEISFETLKSCEYLKAVINETLRIYPSVPHNFRVATRNTTLPRGGGEGGLSPIAIKKGQVVMYTILATHRDKDIYGEDAYVFRPERWFEPETRKLGWAYVPFNGGPRICLGQQFALTEASYVTVRLLQEFGNLKQDPNTEYPPKLQNTLTLSLFEGAEVQMYLIL

SEQ ID NO: 4027 - protein, 291 aa, Photorhabdus luminescens subsp. laumondii TTO1
MPAKIIDGKTIAQTIRSEVAVRVQQRVAAGRRAPGLAVVLVGENPASQIYVASKRRACEEVGFVSRSYDLPDTTSEAELLNLIDQLNNDSDIDGILVQLPLPAGIDNVKVLERIQPDKDVDGFHPYNIGRLCQRAPKLRPCTPRGIATLLERCGINTYGLNAVIIGASNIVGRPMSLELLLAGCTTTVTHRFTKDLRHHVEQADLLIVAVGKPNFIPGEWIKPGAIVIDVGINRLEDGKVIGDVDFETASERASWISPVPGGVGPMTVATLIQNTLQACEEYHDVERIEGC

SEQ ID NO: 4028 - protein, 413 aa, delta proteobacterium MLMS-1
MKRRVVVTGVGLITPLGTGVAKSWQGLCAGRCGVAPIQRYDASNQAVRIAAEVKDFNPADFFAPKESRNLELFVQYAVAAAREALEDSGLVITADNAHRVGSIVGCGMGGLPTIEKYIQILHEKGERRITPFFIPMVIPNMGAGQISIFLGTRGPNLSLSTACAAGTHAVGEAFRSIAYGECDAALTGGSEAVICPMGFSGFHAMKALSTRNDQPAAASRPFDRERDGFIIGEGGGILLLEELESARQRGAPIYAEMAGYGLSGDAYHIAAPPEDGAGAALCMRNALADAGLAPAEIDYINAHGTSTPLNDVVETRALKEVFGEHAGRLAISSTKSMTGHLLGGAGGIEAVITALAIRDQIAPPTINYDNPDPECDLDYVPNQSRQMEIRAALSNSFGFGGTNAVIIMKRYEA

SEQ ID NO: 4029 - protein, 253 aa, Borrelia burgdorferi B31
MLGDFMYKLVLVRHGESEWNKENLFTGWTDVKLSDKGIDEAVEAGLLLKQEGYSFDIAFSSLLSRANDTLNIILRELGQSYISVKKTWRLNERHYGALQGLNKSETAAKYGEDKVLIWRRSYDVPPMSLDESDDRHPIKDPRYKHIPKRELPSTECLKDTVARVIPYWTDEIAKEVLEGKKVIVAAHGNSLRALVKYFDNLSEEDVLKLNIPTGIPLVYELDKDLNPIKHYYLGDESKIKKAMESVASQGKLK

SEQ ID NO: 4030 - protein, 327 aa, Zea mays
MDEINLLRQAQRQHQHHLMVRGIGEEIDLEIGPVDDPSFSGASLVAVTSTHDTVVHADDHKSLLIPCSQPGAADGLAPQQHLSQGEEHDGMLRSPSGHTKKKKKVVKKWREEWADTYKWAYVAVHDTTTRIFCSVCKEYGRKHRRNPYGNEGSRNMQMSALEEHNNSLLHKEALRLQMASKEKLQPPEIEGPVYVKALSKTAASILECVLRRDPHEAEYIQSIQETLKNALSLYKLGGAAGGSDFDPKGKSDNEIMRFCQSFMDELYRYLGPDQDFSAEDIGVGPREMGYLFGQYRRLSGHFQGNFTGPKIFWSGSSFRTEATGYGL

SEQ ID NO: 4031 - protein, 497 aa, Pseudomonas syringae pv. phaseolicola 1448A
MSSIQHLIHGEFISEDGRTADVFNPSTGQVVHTVALATRDTVQKAIDSAKAAFPAWRNTPPAKRAQVMFRFKQLLEQNEARIAQLISEEHGKTLEDAAGELKRGIENVEYACAAPEILKGEYSRNVGPNIDAWSDFQPLGIVAGITPFNFPAMVPLWMYPLAIACGNCFILKPSERDPSSTLLIAELLHEAGLPKGVLNVVHGDKVAVDALIEAPEVKALSFVGSTPIAEYIYKEGAARGKRVQALGGAKNHAVLMPDADLDNAVSALMGAAYGSCGERCMAISVAVCVGDQIADALVAKLVPQIQSLKIGAGTTCGLDMGPLVTGQHRDKVGGYIEDGVQSGATLVVDGRDLQVAGHEQGFFMGGCLFDRVTPQMRIYKEEIFGPVLCIVRVDSLEQAMQLINDHEYGNGTCIFTRDGEAARLFCDEIEVGMVGVNVPLPVPVAYHSFGGWKRSLFGDLHAYGPDGVRFYTRRKAITQRWPQRASHEASQFAFPSL

SEQ ID NO: 4032 - protein, 513 aa, Methanococcus maripaludis S2
MCSISGIIAKDEEGSGSRSLLKNIQKHVINMMKILKHRGPDYSGMMFDDEVLYFENFDDITENTETISRMAMGHNRLAIVGTAVQPIPNTDESIWIICNGEIYNHVELRDELSVDHEFKTDTDSEAIIHTYEDELVDVLDGDYAYAIYDKEKNIIELRRDLMGVKPLYYIDTDEYFAFASEKKALYGLLMEINEMDYKSAFNYDISRLNPNSRLIYELDENSWYIEEDLEKVNPDYFEENDYELCKNELETTILDSVLKRVKGLERVGIIYSGGVDSTLVSKLASENCDVTLYSVGSANSEDLIYAERAAKDMGLKFRKKIILEDEFEEYVIKVAKAIDELDVMKLSVGIPIFAASEMAKEDGIKVVLSGQGADELFAGYNRYQRILNEKGEEGLKKSIISDVFDIHKVNLERDDHCTMANGVELRVPFLDKFVIDVGLSIPVEYKIEEPRKKILRDIASKYVPDYIAQRPKKAAQYGSGSEKMVYAVAKKHGYSKKEINKFFEEYLIEKIKF

SEQ ID NO: 4033 - protein, 501 aa, Mycoplasma pulmonis
MSNFTIFFVRFFYIYFIVYNVLFWDMKKLEKITPLEENFAKWYTDVVKNGELIDYGPVKGTLIFKPNSYGIWENIQLQFNKILKAKGIKNVYLPLLIPESLMKAEFEHIEGFAPELATLTKVGSKNLSENIYLRPTSEVLFQKFFKAEIESYKDLPKIYNQWANVIRWEKTTNPFLRSTEFLWQEGHSSHESAIEARKFTREMLKTYCKFLRKFLAIPTIMGKKTPREKFSGAYSTYTLEAMMKDGKALQSGTTHYLAQNFSEAYDVNFKDSENKKQFVYQTSWGLSTRLIGAIIMTHGDNRGIIIPPFVAPCQIDILAFNPRRSAEIEKFVNQVEKILKKPFRVNVDRSDKTLGFKASQSEIQGVPLRIEIGPRDFENNQVTLVRRDTLEKQSVSINDIVKVSRETLQAIHNNLYEQAKIRLKNNIVEINDYEEFKQEIANHKFVISPLCCTTAEAEEEIQKETGATARCIPFDYQKPGENKCLICKCMTKRFVLFARAY

SEQ ID NO: 4034 - protein, 335 aa, Fusobacterium nucleatum subsp. nucleatum ATCC 25586
MAVKVAINGFGRIGRLALRVMSKNKDFDVVAINDLTDAKTLAHLFKYDSAQGRFDGTIEVTDDGFVVNGDSIKVFAKANPEELPWKDLGVDVVLECTGFFTSKEKAEAHIKAGAKKVVISAPATGDLKTVVYNVNDNILDGSETVISGASCTTNCLAPMAKVLNDKFGIVEGLMTTIHAYTNDQNTLDAPHKKGDLRRARAAAENIVPNTTGAAKAIGLVIPELKGKLDGAAQRVPVITGSITELVTVLGKEVTVEEINAAMKAASNESFGYTEEPLVSSDIIGISFGSLFDATQTKVLTVDGKQLVKTVAWYDNEMSYTSQLIRTLKKFVEISK

SEQ ID NO: 4035 - protein, 294 aa, Candida glabrata CBS 138
MSSIFKALSGKSKKEASKTDGGNGKLYMNKQRTLLISSRGVNYRHRHLIQDLHSLLPHTRKEPKLDTKKDLQQLNEIAELYNCNNIMFFEARKHQDLYLWMSKPPNGPTIKFYVQNLHTMDELNFTGNCLKGSRPILSFDNRFDTTPHYQLIKEMMIHNFGVPPTSRKRKPFIDHVMSFSIVDDKIWVRTYEISHSARNKSEYEEGEEDNDISLVEIGPRFVMTVILVLEGAFGGPKIYENKQYVSPNAVRAQMKQQAANEAKSRADAAVERKIKKREAVLAADPLSNEVLFKD

SEQ ID NO: 4036 - protein, 119 aa, Arabidopsis thaliana
MRNITTTTRKMLLLVITILLGIAYHGEAIACPQVNMYLAQCLPYLKAGGNPSPMCCNGLNSLKAAAPAKADRQVACNCLKSVANTIPGINDDFAKQLPAKCGVNIGVPFSKTVDCNSIN

SEQ ID NO: 4037 - protein, 498 aa, Oryza sativa (japonica cultivar-group)
MATCLDSLGPLLGGAANSTDAANYICNRFTDTSSAVDATYLLFSAYLVFAMQLGFAMLCAGSVRAKNSMNIMLTNVLDAAAGALFYYLFGFAFAFGTPSKGFIGKQFFGLKHMPQTGYDYDFFLFQWAFAIAAAGITSGSIAERTRFSAYLIYSAFLTGFVYPVVSHWFWSTDGWASAGRLTGPLLFKSGVIDFAGSGVVHLVGGIAGLWGAFIEGPRIGRFDAAGRTVAMKGHSASLVVLGTFLLWFGWFGFNPGSFTTISKIYGESGTIDGQWSAVGRTAVTTSLAGSVAALTTLYGKRWLTGHWNVTDVCNGLLGGFAAITAGCSVVDPWASVICGFVSAWVLIGCNKLSLILKFDDPLEATQLHAGCGAWGIIFTALFARREYVELIYGVPGRPYGLFMGGGGRLLAAHIVQILVIVGWVSATMGTLFYVLHRFGLLRVSPATEMEGMDPTCHGGFGYVDEDEGERRVRAKSAAETARVEPRKSPEQAAAGQFV

SEQ ID NO: 4038 - protein, 322 aa, Yersinia enterocolitica
MKQSKLGVLMVNLGTPDAPTPQAVKRYLAEFLSDRRVVDTSPWLWWPLLRGVILPIRSPRVAKLYQSVWMDEGSPLLVYSRRQQKALAERMPEIPVELGMSYGSPNLPDAIDKLLAQGVTKLVVLPLYPQYSCSTSAAVWDAVARILKGYRRLPSISFIRDYAEHPAYISALKQSVENSFVQHGKPDRLVLSFHGIPKRYAQLGDDYPQRCEDTSRALRAEIALPAEQIMMTYQSRFGREPWLTPYTDETLKSLPSQGVKHIQLICPGFSADCLETLEEIKEQNREVFIHAGGEKFEYIPALNDDKGHIDLLEQLVRDHLSC

SEQ ID NO: 4039 - protein, 331 aa, Yersinia pseudotuberculosis IP 32953
MTIKVGINGFGRIGRIVFRAAQERSDIEIVAINDLLDADYMAYMLKYDSTHGRFDGTVEVKDGHLVVNGKTIRVTAERDPANLKWNEVNVDVVAEATGLFLTDETARKHIAAGAKKVVLTGPSKDDTPMFVMGVNHKAYAGQEIVSNASCTTNCLAPLAKVINDKFGIVEALMTTVHATTATQKTVDGPSHKDWRGGRGASQNIIPSSTGAAKAVGKVIPELNGKLTGMAFRVPTPNVSVVDLTARLEKPASYKEICAAIKAASEGELKGVLGYTEDDVVSTDFNGEKLTSVFDAKAGIALNDNFVKLVSWYDNETGYSNKVLDLISHISK

SEQ ID NO: 4040 - protein, 558 aa, Geobacter sulfurreducens PCA
MSIVVIGANAAGAKAASKAKRINPTAEITLIDRGTFISYGACGIPYFVSDTVEDVKELMSTPVGVVRDHQFFRKVKGVTVKTATEVIAIDRAAKTVCMRDCQTSRETKLPYDRLVLATGSTPFIPQISNVNLANVLTVKSIEDAELLKSLAVPGTRACIVGGGLIGLETAEALRHKGLQVAVVEMRDQMLPGVLDWEMAALVEKQLRQQGVTVMTGSAVTGLVGDAAVEAVQIGDVRIPADLVVLAPGVAPNVELARGAGLEIGPTGAIAVDTRQCTTDPDIYACGDCCETTHLITGKKVFIPLGSTANKQGRVAGINAAGGEATFAGVIGTSILRVFAVNAGKTGLTEAEAKAHGFEVETVLSPSHDKAHFFPGAKPIILKLVAERGTGRILGLQAVGEGAVDKRLDAAATAITFGATAEQVAQLDLAYAPPYSAAMDNLIVAADILKNKLAGHARGITPREVKRKFDEGDDFILLDVRSPAEHNAVGIEGAKLIPLGMLREKLEELPRDKEIIAFCKISLRGYEAQKILDAAGFRNAKFMDGGILAWPFALRTSDK

SEQ ID NO: 4041 - protein, 573 aa, Yersinia pestis biovar Medievalis str. 91001
MKQTVATLIAKTLEQAGVKRIWGVTGDSLNGLSDSLHRMGTIEWLGTRHEEVAAFAAGAEAQLTGQLAVCAGSCGPGNLHLINGLFDCHRNHVPVLAIAAHIPSSEIGSGYFQETHPQELFRECSHYCELVSNPEQLPRVLEIAMRQAILNRGVSVIVLPGDVALQPAPEDAAVIWQTPKLPLVQPPMSELTLLADTLNKAKNITLMCGSGCADAHDEVVKLAERLQAPVVHALRGKEHIEWDNPYSVGMTGLIGFSSGYQAMLNADTLILLGTQFPYRAFYPTHANIIQIDINPGSLGAHCPVNMALVGDIKTTLTALLPQLDAKSDRAFLDKALEHYRTTRQDLDALATANDNQPIHPQYLAQQISHYATEDAIFTCDVGTPTVWAARYLQMNGKRRLLGSFNHGSMANAMPQAIGAQATAPDRQVVALCGDGGFTMLMGDFLSLTQLKLPVKIVVFNNSVLGFVAMEMKAGGYLTDGTDLHNPDFAAIANAAGIKGIRVEKASELNAALESAFAHPGPVLVDVVTAKQELSMPPQIKFEQAKGFSLYMLRAIINGRGDEVIELAKTNWLR

SEQ ID NO: 4042 - protein, 540 aa, Francisella tularensis subsp. holarctica
MLFCDDSKKYLKEQNINLKNEFDKDDKRVEKFSLKHQNIYFDYSKNLINNYILKSLLESAEKSSLKDKIKQMFNGAKINSTEHRAVLHTALRDLSSTPLIVDGQDIRQEVTKEKQRVKELVEKVVSGRWRGFSGKKITDIVNIGIGGSDLGPKMVVRALQPYHCTDLKVHFVSNVDADSLLQALHVVDPETTLFIIASKSFSTEETLLNSISAREWLLDHYEDEKAVANHFVAISSKLDKVKEFGIDLEHCYKMWDWVGGRYSLWSSIGMSIAFAIGYDNFEKLLAGAYSVDKYFKETEFSKNIPVIMALLASYYSCTYNSQSQALLPYDERLCYFVDYLQQADMESNGKSVNIAGGTVNYQTGVVLWGGVGTNGQHAFHQLLHQGNIFIPVDFIAIATSHHNYDNHQQALLANCFAQSQALMFGQSYDMVYNELLKSGLNETQAKKLAAHKVIPGNRPSTTILLDELSPYSLGALIALYEHKIFVQGVLWDINSYDQWGVELGKKLGKNILKAMNDDSSDEYQNLDDSTRQLIAKVKNK

SEQ ID NO: 4043 - protein, 349 aa, Bacillus cereus E33L
MNREELFDVTVIGGGPAGLYSAFYSGLREMKTKIIEFQPQLGGKIHVYPEKMIWDVGGLLPVTGDKLIEQLVQQGLTFKPEVVLDTKVESIIRNEDGTFTLKTSNGAEHFSKTVIVATGSGILKPQKLSIEGAERFEVSNLNYTVKSLKRFKDKTVIISGGGNSAVDWANELEPIAKKVYVTYRKEELSGHEAQVKQLLNSSADCFFNTSITKLIAGDNHEAIEYVELTNHETGEVSHLSIDEVIINHGYERDITLLENSELDVAIIDNYYIAGNANSESSVDGLYAAGDILKHEGKLHLIAGAFQDAGNAVNKAKQFIQPDASEYGMVSSHNEVFKKRNRELIKQMMK

SEQ ID NO: 4044 - protein, 311 aa, Bacillus cereus E33L
MKKKIGLLVMAYGTPYKEEDIERYYTHIRRGRKPSPEMLEDLTERYRAIGGISPLATITLEQAKKLEKRLNEVQDEVEYHMYLGLKHIEPFIEDAVKEMHNDGIQDAIALVLAPHYSTFSVKSYVGRAQEEAEKLGNLTIHGIDSWYKEPKFIQYWVDAVKGIYNGMSDAEREKAVLIVSAHSLPEKIIAMGDPYPDQLNETADYIARGAEVANYAVGWQSAGNTPDPWIGPDVQDLTRELNEKYGYTSFVYAPVGFVAEHLEVLYDNDFECKVVTDEIGAKYYRPEMPNASDAFIDSLTDVVVKKKESVM

SEQ ID NO: 4045 - protein, 496 aa, Zinnia elegans
MCSTTLNMCDLEFFILASCLVLALFLILKLVKRRTNNGSTRNLPPGNMGWPFIGETIGYLQPYSATTIGKFMEQHISKYGKIYKSSLFGEPTIVSADPGLNKYILQNEGRLFECSYPRSIGGILGKWSMLVLVGDMHRDMRQISLNFLSNARLKTQLVNEVEKNTLWVLDSWKENSPFCAQEEAKKFTFNLMATHIMSLDPGEPETERLKKEYVTFMKGVVSPPLNFPGTAYWKALKSRATILKFIETKMEERIRMDEGNGLGKLDNDLLGWSMKNSNLTKEQILDLVLSLLFAGHETSSVSISLAVYFLEACPTAVRQLREEHEEIVMKKKLLGEKYLTWDDYKKMEFTQCVINETLRFGNVVRFLHRKAIKDVRYKGYDIPCGWKVLPVIAAVHLDPTHFDQPYLFDPWRWQNASVTSSTCSTPPSASNFMPFGGGPRLCTGSELAKLEMAIFIHHLVLKYEWELVDSDEAFAYPYLDFPKGLPIKIRHRKQSC

SEQ ID NO: 4046 - protein, 199 aa, Brassica napus
LTAASLADLPAGSVVGTASLRRKSQILHKYPSLSVEENFRGNVQTRLSKLQGGKVHATLLALAGLKRLSMTENVASILSLDEMLPAVAQGAIGIACRTDDDKMASYLASLNHEETRLAVACERAFLETLDGSCRTPIAGYAAKDEEGNCYFRGLVASPDGTKVLETSRKGPYVFEDMAKMGKDAGQELLSRAGPGFFGN

SEQ ID NO: 4047 - protein, 424 aa, Thermus thermophilus
MKSEPLSYLGKDGGPWEIFTEQVDRVVPYLGRLAPLAESLKRPKRVLIVDVPVRLDDGSVAYFEGYRVHHNTARGPAKGGVRYHPEVTLSEVMALAGWMTIKNAAVGLPYGGGKGGIRVDPRKLSPGELERLTRRYTSEIGILLGPDRDIPAPDVNTGEREMAWMMDTYSMNVGRTVPGVVTGKPIALGGSLGRRDATGRGVFITAAAAAEKIGLQVEGARVAIQGFGNVGNAAARAFHDHGARVVAVQDHTGTVYNEAGIDPYDLLRHVQEFGGVRGYPKAEPLPAADFWGLPVEFLVPAALEKQITEQNAWRIRARIVAEGANGPTTPAADDILLEKGVLVVPDVIANAGGVTVSYFEWVQDFNSYFWTEEEINARLERVVRNAFEAVWQVAQEKKIPLRTAAYVVAATRVLEARAPPGLYP

SEQ ID NO: 4048 - protein, 240 aa, Triticum aestivum
  misc_feature (142)..(142): Xaa can be any naturally occurring amino acid
  misc_feature (156)..(156): Xaa can be any naturally occurring amino acid
  misc_feature (213)..(213): Xaa can be any naturally occurring amino acid
MNALAATSRNFKQAAKLLGLDSKLEKSLLIPFREIKVECTIPKDDGTLASYVGFRVQHDNARGPMKGGIRYHHEVDPDEVNALAQLMTWKTAVANIPYGGAKGGIGCSPGDLSISELERLTRVFTQKIHDLIGIHTDVPAPXLGTNAQTMAWILDXEYSKFHGYSPAVVTGKPVDLGGSLGRDAATGRGVLFATEALLAEHGQGIAGQRFVIXGFGNVGSWAAQLITEAGGKVIAISDVT

SEQ ID NO: 4049 - protein, 323 aa, Yarrowia lipolytica CLIB122
MIRAKFTEYKQALRNNWVGQPQYTEKDYPDIDGKNFVVTGATGGVGLEVTKLLLDKKSHVIMVGRSRSDWQPVLDQLQKDHSHGTLDFVEADLADLTTVQRAGEYIRTKYPTLDGAIFNAGVMAPPYSLTPQGQESQWGVNVVSHFLLAKYISPAVIAAAKTAPKDSVRLVWLSSSVTFVSPYEGGIKFDDINHQDDKNPSPWTLYSQSKIGDAYLAYLWSKHHPDSGVVSVSVDPGNLSSNLSRHYPILSTLKSYIQYPPKYGAYTELSALLNPAVKNNEHLIPWGVRGHLRLDVDDGRRGSVGEELWQRLNKDVAPYFKEE

SEQ ID NO: 4050 - protein, 331 aa, Thermotoga maritima
  misc_feature (1)..(1): Xaa can be any naturally occurring amino acid
  misc_feature (13)..(13): Xaa can be any naturally occurring amino acid
  misc_feature (48)..(48): Xaa can be any naturally occurring amino acid
  misc_feature (78)..(78): Xaa can be any naturally occurring amino acid
  misc_feature (131)..(131): Xaa can be any naturally occurring amino acid
  misc_feature (142)..(142): Xaa can be any naturally occurring amino acid
  misc_feature (279)..(279): Xaa can be any naturally occurring amino acid
  misc_feature (293)..(293): Xaa can be any naturally occurring amino acid
  misc_feature (312)..(312): Xaa can be any naturally occurring amino acid
XGSDKIHHHHHHXVLTVTLNPALDREIFIEDFQVNRLYRINDLSKTQXSPGGKGINVSIALSKLGVPSVATGFVGGYXGKILVEELRKISKLITTNFVYVEGETRENIEIIDEKNKTITAINFPGPDVTDXDVNHFLRRYKXTLSKVDCVVISGSIPPGVNEGICNELVRLARERGVFVFVEQTPRLLERIYEGPEFPNVVKPDLRGNHASFLGVDLKTFDDYVKLAEKLAEKSQVSVVSYEVKNDIVATREGVWLIRSKEEIDTSHLLGAGDAYVAGXVYYFIKHGANFLEXAKFGFASALAATRRKEKYXPDLEAIKKEYDHFTVERVK

SEQ ID NO: 4051 - protein, 523 aa, Candida albicans SC5314
MYQHQDQTQHQYYQQYNSYNPSIEDLIASSDDKRYQNGGIGNSLQRPPVAGLPYISSQVNPNTSSANLSKLTNNINNYGYNNNNNSYIQLHTPPLSSNPSFTSFQNLNYPLSPLSKPTSPEPILSAASVTTSNFLASSFFSWLPPIDVKIVSFCIGWYLCSIISSNSTKLILNDFKFPVTLTQFQFSASFTFCLVFLNIVKVNPESISSKLPPGFIPSMTDTNRISLSEFITPTRLIIQTTLPMGMFQFIGHITSHKATSLIPVSIVHTIKSLSPIITVLIYRFLFGKSYRMRTYVTLIPLCCGIMLTCYKKSHTSNQNNVPGAGSSVINNNLDKINTNNNYSTGLIFAFISMIIFVSQNIFAKKRLTVESTNAIPMNNKSSLRINSNKVDKLTILFYCSIIGFILTCPIYFVTEWMNYNAFGAISLLQLNSYVMSLVLLNGLSHFVQSLLAFQILGMVSPINYSIANILKRIFIILISFIWESKQFSNSQSIGLVITLFGLYCYDRWGTVSNSGSASNPGKY

SEQ ID NO: 4052 - protein, 88 aa, Triticum aestivum
MSSRRSSRGSISDEEVNELMSKLQSLLPNSRRRGSSQASTTKLLKETCSYIKSLHREVDDLSDRLSDLMSTMDHNSAEAEIIRGILRS

SEQ ID NO: 4053 - protein, 158 aa, Arabidopsis thaliana
MSDDEHHFESSDAGASKTYPQQAGNIRKGGHIVIKGRPCKVVEVSTSKTGKHGHAKCHFVAIDIFTSKKLEDIVPSSHNCDVPHVNRVDYQLIDISEDGFVSLLTDNGSTKDDLKLPTDEALLTQLKNGFEEGKDIVVSVMSAIGEEQMCALKEVGPK

SEQ ID NO: 4054 - protein, 543 aa, Magnaporthe grisea 70-15
MASSQSGSAARRLQATAQQLRPIASAAMASTPTNYPTTHEKITEPVDTPYFIDNKFIASEATSFIDLHDPATNNLVTRVPQMTDAELKAAVASAEKAFPAWRATSVLARQQIMFKFVALIRENWDRLAASITLEQGKTFADAKGDVLRGLQVAEAACAAPELLKGEVLEVAKDMETRTYREPLGVVAAICPFNFPAMIPLWCIPIATITGNTLILKPSERDPGAAMILAELCQKAGFPDGVVNIVHGAHNTVNFILDDPAIKAISFVGGNKAGEYIFSRGSANGKRVQANLGAKNHAAVLPDCNKNQFLNAIVGAAFGAAGQRCMALSTLVMVGETKEWLPELAELAKGLSVNGGFEEAADLGPVISPQSKERIESLIASAEKEGAKILLDGRGFAPSKYPNGNWVGPTIITDVTKDMECYKQEIFGPVLVCLNVETLDDAVELINSNEYGNGVAIFTRSGATAEKFRRNIEAGQVGINVPIPVPLPMFSFTGNKKSVAGGGASTFYGKPGINFYTQLKTVTALWQSADAISKKADVAMPTHS

SEQ ID NO: 4055 - protein, 592 aa, Borrelia burgdorferi B31
  misc_feature (232)..(232): Xaa can be any naturally occurring amino acid
MDINKRLALLRDHMRDNGVDAYLVAGYDPHFSEYSHERYSTRKFITGFSGSFGTVIITLSKAVLFTDGRYFLQAEQELKGTEIALIKLGVKGSPDIFTYINLNLKESKLGIYSDEISIKFYKELSEKCKNTHIKALNQDLIDLIWKSRPQLEFSHVFELADAEKNNKRAEKIKSIYLILEKNLADFYVITALDEIAWVLNLRGADVEESALFYSFLLISRNKNRKNVLFVDXKKLDSGVKEALEMENFEIESYSNFYCFLDKIKHEGKFFVSFYANVRVLKVLGETNIILGESIISSLKALKTDYELLKMKEAHIIDAIALIKFLRKFKSLSKVELSELDEIDVADMLLHFRKLNKDFFSSSFDSIVGFRENGALPHYKPKRGRKINTNGLLLIDSGGSYFGLGTTDVTRVFLIGDASDEEKRDYTLVLKAFIGLSSLKFPYGSSGAFLDGICRLPLLKNELNFIHGTGHGVGFFLNVHELPVSISPNSSYLFKGSEVVSIEPGLYRTFSHGIRIENLVFVRQAFTNDFGAFLEFENLTLVPFEKELIVKEMLSEDELNYINDYHECVFLTLKERFDNEGELEFLAKLTSKI

SEQ ID NO: 4056 - protein, 110 aa, Neisseria gonorrhoeae FA 1090
MSSELIVHTGDAAFEQDVLKSDLPVLLDFWAPWCGPCKMIAPILDDIAAEFEGRLKVVKINIDDNEATPSRFGVRGIPTLMVFKNGEVVATKVGALAKGQLTAFVEASIA

SEQ ID NO: 4057 - protein, 586 aa, Zea mays
MCGILAVLGVVEVSLAKRSRIIELSRRLRHRGPDWSGLHCHEDCYLAHQRLAIIDPTSGDQPLYNEDKTVVVTVNGEIYNHEELKAKLKTHEFQTGSDCEVIAHLYEEYGEEFVDMLDGMFSFVLLDTRDKSFIAARDAIGICPLYMGWGLDGSVWFSSEMKALSDDCERFITFPPGHLYSSKTGGLRRWYNPPWFSETVPSTPYNALFLREMFEKAVIKRLMTDVPFGVLLSGGLDSSLVASVASRHLNETKVDRQWGNKLHTFCIGLKGSPDLKAAREVADYLSTVHHEFHFTVQEGIDALEEVIYHIETYDVTTIRASTPMFLMSRKIKSLGVKMVISGEGSDEIFGGYLYFHKAPNKKEFLEETCRKIKALHLYDCLRANKATSAWGVEARVPFLDKSFISVAMDIDPEWNMIKRDLGRIEKWVMRKAFDDDEHPYLPKHILYRQKEQFSDGVGYNWIDGLKSFTEQQVTDEMMNNAAQMFPYNTPVNKEAYYYRMIFERLFPQDSARETVPWGPSIACSTPAAIEWVEQWKASNDPSGRFISSHDSAATDHTAVSRRWPTAAARPANGTVNGKDVPVPIAV

SEQ ID NO: 4058 - protein, 413 aa, delta proteobacterium MLMS-1
MISPIEDVVADIQAGKMVILVDDEDRENEGDLCMAAEMVTPEAVNFMATHGRGLICLTLTPEQLERLQLPMMVRDNRSPFETAFTVSIEARTGVTTGISAADRARTIQVAVNPEAKPADLISPGHIFPLRAKRGGVLVRTGQTEGSVDLARIAGLNPAGVICEIMKDDGTMARMPDLQEFAQKHELKIATIADLVAYRVRKDKLVHRAAEVQLPTMHGEFQAIVYNNDVDELEHVALVKGEIDPEKEVMVRVHSACLTGDVFGSKRCDCGGQLFNALRMIDREGCGVLLYMQQEGRGIGLINKLKAYALQDQGMDTVEANLKLGFKPDLRDYGIGAQILRDLGVRKMRLMTNNPKKIIGLEGYDLQVTDRLPIEMEAEPENVSYLTTKKDKMGHLLERLAYSKAATQMARNEP

SEQ ID NO: 4059 - protein, 532 aa, Oryza sativa (japonica cultivar-group)
MATCAADLAPLLGPVAANATDYLCNRFADTTSAVDATYLLFSAYLVFAMQLGFAMLCAGSVRAKNTMNIMLTNVLDAAAGALFYYLFGFAFAFGTPSNGFIGKQFFGLKHMPQTGFDYDFFLFQWAFAIAAAGITSGSIAERTQFVAYLIYSAFLTGFVYPVVSHWIWSADGWASASRTSGPLLFGSGVIDFAGSGVVHMVGGVAGLWGALIEGPRIGRFDHAGRSVALKGHSASLVVLGTFLLWFGWYGFNPGSSTTILKTYGPAGGINGQWSGVGRTAVTTTLAGSVAALTTLFGKRLQTGHWNVVDVCNGLLGGFAAITAGCSVVDPWAAIICGFVSAWVLIGLNALAARLKFDDPLEAAQLHGGCGAWGILFTALFARQKYVEEIYGAGRPYGLFMGGGGKLLAAHVIQILVIFGWVSCTMGPLFYGLKKLGLLRISAEDETSGMDLTRHGGFAYVYHDEDEHDKSGVGGFMLRSAQTRVEPAAAGCLQQQQPSVTNPERTTSQRRKKSRVSLPLRSRSSRHKFDPHI

SEQ ID NO: 4060 - protein, 394 aa, Leuconostoc mesenteroides subsp. mesenteroides ATCC 8293
MVDNSAIQSLPLPTFAKVRYSSWQLDEMIAAKEETTTSYFTENNVHGIEVSGLSTTYQQLSDDMIARGVILMNMAQAQIEHPALVEKLLGSVISKTADRLSAQNFAQFNTGIFVYIPENVQFDDVLHLSLNHLAISGEDFVARIFVYVGANAKVDILQEMHTIGTQKTKASVVIEAVADVGAQVTYANIDAFGEQTTAFINREVEVRDHATVDWQNAEFNDGNVIIRLASQLNGEGATSHTNVIGLTTKKQTQGLVTTILNRGRHTIGHIFQRGVILNRSTLVFNGIGKIIKGAKGSDAQQESRVLMLSRRARGDANPLLLIDENDVTAGHAASVGRVDENQMYYLMSRGISEQVARKLVIRGFMGEVLAKMPTKVAQRQVVEEIERKLRHEDD

SEQ ID NO: 4061 - protein, 476 aa, Leuconostoc mesenteroides subsp. mesenteroides ATCC 8293
MEIDRQEAINQTKAAISNDKASELGFQDDYQAVFSTGKGLNEDIIRQISAKKNEPQWMLDYRLQAYQTYLRMPMHTWGPDLSEIHFEDIYYYNKPTNDKYRDWDDVPAELKETFERLGVPEAERKWLAGSSAQYESEVVYHRMKEEFAKTGIIFTDTDTAVQEYPELIQEYFGSLVKPTNNKLAALNSAVWSGGTFIYVPKDVHVTTPIQSYFRINTENEGQFERTLIIVDEGAHVDYVEGCSAPMYSGDALHAAVVEVIVKKDGYCRYTTIQNWSNNVYSLETKRAAAHENATMEWVDGNFGSKTTMKYPSVYLEGEGAKGTMLSIAVAGEGVNLDSGAQMIHNAKNTSSSIISKSIAHDGGSTDYRGTVKFGRESDGSFAHVECDTILVDDKSSADTIPYNTILNGNVSMEHEAKVSRVSEEQLYYLMTRGISAEKATEMIIMGFIEPFTKELPMEYAVELNRLMKFEMVGSVG

SEQ ID NO: 4062 - protein, 390 aa, Leuconostoc mesenteroides subsp. mesenteroides ATCC 8293
MASKVTFYDTTMRDGEQTIGVNFSIEEKIEIAKGLDDYGVAAIEAGFPAASQKDFEEVKRIAEVVDNAKVVGLARMVRNDINAVIEATKDAKHPMIHVFIATSPIHREFKLHMTKAEILDKIKADVTFTKQHMQDIVFSPEDATRTEPDFLVASVQTAIDAGATMINIPDTVGYDTPEEYGEVFENLRQNIVGFDTVGWSTHTHNDLGMATANALAGIEHGATEIQGTINGIGERAGNVDMIEAAAAIHVRHEKFNAETDIVLAQSKAISDIVARATRMPVAGNKPIMGRNAFAHESGIHQDGYLKNPETYEILKPEMVGATASLPLGKLSGSHAVMSKLNSLGYEVTRDDMKSIFPIFKSVAEESDLITDDQLKVIMQVVEEKEMVSYQ

SEQ ID NO: 4063 - protein, 496 aa, Oryza sativa (japonica cultivar-group)
MATCADTLGPLLGTAAANATDYLCNQFADTTSAVDSTYLLFSAYLVFAMQLGFAMLCAGSVRAKNTMNIMLTNVLDAAAGALFYYLFGFAFAFGAPSNGFIGKHFFGLKQVPQVGFDYSFFLFQWAFAIAAAGITSGSIAERTQFVAYLIYSAFLTGFVYPVVSHWIWSADGWASASRTSGSLLFGSGVIDFAGSGVVHMVGGVAGLWGALIEGPRIGRFDHAGRSVALRGHSASLVVLGSFLLWFGWYGFNPGSFLTILKSYGPPGSIHGQWSAVGRTAVTTTLAGSTAALTTLFGKRLQTGHWNVIDVCNGLLGGFAAITAGCSVVDPWAAIICGFVSAWVLIGLNALAARLKFDDPLEAAQLHGGCGAWGVIFTALFARKEYVDQIFGQPGRPYGLFMGGGGRLLGAHIVVILVIAAWVSFTMAPLFLVLNKLGLLRISAEDEMAGMDQTRHGGFAYAYHDDDASGKPDRSVGGFMLKSAHGTQVAAEMGGHV

SEQ ID NO: 4064 - protein, 409 aa, Pseudomonas sp.
MGERRDTTVIVGAGHAGTAAAFFLREFGYHGRVLLLSAETQHPYQRPPLSKEYLLAQHSTPSLLKGKDSYARADIELCLQDDVLSITPASRQVKSSQGSYTYDHLILATGSHPRFMATLGQADNLCYLSDWDDAGRIRQQLGEASRIVVLGGGFIGLEIASSACKMGKHVTVIERAPRLLSRVVSEAFATFIGDIHLGNGIELRLGEEVREVRRCTSGVRVDAVFLSDGQLLECDMLVIGVGSEPRMELATAAGLACASGVLVDEHCHTSDPFISAIGDCVAVCPSPGHQLPRRESVQNATEQARLVAARLSGRPVPPVQTPWFWSDQLQARINLAGERPAQGQVIVRRYGGDKVSMLYLQDQQLVAIEACNMPGDCLLARRAIGQNHSLDLARLVDADVPLKDALHFA

SEQ ID NO: 4065 - protein, 357 aa, Leuconostoc mesenteroides subsp. mesenteroides ATCC 8293
MTSVKKIVVLKGDYIGPEIMTAGLAVLDAATKDTTFAYELIDAPFGGDGIDRAGDPLPQSTIDVSKQADAVLLSAIGGPKWDNAPRRPEQGLLEIRSKLNLFANIRPTKVTAAQIDRSPLKPEYVENTDFVIVRELTSGAYFGKPRKLEAHQAIDTMYYSEEEVTRIMHQGFKMAQKRNKHVTIVDKSNVLATSKFWRKIANEVGKSYQDVTIDYYYVDAMTMAIMAKPTTFDVVIIPNLFGDILSDEAAQITGSIGQIPSMSVGESGPNLYEPIHGSAPDIAGQGIANPISMVNTVAMMLTESFDEKRIADKITAAVDYIIENHCVTPDMGGTMTTDEVTQKMVDYIKNYESADIK

SEQ ID NO: 4066 - protein, 258 aa, Clusia minor
CEEIGRGRFGVVYKCTKLSTNETYALKSIVKNSLNDDLLDARCLVTEPKILRHVSPHPHVTQLHDSHEDDCYLHLIIDLCPNGDLYTLLLSTGPIPEAQSKAQFVQLMKAVSHCHKSGVVHRDIKPDNILFDSRESLKLADFGSAECGKGSDLNGVVGTPYYVAPEILEGREYGEKVDVWSAGVVLYVMLAGFPPFYGETVVEIFEAVLRGNLRFPTRAFCTVSSSVKDLLRRILCRDVSRRFTADQVLRHPWVTSGG

SEQ ID NO: 4067 - protein, 260 aa, Clusia minor
CEEIGRGRFGVVYKCTKLSTNETYALKSIVKNSLNDDLLDARCLVTEPKILRQVSPHPHVTQLHDSHEDDCYLHLIIDLCPNGDLYTLLLSTGPIPEAQSKAQFVQLMKAVSHCHKSGVVHRDIKPDNILFDSRESLKLADFGSAEVICGKGSDLNGVVGTPYYVAPEILEGREYGKKVDVWSAGVVLYVMLAGFPPFYGETVVEIFEAVLRGNLRFPSRAFCTVSSSVKDLLRRILCRDVSRRFTADQVLRHPWVTSGG

SEQ ID NO: 4068 - protein, 173 aa, Pseudomonas fluorescens PfO-1
MSLQELNTFPGVTAIPDSATRHFVFNHTMLRVKDITKSLDFYTRVLGFSLVEKRDFPEAEFSLYFLALVDKSQIPADAAARTEWMKSIPGILELTHNHGTENDADFAYHNGNTDPRGFGHICISVPDIVAACARFEELGCDFQKRLTDGRMKSLAFIKDPDGYWVEIIQPAPL

SEQ ID NO: 4069 - protein, 520 aa, Pseudomonas fluorescens PfO-1
MLDANLKAQLKSYLERVTQPIEIVASLDDGAKSREMLDLLKDIASLSHQITLIDSGDDARKPSFSINRPGADISLRFAGIPMGHEFTSLVLALLQVGGHPSKASVEVIEQIRSLKGEFNFETYFSLSCQNCPDVVQALNLMAVLNPNIRHVAIDGALFQDEVNDRKIMAVPSIYLNGENFGQGRMGLEEILAKLDTGAIERQAEKISAKQAFDVLVVGGGPAGASAAIYAARKGIRTGVAAERFGGQVLDTMAIENFISVQETEGPKLATALEEHVKQYDVDIMNLQRADKLIPGKNGELHEVRFASGATLKAKSVILATGARWREMNVPGEQEYRNKGVAYCPHCDGPLFKGKRVAVIGGGNSGVEAAIDLAGIVSHVTLLEFDVQLRADAVLQRKLHSLPNVTVITSALTTEVTGDGQKVNGLRYKDRNTDELRTVELEGIFVQIGLLPNTDWLKGTIELSPRGEIIVDNRGETSIPGIFAAGDVTTVPYKQIVIAVGEGAKASLSAFDHLIRTSAPA

SEQ ID NO: 4070 - protein, 245 aa, Triticum aestivum
MVKPVQDEENQRLLLDDHKEKHFTSGEVVRDIIIGVSDGLTVPFALAAGLSGANASSSLVLTAGLAEVAAGAISMGLGGYLAAKSDADHYYRELQREQDEIDTVPDTEAAEIADILSEYGLGPEEYGPVVTSLRNNPKAWLEFMMKFELGLEKPDPRRALTSAATIALAYVVGGMVPLSPYMFLASVDSAMMTSVVVTLAALLFFGYVKGRFTGNRPFLSAIQTAIIGALASSAAYGMAKAVQAI

SEQ ID NO: 4071 - protein, 508 aa, Bacillus cereus E33L
MILDADIKTQLSQYLQLMENDILLKVSAGDDDVSKDMLALVDELATMSSKITVEKVELERTPSFSVNRPGEDTGVVFAGIPLGHEFTSLVLALLQVSGRAPKVEQKLIDQIKNIQGEYHFESYISLSCHNCPDVVQALNVMSVLNSGITHTMIDGAAFKEEVESKDIMAVPTVFLNGESFGSGRMTLEEILAKMGNGPDASELSDKDPYDVLVVGGGPAGASAAIYAARKGIRTGIVAERFGGQVMDTMGIENFISVKRTEGPKLVASLEEHVKEYDIDVMNLQRAKRLEKKELIEVELENGAILKSKSVIVSTGARWRNVGVPGEAEFKNKGVAYCPHCDGPLFTGKDVAVIGGGNSGIEAAIDLAGIVKHVTVLEFMPELKADAVLQERLNSLPNVTVLKNVQTKEITGTDKVNGISYIDRETEEVHHVELQGVFVQIGLVPNTDWLGETVERVRGEIVTDKHGATNVPGVFAAGDCTNNPYKQIIISMGSGANAALGAFDYLIRN

SEQ ID NO: 4072 - protein, 206 aa, Solanum tuberosum
MPSRRRTLLKVIILGDSGVGKTSLMNQYVNKKFSNQYKATIGADFLTKEVQFEDRLFTLQIWDTAGQERFQSLGVAFYRGADCCVLVYDVNSMKSFENLNNWREEFLIQASPSDPENFPFVVLGNKVDVDGGNSRVVSEKKARAWCASKGNIPYFETSAKEGTNVEEAFQCIAKNALKSGEEEEIYLPDTIDVAASSQQRTGGCEC

SEQ ID NO: 4073 - protein, 327 aa, Rhodopirellula baltica SH 1
MFGSLYRQFQFFTTSTFRRLTPNQGPGMPATRLDGKKIAAEIRSEVAADVETFVSGGNPPPQLAAVLVGEDPASQVYVRNKERACAKAGIASRLDRMPAATTQAELLAKVAELNADPAVSGILVQLPLPSKANGGTGIDERAVLDAIDPIKDVDAFSPVNVGLLMQGRPRFLPCTPHGIVQLLHRTGIETSGKHVVVVGRSDIVGKPMAMMLAQKDSTCGPAVANATVTIAHSRTSNLAEICRQADILIAAVGRPEMITAEMIQPGAVVIDVGINRVGDKLVGDVAFDEAEAVASAITPVPGGVGPLTIAMLLHNTLMAAKMQAASN

SEQ ID NO: 4074 - protein, 796 aa, Crocosphaera watsonii WH 8501
MEIVKQLKQIVIILLVFAVVNLCLLSFQSYQMTKYGRVVNFSGIVRGASQKLVKNELSNYPKDQEIEKINAIIQGLIKGDKTLDLPLVKNKIFQVKISIVQEKWTDLKAEIIAFREGKSTKQQLLQISEDFWIVTNDATFASENTASSHIQSLRKLYLVLFLINLTVLTFVWKINKKISLNIKDRIRAEISLKSSEEKFQQLANNINEVFWMTDINFREIIYVSPAYEKIWGKTCESLYLDINQWKNSIYPQDVSFFDRVLENFLINQEGTFYLEYRILSSDNQIYWIHHRGFLIKNIENQAYRIAGIAEDITQKKNIEICLREELKQTILLQTITKKIRASLEIETILNNTAHILAIKMKIDSCLIYTYIGDDQFQLNLIGTNINKNIRHYDFLNQLDKDDSYLKRIIDEDKAVVINKIEEEPLLISNQHLLQAENIKSLLTIRTSYKQNINGVIELHQYDKIHNWQPKDIKLIEAVASQLGIAIAQANLLAENKKQLEKLNQQNIQLQEKSKQAEAANKAKTNFLANMSHEIRTPLNAILGFSDLLSQKIIDPENVNHLQSIIFSSNNLLALINDIFELIRLESGIVKVESETVNLTEIIRQIYYKFSEKANQKNIKLIVNLNKNIPDILEFDKLKLYQIINNLLSNAIKFTKLGSVKVDVWANYFQSDLKTRQENCSIVIRIKDTGIGISQEKQKIIFDRFTQVSQETNREYEGIGLGLTLTQKMIQLLEGNLKLESELEKGTTITVTLPHLNIIQLSNQKALNLITETQLTTQEQKNIGQQKKLVLSNYQNS

SEQ ID NO: 4075 - protein, 264 aa, Pseudomonas aeruginosa UCBPP-PA14
MAKNNVEGVEFICANTDAQALKNIAARTVLQLGPGVTKGLGAGANPEVGRQAALEDRERISEVLEGADMVFITTGMGGGTGTGAAPIIAEVAKEMGILTVAVVTRPFPFEGRKRMQIADEGIRALAESVDSLITIPNEKLLTILGKDASLLAAFAKADDVLAGAVRGISDIIKRPGMINVDFADVKTVMSEMGMAMMGTGCASGPNRAREAPEAAIPHPAAGRRQPAGRARHHGEHHPRVRTCPLASTPMSATSSNSSLPSTPL

SEQ ID NO: 4076 - protein, 197 aa, Triticum aestivum
DGGVTDIGLTILAHGCKRLVKLELVGCEGSYDGIAAVGRCCAMLEELTIAEHRMDGGWLAALAFCGNLKTLRLQGCARIDDDPGPAEHLGACLTLESLQLHRCQLRDRHALHALFLVCEGARELLVQNCWGLEDDMFALAGLCRRVKLLSLEGCSLLTTRGVESVVTSWNDLPESTSCRVQQNKGRGNDWCTLRAFL

SEQ ID NO: 4077 - protein, 342 aa, Rickettsia prowazekii
MNKRIAIVLFNLGGPEDIEYVKPFLFNLFYDKAIINLPNPLRYIIAKIISITREKKSQKIYSLIGSKSYLIQETEKQKLAITEKLKEFIKEDFIIFINMRYSTPFAKEVIGQIKEYNPSEIILLPLYPQFSSTTTGSSVKNFLQNIDIDIPIKTICCYPIEEDFIKAHVSIIKEKLYDKNFRILFSAHGLPKRIIKAGDPYSFQIKETVNKIVKELNIKDLDYKITYQSRVGPIEWLKPNTEDEIELAGKLKKDIIIVPISFVSEHVETLVELDIEYKLIADKYKIQYTRIPTLGTNKIFINSLTNILLRFINNTNTNLVMSSSSKRICPNKFTKCLCNLTN

SEQ ID NO: 4078 - protein, 521 aa, Yarrowia lipolytica CLIB122
MLEILIGVTLFFTLWRVLVLADLKRRQKKSGYGYPPIASNGLLGWRGLVHQLSGFVKDIGPAGWGAQFKEHGKTHLYPVFPTQLLVTRDPDNVKAILATQFKDFSFGIRKEALCPSLGYGIFTVEGSSWSHSRALLRPQFSREQISRLDSVEHHFQEFAQCVDNFKGEYFDIQKLFFAQSMDTSTDFLLGESVGCLKELLETRDGDESSKKFGANFQHAFDRVQRLVALRVVFQENYWIIGDVFFRNEFRQVNELIQKFVQGYVDKALKARAHKAPIYTNPDKYIFLYELARDTTNPRVLRDQVLNILIAGRDTTAATLSWLMFELAQKPHIFHKLRKAVIEDFGTTIENISFESLKQCEYLRYVLNEVLRLHPVVPINLRVALKDTTLPRGGGPNGDEPIFVPKGQKINYAVYWTHRDEQYWGEDAEEFKPERWDTTNHPGPLGKGWEFLPFNGGPRICLGQQFALTEMGYILTRLVQEYSDIGIDEEYHDRPLRVRHSITMSHGDGVHVRLSREGTVVS

SEQ ID NO: 4079 - protein, 570 aa, Helicobacter hepaticus ATCC 51449
MKVMKGAQMLIQALHLEGVKVVFGYPGGAVLHIYDEIYKQNYFSHILARHEQGAVCAADGYARSSGEVGVAIITSGPGFTNAITGIATAYTDSIPLVVISGQVPITQIGTDAFQEIDAVGISRPCTKHNFLVRNISELPRILKEAFYIARSGRQGPVLVDIPKDITGTLGEFAYPESISLQSYKPTIKGNSRQIKKLCEAIMSAQKPLFYIGGGAILSNASEIIREIVHCTGIPCAETLLARGVLRYDDENLLGMLGMHGSYAANMAVSECDLLVCLGARFDDRVTGKLSEFAKNAKIAHIDIDPSSIGKIIAVDYPIVGDLKHIVSDMMIELSGYDTQKIMRWREHLRSYALTHPMSFEDSVDSIKPQWVIQRLGEHLGDNAIITTDVGQHQMWAAQFYPFSFPRQFLSSGGLGTMGYGLPAALGAKLACPHKTIINITGDGSILMNIQELMTCVVYGIPFVNVILNNNYLGMVRQWQSFFYEHRFSHTDLSLQPDFIKLIESFGGVGFRVEKKCEFDEAFKKALDAKKVAFIEVMIDRYEDVLPMVPSGGAIYEMILSSGEKALREGK

SEQ ID NO: 4080 - protein, 289 aa, Lactobacillus plantarum WCFS1
MALVTKIIDGKAVAKKVNAQTATAVAELAAQGIQPGIAVIIVGDDAASQIYVRNKNRKATKLGMHSVVRQLPATTSQDELLAIIAAYNADDSIHGILVQSPLPAQINEPLITMAIDPKKDVDGFHPTNVGKLITNFPGNYPVANTPRGIMTMLADYGVDPAGKTAVVIGRSTIVGKPMAALLTNANATVTIAHSKTADLKAVARTADILVVATGIAHLITGADIKPGATVIDVGMDRDENGKLVGDVDFDSAQGIAGLITPVPGGVGPMTIATLMQTTVELAKWSDVSE

SEQ ID NO: 4081 - protein, 1748 aa, Chromobacterium violaceum ATCC 12472
MSEHCDSSAWMKKPLLPASATALLVLLLGAVLSLSLGWKVSRDNRERVDAELRREARQLGVEVAARIRRYQNGLGGARGAIASNGEHGINRQRFRVYTQSLNAAVEFPGLLGFGYARRVPPQRVAEFVRQERRDGEPGFSIRQLRPHEGERAVIVYFEPEPGNRFVIGVDIASEPSRRAAAEAALRSGQARLSEPIALMPHPEDKAQAFLLLLPVYAGGATPASEEGRLRAGFGWVFAPIRAQDAMAGLMADLPGVAVELADVTDGRKAVFFQGGSNPAQPIAAASELQPLFGRDWRLSLRAGPAFADSLKLPSAALVASSGLAASVLSALLALVVGRNRQRRRELLAAQSRLAAIVEGSVDAIISKTLDGVVTSWNLSAERLFGYRADEAVGQPLAKLIVPEDRRGEEVDILRRIARGERIEHFETVRMRKDGSLLIVSVSISPVLDEAGRVVGASKVLRDLSEQKRIKAELQVLSENLEQRVADRTAELDQAWRTLQTVLDAVPFIIGYWDCDQINRVANHAYRTWFGIDPGALPGMRMRDLLGEPLYQANLPHIEAVLGGEPQVFERQICGQDGVVRHSLTTYLPDLVNDEVRGFYAIVQDISEQVESRSRLTSALKERELLLDTINQQLLYTATDTDGRILEANDLFCQVHGYERKELLGWDHRKLSAGVHPAMFWQSLWRTIASGRVWRGEVCNQTREGRQRWFDTVIVPHAGDSGRIERYIALRIDITERKLADAELARVHGMLSNVLRAASEVAIIAADVHGVVSLFNSGAQRMLGYSENEMVGRAMLTHFHLPEELREHGEALSQRYERQVEGLRALVQEPEASGAETREWTYVRKDGSQLQVSLMVTAMRDADELVVGYLAIAADITIPQRQQRELVAARDQLQLAAEVAQLGVWSWSPADNQLRWNAQMFEIYRQPPELAERGLEYRHWRERVHPDDVDSVEADLRALLERGEAMDRVFRVRLPDGEMRYVQVGARLERHGDGVRVTGINRDITETRAYEQNLLEAKRQAEEASMVKSQFLANMSHEIRTPMNAVLGLLQLMQHTRLDERQLDYVGKIQAAAKSLLGLLNDILDFSKIDAGKLQLDLHPFDLEGLMRELAVVLSGNTNDKDVEVLFRMEPTLPAMLIGDKLRLQQILINLAGNALKFTTQGQVVLAVRERARREGEVELRIEVSDTGIGIAPEQLSRIFEGFTQAEASTTRRFGGTGLGLVISRRLVELMGGQLRVESQLGCGSRFWFDLTLGMAADQPLAQLPEPLGQLNVLVVDDNPLAGEILMDTISTVGWRAEYADGGEEALEKVHGAGSAGQRYDVVLMDWRMPGLDGVGVAEVMRQQLAGDKPPVIIMVTAFGREVLAEAAERPNPPFNDFLTKPITPQQLVDAVVRSVTGEGEAERTPATTAFGRRLDGMSVLLVEDNALNRQVASELLQEEGARVSLAEGGLSGVSQAVSADPAFDIVIMDVQMPDIDGLEATRRIRADMRCQRLPILAMTANASQADRAACLAAGMNDHVGKPIDIDELVPKLLALAGREGGPDGTAASVPAPRADDSGALVESLPSRLRRFGNKLRVYRAALATFRPECETLLSGIAESGRLDARPELASGLHTLKGLAATLGAQALSRLAAELEKRARDGEAISGEDLERLRGLLGDSVAQLFDSLPAEETGKTAKPLPDGDWRRQLRDILALLEDSNLAAIDLVDELLDRPLGAQEDSVREVAACVQRLQFEQAIAIVRELLALAD

SEQ ID NO: 4082 - protein, 492 aa, Burkholderia vietnamiensis G4
MLPGHPVLFKSMCYVDGRWIHSDSAATRAVVNPADQSVIGHVPMLERAQIVGAVDAAQRAFGTWRWTPQAARSAALLRWHALILRHLDDLAALLSLEQGKPLAEARGEIRYAASFVEWFANEAKRAVGRTIPTHIDGAHLGTVMEPVGVAALITPWNFPAAMITRKAAAALAVGCTVIVKPAHETPFSALALAQLADEAGFPAGVFNVVLGEPQMAMEALVGDARVRAVSFTGSTRVGRLVTETAAKAGIRKIALELGGNAPFIVTDDADLDDAVRIAVGAKFQTSGQDCCAANRIFVARALYDAFVGRYASAVRALKTGPAFEPGVDVGPLMHQAAFDATVARVDDARARGARIVAGGRPHALGGWFYEPTVIADAAPGMRVYDEENFAPISAVCAFDTLDEVVARANDTEYGLAAYVCATRIDTIFRLVRRLDFAMVSVNGVKFTGAPIPFGGMKASGLGREGGVEGFEPFTETKYFCFGNLGLPVAATA

SEQ ID NO: 4083 - protein, 347 aa, Glycine max
MGSASESVCVTGASGFIGSWLVMRLIERGYTVRATVRDPVNMKKVKHLVELPGAKSKLSLWKADLAEEGSFDEAIKGCTGVFHVATPMDFESKDPENEVIKPTINGVLDIMKACLKAKTVRRLIFTSSAGTLNVIERQKPVFDDTCWSDVEFCRRVKMTGWMYFVSKTLAEKEAWKFAKEQGLDFITIIPPLVVGPFLMPTMPPSLITALSPITGNEDHYSIIKQGQFVHLDDLCLAHIFLFEEPEVEGRYICSACDATIHDIAKLINQKYPEYKVPTKFKNIPDQLELVRFSSKKITDLGFKFKYSLEDMYTGAIDTCRDKGLLPKPAEKGLFTKPGETPVNAMHK

SEQ ID NO: 4084 - protein, 245 aa, Wolbachia endosymbiont of Kalotermes flavicollis
SIDEIMEHIKDSHMLFITAGMGGGTGTGAAPVIAKAAREARAAVKDKALKEKKILTVGVVTKPFGFEGVRRMRIAELGLEELQKYVDTLIVIPNQNLFRIANEKTTFSDAFKLADNVLHIGIRGVTDLMVMPGLINLDFADIETVMNEMGKAMIGTGEAEGEDRAISAAEAAISNPLLDNVSMKGAQGILINITGGGDMTLFEVDAAANRVREEVDENANIIFGATFDQAMEGKVRVSVLATGID

SEQ ID NO: 4085 - protein, 117 aa, Borrelia burgdorferi B31
MAISLTEEDFVVKVFDYKNDKEWSFRGDRPAIIDFYANWCGPCKMLSPIFEKLSKKYENSIDFYKVDTDKEQDISSAIGVQSLPTILFIPVDGKPKVSVGFLQEDAFENIIKDFFGF

SEQ ID NO: 4086 - protein, 412 aa, Helicobacter pylori 26695
MRRIVVTGMGMINSLGLNKEDSFLAIAKGECGIKHIESFDASAFPVRIAGEITDFDPTEVMNPKDVKKAGRFIQLALKATREAMKDSGILDAHNRCPEELANRMGVSSGSGIGGLGNIEANSIFCFEKGPRKVNPFFITSALVNMIGGFTSIEFGIKGPNLSSVTACAAGTHAIIEAVKTILLNGADKMLVVGAESTICPVGIGGFASIKALSTRNDDPKKASRPFDKDRNGFVMGEGAGALVLEEYESAKRRGAKIYAEFAGYGESGDANHITAPAPEGEGAFRAMKMALEMAKVEIGYVNAHGTSTHYNDLYESIALKNVFGSKEKVPPVSSTKGQIGHCLGAAGALEAVISIMAMNQGILPPTINQEMPDPECDLDYIPNAAREKRVDAVMSNSFGFGGTNGVVIFKKA

SEQ ID NO: 4087 - protein, 147 aa, Triticum aestivum
  misc_feature (34)..(34): Xaa can be any naturally occurring amino acid
FHYYPPCPQPELAIGTSRHSDSGFLTILLQDEIXGLQILHEDRWVDVTPTPGAFIVNIGDLLQLISNDGFRSVEHRVVAKNAAPRVSIACFFSTHFHPASTRMYGPIKELLSDENPPLYRETLVRDYIKHYYSIGLDAKTAISDFRL

SEQ ID NO: 4088 - protein, 151 aa, Cryptococcus neoformans var. neoformans JEC21
MSDIYSYSVEFPKSTLPLSDLKGKTLLFVNVASKCGLTPQYKDLQALHEKYGDKGLAIIGFPCNQFKAQEPGTDDEVLQFCQVNYGVTFPIAKKGDVNGENTQPIWKYLKENAEPPVSDIDWNFSKFLVKDGKITWFPARSTKVSDVEAAL

SEQ ID NO: 4089 - protein, 335 aa, Borrelia burgdorferi B31
MKLAINGFGRIGRNVFKIAFERGIDIVAINDLTDPKTLAHLLKYDSTFGVYNKKVESRDGAIVVDGREIKIIAERDPKNLPWAKLGIDVVIESTGVFSSATSDKGGYLDHVNHAGAKKVILTVPAKDEIKTIVLGVNDHDINSDLKAVSNASCTTNCLAPLAKVLHESFGIEQGLMTTVHAYTNDQRILDLPHSDLRRARAAALSIIPTSTGAAKAVGLVLPELKGKLNGTSMRVPVPTGSIVDLTVQLKKKDVTKEEINSVLRKASETPELKGILGYTEDPIVSSDIKGNSHSSIVDGLETMVLENGFAKILSWYDNEFGYSTRVVDLAQKLVK

SEQ ID NO: 4090 - protein, 243 aa, Streptomyces avermitilis MA-4680
MAIIETEATLHEAHRDNHTHRDVNGGWLRPAVFGAMDGLVSNLALMTGVAGGSVGQQTIVITGLAGLAAGAFSMAAGEYTSVASQRELVEAELDVERRELRKHPKDEEAELAALYAARGVEPELAREVARQLSRDPEQALEIHAREELGIDPGDLPSPAVAAVSSFGSFALGALLPVLPYLLGASALWPALLLALIGLFACGAVVARVTARSWWYSGLRQLALGGAAAGVTYVLGSLIGAAVG

SEQ ID NO: 4091 - protein, 224 aa, Haemophilus influenzae R2866
MKPYLIAPSILSADLARLGNDVQNVLNAGADVIHFDVMDNHYVPNLTFGPAVCQALRDYGITAPIDVHLMVKPIDRIIPDFAKAGANYITFHPESSEHIDRSLQLIRDCGCKSGLVFNPATPLSYLDYVLDKVDVVLLMSVNPGFGGQSFIPATLKKLQQARKIIDESGYDIRLEVDGGVKVDNIAEIAAAGADMFVAGSAIFGKPDYKQVIDQMRTQLASVSA

SEQ ID NO: 4092 - protein, 421 aa, Xanthobacter autotrophicus Py2
MSVKISVLDNGVTVITDEMSHLGTASLGIWVGAGARDEQEDEHGISHLLEHMAFKGTRRRSARRIAEEIEQVGGDINAATSVEQTTYNVRVLGEDVGLGIDILADILTEPAFAPDELEREKNVIVQEIGAVMDTPDDLVFDLFQEQAFPGQSVGRSILGTPDTVRAFSRDQLGAYLGRTYRGPRMVVAAAGAVEHDRLVEEAGQRLKIIAPATKPELPQATYGGGTRLLARDLEQVHVLLGLEGCSFKDPEYHAVQVLANVLGGGMSSRLFQDVREDRGLCYSIYAFHWSYQDTGLFGVYAGTDTGDVEELSNAVIDQILDTAETVTELEVARAKAQMKVGLLAALESSGARADQLARQILGFGRVIPVEEIVARVDAVDVAGVRRAAQGLIGRGRPTLTAIGPGGGLEPAARAVERLKVH

SEQ ID NO: 4093 - protein, 562 aa, Rhodospirillum rubrum ATCC 11170
MATDHPMLTNPEIKYRPFVSPIELDDRKWPSKRLTKAPRWLSTDLRDGNQALSDPMDVERKMRFYAMLLAIGFKEIEIAFPSASQTEFDFVRALIGGNRIPDDVTIQVLTPSRQDLIARTFESLEGARQVIVHLYNATAPLFRRVVFGMERHEIVDLAITGVSAMLEESLRRPETDWTFEYSPETFCFTEPDFALEICERVLDVWQPTPERPAILNLPATVEVATPNVYADQIEWFCRNISRREAVVISIHPHNDRGTAVAAAEQALLAGADRVEGCLFGNGERTGNVDLVTLALNFYSQGIDPKLSFPAIRDVVTTVEHCNGLPVHPRHPYAGELVHTAFSGSHQDAIRKGFTAHRQRNDGIWEMPYLPVDPADIGETYEAVIRVNSQSGKGGVAWVIEQDKGLKLPRSLQRDLSRRVQEFSEKSGKEITAAMIWSIFQQAYHLTGPQEFELISYQDGNSRKAGNHRVFAGRIRHKGREIALSGRGNGLISSVVAALEDGCGVALDVVDFHEHALKRGSDSQAVAYLECRTQDDRPIFGVGIDDDIATASVKAVLSAASNG

SEQ ID NO: 4094 - protein, 292 aa, Gibberella zeae PH-1
MTHISETRPLLPSEPAIERSISYQSNYTPYDTRALHPCQSKHEECHVDYSDILRDIIIGFSDGLTVPFALTAGLSSLGSAKVVIIAGLAELFSGMISMGLGAYLAAVTERDAYHSQAEKKEFAVHNRPADERTGVYDVLQKYNVSRSSAAPLVDELCKNPTEWVRFMMDFELKLEEPNVHRAWISAVTMGLSYFIGGLIPMIPYFVMPRVREALLVSIGITVAVLLVFGYVKNYVAIRNHRAGVWGAVQTLVIGEAIALPRVIGIESSCSQANRTPRIALQFFYNEPRKDFP

SEQ ID NO: 4095 - protein, 591 aa, Chlamydomonas eugametos
MAAKFVEGTLDVTLKSASDLREDMSVKLDAYCVVSCASTAHRSNTVTDAGKTMNWEQTFHFDKVASTSVLKLESSMRRTPSDRSSCACKIPLTRACTSGSDEVCVPVLDKKGKPIGETHVSMTFKATSMADGPTKGNWILPTYANKDCWKDYEQGKVVGKGSFGTTYLVTKKDTQEQYAVKVISKRKLTTMEEVEDIQREVRIMHHLAGHPNVVQLKNVYEDKSYVYLVMDACMGGELFDAIVERGTYSEKDARALMRTIVSVVAHCHDMGVIHRDLKPENFLLLDKSANPVLKSIDFGLSSFYQEGQVFHDIVGSPFYVAPEVVRRSYGKEADIWSCGVILYILLCGYPPFHGDNETKIFEAIMNKSLDFQSDPWPKVSEPAKECIRRMLDRNPKTRASAQQTLEHEWMRENGVATEKRLEMEVLTSMKKFSAGNRLKKEAAKIIAANLPTDEICGLREMFIAIDVDHSGSITAEEFANALRMKGNSLPEDEVQRLVSNADVDGDGTCDYEEFLAATINQSKLEREDRLKIAFEHFDLDHDGSITHDELMQSLANLGINDAGIKEIIADVDRDGNGQIDYNEFCLMMRNL

SEQ ID NO: 4096 - protein, 386 aa, Photorhabdus luminescens subsp. laumondii TTO1
MFEPIELTNDAVIKVIGVGGGGGNAVEHMVRERIEGVEFFAVNTDAQALRKTAVGQTIQIGNGITKGLGAGANPEVGRTAAQEDRDALRTALDGADMVFIAAGMGGGTGTGAAPVVAEIAKELGILTVAVVTKPFNFEGKKRMAFAEQGITELSKHVDSLITIPNDKLLKVLGRGISLLDAFGAANDVLKGAVQGIAELITRPGLMNVDFADVRTVMSEMGYAMMGSGIAQGEDRAEEAAEMAISSPLLEDIDLSGARGVLVNITAGFDLRLDEFETVGNTIRAFASDNATVVIGTSLDPDMNDELRVTVVATGIGMDKRPEITLVTNKSSQSSVMEHRHQQMSGGMSSLSEENKPAAKVVNDQSVQTSKEPDYLDIPAFLRKQAD

SEQ ID NO: 4097 - protein, 548 aa, Magnaporthe grisea 70-15
MTLLEFSPWAPAILVPVALIVLYTFLAAPRLKRNGIPLKTPRDSLPFVGNGIVFLQPRQKLFAWFHQREREFGLETYQITVPTLPPGVVISDPVCLEYVFKNETLFNKGAFFKERSDDLFGHGIINVDGEPWRAQRKAGLNFLNTTNLRVLTDVALPRYLNENIGWLKNKADGETVADLQEVFHRITSQLMGKMAYNMEMHAGDDFSVAFDYASGATAERFQNPLWFITEFFTGSRLRRSLAIVKEHGRKIVANATCDRKAAEKLSATLPGVDADSEHDGLEEISGSLIQSLLDCIGDEKLVADAALNYLSAGEMLFSCSKTRTYPLTAIHQQRNSWIANQFAGRDTVAQALTWTSYLLMQHPEAIERIRAETAELISPMDGSAGNHTTLLKPPSAPYTMAVFYETMRFYPPIPFEIKQCVRETTLPDGTFLPASSVVVWCPWAMNRSKAIWGSDVDEFRPERWLSLDGKSFASRSAAEYPVFNGGARMCLGKKMADIIAVQVLPSIVTNFDFRPAYEKQQERVSKSSLTLPMQDGLPVFVKRRDVAR

SEQ ID NO: 4098 - protein, 569 aa, Alkalilimnicola ehrlichei MLHE-1
MVSAGARASIRSSEAGMSDSAVPRLTESAAWQALGARAGDLRGWRPPLKGTQGEQRFRRFSLQLDGLFFDYARQPVDETTRDLLLELARERRLPERIRALFAGEPVNATEGRPALHTLLRAPEGSAFPVHGADARAAVRTELARMTRFVDRVHRGLVHGWDDRPFTDVVNLGIGGSELGAAMAVQALSRFHQREAPRMHFASGSDGVQLEDLIRRLDPATTLFIVASKSFTTSETLLNARAALHWLEACAPEGAHLARHWVGVSANEEGMARFGIPEEQRFRIWDWVGGRYSVASAMGLPVALAVGMRHFQDFLAGMHAMDRHFEEAPLPVNLPVIAGLLQVWSINFLGAHTHCVLPYHQRLARLPAWLQQLEMESLGKRVDSGGRPVDYHTGAVVFGETGFHAQHSFAQLLFQGSCPVAVDFLISREDASGLAVFHGVAQAQALGQGRALMTGRDRATLAGEMIRAGVDEEQRQALLAHREIPGGRPSNTLVFPRLDPYNLGRLIAFYEHRTFVQASIWDINPFDQWGVELGKQLTRALLPAVTGETDPAADLDASSCGLIRILRGAD

SEQ ID NO: 4099 - protein, 134 aa, Arabidopsis thaliana
  misc_feature (9)..(9): Xaa can be any naturally occurring amino acid
  misc_feature (46)..(46): Xaa can be any naturally occurring amino acid
  misc_feature (59)..(59): Xaa can be any naturally occurring amino acid
  misc_feature (74)..(74): Xaa can be any naturally occurring amino acid
  misc_feature (95)..(95): Xaa can be any naturally occurring amino acid
  misc_feature (103)..(103): Xaa can be any naturally occurring amino acid
MAVHLLTKXAGNNRTAKFIIPQTDRRFIGKECYPWPKGLASMVRRXLVGVSLMPKDAYXGLTRRPRHYLTNGVXKLVGHNITQLELLMIHIRTYXAEIAHTLXTKKRKDFVERAHSARTGLLPTRLLVLRALED

SEQ ID NO: 4100 - protein, 261 aa, Arabidopsis thaliana
MYAETSLAFRFMQSSSSPEIHQFEDLFKSYKLSDEMNNLVEASEYDFGEESDLFKAPEPIIEEPMLAVDPLSQELVELGDLGSLQSDQQLIDKAFYDCEQDLLVKSAMESPLSEVLDIKNISLVAKMDNDVKSTSVVVSDVPIPKSVSSGNLSSMDMVEHKDAVIQGFPDFPPVDYGMRRAFSESDIQTLGTGNTGLVQSQLDRIIISCTSEDRREKLSRYRNKKSKRNFGRKIKYACRKALADSQPRIRGRFAKTEEMQK

SEQ ID NO: 4101 - protein, 119 aa, Oryza sativa
MEIESVKCECCGLREDCTQDYIASVRASFYGQWLCGLCCEAVRDEAGRKKAHPGVEEAVRAHMAFCRMFRSNPAVRVADGMRQMLRRRSGDMSKPDTSKKYSTVQIVKHGLVRNRAKIV

SEQ ID NO: 4102 - protein, 453 aa, Nocardioides sp. JS614
MPPSTPAVLWFRRDLRLADNPALVEAAADGPVLPLFVLDPVLWGPAGAARRAYLGASLRALDASLRERGTRLSVVRGDPARLVPRAARAVGAARVHVAADFGPYGSRRDGAVEQALTGAGAELVRTGSPYAVAPGRVTNTAGAPYRVFTPFHRAWAEHGWRGPVGVPEGTGWLRLAEGTAEIPDPALPDGLTLPAAGEAAARRRWAEFLDRVDEYAEDRDRPAVDGTSQMSAHLKWGEIHPRTMLADLARRRGAGAATYRKELAWREFYADVLHARPETARQYLRPEFARMRYDEPGEHLDAWRHGRTGFSVVDAGMRQLRATGWMHNRVRMITASFLVKDLHLEWQLGARHFLRWLVDGDLASNQHGWQWTAGCGTDAAPYFRVFNPTAQGRRFDPRGEYVRRWVPELADPDVVADPHDPSPSERQAVGYPEPIVDHAAERREALGRWERIR

SEQ ID NO: 4103 - protein, 195 aa, Oryza sativa
MVKGSYSKRPSNPAKSVKARGSDLRVHFKNTHEAAHALKGLSLKKAQKYLEDVLGHKRCIPFRRFRGGVGRTAQASVFGVTQGRWPKKSVEYLLGLLKNAESNAEVKNLNIDALHVTHIQVNQAPKQRRRTYRAHGRINPYMSCPSHIELILTEKEAPVPKAKAAAGSAEEKKTKKVSKKKLARERLRSGASGTD

SEQ ID NO: 4104 - protein, 518 aa, Sulfolobus tokodaii str. 7
MEIQKTFPQNNLIKLLIILISFSIILLSLHSFGQTSSNTTAEIQSLNQSILALENHTADYPSAAVPSWLDTGSNAWMLTAATFVGLQSVPGVALYYAGLSKKKYAVNSALMVFYAFAAVLVVWMIAGYNAGFGHPALLSINGYGILGYPLPAWLGHYEASQTVFGPTGTPVDIPTSTYIFFQFVFAAITPVLLAGGVLERMNFKAWMIFVPFWSLLVYSPVAYWLFAGGWLNQLGAVDFSGGYVIHVDAGVGALAAALAIGPRLASERKLEAHSLPLVLAGAGLIWLGWDGFNGGDPGGATIDAAIAVLNTNIATAVSAITWMLMDMAFFKKPTLVGATSGAITGLVAITPAAGYVNGWEAMLIGIASGSIPWLSLYKFEPRLKVDDTLGVFSTHGIAGIVGGLLTGVFADPNVTQYVDPTLKGALYGNLYQLGIQAAAAAVVFVYDFAITFGLLKLIGLFIPLQAPPDTLAIGDYAMHGEVAYSELLATLPESQIKKEEIREEAQEEKEDPDEKKSK

SEQ ID NO: 4105 - protein, 279 aa, Pseudomonas putida KT2440
MSEDRSSNGQKSWLGKLTQAFAHEPKNRQELLELLREAHQNKLLDSEALTIVEGAIQVADLQVRDIMVPRSQMNSIKAGQSPREFLPAVIDAAHSRYPVIGESHDDVLGILLAKDLLPLILKENGDSFNIKDLLRPATFVPESKRLNVLLREFRANHNHMAIVIDEYGGVAGLVTIEDVLEQIVGDIEDEHDVEEDSYIKPLPSGDFLVKALTPIENFNEFFDSEFSDDEFDTVGGLVMSAFGHLPKRNETTEIGSYKFRILNADSRRIHLLRLTPITR

SEQ ID NO: 4106 - protein, 491 aa, Solanum tuberosum
MANTKDSYHIITMDTKESSIPNLPMKEIPGDYGVPFLGAIKDRYDFHYNQGADEFFRSRMEKHDSTIFRTNVPPGPFNARNSKVVVLVDAVSYPILFDNSQVDKENYFEGTFMSSPSFNGGYKVCGFLGTTDPKHTTLKGLFLSTLTRLHDKFIPIFTTSITQMFTSLEKELSEKGTSYFNPMSDNLSFEFLFRLFCEGKNPVDTSVGTNGPKIVDKWVFLQLAPLISLGLKFVPNFLEDLVLHTFPLPYFLVKGDHQKLYNAFYNSMKDILDEAEKLGVKREEACHNFIFLAGFNSYGGMKVFFPSLIKWIGTSGPTLHTRLVKEIRTAVKEAGGVTLSAIDKMPLVKSVVYETLRMDPPVPFQTVKARKNIIVSNHEASFLIKKDELIFGYQPLATKDSKVFKNAEEFNPDRFVGYGEKLLKYVYWSNGKETDNPTVNDKQCPGKDLIVLLGRLLVVEFFMRYDTFEIEFGKLLLGSKVTFKSLTKATS

SEQ ID NO: 4107 - protein, 245 aa, Wolbachia endosymbiont of Microcerotermes sp.
SIDEIMEHIKDSHMLFITAGMGGGTGTGAAPVIAKAAREARAAVKDKALKEKKILTVGVVTKPFGFEGVRRMRVAELGLEELQKYVDTLIVIPNQNLFRIANEKTTFSDAFKLADNVLHIGIRGVTDLMVMPGLINLDFADIETVMSEMGKAMIGTGEAEGEDRAISAAEAAISNPLLDNVSMKGAQGILINITGGGDMTLFEVDAAANRVREEVDENANIIFGATFDQAMEGKVRVSVLATGID

SEQ ID NO: 4108 - protein, 416 aa, Haloarcula marismortui ATCC 43049
MSTSHVIIGDGIAGASAAETIREADPDASVTVLTDEGEALYNRILIKEFAKGKLPEAPISIHEPEWYDERDIDLQLNTHVTDIDPDAHEIQTHEGDTYEYDKLLVATGGTPAQVPVENSDADGIHHFWTFQDARGIREHADEADQGIIVGAGLLGIDLAAVCAAQEIDAKYLMRGNRWWRYALSEEGAEIIHEALEENGVEPVFESGVDHFEVDDDGHVTGAVDPDGNHYEGEWAGVAIGLDFNTEFLNGTGLELDDGVVVDEYMQTNVEDIYAAGDLTQFYDTILDSQAQNGAWGSAKEQGSVAGTNMVADAEEKEFRWVSSYSITHFDFPFLSFGHPTRGDDEAERKYSDSEWRRLAFEDGQLVGGVLIGDLSQQSAFKQLIREERQVADKKELLLEKEVDLEEVKAQTPAPAE

SEQ ID NO: 4109 - protein, 216 aa, Lactobacillus johnsonii NCC 533
MIAPSILNADNMHLSRDIKAAIESGIDRFHIDIMDGHFVPNLSYGPELVKDFKRSFPLTDAEIHLMSNDLETTLPLFVEAGCDLLEFHYEATDNPEYWLKYLKDHNVRCGMAINPSTPVQKLQPFLKELDQVLLMTVKPGFGGQKFEEESVERLVELKNMIEAENLSVPIEVDGGIEPKTLKLTRDAGATIFVAGSYIFKNGSIEDQVMKLKKEDK

SEQ ID NO: 4110 - protein, 541 aa, Geobacter sulfurreducens PCA
MSIAERIPTFFPSPDEIPPQQLLSAPVELRDYLLNGELRHWQGAVQDVFSPVCVRTPGGPERVRIGSFPLMGEADAHAALDAATAAYDCGRGRWPTMGVADRIRHVQHFASLMKEQREAVVRLIMWEIGKTRSDAEKEFDRTVVYITDTIDALKELDRVSSRFVIEQGIIGQIRRGPLGVALCMGPYNYPLNETFTTLIPALIMGNTVVMKPPRHGVLLFAPLLAALREAFPPGVVNVLLGAGRALTPTLMRSGRIDVLAFIGTSKAANTLLKDHPRPNRLRLVLGLEAKNPAIVLPDADLNLAVEECLAGSLAFNGQRCTALKLLFVHESVAQQFIALFSRALSAIGTGMPWQAGVMITPLPEEGKTAYLEELLADASARGAAVVNEGGGTVTGTYFHPALVYPVAPGMRLYTEEQFGPVVPIVPFTDIEEPIRAIRESDYGQQVSIFGRNSALLAPLIDHLVNQVSRVNINSQCQRGPDVFPFTGRKDSAVGTLSVSDALRAFSLRTLVAARNHEINKEIITDIVRERRSTFLSTDFIL

SEQ ID NO: 4111 - protein, 165 aa, Ralstonia solanacearum
MSDIYAFEADSLAGQRVPLSQYRGKVLLIVNTASQCGFTPQYAGLEAVYKRLNEKGLEVLGFPCNQFGKQEPGGAEEIGAFCEKNYGVSFPMFGKIEVNGSNAHPLYKWLTSEKPGVLGTEAIKWNFTKFLLRRDGTVYKRYAPLTKPEEMLGDIETLLAEPDPL

SEQ ID NO: 4112 - protein, 123 aa, Brassica napus
  misc_feature (47)..(47): Xaa can be any naturally occurring amino acid
  misc_feature (117)..(117): Xaa can be any naturally occurring amino acid
MYKSPLLSLSACTISLNLPFLVSQSQTLSLYKRNLPSLFAVSANSDXISGENDGGMSEANKGSGTTARGRRLLKVREEKRKRDYDRLHDYPSWAKVLESACKDDEELRAVLGDSIGXPELMRK

SEQ ID NO: 4113 - protein, 308 aa, Triticum aestivum
  misc_feature (145)..(145): Xaa can be any naturally occurring amino acid
  misc_feature (300)..(300): Xaa can be any naturally occurring amino acid
MHPTRWELSHMVDLQAAALVISVVAAEVISPEEAVEWVKKDRRRLLHVVYRVGDLDKTIKFYTECLGMKLLRRRDIPEERYTNAFLGYGPEDSHFVAELTYNYGVESYDIGSGFGHFGIAVEDVEKTVELIKAKGGTVTREPGPXVKGGKSVIAFIEDPDGYKFELIERGPTPEPLCQVMLRVGDLDRAISFYEKAFGMELLRRKDNPQYKYTIAMMGYGPEDKHAVLELTYNYGVKEYDKGNAYAQIAIGTDDVYKTAEVVRQNGGQITREPGPLPGISTKITACTDPDGWKSVFVDNXDFLKELEE

SEQ ID NO: 4114 - protein, 626 aa, Zea mays
MASSLLSSPAKPTITTTTKTTPAPRPARSAHVHVLSAARCLRLRLRASSQHPPPPPTPRSRRPDYVPNRIDDPNYVRIFDTTLRDGEQSPGATMTSAQKLVVARQLARLGVDIIEAGFPASSPDDLDAVRSIAIEVGNPAPGPAGEEDAVHVPVICGLSRCNRKDIDAAWEAVRHARRPRIHTFIATSDIHMQHKLRKTPDQVVAIAREMVAYARSLGCTDVEFSPEDAGRSNREFLYHILGEVIKAGATTLNIPDTVGYNLPYEFGKLIADIKANTPGIEKAIISTHCQNDLGLATANTLAGARAGARQLEVTINGIGERAGNASLEEVVMAIKCRRELLDGLYTGIDSRHITLTSKMVQEHSGLHVQPHKAIVGANAFAHESGIHQDGMLKYKGTYEIISPDDIGLTRANEFGIVLGKLSGRHAVRSKLVELGYEIGDKEFEDFFKRYKEVAEKKKRVTDEDLEALLSDEIFQPKVIWSLADVQATCGTLALSTATVKLVAPDGEEKIACSVGTGPVDAAYKAVDKIIQIPTVLREYSMTSVTEGIDAIATTRVVVTGDVSNNAKHALTGQSFNRSFSGSGASMDIVVSSVRAYLSALNKICSFAGAVKASSDVAETASVPSTE

SEQ ID NO: 4115 - protein, 405 aa, Dehalococcoides ethenogenes 195
MAVVVHKYGGTSVGDAERIKHVAKRIIAARQKGSDVVAVVSAMGDTTDDLIALAHKLNDCPEPREMDVLLSTGEIVSSTLLAMALKNMGQDAISLSGQQAGIRTDSAHSKARITGIDPKRIHDELAKGRVVIVAGFQGVSDCQDVTTLGRGGSDTTAVALAASLGASICERYTDVDGVYTADPRLIPDARRLAEISYEEMLELSSYGAKIMHPRAVEIGQVYNIPILVASSFNENPGTLIHGGENMEIRNRVSGIAHDFEVAKITILGVPDKPGIAAGLFAPLAKAGVSVDTIVQNSSQDHITDLTFTVTKSDLGKALEVIGPIAKDIQAREVLSDSRIGKVSIIGTGMLNAPGYAARMFKALSDAGINILLISTSEIRITCIIEEDKVKDAVKAIHKAFEMEKD

SEQ ID NO: 4116 - protein, 166 aa, Oryza sativa; identical to SEQ ID NO: 578

SEQ ID NO: 4117 - protein, 600 aa, Cryptococcus neoformans var. neoformans JEC21
MLRTPFTLSSRSTDSVFKIRQSLSIVLSHASTKIISRGYITIPTTSTVASHRPTIQRFKMTIAVPARTLSSSQPLKRSTSPLPAITPAQNLLRLKAHLQNLPTPLLKHVHLSKIRREDPNLFFSVMRDELTELAPIVYTPTVGEACQKYSQIYSGPEGLYLNIEDKDRIPEILHQYASKLVAPPQILVVTDGSRILGLGDLGIGGMGISVGKLNLYVAGGGVNPHGCLPVVLDMGTNNEAVRNDPLYIGLKQPRVGLEEATEFMDAFMAAASEAFPKAVIQHEDFYSEAAFDFLARYKEKYRMFNDDIEGTGSVILAGFLAAAKHASEASGKPLRDHKVVFLGGGSAAVGVAKEMMNFFMMQGLTEDEARERFWLIDTKGLITSTRADVVSGKVASHKKFFIRNDTEGKEYPSLESVIEYVQPTALVGLSTTFGAFSESAVRRMAELNQSPIIFPLSNPTSKCELAFSDALEWTDGRVLFASGSPYAPQQFKGTFREPGQGNNFLVFPGIGFGALQAGCKRITTGMITASAIALSEALTPEEKQKGLLYPRLERIRAVSARVAAGVVKQAQEDGVDTNEKLRGLDIETLTEEMNKAQWWP

SEQ ID NO: 4118 - protein, 317 aa, Rhodobacter capsulatus
MEQMPSPNAPLKIGTRGSPLALAQAFETRSRLMAAFDLPEEAFEIVVIKTSGDNAALIAADKPLKEVGGKGLFTKEIEEAMLAGSIDIAVHSMKDMPTLQPEGLILDCYLPREDTRDAFVSMKYNSLAELPEGAVVGTSSLRRRAQLAARRPDLKMVEFRGNVQTRMKKLGEGVADATFLALAGLNRLGMSEVAKSAIEPEDMLPAVAQGCIGIERREADTRAKMLLDAIHHAPSGLRLACERSFLLTLDGSCETPIGGLSVLEGDQIWLRGEILRPDGSETITGEIRGPAADGVALGAELAKQLLAKAPADFFCWR

SEQ ID NO: 4119 - protein, 168 aa, Oryza sativa
MAAAPSATSVHDFTVKDASGKDVNLSTYKGKVLLIVNVASQCGLTNSNYTELSQLYEKYKVQGFEILAFPCNQFGGQEPGSNEEIVQFACTRFKAEYPIFDKVDVNGNNAAPLYKYLKSNKGGLFGDSIKWNFSKFLVDKEGRVVDRYAPTTSPLSIEKDIKKLLGSS

SEQ ID NO: 4120 - protein, 228 aa, Oryza sativa
MAAAAAAKIAPSMLSSDFANLAAEADRMVRLGADWLHMDIMDGHFVPNLTIGAPVIQSLRKHTKAYLDCHLMVTNPSDYVEPLAKAGASGFTFHIEVSRDNWQELIQSIKAKGMRPGVSLRPGTPVEEVFPLVEAENPVELVLVMTVEPGFGGQKFMPEMMEKVRALRKKYPSLDIEVDGGLGPSTIDVAASAGANCIVAGSSIFGAAEPGEVISALRKSVEGSQNKS

SEQ ID NO: 4121 - protein, 131 aa, Arabidopsis thaliana
MATIATGLNIATQRVFVTSENRPVCLAGPVHLNNSWNLGSRTTNRMMKLQPIKAAPEGGISDVVEKSIKEAQETCAGDPVSGECIAAWDEVEELSAAASHARDKKKADGSDPLEEYCKDNPETNECRTYDN

SEQ ID NO: 4122 - protein, 351 aa, Debaryomyces hansenii CBS767
SSIRKLATFISPESALPKKYGGKYTVTLIPGDGVGKEITDSVRTIFSHQNVPIEWEVVDVSGLEAGNGVTEAVESLKRNKVGLKGILYTPTGTSGKSLNVALRKELDIYASLVLIKNIPGVKGRLEGIDFALVRENTEGEYSGLEHQSYPGVVESLKIMTRFKSERIAKFAFDFAKKNNRKLVTAIHKANIMKLGDGLFRTTVKDVGQDYAGIEVNDLIVDNASMQAVAKPQQFDVLVTPNLYGTILSNIGAALIGGPGLVPGANFGREYAVFEPGCRHVGLDIKGQNTANPTAMILSAAMLLRHLGLNDHADKISKATYDVIAEGNVRTKDIGGASSTTEFTDAIVAKLN

SEQ ID NO: 4123 - protein, 362 aa, Kluyveromyces lactis NRRL Y-1140
MPRTITYDIPSHYQLVDLVGEGAYGTVCSAIHKPTNTKVAIKKIQPFSRSMFVTRTLRELKLLKFFHSHENIISVLDIVRPTSWHKFEAVYLVQELMETDLQKIINQQNLSEDHIQYFVYQILRALKSLHSAQVIHRDLKPSNLLLNSNCDLKVCDFGLARCLASSDQSRENMVGFMTEYVATRWYRAPEIMLSFQEYTTAMDIWSCGCILAEMIMGKPLFPGKDYHHQLWIILEVLGSPTLEDFEQIKSKRAKEYISQLPMKKGIPWANVLNKEVNPLAIDLLSKMLTFNPDKRISAVEALEHPYLATYHDPDDEPDYPQLNLEDNFWKIDNEARDKNEEDDIPLELLKKMLYGEVMKPLN

SEQ ID NO: 4124 - protein, 481 aa, Desulfovibrio desulfuricans G20
MKTVFSQSVPGRMACVPPEAEEHAADFIPKNLLRTRRPALPELSELDVVRHFTRLSRLNYSVDSNFYPLGSCTMKYNPKFTEPLAALPGFTELHPLMAQIKSAGLYTQGALEVMYETERLLCEINGMHAFTLHPMAGAHGELTGVMLIAAYHRDKGNKKTKIICPDSAHGTNPASAALGGYEVVNVESKDGIVDPEALEAVLDNDVAAVMMTCPNTLGLFEKHLPRIVEKLRSVDALLYYDGANLNAIMGKMRVGDVGFDVVHLNLHKTFGTPHGGGGPGSGPVGVSERLEPYLPVSRVDRLRDGRLFLNYDYPKSIGYMAPFYGNFGVYIKALAYIMRLGREGIPKAAELAVLNANYLRKKLEQYITIPYNRICMHEFVASACDKAECGVRALDIAKGLLDKGYHAPTIYFPLIVKECLMFEPTETESKETLDTFVDDLAAILKEGEQNPEALHQAPLTTPVRRLDETLAARSMVLTDDA

SEQ ID NO: 4125 - protein, 329 aa, Synechococcus sp. WH 5701
MSANGYRDYFKVLGVERSADADAVKRSFRKLARQYHPDVNPGDATAEAKFKEISEAYEVLSDPDKRRRYEQFGQYWSQAGGAPGGAPGFDVDFGRYGNFDEFINDLLGRFGGAQGSSGFGAGPGGFGFSGGFPGGFPSGFGGPATGRSGTLNLDAEATISLSFAEAFRGCERTLAVNEERVQVRIPPGVRSGSRLRLKGKGNLQPGTGRRGDLYLNLQLQDHPIWRLDGDQLRADLPLSLDELALGGEVRVATPDGEATVQVPPGVALGRSLRLKGKGWPVKDGRGDLLLSLTLKLPEQFSDAERQLLEKLREARSLDPRREWMRAAQL

SEQ ID NO: 4126 - protein, 299 aa, Mesorhizobium loti MAFF303099
MAILLNRSTRVIVQGFTGKIGSFHAEDMKRYGTKLVGGVTPGKGGQTHLGLPVFNTVKGAVRETRAEASIVFVPPPFAADSIMEAADAGIKLCVCITDGIPSQDMMQVKRYMRRYRFEDRMRLIGPNCAGMITPGQALMGIMPGSIYLPGRVGIVGRSGTLGYEAASQMKALGIGVSTSVGIGGDPINGSSFKDILKLFEQDDETDAVVMIGEIGGPQEAEAAIWARDNMRKPLIAYIAGLSAPKGRRMGHAGAIISAFGESAQEKVEILKEAGVIIVPTPSSFGEVVADTLARMKKAA

SEQ ID NO: 4127 - protein, 333 aa, Francisella tularensis subsp. tularensis SCHU S4
MQQYSCKYNKQAILLVNLGTPDNYDTKSIKRYLKEFLSDPRVIEANPVLWKIILNLIILPIRAKKNVHTYKTVWNKQHNKSPLLFYTENLADKLDKKLDNYIVDYAMRYGNPSIESKIKSLQDQGATEIIIFPLYPQYSATTTATVYDEVYRVLSKLRWQPTIKGINPYYDNKFHIQTISQQIKEHLKKLDSTPDTVLFSFHGLPKEYFDKGDPYYCHCYKTYRLVKEELQNEYPNIDFELSFQSRFGPKKWLEPYTTVKLEEFTKQNKSVVVIAPGFSADCLETLEELAISEKENFIKKGGKEFSLIPCLNDSNQHVDMLYNIIDEEICLKK

SEQ ID NO: 4128 - protein, 200 aa, Crocosphaera watsonii WH 8501
MIEKPQFFYVHRNSLANKKMQSQQLIKISRFLSYHLRHAPEKLGLELEPGGWISTEKLLKACQNTKFTLTFSDLETVVKDNDKQRFSFNEAKTKIRANQGHSVNIDLQLEPLIPPVILYHGTHQKVVKTILKEGLKKMARHHVHLSERKETALKVGSRRGKPVIFVIKAQQMSEDGCIFYCSDNGVWLVDYIDPKYLTIK

SEQ ID NO: 4129 - protein, 501 aa, Lactobacillus plantarum WCFS1
MIWNRKTRYTPYEQWPATKLPQLVAQVRQSKWRMQHHIQPTSGLLNDPNGFSYFDGQWHLFYQVFPFGPVHGLKSWQHVTSKNLVDWHDEGLAIRPDTPYDSHGAYTGTALPIDDQLFIMYTGNVRTADWQRESYQLGAWMDTDNHIKKLSRPLIAHAPAGYTSSFRDPDLIRTDHGYYALIGAQTTTEIGAILVYFSKDLTTWTCQGELNVPANARGYMIECPNLVWIDQQPVLLFCPQGLSQTTTPYQNIYPNMYLVADQLDLAQAQFTEPHALTQLDDGFDVYATQAINAPDGRALAVSWIGLPEISYPTDRENWAHCLSLVKELTLKDGHLYQNPVAAVDDLRTTAHDLVFEQQRATVAALNGSFELLLTVPADKTVTVNIADQQESGQLQVTVDANHGQVMIDRRHTGNSFAEDYGQTRQVELTAHKTIKIRLIIDVSVFECYIDNGYSVMTGRFFLNATPSRLNVQGDTTAVTGKVWEWRQSEHTGVDNNETKIK

SEQ ID NO: 4130 - protein, 372 aa, Methanocaldococcus jannaschii
MKFLKNVLEEGSKLEEFNELELSPEDKELLEYLQQTKAKITVVGCGGAGNNTITRLKMEGIEGAKTVAINTDAQQLIRTKADKKILIGKKLTRGLGAGGNPKIGEEAAKESAEEIKAAIQDSDMVFITCGLGGGTGTGSAPVVAEISKKIGALTVAVVTLPFVMEGKVRMKNAMEGLERLKQHTDTLVVIPNEKLFEIVPNMPLKLAFKVADEVLINAVKGLVELITKDGLINVDFADVKAVMNNGGLAMIGIGESDSEKRAKEAVSMALNSPLLDVDIDGATGALIHVMGPEDLTLEEAREVVATVSSRLDPNATIIWGATIDENLENTVRVLLVITGVQSRIEFTDTGLKRKKLELTGIPKIGSHHHHHH

SEQ ID NO: 4131 - protein, 483 aa, Bacillus cereus E33L
MDKKATFVNVEKKAMYINGEWITLQEQIEVNNPATKEIFATVPKGGVTEAKQAVDAAHEAFKSWSKLTAADRAAKLKKWFTLIDENKEEIAAIMTKEQGKPFAEALGEVNYANSFVEWYAEEGKRVYGEMIPASHPNKRILVMKQPVGVMAAITPWNFPAAMITRKVAPALAAGCTAVVKPASQTPLTALKLAELAHEADIPKGVINIVTGSAKAIADTWMEDGRVRKVSFTGSTEIGKELMASAAQTMKKVSLELGGHAPFIVMNDADLDKAVEAVIGSKFRNAGQTCICTNRVFVQEEVYEAFVEKFQKAVGQLKVGDGFGDGTTVGPLIDENAVSKVQEHIEDAIQKGGTVLYGGQKVAELDGHFMQPTVIGLANDTMLCMNEETFGPVAPVAKFKTVDEVIERANHTPYGLAAYIFTKDISQAFQISEALEYGIIGLNDGLPSVAQAPFGGFKESGIGREGGHFGIEEYLEIKYISLGL

SEQ ID NO: 4132 - protein, 334 aa, Arabidopsis thaliana
MATATSHQSVVSFASLRSSPSSTISQCGFKIDSSLSFTSKKTNFCKIKAMASSVSYDNTLLSPSKTIPDNSQKKSNEAALILIRHGESLWNEKNLFTGCVDVPLTEKGVEEAIEAGKRISNIPVDVIFTSSLIRAQMTAMLAMIQHRRKKVPIILHDESEQAKTWSQVFSDETKNQSIPVIPAWQLNERMYGELQGLNKQETAERYGKEQVHEWRRSYDIPPPKGESLEMCAERAVAYFQDNIEPKLAAGKNVMIAAHGNSLRSIIMYLDKLTCQEVISLELSTGIPLLYIFKEGKFMKRGSPVGPTEAGVYAYTKRLAQYRQKLEDDSEVLCA

SEQ ID NO: 4133 - protein, 339 aa, Frankia sp. CcI3
MGIMTITVGINGFGRIGRSYFRALLTSGADIRVAAVNDLTSAQSLADLLKYDSVYGPLPQQVAAEGSSLRVGDTVVEVLSERDPAQLPWRRLGVDVVIESTGVFNDAAKARAHIDAGASKVVVSAAAKNADLTLVIGINDDLYDPQKHTVVSNASCTTNCLAPMARVLDDGLGIECGTMTTIHAYTQDQNLQDGPHPDPRRARAANLSTIPTTTNAASAIGLVLPNLKGKLDGYSVRVPVPVGSLTDLTVRVDRETTVEEVNSLFRKAADGELARILRYTADPVVSADIVKDPASCIFDSLLTQVIEGRHVHIFGWYDNEWGFSNRLIDTTQLVGGATA

SEQ ID NO: 4134 - protein, 387 aa, Prochlorococcus marinus str. MIT 9313
MHQHLNGSTSTMEMAIKNMSMSTSMETAGILPSQSARIEVIGVGGGGSNAVNRMILSDLDGVNYRVMNTDAQALLQSAASNRVQLGQTLTRGLGAGGNPSIGQKAAEESRAELQQALQGVDLVFIAVGMGGGTGTGAAPVVAEVAKESGALTVGIVTKPFSFEGRRRMRQAAEGIGRLADHVDTLIVIPNDRIKDVISEAPLQEAFRSADDILRMGVKGISDIITCPGLVNVDFADVRSVMTEAGTALLGIGEGSGRSRAIEAAQAAISSPLLEAARIDGAKGCVINISGGRDMTLEDMTSASEVIYDVVDPEANIIVGAVVDEKLEGEVHVTVIATGFEGNQPYRSERSINKIASQSIYSQPEANESGARIPEFLRKRQPRNDNEI

SEQ ID NO: 4135 - protein, 569 aa, Xanthomonas campestris pv. campestris str. ATCC 33913
MSLADTRHHQMFPELDTAQLAITRRFASGPPRRFEAGEMVFDVGDAHAPVWVVLEGAIEVVRRDGLGNEKPITLHTPGQFTGEVSQLAGRASLAAGRAGEHGCLALPFDTAHLRALMISSAEVGEVVMRALILRRVGLIEGDASGSVLIGEPDDPHLTRLQGFLTRNGYPNTVMDVSDEDGRALVERLGIQEQDLPVMVCPSGRVLRQPSDAEAAHCLGMTPDIDPDHRYDVAIVGAGPAGLATAVYAASEGLSVIVLDQRAIGGQAGASARIENYLGFPTGISGQALAGRAYNQALKFGAELAIPLEAATLECGREDGALRLDLADGKQLQASTVVIASGARYRRPQIDQLDRFEGHGVSYWASPVEARLCEGGVVALVGGGNSAGQAVAFLAPRVKELHLIIRGEGLEASMSQYLIERIAALPNVTLHTGTEVAALEGDPERGLQAAVLRTRADGQTQRLELRHLFLFVGADPNTGWLQQCVETDAHGFVVTGSVRAEGLPPCLPLETNRRGVFAIGDVRAGSVKRVAAAVGEGAAVVAQIHQFLAHQATPVAVSELANATQESATS

SEQ ID NO: 4136 - protein, 159 aa, Chromobacterium violaceum ATCC 12472
MSLATTDLCDAFDAEIQVLDPVFQSFGGHARFHGPIATLKLFEDNSLVRQMLGEPGNGRVLVVDGGGSRRCALLGDQLGELAVKNGWAGLVIDGCVRDSAALGKLPLGVKALAAHPRKSVKRDSGQRDLPLRVAGCDILPGQWLYADEDGVIVSGRPLG

SEQ ID NO: 4137 - protein, 167 aa, Glycine max
MASQSNTKSVHDFTVKDARGNDVNLADYKGKVLLLVNVASQCGLTNSNYTELNQLYEKYKGKGLEILAFPCNQFGAQEPGTNEEIVEFACTRFKAEFPIFDKVDVNGDNAAPLYKFLKSSKGGLFGDSIKWNFSKFLVDKDGNVVDRYAPTTSPLSIEKDIKKLLDA

SEQ ID NO: 4138 - protein, 443 aa, Desulfovibrio desulfuricans G20
MPYTPHTPEEIRQMLDVIGVKSIDDLFAEIPPEMQPRSFDIPEGMSEMEVCARIQRMAAKNRIDLVSYLGAGFYDHHIPKAVDNLVSRGEFYTAYTPYQPEASQGTLQAIFEYQTAVCRLMEMEVANASVYDGGSAIFEAMMMAARATRRSKLVIDEALSPIYRTMLASYTSNLNMELVTVAHNEGRSDKQALMDAVDDKCAAVVVQNPNFFGAVDDFTELFTHARSCNALGVISVYPVMQSVLKTPGEMGADIAVADGQSLGMPLSFGGPYLGIMTCTKKLARQIPGRIAGRTKDVDGKTGYVLTLQAREQHIRRAKATSNICSNQALCALRAIIHMCLTGPEGLVRTAELSMERAHYAADRLTALPGVSLLHDAPFCNEFALRLPVSAYDVVDRLVNHGVVPGFPLGGYYAGMDDVLLVACTEKHSFEQIGIMAELVGGML

SEQ ID NO: 4139 - protein, 298 aa, Triticum aestivum
MVSIVQLQRRRTEASAAAASASARGILPDREGRMDLSVPRGEFPIPMHQHAAASPYGGIGGGGVAVADHAMELHHDHANHNGQSQAQDMPSPPAAASEDSSGKKRAAAIAGGAGGPPVKYRECLKNHAAAIGGNATDGCGEFMPSGEEGSLEALKCSACGCHRNFHRKELDDFDGDSCASHGYGYGYGHPAVRPARPGRAAPPQEQRGPPRHRGPLRRLRCGKARSLRRRPPPVGTPPTRSTWRLNMNPDVRVRTKRTGTRRHHGPTATRGANLQRGGGRRAPPPFKESAFRTKVTRP

SEQ ID NO: 4140 - protein, 601 aa, Mycobacterium sp. KMS
MCGATGEVRLDGRTPDLAAVSAMAETLSPRGPDGAGAWSQGRVALGHRRLKIIDLSEAGAQPMVDSDLGLAIAWNGCIYNYQQLRDELRGHGYSFFSTSDTEVLLKAYHHWGDRFVDRLYGMFAFAIVERDSGRVLLGRDRLGIKPLYISEDAHRIRFASSLPALVAGGGVDTRIDPVALHHYLSFHSVVPPPLTILRGVKKVPPASLVAIEPDGRRTTTTYWTPDFTRHADRADWSEQDWEDAMLTALRRAVERRLVSDVPVGCLLSGGVDSSLIVGLLAEAGQTGLQTFSIGFESVNGVAGDEFKYSDIVAQRFGTDHHQIRIDTARMLPALDGAIGAMSEPMVSHDCVAFYLLSQEVAKYVKVVQSGQGADEVFAGYHWYPPMAEPGAASVEGSVASYRAAFFDRDPAALGGLVTPPYFADGDPSGRFVTEHFAREGAATGVDRALRLDTMVMLVDDPVKRVDNMTMAWGLEGRVPFLDHELVELAATCPPEYKTAQGGKGVLKEAARRVIPAEVIDRPKGYFPVPALTHLEGPYLDMVRDALSAPAAKERDLFRPEAVDRLLADPNGRLTPLRGNELWQMALLELWLQRHGITGPAA

SEQ ID NO: 4141 - protein, 334 aa, Arabidopsis thaliana
MSIPMELMSIRNPNSTLLYRAHSRPPVKLCAPPRSLLPSRRHFSAPRAVVSYPGIRFGFTSPEVLLNRSVVAFAASHEDSGESGVEVGKEKSDIDVEDDTSKEAWKQTLESFKEQVSKMQSVSSEAYSVNSQKAMTVLKETSEQLRIQAEKAKEELGTKAKVVSEEGREYILKAAEESPSDVKEIVEAFASTEDLKNVSRANDFHVGIPYGLLLLVGGFINFMVSGSIPAIRFGVILGGALFALSLASLKSHRKGESSTKFLKGQMAIVAIIFLRELRLLLSQKSTFLGFFTTLTSGGVLGFYLYKMVVKREKGPTLEDGGEDESSDGFVRSEG

SEQ ID NO: 4142 - protein, 245 aa, Triticum aestivum
  misc_feature (153)..(153): Xaa can be any naturally occurring amino acid
  misc_feature (177)..(177): Xaa can be any naturally occurring amino acid
  misc_feature (182)..(182): Xaa can be any naturally occurring amino acid
  misc_feature (189)..(189): Xaa can be any naturally occurring amino acid
  misc_feature (200)..(200): Xaa can be any naturally occurring amino acid
  misc_feature (209)..(209): Xaa can be any naturally occurring amino acid
HAVAKEHFCASPGPSNHKLCYSVDSVVAAEIISTDLSCVVDTLSNEEDDAELDLDSPTEGFSSISEAIEDIRQGKLVIVVDDESRENEGDLILAASLVTPEAMAFIVRHSTGIVCVSMKENDLERLNLPLMVSTKENEEKLCTAFTITVDACXKEGTTTGVSCKDRGKTVMTLASPXSKPEXFNRPGHXFPSEVRDGGVXKRAGHLDHXVDPAGLLGFPPVDYLVKCGLGWSRAPTQVAVLLKNN

SEQ ID NO: 4143 - protein, 907 aa, Desulfovibrio desulfuricans G20
MKSSPPAHTGLQRGRLLFLLPALALAAFIVCLISFVYISQRQTLEARQLRIMAQAERQASAISHLIGEIKLDAALLFRQQDFIDFSDSTPKSVQPGQTHPAGREAVRRLLTDFIASKALSGERLYNRIVLFSSTGRMLMDTSANKEPVHLPAGIARALASDVDYPLVFSLTPEIKELTFAVPLVTDSTRAGYAVVFCNTRAVTSFLESLWDLNDAYILLLQGQSGIALHRAEQISPEWIRQASRLEPGLLYTLSSEGEPEMLQHGAATSRETGIRHHVDNSPFDLLLVFSGPSIGGAVSPNVTLVAVALLAAIIAVSFYHVFRSTMRAREHKARAEAAAASEKRILQQNALLNAEIEERIKAEHALREAKELAEEADKAKGEFLANISHEFRTPMNAIIGMSEVILKTELSAPQRNHLTVLNKAAHSLLDLLNTILDFSRYESGKATLALSPFMLHAPFTQVHEMFLSAAAAKGLPLQLELAPDMPRAVEGDEGKIRQILVNLVSNALKFTDTGNITITCKAFPAPSGRADICFSVSDTGIGIEKEKHSAIFDSFTQADGSYTRTYGGTGLGLSICKLLADMMGGSITVRSAPRQGSTFTVCLPLKAVPEERVFPAAENPAVRPSKAASPLSVLVAEDNEFNREVIREILGLSGHSSTLVQNGEQALQALSTQDFDVVLLDIQMPVMDGVQTAQKIRSGACGNRNAGIPIIALTAHSMEGDKKRFLQAGMTEYLAKPVTPDHLNHVLGKYAPLPAAAPTGQSSAAHGFQPAAGKGSTAQADAEIPPPDLSLALSMLNGKQKVLTVMLGTFVRTMPDRIAALHDALQKKDIQALAEQGHALKSTLHSIGSLPGRSVAEQLENAGRSGNTEAAVTLAPRLIHVLEFMTEHLRRQIDSSQSHHQPSSGGR

SEQ ID NO: 4144 - protein, 473 aa, Arabidopsis thaliana
MSSSVPNSDRKIVTGPAGYILEDVPHFSDDFPDHPTYPNPLQDNAAYSVVKQYFVDEDDTVPQKIVVHPDSPRGTHFRRAGPRQRVYFESDDVLACIVTCGGLCPGLNTVIREIVCGLSYMYGVKRILGIDGGYRGFYARNTIHLDLKTVNDIHRSGGTILGTSRGGHNTTKIVDSIQDRGINQVYIIGGDGSQKGAAAIFEEIRKRKLKVAVAGIPKTIDNDIPIIDRSFGFDTAVEEAQRAINAAHVEATSFENGIGLVKLMGRYSGFIAMHATLASRDVDCCLIPESPFFLEGSGGLFEFIDKRLKESGHMVIVIAEGAGQDLLSESMKESTTLKDASGNKLLQDIGLWISQRIKDHFAKKMTLTLKYIDPTYMIRAVPSNASDNVCCTLLAQSAVHGVVAGYNGFTVGLVNGRHTYIPFNRITEKQNKVVITDRMWARLLSSTNQPSFMKQADKIHSNQLVGEPGTMKW

SEQ ID NO: 4145 - protein, 453 aa, Saccharomyces cerevisiae
MSENNEEQHQQQQQQQPVAVETPSAVEAPASADPSSEQSVAVEGNSEQAEDNQGENDPSVVPANAITGGRETSDRVLYVGNLDKAITEDILKQYFQVGGPIANIKIMIDKNNKNVNYAFVEYHQSHDANIALQTLNGKQIENNIVKINWAFQSQQSSSDDTFNLFVGDLNVNVDDETLRNAFKDFPSYLSGHVMWDMQTGSSRGYGFVSFTSQDDAQNAMDSMQGQDLNGRPLRINWAAKRDNNNNNNYQQRRNYGNNNRGGFRQYNSNNNNNMNMGMNMNMNMNMNNSRGMPPSSMGMPIGAMPLPSQGQPQQSQTIGLPPQVNPQAVDHIIRSAPPRVTTAYIGNIPHFATEADLIPLFQNFGFILDFKHYPEKGCCFIKYDTHEQAAVCIVALANFPFQGRNLRTGWGKERSNFMPQQQQQGGQPLIMNDQQQPVMSEQQQQQQQQQQQQ

SEQ ID NO: 4146 - protein, 872 aa, Desulfovibrio desulfuricans G20
MKKQRILAFFIGAALMFFSFQAAHAASVTRLANGLTVLIQQDDRFPLASLRLYVHAGSAYETPQQAGISHLLEHMVFKGTEKRPEGGVAGAIEQIGGNINAATSFDYTVYLTDVPSEHWRLGMDVLKDMTFGAKISPEALAPEKEVVLAELERGEDTPGSLLFKRLTAKVLARTPYERPIIGYRETVSAITSKDIHDYIDRLYQPQSMLLVVCGAVNEQEVLAEAEKLFGNLANTRTCVPPQPVTPPVSPAAPALTAEPGKWNKVYAGFALPIPNFHDARIPAVEVLAQMLGGDKTSLLYREFKYDKQLVDDISVSAYSFERTGLLLITAILDPQKTEKFTRELSAALARLSADSFTDNALARAKLNLEDELFRSKETLSGLASKLGHFYFFENGEQSELNYLQSLRQVEKTSVQDILDTFFTPERLNGVLLTPQNAGLNSDDLTELFRDGWPAKGSGHAAPAEKGDNGQQQEVIELGDGRTVVLIPDETLPYTAVDLVFRGGDALLDEDRQGLAALAARVLTKGTQQMDNAALEAFKADRAASLAASAGRSSFTISARYPERFSADITGLFRNVVTAPALAAEETAREKDNQIASIKAREDQPLGLAFRRLFPFLFHNSAYGYLHLGEEQRLAAYTAEDVAGFWKVQRTQPWVLAVCGQFDREEILGLARSLPAPSGPVAVPAVPLWSAETQLDISLEDRNQAHMLMIFKTVPITHEDTPALELLQTVLAGQSGLLFTDLRDKQGLGYTVTAFPWQSEHAGLLAFYIGTDPEKLAQADAGFKKVIRDLQEAPLPEEAIRRGKNMLRGDYYRGRQSLGSRSNEAARLAGSGLPLDFEKGLIEKAEKVDATALQEVARRYLIPQDAYIIRVLP

SEQ ID NO: 4147 - protein, 208 aa, Ashbya gossypii ATCC 10895
MSSRKKNILKVIILGDSGVGKTSLMHRYVNDKYSQQYKATIGADFLTKEVTVDGDKVATMQVWDTAGQERFQSLGVAFYRGADCCVLVYDVTNAKSFENVKSWRDEFLVHANVPSPESFPFVILGNKIDVEESKKVVTTRTSQELAKSLGNIPFFLTSAKNAINVDDAFEEIARSALQQSQADAGAYEDDFNDAINIQLDGEPSSCNC

SEQ ID NO: 4148 - protein, 306 aa, Methylobacterium chloromethanicum
MIAQVIDGRAEAARLTDNVRARAHRFTDEFGRCPGLAVVLIGDDPASSVYVKAKTEKARSTGILSSSHRLPSDTTEDALLRLIDQLNRDRTVDGILVQLPLPPHIAPERVLQRILPCKDVDGFHPVNAGLLATGQPGLVPCTPLGCLRLVQSVAAELVGQNVVVVGRSTIVGRPAAQVFLNADCSVTILHKESRDVPGHCRSADILVVAAGSPGLVRRDWVKPGAVVIDVGINRIPVSSGYRLVGDVDFEGVQYVASAITPVPGGVGPMTVAALMENTVACAEALAIRAPEVMSPDNRLHFDHADV

SEQ ID NO: 4149 - protein, 131 aa, Methanococcus maripaludis S2
MAGTKPSELGALKVGQYVVIDGIACRVMDTAHSKPGKHGGAKVRLTAMGIFEPVKKEHVGPASSRIDVPLIDKRKGQVLALMGEHVQIMDLETYETLELPMPTDVEGIDSGVEVEYFEAMDRYKITRVISK

SEQ ID NO: 4150 - protein, 562 aa, Colwellia psychrerythraea 34H
MPQSQRPLYIPYAGPSLLETPLLNKGSAFSKEERGSFNLTGLLPPRFESIDEQAERAFRQYSCFQTNINKHIYLRAIHDNNETLFFKLVQNNLAEMMPIIYTPTVGDACEQFSDIYRSSRGLFISYEDRFNIDDMLRNATKNKVKVIVVTDGERILGLGDQGIGGMGIPIGKLSLYTACGGISPAHTLPVMLDVGTNNQKLLDDPMYMGARHKRIDQDSYDEFLELFISAVKRRWPNVLLQFEDFAQPNAMPLLQRYKDRICCFNDDIQGTASVTVGTLLAACRSKGSKLSELNVAFVGAGSAGCGIAEQIISQMMNEGLGAEQARSQVFMVDRFGLLTQGMGELRDFQQKLVQSNEAIAEWDIAGEFASLVEVMHGAKPDILIGVSGQAGLFTEKVITAMKSHCEMPIIFPLSNPSRQVEATPSQVINWTQGQVIIATGSPFDPIEYQGKTFPIAQCNNSYIFPGVGLAVVAANISRITDGMLQVASETLAAASPLANGESDELLPPLTSIAQLSRDIAFAIAKVAYKQGLALELTDDELLAKIEHNFWKPEYRQYRRTSL

SEQ ID NO: 4151 - protein, 487 aa, Colwellia psychrerythraea 34H
MPLIKYKNYVDGAYTSNGTGETFDVTNPATGQVIYQVEIADELIKSKAIESAKRGFAQWSAMSATERSRVLLKAVDLLRERNDELAEIEVLDTGKPWQEASVVDVQSGADSIEFFAGLAPGIEGNQQQVGADFYYTRREALGICAGIGAWNYPLQIACWKAAPALACGNAMIFKPSEETPLGALKLAEIFSEAGLPDGVFNVLQGAGDVGSWLSHHPEIAKVSFTGEVGTGKKVMAGAATTLKDVTMELGGKSPLIIFDDADVDNAVSAAMLGNFYTQGEICTNGTRVFVQKEIYPTFIKKLVERTKNNIIVGDPMDPETNFGALISAKHQRLVLDYIDLGLKEGATLLQGGAALNPIGCDAGYFVEPTIFTDCNDDMRICCEEIFGPVMSVLTFDDEDEVIKRANATEFGLAAGVFTQDITRAHRVIHQMQAGICWINSYGLSPAEMPVGGYKLSGIGRENGLATLNHYTQIKAVYVGLEPLESPF

SEQ ID NO: 4152 - protein, 195 aa, Zea mays
  misc_feature (10)..(10): Xaa can be any naturally occurring amino acid
MVGYSDSGKXAGRLGGAWQLYRAQEEMAQVAKRYGVKLTLFHGRGGTVGRGGGPTHLAILSQARGTINGSIRVTVQGEVIEFCFGEEHLCFQTLQRFTGATLEYGITTLRAIPWIFSWTQTRFHLPVWLGVGAAFKFAIDKDVRNFQVLKEMYNEWPFFRVTLDLLEMVFAKGDPGIAGLYDELLVAGELSPFGS

SEQ ID NO: 4153 - protein, 488 aa, Geobacillus kaustophilus HTA426
MKMGTEKQTYLNYINGEWIHSSTGKIEASLNPANIDDIVGYVQESGVEDVNVAVEAARRAQAAWRKLSGPKRGEYLFRAADVLEKRLDEIAETMTREMGKTLPEAKGEVQRGVNILRYYAGEGMRSIGEVIPSMDSEALMFTTRVPLGVVGVITPWNFPVAIPIWKIAPAIVYGNTVVFKPAQETAVTAAKIVECFDQAGLPAGVVNLVTGKGSVIGNAIAEHPHIHGITFTGSNEVGKTIAQKAVARGAKYQLEMGGKNPVIVLEDADLDRAVEATISGGLRSTGQKCTATSRVFVQSSIYESFKEQLLAKIKQLKIGDGLKEGVWMGPCASRKQLETILSYIEKGIEEGATLLCGGRRLVDGELGNGFYIEPTVFENVSPNMTIAREEIFGPVLSLIKVDTFEEALALANDTPFGLSASIFTQNIGKMLAFIQDIEAGLVRINEESAGVELQAPFGGMKQSSSHSREQGRAAIEFFTAIKTVFVKG

SEQ ID NO: 4154 - protein, 216 aa, Glycine max
MNSMAVRLVKHLQLSAPTSSSFGGVPRSGASWYSTSLSGGEYQPSQDNVAPKNEALDGELDDFLGEKAELQLQGVDPKKGWGFRGVHKAIICGKVGQAPVQKILRNGRNLTIFTVGTGGMFDQRIQGPKDLPKPAQWHRIAVHNDILGAYAVQKLFKNSSVYVEGDIEIRVYNDSINGEVKSIPEICVRRDGRIRLIKNGESIDKTSLDELREGLF

SEQ ID NO: 4155 - protein, 470 aa, Photobacterium profundum SS9
MIQFGTGGWRAFIGEEFTRENVRLVAQALANIMHNENVIDNGFVIGYDRRFLSDKAAAWFAEVLAGNGITVSFIDKYVPTPVVMFESKEIGATYSACITASHNPADYNGIKIFIEGGRDADEIITQKIEQQVQGLTNSDVKHIDFDEALNAQTIKIINPMNAFVDSIINFIDIEAIKKANLRVLIDPMFGVAKNALQTVLISGRCDVDVIHDDQNPSFGGLMPSPNAATLYRLKHLVAHEGYDIGIGTDGDADRLGIIDEKGNFIHPNEVLLLLYYYMLEYKGWKGSVVRNIATTHLLDKIAAAHDEKCFEVPVGFKHISSQMEADDSLIGGESSGGLTIRGHIKGKDGVFASSLLVEMISVTNKKLSEMLDEIYSKYGYAYTAEDDCIFKISDRERLYNKIYIDKELPEFNYDIEKISYADGAKVYFKNGGWALARFSGTEPLLRLFVEMEDKIKAKAVLLQLKEFLKV

SEQ ID NO: 4156 - protein, 487 aa, Geobacillus kaustophilus HTA426
MSSVTETKTLKNFIGGQWVASTSGKEEVVPNPATGEVLAKVPLSSREELDAAVAAAKEAFREWRKVPVPRRARILFRYQQLLVEHWDELARLVTLENGKVYEDAYGEVQRGIECVEFAAGIPTLMMGQQLPDIATDIESGMYRYPLGVVAGITPFNFPMMVPCWMFPLAIACGNTFVLKPSERTPMLANRLAELFTEAGLPPGVLNIVHGAHEVVGGILEHKDIKAVSFVGSQPVAEYVYKTAAAHGKRVQALAGAKNHSIVMPDADLDMAVTNIINAAFGSAGERCMACSVVVAVGDIADELVRRLKEAADRIQIGNGLDKGVFLGPVIRESHKERTIKYIEIGEKEGALLVRDGRRDSATSGQGYFIGPTIFDHVKPGMTIWTDEIFAPVLSVVRARDLDEAIEIANRSEFANGACIYTDSAKAIRQFREEIDAGMLGVNVAVPAPMAFFPFSGYKNSFYGDLHANGRDGVEFYTRKKMVTARYQ

SEQ ID NO: 4157 - protein, 393 aa, Gluconobacter oxydans 621H
MSTSADRSLTPETIAIIKATIPALEAHGVTITSEMYRRLLADPAIAEMFDPTHQSTGTQPRALAMAVLAYAKNIDNLGVMGSAVERIAQKHASLEIQPEHYPHVATALLGAISSVLGEAATPEILDAWGKAYWALADILIGREHQLYDSSAHAEGGWTGWRPFRIARAVPECANVTSLELEPVDGKPVISAVPGQYLGVDLDIPDRGRTRRNYSITSSPNRKGYRISVRHVSNGAVSGWLNSGKCEGMEVLLSPPAGNFVLPEKVEGPLAFVCAGIGITPMIGMLEALAQPGVTTPVHVVQIAHSAETAPFAERLAELSHNSAGRIRVVTRLTEKDGHPTAAWVAEQLPGGVSTYLCGPTGFMHDMVHGLPAAGVPAERLRYETFGPDTGVTD

SEQ ID NO: 4158 - protein, 326 aa, Glycine max
EFGTSKGRVCVTGGTGFIGSWIIKRLLEDGYSVNTTVRPDPEHRKDVSFLTSLPRASQRLQILSADLSNPESFIASIEGCMGVFHVATPVDFELREPEEVVTKRSIEGALGILKACLNSKTVKRVVYTSSASAVDNNKEEIMDESSWNDVDYLRSSKPFGWSYSVSKTLTEKAVLEFGEQNGLDVVTLIPTLVFGPFICPKLPSSVRNSLDFILGEKGTFGVVLQTDMVHVDDVARAHIFLLEHPNPKGRYICSQCSVTYERISKLVSAKYPEFQPPPVESLNHIEGTKGSYLSSKKLIDAGFVYKYGLEEMVDDAIQCCKEKGYL

SEQ ID NO: 4159 - protein, 351 aa, Roseovarius nubinhibens ISM
MTLDAQRPDHAPSDHPALRHGRTGILLANLGTPDGTDYWSMRRYLSEFLSDKRVIDYPKWKWQPILQGIILTKRPFASGKAYKSIWNEERDESPLMTITRDQTDAIRAALTADYGDQVMVDFCMRYGNPSTASKVREMVAAGCTRILFFPLYPHYAGATSATANDQFFRALMEETWQPTARVVEPYFENPAYIDALAQSVEKAYSETDTPPEMLVVSYHGMPQRYLTQGDPYHCQCQKTTRLLRERLGWDKDRITTTFQSVFGPEEWLRPYTVEEVARLARDEGKTRIAVIAPAFSADCIETLEEINEEIRESFEEAGGESFTYIPCLNDTPDHVAALTAIIRENLGGWVA

SEQ ID NO: 4160 - protein, 457 aa, Triticum aestivum
  misc_feature (224)..(224): Xaa can be any naturally occurring amino acid
RRKRVNSPEGDARDEAGTHRSHGTRLEERRRVRADPPRPRGRARHDPTARADDFWHGTGKRKASNQAGRKKDRGGGGRLRPHTPAPRTKPLVVVPPEKGSARDATPRARENEAPRSLPLLPPPRPGVDAPGGMGAGNGLSKAAPDGTTVFRPTAYSPLRTTLALALWLGAIHFNVLLLIASLFLLPRRVAAMVLGTQLFFMLLPLNDKSRLGRKIARFISKYVXGYFPVTLHVEDYKAVDPKRAYVFGYEPHSVLPIGLGALVDLVGFMPLPKTKVLASTAVFYTPFLRQIWTWLGLVPASRKNFYSYLRAGYTCIVVPGGVQEMLHMDHDSEVAFLKSRKGFVKIAMETGSPLVPVFCFGQSLVYKWWRPGGKLIVKIARAIKFTPIIFFGKYGTPIPFATPLHLVVGRPIEVQKNPQPTYDEINEVHEQFVVAMQELFEKYKTKAGYDKLELRVL

SEQ ID NO: 4161 - protein, 287 aa, Bacillus cereus E33L
MKKAMLALAATSVIALSACGTSSSDKIVTSKAGDITKDEFYEQMKTQAGKQVLNNMVMEKVLIKNYKVEDKEVDKKYDEMKKQYGDQFDTLLKQQGIKEGTLKTGVRAQLAQEKAIEKTITDKELKENYKPEIKASHILVKDEATAKKVKEELGQGKSFEELAKQYSEDTGSKEKGGDLGFFGPGKMVKEFEDAAYKLKKDEVSEPVKSQFGYHIIKVTEIKEPEKSFEQSKVDIKKEIVQKKAQDAEFMNELMMKEIKKADVKVDDKDLKDLFEEKKADAKKEEKK

SEQ ID NO: 4162 - protein, 576 aa, Dechloromonas aromatica RCB
MRTSQFFFTTLKEAPADAEVISQKMMLRAGYIKRAAAGIYTWMPLGLRVLRKVENIVREEMNNAGALELLMPAVQPAELWQESGRWEQYGPELLRFKDRHQREFVIGPTHEEVITDVVRRDVKSYRQLPIHLYQIQTKFRDEIRPRFGVMRGREFLMKDGYSFHASFDDLKREYGNMYDTYSRIFSRLGLKFRAVAADTGSIGGTGSHEFHVLADSGEDDIAFCPDSGYAANVELAEAMAPNEARAAASTLMEKTHTPGKMACADVAKFLELPLDRIVKSIAVMSEKEDGSQTFALLLLRGDHELNEIKASKIAAINPFRFATEEEVIERLGCKPGFIGPVAIDATKVAVFADRSVANMSDFVCGANEAGYHMTGVNFGRDLPEPEVFDIRNVVAGDASPDGQGKLEILRGIEVGHIFQLRQKYAEALNCVYLDDSGKSQIMEMGCYGIGVSRIVGAAIEQGNDDKGIILPPAIAPFEVCIVPMGYHKSEAVKASADQLYADLKKIGVDVVLDDRNERPGVMFADMELIGIPHRVVIGERGLKDGLFEYKSRIDAEPTMVAQTDIVTLLQGKLCAA

SEQ ID NO: 4163 - protein, 282 aa, Lactobacillus johnsonii NCC 533
MKKLLEGKTPANEIKENLIEEIKKLKSDGINPTLCVIEVGDDPASKIYLRVKRNLAKKVGIKEIGLHFPANTSQAELLEKIEDLNQDPSINGIMVQLPVPPQIDPRAIFETIAPEKDADGFSPLNLGRLWEGQSDVIPATVRSILTLIDYYGIEMAGKNTVIIGRSVIVGKPLAAVLVERDATVTIAHSKTKNLSELTKNADVIISDVGKAHLVTEDMVKEGAVIIDVGMNRENGKLMGDVDFDMVAPKAKAITPVPGGVGPLTVASLMKQAVILTRKQHGR

SEQ ID NO: 4164 - protein, 170 aa, Arabidopsis thaliana
MMTPGGSGRLRPLPTAMYAGYSGTASSWVAKTSVSASGKRIQREMAELNIDPPPDCSAGPKGDNLYHWIATIIGPSGTPYEGGIFFLDIIFPSDYPFKPPKLVFKTRIYHCNVDTAGDLSVNILRDSWSPALTITKVLQAIRSIFLKPEPCKFLFYSQASDQTISSPLMK

SEQ ID NO: 4165 - protein, 454 aa, Escherichia coli CFT073
MTMSHNVTPNTSRVELRKTLTLVPVVMMGLAYMQPMTLFDTFGIVSGLTDGHVPTAYAFALIAILFTALSYGKLVRRYPSAGSAYTYAQKSISPTVGFMVGWSSLLDYLFAPMINILLAKIYFEALVPSIPSWMFVVALVAFMTAFNLRSLKSVANFNTVIVVLQIVLIAVILGMVVYGVFEGEGAGTLASTRPFWSGDAHVIPMITGATILCFSFTGFDGISNLSEETKDAERVIPRAIFLTALIGGMIFIFATYFLQLYFPDISRFKDPDASQPEIMLYVAGKAFQVGALIFSTITVLASGMAAHAGVARLMYVMGRDGVFPKSFFGYVHPKWRTPAMNIILVGAIALLAINFDLVMATALINFGALVAFTFVNLSVISQFWIREKRNKTLKDHFQYLFLPMCGALTVGALWVNLEESSMVLGLIWAAIGLIYLACVTKSFRNPVPQYEDVA

SEQ ID NO: 4166 - protein, 315 aa, Mycoplasma pulmonis
MALISPIARRLAKEKQVDISLIKGSGHDGKILESDVLKFIAEQQNAPKAAEPAPAPAATSAAPAAAPAAAAAPVSPSKEVAKLEARREKVTTIRKAIARAMKNSQDNVAYVSLVHEIDMTKLWDLRKSVVEKVKDLTGIKLTFLPFILKAIAIAIKDFQIFGAKYDEKTEELVYPDTVNLGVAVDTDHGLMVPVIKNAQSLNLVEFSQEIIRLANLARTKTIKPADMSGATFTITNYGSVGSLFGTPVINYPELAIAGVGAIVDKVYWKNGAAVPGKVMWITIAADHRWIDGATMGKFISKVKSLLEQPEILGVF

SEQ ID NO: 4167 - protein, 332 aa, Mycoplasma pulmonis
MSDKLTLNNIEALTNAIDVKMEEDKTIVLYGQDAGFEGGVFRATAGLQKKYGEERVWDSPIAEASQTGVGVGAAIYGLKPIVEIQFQGFSYPAFQQLMVHAARYRNRSRGRFSVPMVLRMPMGGQVRALEHHSEAIEALYSHIPGLKVVMPSNPYDTKGLMIAAIEDPDPVVFLEHKRIYRSFKQEIPAGRYTVEIGKANVIYEGDDLTLVTYGAQVHDTIKAMDLLDEEGKEYSIELIDLRTISPLDSETIIESFKKTGRLLVVHEAVRSFSVSAEIMARVSEEAGDYIKTPLARLTGWDITVPLAKGEQYHALSPERIADAIKKVMEREE

SEQ ID NO: 4168 - protein, 106 aa, Agrobacterium tumefaciens str. C58
MATVKVDAANFQSEVLESAEPVVVDFWAEWCGPCKMIAPSLEEISSELAGKVKVAKLNIDENPELAAQFGVRSIPTLAIFKGGEVADIKVGAAPKTALSAWISSAA

SEQ ID NO: 4169 - protein, 327 aa, Cyanidium caldarium
MSMMFLYEALRAAIDEEMGKDSNVFIVGEDVGHYGGSYKVTKDLHVKYGDLRVLDAPIAENSFTGMAIGAAMTGLRPIVEGMNMGFMLLAFNQISNNLSMLQYTSGGNFNIPVVIRGPGGIGKQLAAEHSQRLESCFQSIPGLQIVACSTAYNAKGLLKSAIIEKKPILFLEHVLLYNLKGFVPDEEYYLPLDKAEVVRSGSDVTIVTYSRMRYHVLAAVEKLVLNGQDPEIIDLISLKPLDLHTISKSIKKTHKIVIVEECAQTGGIAAELISLINTYLYDELDSPAVRLSSKDVPIPYNGNLEKSTLIQPDQIVDVVTNLLQYKT

SEQ ID NO: 4170 - protein, 499 aa, Oryza sativa
MYRIAGSHLRSLKRYSYSRFASTSVVKQSSGGLFSWLLGEKSSQLPPLDVPLPGITLPPPLPDFVEPSKTKVTTLPNGIKIASETSVSPAASVGLYIDCGSIYETPASSGASHLLERMAFKSTTNRSHLRLVREVEAIGGNVSASASREQMCYTYDAFKAYVPEMVEVLIDSVRNPAFFNWEIKEQLEKIKAEIAEVSDNPQGLLLEALHSAGYSGALAKPLMAPQSAIHRLDSSILEEFIAENYTAPRMVLAASGVEHDELVSIAEPLLSDLPSVKRPEEPKSVYVGGDYRCQADSDKTHIALAFEVPGGWFEEKTAIIVTVLQMLMGGGGSFSAGGPGKGMHSRLYLRILNNYHQIESFSAFNSIYNHSGLFGIHATTSPNFASKAVDLAAGELLEVATPGKVTQEQLDRAKQATKSAVLMNLESRVVASEDIGRQILTYGERKPIEHFLKDLEAITLNDISSTAKKIISSPLTLASWGDVIHVPSYESVSQKFFSK

SEQ ID NO: 4171 - protein, 396 aa, Mycobacterium avium subsp. paratuberculosis K-10
MAKAKFERTKPHVNIGTIGHVDHGKTTLTAAITKVLHDKYPDLNESRAFDQIDNAPEERQRGITINISHVEYQTDKRHYAHVDAPGHADYIKNMITGAAQMDGAILVVAATDGPMPQTREHVLLARQVGVPYILVALNKADMVDDEELLELVEMEVRELLAAQEFDEDAPVVRVSALKALEGDAKWVESVEQLMEAVDESIPDPVRETDKPFLMPVEDVFTITGRGTVVTGRVERGVINVNEEVEIVGIRPSSTKTTVTGVEMFRKLLDQGQAGDNVGLLLRGIKREDVERGQVVTKPGTTTPHTEFEGQVYILSKDEGGRHTPFFNNYRPQFYFRTTDVTGVVTLPEGTEMVMPGDNTNISVKLIQPVAMDEGLRFAIREGGRTVGAGRVVKIIK

SEQ ID NO: 4172 - protein, 181 aa, Brassica napus
MAYSMLSSAAVVTSPAQATMVAPFTGLKSSSAFPVTRKANNDITSIVSNGGRVSCMQVWPPVGKKKFETLSYLPDLTEVELGKEVDYLLRNKWIPCVEFELEHGFVYREHGSTPGYYDGRYWTMWKLPLFGCTDSAQVLKEVQECKTEYPNAFIRIIGFDNNRQVQCISFIAYKPPSFTGA

SEQ ID NO: 4173 - protein, 300 aa, Methanococcus maripaludis S2
MVYDLIIIGGGPAGLTAGIYAMRAKLSTLCLEKQNEGGKIAEAGIVENYPGFESIKGFELAQKFSEHAKHFELPIIHEEVEKIDTSSKPYKVITKHETYEAKSIVIASGSRYKKPGLNEDDFMGKGVCYCVMCDAFFFLNKEVIVLGRGTSAIMAAYNLKDIAKKITIVTDRSELKAVEKIMEDRMNLMNNLEIVLNAEPIEIVGKEKAEGVKVSIDGKEKIISADGIFISFGYVPNTEFLDGSEIKLNKRKFIETDENCKTSVEGIYACGDVTGGILQVSKAVGEGVTAFTGALSSIQK

SEQ ID NO: 4174 - protein, 352 aa, Saccharomyces cerevisiae
MVKETKLYDLLGVSPSANEQELKKGYRKAALKYHPDKPTGDTEKFKEISEAFEILNDPQKREIYDQYGLEAARSGGPSFGPGGPGGAGGAGGFPGGAGGFSGGHAFSNEDAFNIFSQFFGGSSPFGGADDSGFSFSSYPSGGGAGMGGMPGGMGGMHGGMGGMPGGFRSASSSPTYPEEETVQVNLPVSLEDLFVGKKKSFKIGRKGPHGASEKTQIDIQLKPGWKAGTKITYKNQGDYNPQTGRRKTLQFVIQEKSHPNFKRDGDDLIYTLPLSFKESLLGFSKTIQTIDGRTLPLSRVQPVQPSQTSTYPGQGMPTPKNPSQRGNLIVKYKVDYPISLNDAQKRAIDENF

SEQ ID NO: 4175 - protein, 398 aa, Mycobacterium avium subsp. paratuberculosis K-10
MSSDASASNGIVIVGGGLAAARTAEQLRRSEYSGPITIVSDEVHLPYDRPPLSKEVLRKEVDDTALKPRQWYDDNDITLRLGSAARSLDTAAQTLTLEDGTTLGYDELVIATGLVPRRIPTIPDLDGIRVLRTFDESLALREHASAAQRAVIIGAGFIGCEVAASLRSLGVDVVLVEPQPTPLAAVLGEQIGELVARLHRAEGVDVRLGVGVAQVRGDTHVEAVVLTDGTELAADVVVIGIGSRPATDWLEGSGVAIDSVDRGVLCDEAGRTSAPNVWALGDVASWRDATGHQGRVEHWSNVADQARVVVPAMLGKEVPPVVVVPYFWSDQYDVKIQCLGEPEADDIVHIVEDDGRKFLAYYERDGALVGVVGGGMPGKVMKTRAKIAAAVPIAEMLG

SEQ ID NO: 4176 - protein, 520 aa, Photorhabdus luminescens subsp. laumondii TTO1
MNQQVIIFDTTLRDGEQALQASLCVNEKLQIALALERMGVDIMEVGFPVSSPGDFESVQTIAKQIKNSRVCALARCVEKDIDVAAEALKVADAFRIHVFLATSDLHIESKLKKTFENVMEMATQSIKRARRYTDDVEFSCEDAGRTPIDNLCRIVENAIKAGATTINIPDTVGYTTPYQFGGIITNLIERVPNIDKAIISVHCHDDLGMSVANSITAVQSGARQIEGTINGLGERAGNCSLEEVIMAIKVRQQMLGVYTNINHQEIYRTSQLVSQLCNMPIPANKAIVGSNAFSHSSGIHQDGVLKNRETYEIMTPESIGLKEIQLNLTSRSGRAAVKHRMEEMGYQDKDYDLGSLYEAFLRLADKKGQVFDYDLEALAFINLQQQEPEFFHLDNFNIQSGSNVMATAAVCLVCGKELKSEAATGNGPVDAVYQAISRITEYPIELVSYQLSGKGQGKNALGQVNIVVECFGRRFHGMGLETDIVESSAKAMVHALNCVWRTEQVKKEKQRIQQNTKEMV

SEQ ID NO: 4177 - protein, 363 aa, Photorhabdus luminescens subsp. laumondii TTO1
MSNNYHIAVLPGDGIGPEVMAQAYKILDAIRKRFNICITTSEYDVGGIAIDRHGCSLPAKTVAGCEQADAILFGSVGGPKWEHLPPAEQPERGALLPLRKHFKLFSNLRPARLYAGLEVFCPLRNDIAAKGFDILCVRELTGGIYFGQPKGREGQGKYERAFDTEVYHRFEIERIARIAFESARKRSNKVTSIDKANVLQSSVLWREVVTEIAKAYPDVEINHMYIDNATMQLIKDPSQFDVMLCSNIFGDILSDECAMITGSMGMLPSASLNEKGFGLYEPAGGSAPDIAGKGIANPIAQILSAALLLRYSLGHNDAANAIEQAVNYALEQGYRTTDLAGNGKAISTDEMGSTIARYIAEGV

SEQ ID NO: 4178 - protein, 203 aa, Zea mays
FFLSCSPKDCKSSATSNLSYTAAIPGSPFAIKHIMQKDIRNIHILREMYNEWPFFRVTLDLLEMVFAKGDPGIAAVYDKLLVADDLQSFGEQLRKNYEETKELLLQVAGHKDVLEGDPYLKQRLRLRESYITTLNVCQAYTLKRIRDPSFQVSPQPPLSKEFTDESQPAELVQLNEQSEYAPGLEDTLILTMKGIAAGMQNTG

SEQ ID NO: 4179 - protein, 496 aa, Physcomitrella patens
MAGTGFYESILDNDVFKYYADGEWKVSSSGKSVGITNPSTLKVQYKVQACTQDEVNKAVESAQAAQKIWAKTPLWKRAEALHRFAAILKDNKNEIAEALVKEIAKPHKDALTEVVRSGDLISYSAEEGIRILAEGKFLVSDSFPGNGRNKYCLASKIPLGVVLAIPPFNYPVNLAVSKIAPALIAGNAVVLKPPTQGAVSALHMVHCLHMAGFPKGLVSAITGKGSEIGDLMTMHPGINCISFTGGDTGIAISRKAGMVPLQMELGGKDCCLVLEDADLELAANNVIKGGYSYSGQRCTAVKVICVMESVAEELVSKIVQKMTKLTVGMPEDNCDITPVVSQSSANFIQGLVEDAQAKGAKFHQEWKREGNLIWPLLIDNVTPDMRIAWEEPFGPVIPVIRIKTVEEGIHHCNANNFALQGCVFTKDINKAILVSDAMESGTIQINAAPARGPDHFPFQGLRDSGIGSQGITNSIQMMTKTKSTVINLPTESYTMG

SEQ ID NO: 4180 - protein, 461 aa, Triticum aestivum
  misc_feature (82)..(82): Xaa can be any naturally occurring amino acid
MGKSSKKSAAPTVVAPAAVLTKGKAGKKREVDDEIEKAVSAKKQKAAPAKAVPGPKEAAKKAKKQPPPKKVESSSSEEESSXSQEEEVPKKTAKPVKHESSYDSSDDFSSDEEPAKKPSAKPVTPAASNGSKKGKPESSSSISEDESDDDVAPAAPVKRTPLIESDTSESDSDDSPNEDVPAKSPAAAAKKVDSSDSSELESESEDEEKSKKAAQATKIAPAAAKRKEGSSDSSDSDESDEEPPQKKQKDAAKVAPKSAKKDSSSDDDSSDESSDDEPKKEVTTATKSQKEEPKTPASNKGQATGSKTLWMGNLSFNIEYDQVKQFFAQIGEVVDVRLATHEDGHPKGFGHVEFATAEDAQKALDSLNGGDLMGRPVRLDITAITIRPIPVTWLNKFVQKSRLVPAPEFPGYRRPTRPTPLLASTPPAVHGQVKQEVRGPYCRGAGGRPYQGEGREEARSR

SEQ ID NO: 4181 - protein, 327 aa, Bacillus halodurans C-125
MREITYLEAIREAMTLEMRKNEDVFILGEDIGVYGGAFGVTRGMIEEFGSERVRNTPISEAAISGTAIGAALTGMRPILELQFSDFITIAMDNMVNQAAKLRYMYGGKAKVPMVLRTPAGSGTGAAAQHSQSLEAWMTHIPGLKVVQPATAYDAKGLLKAAIDDNNPVIFYEHKLCYRTKCHVPEEEYSIPLGKADVKRKGTDVTVVATAVMVHKALEAAVELEKEGISVEVIDPRTLVPLDEETIIRSVKKTSRLIVVHEAVKRGGFGGEIASIIAESEAFDYLDAPIKRLGGKPVPIPYNPTLERAAIPQVPDIIEAVKETLNWS

SEQ ID NO: 4182 - protein, 596 aa, Gloeobacter violaceus PCC 7421
MQATGAFAVVDSLCCQGVRHIFGYPGGAILPVYDEIYKAEAEGRFQHFLVRHEQGAAHAADGYARATGRVGVCVATSGPGATNLVTGIATAHMDSVPMVAITGQVPRRSIGSDAFQEADILGITLPIVKHSYVIRNTGDIGRIFSEAFHIASSGRPGPVLIDVPKDVGQESFEYTPVQTTPKIPGYRPTTRGNPRQVAAAAKLILEADRPLLYVGGGAISAGAHAELMRLAELGLIPTTTTLMGKGAFPEDHPLAVGMLGMHGTAYANFAVTECDLLIAVGARFDDRVTGKLDEFAARARVIHIDIDPAEVGKNRGPEVPIVGDVKLVLQDLIKKLIEFQPRTRAWLERIERWKAEYPLEVPSDGTRLYPQEVMVAFRELATDAYYTTDVGQHQMWAAQFLKNGPRRWISSGGLGTMGYGFPAAIGVQVALPDEDVVCISGDASFQMNLQEIGTAVQYDLPVKAAIVNNGWQGMVRQWQEFFYDRRFSHSHMKPSMPDFVKLAEAFGAEGMVIDHPDQLKEGIEALMERDRPVICDFHVVPDANCYPMVPPGKANHQMVGLPRPLPMQPLELIYCPNCGTKNTTANRFCPECGTKL

SEQ ID NO: 4183 - protein, 436 aa, Bacillus halodurans C-125
MAKEIFMPKLSSTMQEGTLLQWFKEEGDRVEVGEPLFEIMTDKINIEVEAYEEGTLLKRYYGEDDEIPVNHVIGYIGTPDESVPTEPPGASEITASSTDEAGDHRTTAVKKAPSSDRENVRATPAARRIAKEKRIDLRQVEGSGPEGRVQAVDVATFKKKGQKATPLAKKVAEVKGVALEKVQGSGPYGKVYREDVEHAQAASPVEDKGNRVKLSGLRKVVAKRMVDSAFSAPHVTITTEIDMSSTIKIRSQLLGMIEQETGYRLSYTEIVMKAVAHALMSHPTINASFFENEIVYHEDVHIGLAVAVEGGLVVPVVKHVDKKGLAQLTNECKTVAMAARDNRLSQEMMSGGTFTISNLGMYAIDVFTPVINQPESAILGVGRIQEKPVGIDGQIELRPMMTASLSFDHRVIDGAPAAAFLTDVKSMLEQPFQLLM

SEQ ID NO: 4184 - protein, 161 aa, Glycine max
MAQKTEKEETDFKVPETITLCVNNCGVTGNPATNNMCQKCFTASTATTSGAGGAGIASPATRSGVSARPQKRSFPEEPSPVADPPSSDQTTPSEAKRVVNRCSGCRRKVGLTGFRCRCGELFCAEHRYSDRHDCSYDYKAAGREAIARENPVIRAAKIVKV

SEQ ID NO: 4185 - protein, 591 aa, Schizosaccharomyces pombe
MAEELKAKGNAAFSKKDYKTAIDYFTQAIGLDERNHILYSNRSACYASEKDYADALKDATKCTELKPDWAKGWSRKGAALHGLGDLDAARSAYEEGLKHDANNAQLLNGLKSVEAAQTQAASGAGGFNPFAKLGSQLSDPKFMEKLASNPETASLLADSAFMAKLQKIQQNPGSIMAELNDPRMMKVIGMLMGIDINMNAGEGAAEEQEKKEEFAPSSSTPSADSAKPETTNPPPQPQASEPMEEDKTAEELEEAATKEALKKKADQEKQIGNENYKKRNFPVAIEQYKKAWDTYKDITYLNNLAAAYFEADQLDDCIKTCEDAIEQGRELRADFKLIAKALGRLGTTYQKRGDLVKAIDYYQRSLTEHRTPDILSRLKDAEKSKELQDREAYIDPDKAEESRVKGNELFKSGDFANAIKEYTEMTKRAPSDPRGFGNRAAAYLKVMAPAECIRDCNKAIELDPNFAKAYVRKAQALFMLKDYNKCIDACNEASEVDRREPNTGKNLREIESQLSKCMSAMASQRQNETEEETMARIQKDPEVLGILQDPAMQAILGQARENPAALMEHMKNPTVKSKIEKLIASGVIRLG

SEQ ID NO: 4186 - protein, 304 aa, Salmonella enterica subsp. enterica serovar Paratyphi A str.
MIYTLTLNSAIDMNIFSDPLQPNIVNRTHHTEFCPNGKGVNVALVLDHFQIPAHILGIFGGFTGHYIVESLRTKKMPVTPAWVEEPTRINIFIHDGQQEYKLVNPGSYIPDECKQQIITIISQLPDAEYLVISGSLPQGIESRFYAEIMHICQQKNIGVILDISHPSLRQLLEFKPLLIKPNDEEVKAIFGLTVSDDNDAKNALTTLHALGAQNVLLTLGAKGMYFSNGIDYWFCSAPTVDLVSSACAGDAALAAFLSQWLSTGEVEYALSLASATGADVASSAGLGQLAAIETLLSQIHVRKL

SEQ ID NO: 4187 - protein, 461 aa, Aspergillus nidulans FGSC A4
MSGLSRTANLLFRTTKTSILRPRGVNPVQYALSKDRQTVRAMATTFERTKPHVNIGTIGHVDHGKTTLTAAITKHQASKGLAQFLEYGAIDKAPEERKRGITISTAHIEFSTDNRHYAHVDCPGHADYIKNMITGAANMDGAIVVVAASDGQMPQTREHLLLARQVGVQKIVVFVNKVDAVDDPEMLELVELEMRELLNTYGFEGEETPIIFGSALCALEDRRPEIGTEQIDKLLEAVDTWIPTPQRDLDKPFLMSVEEVFSIPGRGTVASGRVERGLLKKDSEIEIHGGGEVQKTKVTDIETFKKSCDESRAGDNSGLLLRGTRREDVKRGMVIAAPGSIKAHKKFLVSMYVLTEAEGGRRSGFGSNYRPQAYIRTAGKSFSNNLNAIFGHHRRSNQCLDEACDLTFPDGDLSRRVMPGDNVEMILNLNRPVAAEAGQRFNIREGGRTVATGLITRVIEE

SEQ ID NO: 4188 - protein, 446 aa, Enterococcus faecalis
MKVVVVGCTHAGTSAVKSILANHPEAEVTVYERNDNISFLSCGIALYVGGVVKNAADLFYSNPEELASLGATVKMEHNVEEINVDDKTVTAKNLQTGATETVSYDKLVMTTGSWPIIPPIPGIDAENILLCKNYSQANVIIEKAKDAKRVVVVGGGYIGIELVEAFVESGKQVTLVDGLDRILNKYLDKPFTDVLEKELVDRGVNLALGENVQQFVADEQGKVAKVITPSQEFEADMVIMCVGFRPNTELLKDKVDMLPNGAIEVNEYMQTSNPDIFAAGDSAVVHYNPSQTKNYIPLATNAVRQGMLVGRNLTEQKLAYRGTQGTSGLYLFGWKIGSTGVTKESAKLNGLDVEATVFEDNYRPEFMPTTEKVLMELVYEKGTQRIVGGQLMSKYDITQSANTLSLAVQNKMTVEDLAISDFFFQPHFDRPWNYLNLLAQAALENM

SEQ ID NO: 4189 - protein, 160 aa, Brassica napus
EGRLVQRPTPLVALLTLLWLPIGFLVSLIRVYTNIPLPERIARYNYKLTGIKLVVNGHPPPPPKPGQPGHLLVCNHRTVLDPVVTAVVLGRKISCVTYSISKFSELISPIKTVALTRQRDKDAANIKRLLEEGDLVICPEGTTCREPFLLRFSAMFAELT

SEQ ID NO: 4190 - protein, 276 aa, Xanthobacter autotrophicus Py2
MSAEPSAHPVAGAAAPVVTTSRDGGVLTLTLARPEARNSLSEAMMAALTSALAAIAADTAVRAVVLAAEGPVYSAGHDLKEIQAHRGDADRGRAYFEDVLKRCATLMTAIVRLPQPVIAAVEGMATAAGCQLVASCDLAVAGEKARFCTPGVNIGLFCHTPMVALSRNLARKHAMEMLLLGEWVEAEEARRMGLVNRVVPAGDALSTAQALARRIAEKSQVPVKLGKAAFYTQMEMGLDDAYAYASRVMAENMLARDADEGISAVLAKRAPSWEDR

SEQ ID NO: 4191 - protein, 343 aa, Gluconobacter oxydans 621H
MAFLHKTPRIAPPPEGRTGILLINLGTPDDTGYFSVRRYLSEFLSDRRVIESPPLIWQPILQSIILTKRPFASGANYARIWHKEENASPLRVYTRRQAEGLAERLRADGVPVEWGMRYGCPSVAKAVESLMDQGCDRIISIALYPQYSATTTATANDQLFRALMRLRRQPAVLTVPSFPDHPAFIRALETSVQDTLAGLSFKPQQIVASFHGLPKTCIEKGDTYRDECERTISALRQALGLSEEQMPLTFQSRFGPLEWVQPYTAPFVKALPAQGITKIAVIMPGFMVDCLETLDEIGNELREEFMEAGGEEFALVPCLNDSKGAIDLLEDLSRSAMAGFQRG

SEQ ID NO: 4192 - protein, 778 aa, Arabidopsis thaliana
MPEFISVEDGYSDSTSPISEPPDITNWFPSYVYESLPLSSSINEIEIEVDVVNKANPGGVIDESLPSEPPDLGKWFSSYVYESPLLDTSDGLELSVPGESECVKETQTENESPKIEGNDVCPRLLEQELVSSTKVTDFSESQSVLSEPPDLRNWFSSYEYQSPQLSDIQEFGFLYSEKDELIIEESDTEEGISSGIFRKIKSRQETVGLGRLDSNDYKENIATDTAKEVSLDNAVSDQKMEKRSSVRLLNASKKDVKQESSFKQEPLLCELQEEARFSPRVSRYNPKLKSPSKNDTSLHELRPIHIQESISMNSNRQKSPPIEQESYDKENVHGQSNQTGFVTMKKASFREARDQCSLKKPNTEVLVKCSSSKELKTKAGEDNTEEREKKRRVLGEMSNQLSSVAKEIAGKWRCPQKNKRKIVPPLKQLRLDAWIHKSEETPCSLNGTGIENEPRFGTGYVPMSFVKYLRRDNLLQLAGKPSLSRNYILQTCRTLIIETSPPEFVKLNRLSGSDSGIIEVNLDRPVTKNAINKEMLKSLQNAFESIHQDNSARVVMIRSLVPGVFCAGADLKERRTMSPSEVHTYVNSLRYMFSFIEISCYCYPGKVNGQPKALSIPTIAAIEGAALGGGLEMALACDLRICGENAVFGLPETGLAIIPGAGGTQRLSRLVGRSVSKELIFTGRKIDAIEAANKGLVNICVTAGEAHEKAIEMAQQINEKGPLAIKMAKKAIDEGIETNMASGLEVEEMCYQKLLNTQDRLEGLAAFAEKRKPLYTGN

SEQ ID NO: 4193 - protein, 530 aa, Burkholderia xenovorans LB400
MLDANLKTQLKTYLEKVSRPIEIVASVDDSAKSQELLALLNDIATLSERVNVIERRGDAERKPSFSIGEPGKETGIRFAGIPMGHEFTSLVLALLQVGGHPLKLEDAVIEQIRNLDGDYQFETYFSLSCQNCPEVVQALNVMALINPRIRHVAIDGALFQNEVEARQIMAVPTMFLNGEVFGQGRSGVKEILAKLDTNAGARAAKELEKKPVFDTLIVGGGPAGAAAAIYSARKGIATGVVAERFGGQVLDTLAIENFVSVTETEGPKFATALEQHVKSYEVDIMDVQRAEALIPGRINEVRLANGAVLKAKTIILATGARWREINVPGEREYRNHGVAYCPHCDGPLFKGKRVAVIGGGNSGVEAAIDLAGIVREVTLFEFGATLRADEVLQRKLRSLANVTVVTQAQTTEITGDGKKVNGLVYKDLRSGEVKQVELEGVFVQIGLVPNTEWLKGTVELSKHGEIVVDARGATSVPGVFAAGDVTTVPFKQIVIAVGEGAKASLSAFDYLIRNSEEVEVVSEAEAEVAV

SEQ ID NO: 4194 - protein, 300 aa, Brucella melitensis 16M
MSILVNKDTKVLVQGLTGKTGTFHTEQALAYYGTQMVGGIHPKKGGETWEGSKGEKLPIFATVAEGKERTGADASVIYVPPAGAADAIIEAIEAEIGFIVCITEGIPVMDIVRVKERLERSKSRLLGPNCPGILTPEECKIGIMPGNIFKKGSVGVVSRSGTLTYEAVFQTSNEGLGQTTAVGIGGDPVKGTEFIDVLEMFLADDETKSIVMIGEIGGSAEEDAAQFLKDEAKRGRKKPMVGFIAGRTALAGRTMGHAGAVISGGKGGAEDKIAAMESAGIRVSPSPAQLGKTLVEVLKG

SEQ ID NO: 4195 - protein, 543 aa, Pseudomonas fluorescens PfO-1
MSGQGKFKKQLSLIDLTFIGLGAIFGSGWLFAASHVSAIAGPAGIFSWLLGGFAVLLLGIVYCELGAALPRAGGVVRYPVYSHGPLLGYLMGFITLIAFSSLVAIEVVASRQYAAAWFPSLTKAGSGDPTLLGWLVQFGLLCVFFLLNYRSVKTFAKANNLVSVFKFIVPLLVIGVLFTFFKPENFQIQGFAPFGLSGIEMAVSAGGVIFAYLGLTPIISVASEVKNPQRTIPIALILSVLLSTAIYVLLQTAFLGGIPTELLANGWAGVSKEFALPYRDIALALGVGWLAYLVVADAVISPSGCGNIYMNATPRVIYGWAQTGTFFKVFTHIDAKSGIPRPALWLTFALSVFWTLPFPSWEALINVVSAALVLSYAVAPVTVAALRRNAPDMPRPFRVKCMGVLGPVSFIIAALIVYWSGWNTVSWLLGLQILMFVVYLLCGRFVPTAQLSLSRQVRSSAWLIAFYAVTIVLSKLGTFGGLGILTHPFDTLVVAACAMGIYYWGAATGVPAHLLRLESEEDESEVASPSPASTANPRAAGAY

SEQ ID NO: 4196 - protein, 198 aa, Coccidioides immitis RS
MTSRLVLVIGDLFIPDRAPDLPAKFKKLLTPGKIGQILCLGNLTDRETFDFLRQIAPDLQLVKGDFDVDSPNLPLSKVITHGSLRIGFTHGHTIVPSGDADALLIAARQMDVDVLLWGGTHRFDAFEAEGRFFVNPGSATGAFTMDGGGEDVVPSFCLMDVQGDVLVLYVYQLRTDDQGTETVSVEKMSYRKPSVQAA

SEQ ID NO: 4197 - protein, 1023 aa, Neurospora crassa
MTRRDAEVKDRCDTGRESPSTDGTGKSIFHVKPPALAALRFLHLLHLALTCFASAATVTTPSLYRPIRGYRFQHLLSISHVPVQHFPEGIQSRIFVAATSGHTEQTQPGVFGCLQRLDHACLQGHAQPTRPDPTRTHHPDPPPTVHGSVKAPAVCNGIHSRRQNSEKTPLARGKDTDTHSDTLLHHGQAALETAIPRLPKPARQALPVSPWTVLMSGATAPRLQNVLSRPVLSSKRDAGRTSSHHLLKSLLLASRFAASTLVATTSSAGASRSTGTSSPDPGPTINKSQTNRNPSTYTSPPNSLSRTFSASNLLAWYRTLPSPYFNLSGHLDDLSSLIRPFLAFLDPSSLSSPYSMASTSYAFSTSSGSDFSTPRSSSPHSSASVASARSSHSSTFSAGKRLSMSSVRRTSASNPMSSVDLSTIEEALKMANLDTLKGYCQKTYGEVHQETTTEYISQEEARGYQVLNQPHWNKVADFRISPKGTSFTPEERVAKNLTGLIPHVMEDSEKQVERALKMIRTRQTDIDRYLYLSTIKSQNVDLFYRLLMDHAKEMMPLVYTPTIGDVCLQYSTLYTRPEALYISIKQRKSIRTILRNWPYPQPEICVVTDGSRILGLGDLGVNGVGIPIGKLALYTAAAGIHPDKTLPIVLDCGTANETNLKDPLYLGLRQKRIPVAEQQEFMDEFMEAAAEVFPDMVVQFEDFESEKAFNYLDRYRDQYKCFNDDIQGTGAVVLAGYIGAVNLSNVPIEEQRLVFMGAGSAGVGVAKQLVEYYTKRGLSEQQAKDKFWLVDTKGLVTKDRGDKLAEHKKYFARTDNNGHQFRTLEEVIEYVKPSALVGLTATHGVFTESVVRALKASVDAGGLGRRPILFPLSNPLTKAECTFKEAIDWTDGTVLFASGSPFSSYTTNGVTYHPNQGNNVYVFPGIGLGAILAKATRVTDDMIYTSAAALANSLNADEVKQGLIYPRIDRVREASVIVAREVMKSARREGVSTLPEEQWLEWEEWGDVDLERYIKQHIYDPKF

SEQ ID NO: 4198 - protein, 219 aa, Desulfovibrio desulfuricans G20
MSAKESLLTGTFEERVEAALDALRRGHGVLVTDDEDRENEGDLIFAAETLSDSQMAMLIRECSGIVCLCLTDEKVRALGLPMMVENNSSQYQTAFTVSIEASCGVSTGVSAADRVCTIQAAIADDACPSDLCRPGHVFPLRARPGGVLERRGHTEATVDLMRLAGLKPCGVLCEVTNPDGTMARLPQIVDFGRKHDMVVLTVDDLVRYREMKENKSAAA

SEQ ID NO: 4199 - protein, 493 aa, Mentha x piperita
MAALLVFFSVSLILLAVLFHKRKSSLSSRKRPPPSPLRLPVIGHFHLIGALSHRSFTSLSKRYGEVMLLHFGSAPVLVASSAAAAREIMKNQDVIFASRPRLSIFDRLMYSGKGVAFAPYGEHWRNARSMCMLQLLSAKRVQSFGGIREEETSAMIEKIRRSKPTTVVNLSEMFMALTNGVIHRAVLGRKGDGGDDFNRILIKVIKLLGSFNVGDYVPWLSWINRINGVDAEVEKVGTKLDGSMEGILRKYRRKKVGDDETNFVDTLLQFQRESKDTDPVEDDVIKALIFDMVSAGTDTTFAALEWTMAELIKNPRTLKTLQNEVREVSRNKGGITEDDVDKMPYLKAVSKEILRLHPPFAILLPRELTQDANMLGYDIPRGTVVLVNNWAISRDPSLWENPEEFRPERFLETSIDYKGLHFEMLPFGSGRRGCPGSTFAMALYELALSKLVNEFDFRLGNGDRAEDLDMTEAPGFVVHKKSPLLVLATPRQS

SEQ ID NO: 4200 - protein, 139 aa, Salmonella enterica subsp. enterica serovar Typhi str. CT18
MNTVCTHCQAINRIPGDRLQDAAKCGRCGHELFDGEVINATGETLDKLLKDDLPVVIDFWAPWCGPCRNFAPIFEDVAEERSGKVRFVKVNTEAERELSARFGIRSIPMIMIFKHGQVVDMLNGAVPKAPFDSWLNEAL

SEQ ID NO: 4201 - protein, 134 aa, Oryza sativa (japonica cultivar-group)
MASCALKPSPSPFLEQTRIRAIQPSSRPSLFRVMAKKAKKIQTSQPFGPGGGPNLKDGVDASGRPIKGKGVYQFASKYGANVDGYSPIYNPEEWSPSGDVYTGGKTGLLLWAVTLSGILLAGALLVYNTSALAS

SEQ ID NO: 4202 - protein, 561 aa, Cryptococcus neoformans var. neoformans JEC21
MSDIVTVKTKPYSGQKPGTSGLRKKVKIFQQEHYTENFVQAILSAMPGGPEGKTIVVGGDGRYFSPEATQIILRIGAANGIKHVILGQNAILSTPAGSALIRSLKTDGGILLTASHNPGGPDNDFGIKFNTPNGGPAPEDVTNAIHEIADSIQEYKQINLPDLDLSKIGEFTHGPLKVTIVDPVSNYIDLLKSIFDFDAIKNWLHNTTPRPTVLFDALNGVTGPYGRAIFVEELGLPESSIQNCVPSPDFGGGHPDPNLTYAHELVERVEKENIEFGAASDGDGDRNMIYGKGAFVTPSDSVAIIADWAEKAIPYFKSGIKGLARSMPTSGAIDIVAKERGLEVFEVPTGWKFFGNLMDAGRLSICGEESFGTGSDHIREKDGVWAIVAWLAILAAANKEKPGSGINDVLMQHWKKYGRSFFSRYDYEECESGPAEKMMSHLSDLFASSGFVGSSLKATSSDASFKVAEADNFSYTDPIDGSVSTNQGLYIKFEDGSRIIFRLSGTGSSGATIRLYVEKYSKDESEYGNDAQVGLKPLIEVALNISKLKEYTGREKPSVIT

SEQ ID NO: 4203 - protein, 346 aa, Haloferax volcanii
MATESRDYTEATETDRELTMSRAMVEAIAWEMRENEEVFYMGEDVADYGGIFSSTTGLLDEFGRDRVMDVPISETAYLGAAVGAAQAGMRPIAELMFVDFFGVAMDQIYNNMAKNTYMSGGSFSVPMVLTTAVGGTYNDAGQHSQTLYGTFAHLPGMKVVVPSTAYDAKGLMHTAIRDDDPVVYMFHKRLMGLGWMPSPSGPKTGVSEEDYAIPFGEADVKRPGDDVTVVTLGLHVHRAMEAAERLDDDGIDAEVIDLRTLVPLDTETVLDSVRKTGKLLVVDEDYRSFGVTGEIIARAAEGALDDLSAVKRLAIHDVPIPYARPLEDEVNPGTDDIAAAVRELHE

SEQ ID NO: 4204 - protein, 802 aa, Rhodobacter sphaeroides
QPVTGGAEALRIRWSKAPCRFCGTGCGVMVGTRDGQVVATHGDTQAEVNRGLNCVKGYFLSKIMYGEDRLTTPLLRMKDGVYHKEGEFAPVSWDEAFDVMAAQAKLVLKEKAPEAVGMFGSGQWTIWEGYAASKLMRAGFRSNNLDPNARHCMASAATAFMRTFGMDEPMGCYDDFEAADAFVLWGSNMAEMHPILWSRLTDRRLSHEHVRVAVLSTFTHRSSDLSDTPIIFRPGTDRAILNYIAHHIISTGRVNRDFVDRHTNFALGATDIGYGLRPEHQLQLAAKGAADAGAMTPTDFETFAALVSEYTLEKAAEISGVEPALLEELAELYADPDRKWMSLWTMGFNQHVRGVWANHMVYNLHLLTGKISEPGNSPFSLTGQPFACGTAREVGTFAHRLPADMVVTNPEHRAHAEEIWKLPAGLLPDWVGAHAVEQDRKLHDGEINFYWVQVNNNMQAAPNIDQETYPGYRNPENFIVVSDAYPTVTGRAADLVLPAAMWVEKEGAYGNAERRTHFWHQLVEAPGEARSDLWQLMEFSKRFTTDEVWPEEILSAAPAYRGKTLFEVLFANGSVDRFPASDVNPDHANHEAALFGFYPQKGLFEEYAAFGRGHGHDLAPFDTYHEVRGLHWPVVEGEETRWRYREGFDPYVKPGEGLRFYGKPDGRAVILGVPYEPPAESPDEEFGFWLVTGRVLEHWHSGSMTLRWPELYKAFPGAVCFMHPEDARSRGLNRGSEVRVISRRGEIRTRLETRGRNRMPRGVVFVPWFDASQLINKVTLDANDPISRQTDFKKCAVKIEAV

SEQ ID NO: 4205 - protein, 206 aa, Linum usitatissimum
GCTVRGTVRNPDDPKNSHLRELEGASERLTLCKADLLDYESLREAITGCQGVFHTASPVTGDPEQMVEPAVVGTKNVINAAAEAQVRRVVFTSSIGAVYMDPNRSPDVVVDESCWSDLEFCKNTKNWYCYGKMVAEQAAWETAKEKGVDVVAVNPVLVMGPLLQSTINASTIHILKYLTGSAKTYANSVQAYVDVRDVALAHIIVF

SEQ ID NO: 4206 - protein, 309 aa, Oceanicola granulosus HTCC2516
MIELGTQDQPQQPPATDLIKEGSDQTFMADVVEASQTVPVIVDFWAPWCGPCKTLGPALEAAVTKHKGAVKMVKVDVDRNQGVAGQLQVQSIPTVYAFWKGQPVDGFQGALPPSQIDEFVAKLAAMGPGAEGEDEGLGAAVEAAEAMLAEGAAADAAETFAAILQEDGENAEAYGGLVRAYLALGEVDQAEAILNGAPASITETAPLESARAAIELARQAENAGPVAELRAKVEADPADAQARYDLATALHASGDTAGAVDELLELFRRDREWNDGAAKAQLFTIFDALKPTDPVVLNGRRKLSSLIFS

SEQ ID NO: 4207 - protein, 482 aa, Arabidopsis thaliana
MAGLKIWQAIFITIALIIIVVLSVLSFCLIWKKKSRRSKTLSLPIIQTPVVSKEIKEVRIEHVVSTSSNFDPQDENNNESDKFLLNLEMEKNRENGLSSSRSGSGKEGYLCVANRSTSSLYEMATPSPSPLSGLPESHLGWGHWFTLRDLEIATNRFSKENVIGEGGYGVVYRGELVNGSLVAVKKILNHLGQAEKEFRVEVDAIGHVRHKNLVRLLGYCIEGTNRILVYEYMNNGNLEEWLHGAMKHHGYLTWEARMKVLTGTSKALAYLHEAIEPKVVHRDIKSSNILIDDRFNAKISDFGLAKLLGDGKSHVTTRVMGTFGYVAPEYANTGLLNEKSDVYSFGVLVLEAITGRDPVDYARPANEVNLVEWLKMMVGSKRLEEVIDPNIAVRPATRALKRVLLTALRCIDPDSEKRPKMSQVVRMLESEEYPVPREKSMQKLYKHKQEFNLQERRVRRTQEENSDTDRSRPVSRSQSKRL

SEQ ID NO: 4208 - protein, 520 aa, Lilium longiflorum
MSRHESRKLSDDYEVVDVLGKGGFSVVRRGISKSRGKNNDVAIKTLRRYGYTLPGAQRSQPGQRGLSPLGMPTLKQVSVSDALLTNEILVMRRIVEDVSPHPNVIHLHDVYEDANGVHLVLELCSGGELFDRIVAQDRYSESEAAEVVQQIASGLAALHKSTIIHRDLKPENCLFLNQEKRSTLKIMDFGLSSVEDFTDPIVALFGSIDYVSPEALSQRQVSSASDMWSLGVILYILLSGCPPFHAPSNREKQQRILAGDFSFEEHTWKTITSSAKDLISSLLSVDPYKRPTANDLLKHPWVIGDSAKQELIEPEVVSRLRSFNARRKLRAAAIASVLSSKVLLRTKKLKNLLGSHDMKSEELENLRAHFKRICANGDNATLPEFEEVLKAMKMNSLIPLAPRVFDLFDNNRDGTIDMREILCGLSNLRNSQGDDALQLCFQMYDADRSGCISKEELASMLRALPEDCVPADITEPGKLDEIFDQMDANSDGVVTFDEFKAAMQRDSSLQDVVLSSLRTI

SEQ ID NO: 4209 - protein, 302 aa, Gibberella zeae PH-1
MVLYNGFDSITDVPDLLGKVILVTGGTSGLGRSAITTLAAHNPSHIYFTGRSSSAAESLIKDISPIPSTFLECDLTSIANMHAAAKKFRHDRLDLFIANAGVMAVDGLTKDRLELQFGVNHVGNATLFMALLPIMLKTAEEPNSDVRFVSLTSLGYRGHPKNGIEFDTLQSKQEDMSFGTWGRYGQSKLANIVFAKEIQRRHPKITSVVVHPGVIATGLVTELSFWKRMFVYVTNPRMMTVEQGGLNTVWAATSGDVKKGDEKVAFYEPVGKGNAGDEMCFSQELGKKLWEWTEEKINSTKM

SEQ ID NO: 4210 - protein, 527 aa, Pisum sativum
MEYGTRKLSDVYEVSEILGRGGFSVVRKGTRKSNNDDEKSQSQSKSQSQSQVAIKTLRRLGTSNNLPRKKDGGENSTETMMKFPTMRQVSVSDALLTNEILVMRRIVENVSPHPNVIDLYDVYEDTNGVHLVLELCSGGELFDRIVAQDKYSETEASTVVHQIVAGLEAIHRANIIHRDLKPENCLFLDVGKDSSLKIMDFGLSSVEEFTDPVVGLFGSIDYVSPEALSQGKITTKSDMWSLGVILYILLSGYPPFIAQNNRQKQQMILNGNFSFYEKTWKGISQSAKNLISSLLTVDPAKRPSAQELLSDPWVKGEKAKDDQMDPEIVSRLQRFNARRKLRAAAIASVWSSTIFLRTKKLKSLVGSYDLKEDEIENLRMHFKKICADRDNATLCEFEEVLKAMKMPSLIPFAARIFDLFDNNRDGTVDMREILCGFSSLKNSKGEDALRLCFQMYDTDRSGCITKEEVASMLRALPYDCLPTDITEPGKLDEIFDLMDANSDGKVTFDEFKAAMQRDSSLQDVVLS

SEQ ID NO: 4211 - protein, 242 aa, Schizosaccharomyces pombe 972h-
MWSIFEARPKEAHSVNKIGWLRASVLGANDGILSLSGLLVGVVAANADIKVILITGVAGLMSGALSMAVGEYVSVSSQADLEDADLQLERREMDADWDAEVDELAAIYRGRGLDEELSRTVAVQLMEYNALEAHARDELGINIHTTAKPTLAALSSAASFSVGGIFPLLTSLITPLEYLSLVLPIATMFFLGMLGFVGAHIGGAKRVRAILRAVVLGLLAMAATALVGRLLEIHALSLQYAI

SEQ ID NO: 4212 - protein, 112 aa, Magnetococcus sp. MC-1
MKWIVAIIKPFKLDEVREALTSVGISGITVSEVRGFGRQKGHTELYRGAEYRVDFLPKLKVELAVDDSILEQAVEAIQKGAKTSKIGDGKIFVYDLESAVRIRTGESGPSAL

SEQ ID NO: 4213 - protein, 488 aa, Geobacillus kaustophilus HTA426
MAVQTEIKTYLNYIDGSWVGSVSKNVEPSINPANRNDIVGYVPRSTLEDLNAAVAAAKQAQKSWWKRSGIERGEYLYKAALLLEQRLEDIAETMTREMGKTLAEAKAETMRGVHILRYYAGEGARKIGDVIPSSDSGGLMFTTRVPLGVVGVISPWNFPVAIPIWKMAPALVYGNTVVLKPASETAVTAAKVIECFHEAGFPKGVVNMVCGSGSVIGQGIANHPDVDGVTFTGSNTVGKQVGRAAFERGAKYQLEMGGKNPVIVAKDADLDLAVEGTISGGLRSTGQKCTATSRVFIEREVYEPFKEKLLERVKQLKIGNGMDAETWMGPCASESQLNTVLSYIEKGKAEGAKLIYGGNRCTEGELANGFYVEPTIFEEVDLQMTIAREEIFGPVLVLIPVDSIEEAIELANDTEYGLSASIYTKNIGNILDFIKDIEAGLVKVNAETAGVEYQAPFGGMKQSSSHSREQGQAAIEFFTTIKTVFVKA

SEQ ID NO: 4214 - protein, 183 aa, Aspergillus nidulans FGSC A4
MASSTGAGWAQLRQQARSLETQTESLFHTYSQYASMTKLPPQPAEEEIRNEHQIRDLLEKRESLLAQLARLLDSEATLTSSALKQNNLARHREVLAEHKRELSRLTAAIAELRDRANLLSNVRSDINAYRSSNPAAAESEYMLEERRRIDESHGVIDGVLSQAARHFRALTGGLWALPAKSRG

SEQ ID NO: 4215 - protein, 170 aa, Arabidopsis thaliana
MAMRLKSMATLPKLIQSMRKEVPKHSNPVLPSLRRAFSLYDQINLIDNVPEDQLRFQEFNDTSFTVNGVKYEGSLLCVGNLLMSWSPRKFSEITTDSLSIFLTVRPIPELLIVGCGRDIHPVTPEVRQFVKSLGMKLETVDSRNAASTYNILNEEGRVVAAALLPYGVTS

SEQ ID NO: 4216 - protein, 234 aa, Methanocaldococcus jannaschii
MIKIGASILSADFGHLREEIKKAEEAGVDFFHVDMMDGHFVPNISMGIGIAKHVKKLTELPVEVHLMVENVDLFVNEFEEMDYITFHIEAVKFPFRIINRIKSIGAKPIVALNPATPLDAIEYILGDVYAVLVMTVEPGFSGQKFIPVMTKKIRKLKSMIVENGYDTKIFVDGGINVETAPLAVKAGADVLVAASAIFGKDDVKTAVKNLREAALEALNKDFLTKSFNSNEEKQ

SEQ ID NO: 4217 - protein, 161 aa, Lactobacillus plantarum WCFS1
MAESVYDFTETEMSGAPLDLSQYRGQVLLIVNTASNCGLAPQFKGLEELYQKYQQEGLVVLGLPSNQFHQEKADDDETHDYCQRHYGVTFPMTKRVMVNGDDADPLFTYLKQAAGHGRIKWNFTKFLIGRDGRVLERYAPTTRPATFEAAIRDALADRSED

SEQ ID NO: 4218 - protein, 101 aa, Zea mays
MAAPKLAMSCSTVYSTLMPCLPFVQMGGAMPPQPCCGGIRSLLQQANNTPDRRTICGCLKNVANGANGSGTYISCAAALPSKCGVALPYKISTNVNCNTIN

SEQ ID NO: 4219 - protein, 331 aa, Aspergillus nidulans FGSC A4
MQSVLQPIIGPKKTAEDLSGRVAIITGGAFGIGYEISRTFVQNGARVIMVNRKEDQGQEAIDKIKEEAGSDAKIEWVPCDMGNLAQIREVASRFVEKEERLDLLILSAGINVHQYGETHDKIERHFQVNWLGQFYLTNLLWPLLRKTAKLPDTPAPRVVFESSEQHRAAPSGVKFGSLEEINNPDLGPLERYGRTKLAIILGVKYGLLEKVIKPNGDNIYALSVHPGAVNTAMQQQWKDAYPGLFGKLLTTVMLAAGRNVEQGSYSALYAAISPEVEEKGWNGYYLKDVGQPGKESSLASDSVLGAALWDLSHRMIRDILGNDAVADWASA

SEQ ID NO: 4220 - protein, 1034 aa, Flaveria anomala
MERARRLAMLGRLVSQTKHNPSISSPALCSPSRYVSSLSPYVCGGTNVRSDRNLNGFGSQVRTISVEALKPSDTFPRRHNSATPEEQTKMAEFVGFSNLDSLIDATVPKSIRLDSMKYSKFDEGLTESQMIAHMQDLASKNKIFKSFIGMGYYNTSVPTVILRNIMENPGWYTQYTPYQAEIAQGRLESLLNFQTMITDLTGLPMSNASLLDEGTAAAEAMAMCNNIQKGKKKTFIIASNCHPQTIDICKTRADGFDLKVVTSDLKDFDYSSGDVCGVLVQYPGTEGELLDYSEFIKNAHANGVKVVMASDLLALTILKPPGELGADIVVGSAQRFGVPMGYGGPHAAFLATSQEYKRMMPGRIIGVSVDSSGKPALRMAMQTREQHIRRDKATSNICTAQALLANMAAMYGVYHGPEGLKTIAKRVHGLAGTFAAGLKKLGTVQVQDLPFFDTVKVTCADSKAIAEEACKHKMNLRIVDKNTITVAFDETTTIEDVDTLFKVFALGKPVPFTAASIAPEVQDAIPSGLVRETPYLTHPIFNMYHTEHELLRYISKLQSKDLSLCHSMIPLGSCTMKLNATTEMMPVTWPAFADIHPFAPTEQAQGYQEMFKNLGDLLCTITGFDSFSLQPNAGAAGEYAGLMVIRAYHMARGDHHRNVCIIPVSAHGTNPASAAMCGMKIITVGTDSKGNINIEELRKAAEANKENLSALMVTYPSTHGVYEEGIDEICKIIHDNGGQVYMDGANMNAQVGLTSPGWIGADVCHLNLHKTFCIPHGGGGPGMGPIGVKKHLAPYLPSHPVVPTGGIPAPEESQPLGTIAAAPWGSALILPISYTYIAMMGSQGITNASKIAILNANYMAKRLENHYPILFRGVNGTVAHEFIVDLRPLKTTAGIEPEDVAKRLIDYGFHGPTMSWPVPGTLMIEPTESESKAELDRFCDALISIRQEIAEIEKGNVDFNNNVIKGAPHPPQLLMADKWTKPYSREYAAYPAPWLRAAKFWPTTCRVDNVYGDRNLICTLQPPQEYEEKAEATA

SEQ ID NO: 4221 - protein, 139 aa, Astragalus membranaceus var. mongholicus
TAIGVYLEENAIASLAPKWKGKTPAELIQSLDFYRDIIKGPFEKLVRGSKLKKLDGNEYVRKVSENCASFIKSEGIHSEAEEKAIEEFREAFKDRVFPPGSTVFYRQSPAGELGLSFSKDETVPEHEHAVINNKAPSDA

SEQ ID NO: 4222 - protein, 133 aa, Boea crassifolia
MEPYGNHQIGDQLRKTDEYGNPVHHTPGGEYGGPHVGAEHHHGAPISIPPTTDVPHHRRSGSSSSSSSEDDGQGGRRKKGIKDKVKEKLPGGHKDNQPHHEAGYGGGYGAQPEPEKKGMMDKIKEKLPGGHRN

SEQ ID NO: 4223 - protein, 579 aa, Lactobacillus plantarum WCFS1
MAKISGSDAVLKVIQKWGVKHIYGLPGGSFDSTMNAIYNQRKTLKYIQVRHEEAGAIAASADYKLTGKIGVCFGSAGPGAVHLLNGLYDAKEDGIPMLAIVAQVPTKRMNMDFFQAMNEEPIFDDVAVWNRTAMTAESLPMMTDEAIRQAYAHNGVAVLTIPKDFGWAEIEDNFETNASVHTVNYPAPTAESVADAVKLIKAAKSPMIYFGVGAKDAAEELKAASEKFKMPLVSSVLAKGIIEDDYPAYLGSTGRVAPKPGAEIGFSTDLILWVGNNVPFSIFLFNKKAKVIQIDIDSEKFGKRHHTNVAIQADAKKALAAINAAGEARDDSAFYDAAVADKKNWDKWQASFNDSTESPVRPEPIFDVLNQEASDKAVWAIDVGNVNINFERLIRMHDDQKWATSGIYATMGFGVPAALAAKVNYPDRDVYSLSGDGAFAMLSEEILAQVKYNLHIINIVFSNETLGFIEAEQTDDSHQPLSGVDLPDTDWAKVGEGYGAVGYTVRTKAEFKQALEDAKKTDKPVVIDVKLTHAMPFTTEHMYLDDAWQDKDKIAEFVKKYDAQALKPFSYFLKQAQTN

SEQ ID NO: 4224 - protein, 369 aa, Dendrobium crumenatum
MACSPIGFEGYEKRLEITFSEAPLFVDPHGHGLRALTRPQIDSILEPAKCTIVSQLSNKHFDSYVLSESSLFVYPCKMILKTCGTTRLLLSIPVILDLAAELSLSVTAVKYSRGSFIFPGAQPAPHRSFSEEVAVLNQFFGGLGSGGNAYVIGNPAHPNLNWHVYYASEKPEQPMVTIEMCMTGLNTEKASIFFKNSVPRHESSAKEMTKRSGICDIIPEMKICDFEFDPCGYSMNGINKQALSTIHVTPEDGFSYASYEAMGFKPSAISYRNLIERVLRCFEPANFSVAVTIFGGRPFACSYGQKVSVNGYNCKNLVQQDLSGGGLLLYQSFKASSDGSASPRSILYCWEAEAEDEEENGVKCKKKLF

SEQ ID NO: 4225 - protein, 498 aa, Yersinia pestis biovar Medievalis str. 91001
MSEYHEKNNALFKSITALDGALFINGEFRKGAGGRLPVENPATGKVIGHLAAATPEEIEEAVAAARRAFPAWAAERPKARANALHRLGDLIAGDALNMARNMTIEQGKPVNEAQGEILKLAEICHFYGEEATRVQGDVVPNDPPGFQSLVVREPVGVVGAITPWNYPAELVGWKLCASLAAGCTLIIKPAELTPYTALAIAEKCLEAGIPAGVVNVLTGKGEQVGQALVEHPQVDKIAFTGSSAVGLHIQQSCPQVKRLSLELGGNGPMVVTACADVAAAVKGAVRRSFRNCGQVCIAINRIYVHRSCYRAFVSKMGVATNGLRLGNGLDDPAADLGAMASVEPLNKTRAHLEDALAKGARLVAGGKAPEGVEYAKGHFFRPTVLADCTHQMRVMTEETFGPLVGLAPFDDIDEVISRANDTPYGLAAYVYARDLAAIHRLSAALDYGNVAINNVDASMMNAPYGGRKQSGVGYEHGREGLLEYFNFKHIRLYHGIGD

SEQ ID NO: 4226 - protein, 587 aa, Lactobacillus plantarum WCFS1
MMTKMIAGQALVKVLEAWGVDHIYGIPGGSINHTVEGLYLEKADIDYIQVRHEEVGALAASADAKFTGKIGVSFGSAGPGATHLFNGLYDAKMDHVPVLALVGQVPQATMNTNYFQEMDETPMFSDVAVYDRTVTTAGQLPYVINQAIREAYRQKGPAVVIIPENLSAEEIDYQPVSTPNTVSDTFEQRVDPQAITATLKMLKAAKHPLVYAGRGLLGAKADLVKFSEQFNIPVMNTVPATGVIPTNHPNAIGTFGRLGSKSGFEALQHADLILFLGSEFPFASFWPKGIKIIQVNNNSFDIGKMVPIDYAVISDAQAYLQAMIATGETLPETAWLTTNRQNKRNWDKWLQQLAADDHDGLAPEAVMHKVASMVGPRDTYGVDTGNVSEWAVRGLPMDQEQRFALSGLFATMGFGLPAGMAGALSVPDSQAWSFSGDGGFAMVAPDIITEARYGLPVINVIFSNQRFGFIYREQVDTKQHLYGVDLTDADWAKVADGLGGIGFTVQNNQEVETVFDQIKALQAKGNKRPIVVNAVIKNDDPIGTAYMPLDPELYGQAEVDAYAKANHIDIKEQPSLGALLRAQGDQL

SEQ ID NO: 4227 - protein, 187 aa, Triticum aestivum
MSTSSGAKEAPANNPGLQAEADPATKGYIMQQTMFRVKDPKVSLDFYSRVMGMSLLKRLDFAEMKFSLYFLGYEDLSAAPADPVQRTGWTFGQKATIELTHNWGTESDPEFKGYHNGNSDPRGFGHIGVTVDDVYKACERFERLGVEFVKKPDDGKMKGIAFIKDPDGYWIEIFDLKRIGEVTATAS

SEQ ID NO: 4228 - protein, 126 aa, Clostridium perfringens str. 13
MASKMLHTCIRVKDLDKSLKFYKEALGLVETRRRDYPEYKFSLVYLSDKEDGYEVELTYNYDQEKPYNLGNGFSHIAVGVEDIEAERERHISLGYEVTPMKGLSDGAATYYFVTDPDGYKVEVIKL

SEQ ID NO: 4229 - protein, 186 aa, Arabidopsis thaliana
MAEVMLPRKMEILNHSSKFGSPDPLHVLAVDDSHVDRKFIERLLRVSSCKVTVVDSATRALQYLGLDVEEKSVGFEDLKVNLIMTDYSMPGMTGYELLKKIKESSAFREVPVVIMSSENILPRIDRCLEEGAEDFLLKPVKLSDVKRLRDSLMKVEDLSFTKSIQKRELETENVYPVHSQLKRAKI

SEQ ID NO: 4230 - protein, 384 aa, Raphanus sativus
NRTLVSPGTHFELGFFRTISRWYLGIWYKKLSERTYVWVANRAHPLSNSIGTLKISGNKLVNLGQSNKSVWWTNITRGNESSPVVAESSANGNFVMRDSNNNKSSEYFWQSFDYPTDTLLPEMKLGYDLRKGLNRFLASWRSSDDPSSGDPLYKLETRRIPEFYLHGIFPMHRQALWNGIRFSGIPEDQKLSYVVYNFTENREEVAYTFRMTNNNNPYSRLTLSYSGYIERHTWNPSLGIWNRWFWSFPLDSQCDVYRMCGPYPYCDVNTSPICNCIQGFNPSNVEQWDLKSWSGRCIRRTRLSCSRDGFTRMKNMTLPETTMAIVDRSIGVKECEKRCLSDCNCTAFANADINGGTGCVIVTGELEDIRNYAAHGHDLYVRLA

SEQ ID NO: 4231 - protein, 791 aa, Oryza sativa (japonica cultivar-group)
MGKTQKFSKGHPLGFVPDYRHGVETVGESKGCIGSPERIVSGSSCAVPKRKCGILKTEDGGELPGFNVPRDVFMLPRMSPSDKKDLEMRLRKELEQVKALQSRLFLRPAAVSMNGGAASASGDVVAKRNDAKLKRSNSVQSGRGVPPSAATPVVRSANYAEAFKQCGNLLKNLFKHQWAGPFLAPVDVVQLNIPDYFDIIKKPMDLGTIEKKLNAGMYSTPWDFAADVRLTFDNAVTYNPVGNDVNLMGKTLKCIFETRWKFIEKKLPSLDDKFSVRREPSQKGAVKKDTIEKDYPSEKKHSTKGVHKKDMFKKEDASTKPALQPKKRKASPLVQGSLEIPVVEADKVIDDAQVVQPSKVIDDAQVVQAFKVIDDAQVVQASKEIMTDRQKYELSVRLQSYGGLIPNHVVDFIRSHLPDDNEGDEDELELDMNVLSDSTLFELQKLLDDYDRVNQSGNPTKDEHREVEFESEYGLSNSSMHHEEGNELVEEDVDIGGNDLPPLTYPPAVFESETAERSSKHSTSSSSSSDSESSSSDSDSSSSSGSDLDVNVPPSTSGAKDNTQSAVRLDQENDPLSSTNLPQQSSDPVPISAEDEGENVSEKQVPPAKQYRAAVLLNRFADTIFKAREKTLDQVAKKDPEKLQHDMEELERLRREERARIQAEAKAAEDARKRAEAAAAAEAAAEAKRQREREREAARKALQQMEKTVDINEGNLFLKDLEMLGTVTSGEQFPSSVGETSPTHTPEGLGFQLGSNPLEQLGLYMKNDDEEDEEGESADEPTIDVEEGEID

SEQ ID NO: 4232 - protein, 232 aa, Triticum aestivum
  misc_feature (200)..(200): Xaa can be any naturally occurring amino acid
MAVSELEVDGVVFPPLARPPGSEHAHFLAGAGVRGMEIGGNFIKFTAIGVYLQADAAVPALAAKWAAKPAADLASDAAFFRDVVTGEFEKFTRVTMILPLTGAQYSDKVTENCVAYWKATGVYTDAEAAAVDKFKEAFGPHSFAPGASILFTHSPAGLLTVAFSKDSSVPESGGVAIDNARLCEAVLESIIGEHGVSPAXAKLSLATRVAELLKGASHAGGEPAAEPVSVSV

SEQ ID NO: 4233 - protein, 599 aa, Ashbya gossypii ATCC 10895
MPSAGELEQQPLRGSPSSNVQYISIPIERQSSVTAEAGGHAAAGTPGAHRGSFLDQPLGSFRGVNSLGRFASSFHRSNSFKAIELNAGKERAFLKDGYDELYDPDTLGPSLDGRRLSIAINAPGTVSVRPPASDFYGSVGGGGWRDSTAVVDEDEQSTRLMRVLSNQSLTFVDVNNAAGPDADSIMLKRVETKTGKVVTVLAGQSTAPQTIFNSVNVLIGIGLLALPLGLRYAGWALGIPMLLVFAAGTFCSAELLSRCIDADPSMISYGDLGYAAFGSKGRALISVLFTLDLLGCGVSLIILFGDSLNALFPQYSVTQFKILSFFAVTPQVFLPLSVLSNFSLLGITATLGTVLTILYCGLTKTQSPGSLLDPAPTRVWPASFLEFCLSIGILSACWGGHAVFPNLKSDMRHPSKFKDCLRTTYAITSLTDIGTATVGFLMFGVAVKDEVTRSVMLSDGYPPFVYVLISALMAIIPLAKTPLNARPIISILDVMMGIRNAETELEGHKLFVARALKLTNRLLINVMFVIIAILFPEFDKLIAFLGAGLCFMICLILPCLFYLRICKDRVTPRERMACYATIAVSAVLSVLGVGAAILS

SEQ ID NO: 4234 - protein, 525 aa, Synechococcus sp. WH 5701
MVCRQAGTCSNPGQPDCCYELLNPAAPMASAPLPLEPSPIRFGTDGWRGILGVDVTLERLLVVAAAAARELERAAPAELTSREVVIGYDRRFLAPELAEAIASAVRGADLEPLLTDSAVPTPACSWAVVERRALGALVITASHNPPEWIGLKIKGHFGGSVEEAFTAAVEKRLEAGGITVPIPGDTPRFDGWDGYLKGLRQLVDTSALRRGLETIGLRVIVDPMHGSAAGGLPALLGGSSGTSEGAADGSGEGCIEEIRSWRDPLFGGHPPEPLAPYLQELIAAVRASGEAGRPAVGIVFDGDGDRIAAIDERGRYCSTQLLMPLLIDHLARARALPGAVVKTVSGSDLMQLVAEGLGRPVIEKPVGFKYIASEMIAGGVLVGGEESGGVGFGLHLPERDALFAALLVLEALVEGGLPLGERLDRLQVAHGGASAYDRLDLRLKDMASRERLERQLAQEPPTSVAGWPVQEVVSTDGVKLRLGDSHWLMLRFSGTEPLLRLYSEAPSGERVSEILAWARQFAEAA

SEQ ID NO: 4235 - protein, 111 aa, Triticum aestivum
  misc_feature (18)..(18): Xaa can be any naturally occurring amino acid
  misc_feature (50)..(50): Xaa can be any naturally occurring amino acid
  misc_feature (78)..(78): Xaa can be any naturally occurring amino acid
LLRDWYGPPGGKPRRSCXDGGGRWLGILGEPVQQAQNNGGCILVNGCIRXVDETTVGIGVRALSSHPMKANKKGMGEXHVPVNIAGTRICDGEWLYADPDGILVSRTELTV

SEQ ID NO: 4236 - protein, 892 aa, Aspergillus nidulans FGSC A4
MADNVSASTSSTHAPPQPSTAASNQQYDASQGNGQTNPSHMPPPPRPPVIIPQNTNPIPTAITTPMSGNMVSPTSAGGYVRRAAPEPNKRALYVGGLDPRVTEDILKQIFETTGHVISVKIIPDKNQFNSKGANYGFVEFDDPGAAERAMQTLNGRRIHQSEIRVNWAYQSNTANKEDTSNHFHIFVGDLSNEVNDEVLLQAFSAFGSVSEARVMWDMKTGRSRGYGFVAFRERADAEKALTSMDGEWLGSRAIRCNWANQKGQPSISQQQAMAAMGMTPTTPFGHHHFPTHGIQSYDMVVQQTPAWQTTCYVGNLTPYTTQNDIVPLFQNFGYVIETRMQADRGFAFIKMDTHENAASAICQLNGYNVNGRPLKCSWGKDRPPTGQFDNFPGQQANSPFASSPGPYFPQYGGPGGPMTPQGPAQAGRGWEQPQMAQQGFGQVPGNTGYGRGQATPNSGWNQGNNANFGNGFAGGYQACGWTRRHVIRATWSMEDAIDRKATAPSSDNEGQPSGRTRSGSANSGHKRSSSGSLLSRLSFLRMMQASQNPSGRGHSSLEADDDRDDLGSGLRGGRPISTAPQHRRTRRRRGSLRKTALLGTRFDYRDKKAGRQGVDVRGENADQHQVQSRAQQQQLTPPPIPTHTRMKSFGDPATSSDGFIHSQPSSREGLGGRSTSTSSWTLMDAPQRSRKLSASTPQHIQSIRSKENKLRDDVTTDDEDIVPFPSKNAGTAPSAFHSSSNTSSNSGAAGLHLPTPPSSTDSYYSLQPDQKYRAAHRAKSPLATHAVDITGSQEAMSWDYSETEWWGWIILIVTWLVFVVGMGSCFGVWSWAWDVGETPYAPPELEDDPTLPIVGYYPALIVLTAVMSWVWVIIAWVGMKYFKHANITGDDT

SEQ ID NO: 4237 - protein, 367 aa, Brassica napus
MSRRSLTLLKNLARNSNASCIQTRSVTYMPRPGDGSPRAVTLIPGDGIGPLVTNAVEQVMEAMHAPIYFEKYDVQGEMSRVPAEVMESIRKNKVCLKGGLKTPVGGGVSSLNVQLRKELDLFASLVNCFNLPGLPTRHENVDIVVIRENTEGEYAGLEHEVVPGVVESLKVITKFCSERIAKYAFEYAYLNNRKKVTAVHKANIMKLADGLFLESCREVAKKYPGITYNEIIVDNCCMQLVAKPEQFDVMVTPNLYGNLVANTAAGIAGGTGVMPGGNVGADHAVFEQGASAGNVGKDSIVRKNKANPVALLLSSAMMLRHLQFPSFADRLETAVKKVISEGKCRTKDLGGQSTTQEVVDAVIAKLE

SEQ ID NO: 4238 - protein, 778 aa, Photobacterium profundum SS9
MRFSLLLALALVALAVVVQIGVTLVLQGEVHNIDIVRSVFFGLLITPWAVYFLSVVVDQLEDSRQRLSKLVSKLEEMRSRDMQLNTQLQMNITQLNQEIEEREKAEEAREIAMHDLENEVYQRENAQLELAEQSALLKSFLDASPDLIYYRNEKGEFSGCNRAMAELTGKTEKGLVGLTPWDVYSEEAAIKIVETDEQVFQKNVSLTYEQWLEYPDGRKAVFELRKVPFYRRDGRRLGLMGFGRDITERKQYQDAQEKASRDKTAFISTISHELRTPLNGIVGLSRMLLETPLNDEQRGYMRTVHVSAITLGNIFNDIIDMDKSDRRRLELMPKPLDFNEFVTEMENISSLMAEQKGLRFDLERLTKLPAFIEVDSTRLRQVLWNLIGNATKFTKEGGVILSVSSEIFEHEAEITFDVEDSGIGIPASEVDKIFTMYYQVKQGSDNLHAVGTGIGLAVSRQLVQLMGGNILVTSDIGEGSTFTVTIRVPLVEAVVEEEIMPVVPQASLSILMVEDIELNITVAKALLESLGHEVTVAMRGDEALAMFDPEAFDLVLLDIQLPDMTGFDVAQALRKKYDYLPALVALTANVISDKNEYIEKGMDEALSKPLSVKAITDVIQRLVLTCPLDDFDDDEEIETIEPISDTQPAVVVEHSNNEMFNQLLDLEMLESYVEIVGTKPVHESIAMFEKMMPDYIAILDSNMTAKDKDGIKFEAHKIKGAAGSIGLKHIQQVAQKAQSPELPAWWENINDWVDEIKNGYAHDLNVLREWVAEQEKAK

SEQ ID NO: 4239 - protein, 1034 aa, Flaveria trinervia
MERARRLAMLGRLVSQTKHNPSISSSALCSPSRYVSSLSPYVCSGTNVRSDRNLNGFGSQVRTISVEALKPSDTFPRRHNSATPEEQTKMAEFVGFSNLDSLIDATVPKAIRLDSMKYSKFDEGLTESQMIAHMQDLASKNKIFKSFIGMGYYNTSVPTVILRNIMENPGWYTQYTPYQAEIAQGRLESLLNFQTMITDLTGLPMSNASLLDEGTAAAEAMAMCNNIQKGKKKTFIIASNCHPQTIDICKTRADGFDLKVVTSDLKDFDYSSGDVCGVLVQYPGTEGELLDYSEFIKNAHANGVKVVMASDLLALTILKPPGELGADIVVGSAQRFGVPMGYGGPHAAFLATSQEYKRMMPGRIIGVSVDSSGKPALRMAMQTREQHIRRDKATSNICTAQALLANMAAMYGVYHGPEGLKTIAKRVHGLAGTFAAGLKKLGTVQVQDLPFFDTVKVTCADSKAIAEEAYKHKMNLRIVDKNTITVAFDETTTIEDVDTLFKVFALGKPVTFTAASIAPEVQDAIPSGLVRETPYLTHPIFNMYHTEHELLRYISKLQSKDLSLCHSMIPLGSCTMKLNATTEMMPVTWPAFADIHPFAPTEQAQGYQEMFKNLGDLLCTITGFDSFSLQPNAGAAGEYAGLMVIQAYHMARGDHHRKVCIIPVSAHGTNPASAAMCGMKIITVGTDSKGNINIEELRKAAEANKENLSALMVTYPSTHGVYEEGIDEICKIIHDNGGQVYMDGANMNAQVGLTSPGWIGADVCHLNLHKTFCIPHGGGGPGMGPIGVKKHLAPYLPSHPVVPTGGIPAPEQSQPLGTIAAAPWGSALILPISYTYIAMMGSQGITNASKIAILNANYMAKRLENHYPILFRGVNGTVAHEFIVDLRPLKTTAGIEPEDVAKRLIDYGFHGPTMSWPVPGTLMIEPTESESKAELDRFCDALISIRQEIAEIEKGTVDFNNNVIKGAPHPPQLLMADKWTKPYSREYAAYPAPWLRAAKFWPTTCRVDNVYGDRNLICTLQPPQEYEEKAEATA

SEQ ID NO: 4240 - protein, 367 aa, Brassica napus
MSRRSLTLLKNLARNSNASCIQTRSVTYMPRPGDGSPRAVTLIPGDGIGPLVTNAVEQVMEAMHAPIYFEKYDVQGEMSRVPAEVMESIRKNKVCLKGGLKTPVGGGVSSLNVQLRKELDLFASLVNCFNLPGLPTRHENVDIVVIRENTEGEYAGLEHEVVPGVVESLKVITKFCSERIAKYAFEYAYLNNRKKVTAVHKANIMKLADGLFLESCREVAKKYPGITYNEIIVDNCCMQLVAKPEQFDVMVTPNLYGNLVANTAAGIAGGTGVMPGGNVGADHAVFEQGASAGNVGKDSIVRENKANPVALLLSSAMMLRHLQFPSFADRLETAVKKVISEGKCRTKDLGGQSTTQEVVDAVIAKLE

SEQ ID NO: 4241 - protein, 411 aa, Vitis vinifera
MNALAATNRNFRHASRILGLDSKLEKSLLIPFREIKVECTIPKDDGSLATYVGFRVQHDNARGPMKGGIRYHPEVDPDEVNALAQLMTWKTAVVDIPYGGAKGGIGCTPKDLSMSELERLTRVFTQKIHDLIGTHTDVPAPDMGTNAQTMAWILDEYSKFHGHSPAVVTGKPIALGGSLGREAATGRGVVFATEALLAQHGKSIKGLTFVIQGFGNVGSWVARLIGERGGKIIAVSDVTGAVKNQNGLDIVDLLRHKEETGCLTNFSGGDHMDPNELLTHECDVLIPCALGGVLNKENAADVKAKFIIEAANHPTDPEADEILSKKGGVILPDIYANAGGVTVSYFEWVQNIQGFMWEEEKVNNELQKYMTKAFHNIKAMCQSHNCSLRMGAFTLAVNRVACATTLRGWEA

SEQ ID NO: 4242 - protein, 518 aa, Funaria hygrometrica
RSSTKKSRKERRPNPFAQDGYHGNLQILKNQPKARILDKYVLGRELGRGEFGITYLCTDKETQEIFACKSISKKKLRTAVDVEDVRREVAIMKHLPEHPHVVTLKGAYEDDNAVHLVMELCEGGELFDRIIARGHYTERGAAQVTRTIVEVVQACHRQGVMHRDLKPENFLFANKNENSPLKAIDFGLSVFFKPGEKFSEIVGSPYYMAPEVLKRNYGPEVDVWSAGVILYILLCGVPPFWAETEQGVAQAILRGILDFKRDPWPKVSDSAKSLVRHMLEPDPKARYIAQQVLDHPWLQNAKKNPNVPLDAVRSRLKQFSAMNKLKKRALQVIAEHLGGEEIDGLKEMFEKLDSDNTGAITFEKLKMGLIEIGSQLTEHEVRLLMEAADVDGNGTLDYGEFVAATVHLQRLDDDEHLRRAFDVFDVNESGFIEVEELREAVGQSLMGSPSESDVVQAILSEVDLDKDGRISYEEFAVMMRRGTDWRKASRQYSRDRFNSLSMRLLRDGSLNPPSYSMR

SEQ ID NO: 4243 - protein, 174 aa, Enterococcus faecium
LYLGNRHARVEGETYYEFIDQFVQSATELFPELLLHWEDFGRGNAAAILEKYEDQITTFNDDIQGTGIVVLAGVLGGLNISGEQLKDQIILTFGAGTAGVGIANILLDEMIRQGVPEEEARQHFYQVDKQGLLFEDTEGLTPGQIPFARKRSEFINADELTNLEAVVKAIHPTI

SEQ ID NO: 4244 - protein, 1035 aa, Solanum tuberosum
MERARKLANRAILKRLVSQSKQSRSNEIPSSSLYRPSRYVSSLSPYTFQARNNAKSFNTQQARSISVEALKPSDTFPRRHNSATPEEQTKMAEFCGFQSLDALIDATVPQSIRSESMKLPKFDSGLTESQMIEHMQNLASKNKVFKSYIGMGYYNTYVPPVILRNLLENPAWYTQYTPYQAEISQGRLESLLNYQTMITDLTGLPMSNASLLDEGTAAAEAMAMCNNILKGKKKTFLIASNCHPQTIDICKTRADGFDLKVVTVDLKDIDYKSGDVCGVLVQYPGTEGEILDYGEFIKNAHAHGVKVVMASDLLALTMLKPPGELGADIVVGSAQRFGVPMGYGGPHAAFLATSQEYKRMMPGRIIGLSVDSTGKPALRMAMQTREQHIRRDKATSNICTAQALLANMAAMYAVYHGPEGLKTIGQRVHGLAGTFSAGLKKLGTVEVQDLPFFDTVKVKCSDAKAIADVANKNDINLRIVDNNTITVSFDETTTLEDVDDLFKVFALGKPVPFTAQSIAQEVENLIPSGLTRETPFLTHQIFNSYHTEHELLRYLHKLQSKDLSLCHSMIPLGSCTMKLNATTEMMPVTWPSFANIHPFAPTEQAAGYQEMFDDLGALLCTITGFDSFSLQPNAGAAGEYAGLMVIRAYHMSRGDHHRNVCIIPVSAHGTNPASAAMCGMKIVAVGTDAKGNINIEELRKAAEANKDNLAALMVTYPSTHGVYEEGIDEICKIIHDNGGQVYMDGANMNAQVGLTSPGFIGADVCHLNLHKTFCIPHGGGGPGMGPIGVKKHLAPYLPSHPVVPTGGIPSPDKSEPLGAISAAPWGSALILPISYTYIAMMGSKGLTDASKIAILSANYMAKRLEKHYPVLFRGVNGTCAHEFIIDLRGFKNTAGIEPEDVAKRLIDYGFHGPTMSWPVPGTLMIEPTESESKAELDRFCDALISIREEIAQIEKGNVDINNNVLKGAPHPPSMLMADAWTKPYSREYAAYPAPWLRSAKFWPTTGRVDNVYGDRNLICTLLPVSEMAEEKAATA

SEQ ID NO: 4245 - protein, 388 aa, Candidatus Phlomobacter fragariae
VAIPKANGYQSLHTSMIGPHGVPIEVQIRTEDMDQMAEMGVAAHWAYKEQGESSTTTQIRAQRWMQSLLELQQSAGNSFEFIESVKSDLFPDEIYVFTPEGRIVELPTGATPVDFAYTVHTYIGHACVGARVDRQPFPLSQSLSTGQTIEIITAPGAMPNAAWLNFVVSSKARAKIRQLLKNLKREDSVSLGRRLLNHALGKGKKLGDIPQENINKELARMKLHSVDDLLAEVGLGNTMSVVVAHNLLGNASINNVITDNSDNRSKLPIKGAEGVLITFAKCCRPIPGDPIVAHISPGKGLVIHHESCRNIRGYQKEPEKFMQVEWDEGVNNNFIAEIKVDMINHQGALANLTAAINSANSSIQSMNTEEKDGRVYCAFIRLTAKDRN

SEQ ID NO: 4246 - protein, 163 aa, Photobacterium profundum SS9
MNDLLPDLCDHYEQDVRWLPLVLNDYGGKKIFYGEVVTLRCFEDNSLVRDIVSQDGTGKVLFIDGHASYNGALLGDQLALLAVKNGWQGIVINGTARDVGTLATLDLGVKALGTCPYKTVKRQTGDMNVTMTVAHTMIYPGDYLYADLNGILLSKQSLDLSVL

SEQ ID NO: 4247 - protein, 337 aa, Rubrobacter xylanophilus DSM 9941
MGREGLPLEDEGWYRENGVRLLLSTRAAALDPARRTVRVAGGEEIPYESCVLATGAEPARLSVPGADDPGIALMRRVPDADRLRGWTSPGSRVAVVGSGFIGCEAAASLALRGRRVTVVSMEELPQARRLGEEVGRRILSWLEGYGVEVLPGREVEEISRRSGGPYALRTGEGEEIPADAVLFGAGIQPSSGLAEEAGLRTEGGRIVTDSSMRASAPGVLAAGDVALAYNEAVGRPLAVEHWGDALEQGRIAGAAAAGRQVRWDSVPGFWSTIGEKTLKYWAWGDGWDALAFEEGDDGSFVARYGREGALVGVLAHGRDEVYEEASDRIRAGAPFPG

SEQ ID NO: 4248 - protein, 520 aa, Arabidopsis thaliana
MAQVSRICNGVQNPSLISNLSKSSQRKSPLSVSLKTQQHPRAYPISSSWGLKKSGMTLIGSELRPLKVMSSVSTAEKASEIVLQPIREISGLIKLPGSKSLSNRILLLAALSEGTTVVDNLLNSDDINYMLDALKRLGLNVETDSENNRAVVEGCGGIFPASIDSKSDIELYLGNAGTAMRPLTAAVTAAGGNASYVLDGVPRMRERPIGDLVVGLKQLGADVECTLGTNCPPVRVNANGGLPGGKVKLSGSISSQYLTALLMSAPLALGDVEIEIVDKLISVPYVEMTLKLMERFGVSVEHSDSWDRFFVKGGQKYKSPGNAYVEGDASSACYFLAGAAITGETVTVEGCGTTSLQGDVKFAEVLEKMGCKVSWTENSVTVTGPPRDAFGMRHLRAIDVNMNKMPDVAMTLAVVALFADGPTTIRDVASWRVKETERMIAICTELRKLGATVEEGSDYCVITPPKKVKTAEIDTYDDHRMAMAFSLAACADVPITINDSGCTRKTFPDYFQVLERITKH

SEQ ID NO: 4249 - protein, 110 aa, Lactobacillus plantarum WCFS1
MIEPVDKTTFATVADGTALTVVDFWADWCGPCKMQEPVLEALDELYDGQVKFASLDVDQHQEIAQQFEIMSIPALVIFKNGQPAEKVVGFHPQAALKKYLDQKLAEVKPA

SEQ ID NO: 4250 - protein, 866 aa, Mycobacterium sp. JLS
TNPVATMPNRRTTIAGLEAAELVITQDVYRDTATNRYADIVLPATLWAESDQVMVNSDRTLTLLQQAVPPPGQTRPDWQLICRIAAELGFGADFTYTDSAQIFDEIREFSNRRTGFDLRGATYDRLRETPLQWPVPPDDGADRHPIRYLNDGVSQDLHVDASGHRPRLAFPTPSRRAVFYARPHVDAAELPDGDFPFVLNTGRLPHQWHTMTKTGRVRALVKLDGRPFVEVHPHDAAALDIVDGQSVELTSRRGRAVLPAVVSDRVMPGNCFAPFHFNDEHGEYLTVNALTNDAVDPDSLQPEFKVCAVALRPVQTVAAPTEERRTPAPEPVASDGPLVLWASQTGTAEDFATDVAARLPGAQLVTMDELPLLRLAEARDVVVITSTFGDGGPPDNGADFFDRLQGPDAPKLDHIRFAVLGIGDRSYSDFCGHARSLDGRLASLGATRMLDRVDCEAYDQDRMEHWAQQMTHLLNPDGVDSDGGGVTTRRRTTTVAEPFTRARPLLAPLARNTLLTPAESRKEVRHFGFDISEYDVTYAAGDSLGVYATNSAVAVDAWLAATGLDGSEKVDVDGAEHSLRDALTVSYDFCRVTPDLMRFVAEQCRDRSAAKRLRAARADLDAWLVDRNGLDVVREFEVRADPRQWQEVLVRLTPRQFSISSSPLVSPHEVQLTVSVVRYRGSDGGERGGVASTFLADRATAPLPVFLQRSPHFRPPRDGVTPMIMVGPGTGIAPFRAFLQERRALGHTGPNWLFFGDRHRDENFYYRDDLEDMVTDGFLRLDLAFSRDQPKPVYVQHRMLEHGAEVWRWLERGAHLYVCGDAARMAKDVDAALTTIIRKHGGLSESAAREYKKSLVAGKRYLRDVY

SEQ ID NO: 4251 - protein, 163 aa, Triticum aestivum
RGRGRGQTPKKRGDERGGGATLGSTAWEAFRRHFSRKRAVDIRRINPKVPKEEAVAISGRLLQILADHGPLTVGSTWNHAKDAAIDGLNSKTHMKILLKWMWGRRIIKLSCTQAGNTKKFLYSPFTAEDTEAAEEPAEEQPKKKGWKGKHPKYQTKKQPAAAA

SEQ ID NO: 4252 - protein, 452 aa, Oryza sativa
  misc_feature (341)..(341): Xaa can be any naturally occurring amino acid
MAAAAGKAAMERHQSIDAQLRLLAPGKVSEDDKLVEYDALLVDRFLDILQDLHGPHLREFVQECYELSAEYENDRDEARLDELGRKLTSLSPGDSIVVSSSFSHMLNLANLAEEVQIAHRRRIKLKRGDFADEASAPTESDIEETLKRLVTQLGKSREEVFDALKNQTVDLVFTAHPTQSVRRSLLQKHGRIRNCLRQLYAKDITADDKQELDEALQREIQAAFRTDEIRRTPPTPQDEMRAGMSYFHETIWKGVPKFLRRIDTALKNIGINERLPYNAPLIQFSSWMGGDRDGNPRVTPEVTRDVCLLARMMAANLYFSQIEDLMFELSMWRCSDELRIXADDLHCSSRKAAKHYIEFWKQIPPNEPYRVILGGVRDKLYYTRERTRHLLTTGVSEIPEEATFTNVEEFLEPLELCYRSLCACGDKPIADGSLLDVNVKGGLIWLLQPDPK

SEQ ID NO: 4253 - protein, 182 aa, Arabidopsis thaliana
MASSMLSSATMVASPAQATMVAPFNGLKSSAAFPATRKANNDITSITSNGGRVNCMQMQVWPPIGKKKFETLSYLPDLTDSELAKEVDYLIRNKWIPCVEFELEHGFVYREHGNSPGYYDGRYWTMWKLPLFGCTDSAQVLKEVEECKKEYPNAFIRIIGFDNTRQVQCISFVAYKPPSFTG

SEQ ID NO: 4254 - protein, 396 aa, Lactobacillus johnsonii
MAEKEHYERTKPHVNIGTIGHVDHGKTTLTAAITTVLAEDGLAQAEDYSQIDAAPEEKERGITINTAHVEYETKNRHYAHMDAPGHADYIKNMITGAAQMDGAILVVAATDGPMPQTREHILLARQVGVQYIVVFLNKVDLVDDPELIDLVEMEVRDLLSEYDYPGDDVPVIRGSALKALEGDPEQQDVIRKLMETVDEYIPTPERDTDKPFLMPVEDVFTITGRGTVASGRIDRGTVKVGDEVEIVGLTDKIEKSTVTGLEMFHKTLDLGEAGDNVGVLLRGIDRDQVERGQVLAAPGSIQTHKNFKGQVYILNKDEGGRHTPFFSDYRPQFYFHTTDVTGKIELPEGTEMVMPGDNVEFTVELIKPVAIEKGTKFTIREGGKTVGAGQVTEILD

SEQ ID NO: 4255 - protein, 408 aa, Chromobacterium violaceum ATCC 12472
MALIVQKYGGTSVGTTERIKNVARRVAKWKAQGHDVVVVVSAMSGETNRLIALAKEIQDYPDPRELDVVVSTGEQVTIGLLAMALKEIGVPAKSYCGWQVKVVTDQAHTKARIQSIDDEAMRGDLKEGRVVIVAGFQGVDEEGSITTLGRGGSDTSAVALAAALKADECQIYTDVDGVYTTDPRVVPEARRLKTVTFEEMIEMASLGSKVLQIRSVEFAGKYKVRLRVLSSFEDEGEGTLITFEEDESMEKAVVAGIAFDRNEARINVKGVPDKPGIAYQILGPIADANIEVDMIIQNVGENGTTDFSFTVPRGEFNRALTILREVQTHIGAAKIDADDKVAKISIVGVGMRSHCGIASTMFRTLAEEGINIQMISTSEIKVSVLVDEKYLELAVRVLHKAFGLDQAA

SEQ ID NO: 4256 - protein, 319 aa, Zea mays
MVVLVVATTSDPASIGPAAAFLAMPGWSPGPPIAEAMESFTNGNVRLLKHERSIVAEDDLDQRWQEATGESVSEVIFLSKHTAVSKRPALTVHPIGPFFFRVPHLKEDETPPQGGTPGWAAIPSPRIGPWLRLMQKIAVEQGLVPEFEVTLEATHHGPVTSTPTMFVEIGSTEDHWGRQDAAQAIALVLWKGLGLEDGNAVGTWQRNCEKVLLGIGGGHYVPRHMDIVIKDGVWVGHLLSGYSLPMDMPSQVNVKSSEEVAGMWKHSIKVSYEATKAAFPGGEVIAHLDHKSFKGWQKNAVTCFLQEQNIRIGKPSDFL

SEQ ID NO: 4257 - protein, 201 aa, Chlamydomonas reinhardtii
  misc_feature (75)..(75): Xaa can be any naturally occurring amino acid
MLLTRKNVAVRPARAARRDVRAMSLLGNLFGGGSKPTSSTSNFHQLSALDIDKKNVDFKSLNNRVVLVVNVASKXGLTAANYKEFATLLGKYPATDLTIVAFPCNQFGGQEPGTNAEIKAFASARGFSGAGALLMDKVDVNGANASPVYNFLKVAAGDTSDIGWNFGKFLVRPDGTVFGRYAPTTGPLSLEKYIVELINSR

SEQ ID NO: 4258 - protein, 433 aa, Arabidopsis thaliana
MRRRRCDLQPKRTRMCDLQPKRTSMCDLPPKLVGEKILTRIPITSLRAVRSTCKLWNALTKDRVLGKAAAQFLGFMTMDSKVCSVRFHLRRSKEEEEDTMDLSIKQVDLLNQVEISRVYHCDGLLLCVAKDNSRVVVWNPYLGQTRWIRPRTESNIGDSYALGYDINRNHKILRMVQTRNVSVYRYEIYDLRSNSWRVLEVTPNGEMDPNHPLYGVSVKGNTYFFAHEDSSSGEIDEDGDIIDLEDFLLCFDFTTETFGLRLPLPFHSTIDATVTLSCVRDQQLAVLYHNEGLHSDDRFTTVEFWVTTSIEPNSVSWSKFLTVDMRPLALTGVRFDNDMGATFFIDEDEKVAVVFDLDGYLSTESARYHTAFISGKDGFFKPVTLGVAPNVGEPCPRTGHIPTTYRPPLVCSSTYLPSLVQVNQQRKRRERHV

SEQ ID NO: 4259 - protein, 465 aa, Lactobacillus plantarum WCFS1
MGIFQRIFQKEDLERYLQKDSHFERTLSAVDLIALGIGAVIGTGIFILPGTVAATKAGPGIILSFVLAAIVCAVAAMCYAEFASVLPIAGSAYSYGNIVYGEMIGWIIGWALVLEYVLAVATVAVGWAAYFNSFIAGFGLKLPKAITGSFDPAHGTYINVIAILIVCLIAWIIDTGLKTSIRLNNIIVVVKLAIIVLFLLVGSFYVKPSNWTPFAPFGGTEILKGAAVVFFAYLGFDAVSSSAAEVKNAKRNMPIGIIGTLVICTIFYILVSGVLTGMVSYKQLNVDDAVAFALQLVHQNFVAGIISIGALAGMFTMMVTMIYSSSRLLYSIGRDGLLPRFLGKIDKHHAPKNAMLTVTIVNSILAGLIPLDQLANLVNIGTLIAFAFVSFGILLLRRNPKLNAIKGFRVPLYPVLPIISGLLCLFMMTQLSMETWLASLVWFLLGLIIYFGYGIRHSRMNKADE

SEQ ID NO: 4260 - protein, 1072 aa, Frankia sp. CcI3
MPDVTQYDDTPYADGPATAADGPATTATTATISPASSHARSGAPRQGSAAAVGRNGARRLPAAAIPRFADRHIGPDPSSQREMLDALRVESLAALTDAAVPASIRDHDLDLPAALSEPAVLAALRAFGSRNRPVSSMIGLGFHPAVMPGVIQRNVLENPAWYTAYTPYQPEISQGRLEALLNFQTMITDLTGLAVAGASLLDEPTAAAEAMQIAFRTAKGSRATFLIDADTLPQTVSVVATRAEALGINVVVADLAAGLTAVGPAQLDAAFGLLLSYPGPAGVLRDVRAVIASARERGIVVTIAADPLALTLLRAPGDLGADIAVGSTQRFGLPLSFGGPHAGYLAVRKGLERSLPGRLVGVSVDADGAPAYRLTLQTREQHIRREKATSNICTAQVLPAVLASMYAVYHGPEGLAGIARRIHGHAVRLAEGLRAAGVTVVHDAFFDTVLAAVPGRATQVVADALARGVNLRLVDDDHVGISCNETTGQAELEAVRSAFGVGPEATAGITWTGTGTGTEIRTGAWTGSVAAANDHLVARADQADQADQADQAADEPVALPAELVRTDPYLQHPVFHDHRSETAMLRYLRRLSDLDLALDRGMIPLGSCTMKLNATTEMAAVTWPEFADIHPFAPLDQAAGYLAMIQDLERWLAQITGYAGVSLQPNAGSQGELAGLLAIRAYHRDHAVPGSVVRNICLIPSSAHGTNAASAAMAGMRVVVVSCDDDGNVDLNDLARKARANADALAALMVTYPSTHGVYEEGIGQACAIVHEAGGLVYVDGANLNALVGLARPGQFGADVSHLNLHKTFCIPHGGGGPGVGPVAVVEKLLPYLPNHPLRPEAGPATGVGPISGSPWGSAGILMIPWAYIRMMGADGLRRATSVAVLNANYIAHRLHPYYPVLYAGRDGLVAHECILDLRPLTKLTGVTVDDVAKRLIDYGFHAPTMSFPVAGTLMVEPTESEDLGEIDRFCDAMISIRAEADKVGDGIWPRTDNPLHNAPHTAQMVTANEWSHAYPRSVAAYPVASLRAAKYWPPVRRIDGAYGDRNLVCTCPPVGSFAAEPVDEQILAGAR

SEQ ID NO: 4261 - protein, 401 aa, Zea mays
  misc_feature (206)..(206): Xaa can be any naturally occurring amino acid
MLWVARLSGLLSAAMVVVVLSPSLQSFPPAEAIRSSQFDGSVRFPGQIAGGARGVAFRRAPPFRNAADCGAGADNGTGANVCDPWLVHIAITLDNEYLRGSVAAVHSVVQHARCPESVFFHFLVSDPGLGDLVRAVFPQLRFKVYYLDPGRVRGLISTSVRQALEQPLNYARNYLAELLEPCVRRAIYLDSDLVVVDDVAKLWRTXLGGRTVGAPEYCHANFTKYFTGRFWSDQRFAGTFAGRRPCYFNTGVMVVDLERWRQAGYTQRIERWMEVQKSAAGRIYELGSLPPFLLVFAGHVAPIEHRWNQHGLGGDNVLGSCRDLHPGPVSLLHWSGSGKPWARLGAGRPCPLDALWAPFDLYGPGPGGGAEEDLHVFLFAKNKLYVLHLFFLLLFPFGLLD

SEQ ID NO: 4262 - protein, 612 aa, Rickettsia rickettsii
MTAQPPSGQEHDIRDINRDINMTKIRINLLRNLFTEYDIDGYIIPSNDKYMSEYVPSYAKRLEYITGFTGSNGIAIIYKDTALFFTDGRYLEQANKELDLELFKLFDLKDISKFGKDAKIGYDSELFTYPTISNLKFNFQKINGNLVDKIWPNQPLEPNSKVYLYDIKLAGVSHTDKISKCREIFLDSRFCRNDTEQSALVILDSSSICWLLNLRASDVAYTPLMFAKVILTSTQLYLFINPTRIDAEIINARPEITILPEEEFENILRDSKNKHLSKPAYRIFIDDTIASVHIMDLVADKKVQKITDPCLMLKACKNDVEIQHAIDLHIKDAVALCEFFADFSQCHPRENGDPEKHNNELTEYSLGLKLTEQRAKQEGYVSDSFPAICGFQENSAIIHYRADQKTAKKIEGQGILLIDSGGQYQGATTDITRTIVIGTPTDEQKKRYTQVLKGHIALAKAKFPKNIIAGANLDILARQYLWQEMLDYPHGTGHGVGSFLSVHEGPQSINLLNKTILKAGMILSNEPGFYVPGKYGIRIENLMYVKENNGWLEFETLSLVPYASKLTDMKLLNIDEINYIKEYYNKIRAKIYDLLSTQARNWLNNEINLYCN

SEQ ID NO: 4263 - protein, 338 aa, Acinetobacter sp. ADP1
MSNHQVALQFEDGVTRFICIAQGETLSDAAYRQQINIPMDCREGECGTCRAFCESGNYDMPEDNYIEDALTPEEAQQGYVLACQCRPTSDAVFQIQASSEVCKTKIHHFEGTLARVENLSDSTITFDIQLDDGQPDIHFLAGQYVNVTLPGTTETRSYSFSSQPGNRLTGFVVRNVPQGKMSEYLSVQAKAGDKMSFTGPFGSFYLRDVKRPVLMLAGGTGIAPFLSMLQVLEQKGSEHPVRLVFGVTQDCDLVALEQLDALQQKLPWFEYRTVVAHAESQHERKGYVTGHIEYDWLNGGEVDVYLCGPVPMVEAVRSWLDTQGIQPANFLFEKFSAN

SEQ ID NO: 4264 - protein, 84 aa, Burkholderia brasilensis
LIKPFKLDEVREALAEVGLTGLTVTEVKGFGRQKGHTELYRGAEYVVDFLPKVKIEVVVANEQTDQVIDAIIGAARTGKIGDGK

SEQ ID NO: 4265 - protein, 507 aa, delta proteobacterium MLMS-1
MSEKIIVFDTTLRDGEQSPGASMNIHEKYRLAQQLTKLGVDVIEAGFPAASLGDFECVKNIADNIRGTQIAALCRCNPKDIDTAWQALKNGENPRIHTFLATSEIHMQHKLRMSPEQVVERAAAMVAHAAQYTGNVEFSAEDASRSDLDFVCRVFAAVIEAGATTLNFPDTTGYALPDEFGAKIRYLVENVPNIDKAVLSVHCHNDLGLAVANSLAAINNGARQVECTVNGLGERAGNTAMEEVVMILRTRAETSPYHTDIVTEHIYPSSRLVSTITGMPVQPNKAIVGANAFRHESGVHQDGVLKERTTYEIIDPKDVGISIGNIVLGKHSGRHALRDKVLELGYGDLSEEEVERVFKRFKEVADRKKEMFEEDLEAIIMDEVLRVPESFKLLHLGSMSGSMSLPTAAVRMRVNDQEKETAVLGVGAIDATFRAIAELTGTGSKLLYFSVSSITGGTDAQGEVMVRVEDNGKLVIGQGADPDIITAAAKAYLMALNRLEFLKKQLQ

SEQ ID NO: 4266 - protein, 581 aa, Oryza sativa
MDLPKLLFTVLILSLLNYESSSATAWDDEDFFKTCSSHRCSKHGPEIRFPFRLSTQPPSCGAPGMHLSCSGQDTILNHPVLGPCKVTEISYSYATMNVIPPVDSSPHCPLQKLMSKNQSTSVYKPQGPQSQGATLVVCSRDPIPANQYDIVGPISCLGHNNQFWYLADPYTYMSVLPLDCTVISKGIPMPYSYDKKGRINWDTSNFKETANRVINDGPRVTLVAATSSVATFVILSLVVATAFYISLKSRYNKEIHLKVEMFLKTYGTSKPMRYTFSDVKKITRRFKNKLGHGGFGSVYKGELPNGVPVAVKMLENSLGEGEEFINEVATIGRIHHANIVRLLGFCSEGTRRALIYEFMPNESLEKYIFSNGSNISREFLVPKKMLDIALGIARGMEYLHQGCNQRILHFDIKPHNILLDYSFSPKISDFGLAKLCARDQSIVTLTAARGTMGYIAPELYSRSFGAISYKSDVYSFGMLVLEMVSGRRNTDPTVENQNEFYFPEWIYERVINGQELVLNMETTQGEKETVRQLAIVALWCIQWNPTNRPSMTKVVNMLTGRLQKLQVPPKPFISSENHLAT

SEQ ID NO: 4267 - protein, 242 aa, Zea mays
SRNANLEKRLVHTSEYTGAKKMKEILEGHESWCKSEFRMEPEIFKATCNYLRRERLLRDTRGVTIEEQLGIFMFMISHNASNGRLQKTFQHSGETIHRHVKAVFNIIPTLTCRFVKLPTSLEPHPKIASDSRFWPFFQNCIGAIDGTHVPITISEEKAPPYRNRKGTLSQNVMVACDFNLNFTFISCGWEGSASDAGVLKSAISKGFHVPEGKFYLVDGGYANTPSFLAPYRGVRYHLGEFS

SEQ ID NO: 4268 - protein, 128 aa, Gossypium barbadense
TATVKLIGADGEEHVACSVGTGPVDSAYKAIDLITKEPVTLLEYSMNAVTEGIDAIATTRVLIRAEKSRISTNILTGEIVQRTFSGTGAGMDIVVSSVKAYIGALNKMLGLKEQYQTKASIERTPVSA

SEQ ID NO: 4269 - protein, 480 aa, Synechococcus sp. WH 5701
MSSTTSVGDLVSQPYKYGFVTDIETDKIDKGLSEDVVRLISSKKDEPQFLLDFRLRAYRQWLRMEEPDWAALGHPAIDYQEMIYYAAPRQQEKKASLDEVDPKLLETFDKLGIPLSEQKRLSNVAVDAVFDSVSIATTYREKLAEHGVIFCSISEAVKDHPELIERYLGTVVPSNDNFFAALNSAVFSDGSFVFIPKGVECPMELSTYFRINSGDTGQFERTLIVAEEGASVSYLEGCTAPMFDTNQLHAAVVELVALDDASIKYSTVQNWYAGDENGVGGIYNFVTKRGHCRGDRSHISWTQVETGSAITWKYPSCVLQGAHSVGEFYSVALTNNLQQADTGTKMVHVGPHTRSTIVSKGISAGHSSNSYRGLVQIGPKARGARNYSQCDSMLIGDQAAANTYPYIRSQQPEASVEHEASTCRISADQLFYLQSRGIGFEEAVSMMVSGFCRDVFNQLPMEFAAEADKLLALKLEGSVG

SEQ ID NO: 4270 - protein, 365 aa, Leptospira interrogans serovar Lai str. 56601
MIDPIIDSKKFEELFQFLISKEESGTRLDHFLSKKFTYHSRTTWQKEITEGRILISSKTVKPGVSLKEGDLISYHPIQKEEPPVRNDYKILYEDEFFVAVDKPGDLPIHPAGIYRKGNLLTFLKESGKFKDLFTVHRLDRETSGVILFAKNSEIASILSKSFSLGNIQKYYITKVHGNFPKRKSAYGILKPDLSSKIRKKRTFVPLKFNFLKRNKKYLFENSLIEKQEEISLTYFQKIEYDKGRESKFKFSKIEFQFKNVNNEKIKSVFLDQEKDCYSFLLCKPITGRMHQIRATLFSLGFPLFGDKLYGKDEKVFLEFIEGKNPDLTTRLGMKRQALHSYAVCLNHPVTNQKMKITAPIPEDFL

SEQ ID NO: 4271 - protein, 467 aa, Arabidopsis thaliana
MKALCDRFVPQQCSSSSKSDTHDKSPLVSDSGPSDNKSKFTLWSNVFTSSSSVSQPYRESSTSGHKQVCTTRNGWTAFVKRVSMASGAIRRFQERVLGPNRTGLPSTTSDVWLLGVCYKISADENSGETDTGTVLAALQLDFSSKILMTYRKGFEPFRDTTYTSDVNWGCMIRSSQMLFAQALLFHRLGRAWTKKSELPEQEYLETLEPFGDSEPSAFSIHNLIIAGASYGLAAGSWVGPYAICRAWESLACKKRKQTDSKNQTLPMAVHIVSGSEDGERGGAPILCIEDATKSCLEFSKGQSEWTPIILLVPLVLGLDSVNPRYIPSLVATFTFPQSVGILGGKPGASTYIVGVQEDKGFYLDPHEVQQVVTVNKETPDVDTSSYHCNVLRYVPLESLDPSLALGFYCRDKDDFDDFCLRALKLAEESNGAPLFTVTQTHTARNDRSYGFAEDDRRDEREDDWQML

SEQ ID NO: 4272 - protein, 400 aa, Campylobacter jejuni RM1221
MLIVQKYGGTSVGTLERIEAVANRVIQSVQQGDQLVVVVSAMSGVTNTLIEQAEYFSKTPNGKDMDMLLSSGERVSCALLSIALNEKGYPAISFSGRKAGIITDSVFTKARIHHIDTKAIKSELQNGKIVVIAGFQGVDEEGNVTTLGRGGSDLSAVAVAGALNADLCEIYTDVDGVYTTDPRIEPKAKKLDKISYEEMLELASLGAKVLQNRSVELAKKLNVNLVTRSSFNNNEGTMITKEDGMEQALVSGIALDKNQARVTLRNVEDKPGIAAEIFSVLANENINVDMIIQNVGVDGATNLGFTVPQNELELAKNAMQKILSSKTTIESDSAVVKVSIVGVGMKSHSGVASKAFKALADEGINIGMISTSEIKISMIVHEKYGELAVRALHECYGLDK

SEQ ID NO: 4273 - protein, 643 aa, Pseudomonas putida KT2440
MSKRLSWDIHTRTQIISLGPALLLTLLLISFFTFVRIQDLRQELNHTGQLIANQLAPASEYGVISGNNEVLEGLMRATLSIPHVRFLEVQDSRNHILVYVEQSDESANRAQQVEVFQAPIRLQQIRLDNDFLQQGKATSPAIGDDYLGRVIVGMSDDAFSQRQQEIVIKAGILALFALLFTFLLARRLALSLAKPISDMGHAVKAIQQGEYNTPLPVVDDSELGHLARHINNLASALEQASDEQKQAIAELIQAREEAEQANRAKSDFLAMMSHELRTPMNGVLGMLQLLETTPLSSEQADYTAVASESTGHLLKVINDILDFSRIERAALQLEHIDFNLGELITNSVQSFQHSAQQRGLGLHLQLPAGIEQLQVNGDPTRIRQILLNLIGNALKFTERGQVQVDARWQVLDRQLIWLTCSVRDTGIGIDSDRLEMMFVAFQQADSSISRRYGGTGLGLSIARTLAERMGGKLRGESREGLGSTFTLEMPLALANPAPVPLTPPTTVRTTVPDNDQVLLVEDNPVNRSVVEAMLRSLGLAVCTAEDGLEAVELVGRQRFAAVLMDCRLPHLDGYEATRRIRQLPNGAGLPIIALTANALQGDRERCMAAGMDDYLSKPLRRTELQQVLQRWLPGQTTATGDKC

SEQ ID NO: 4274 - protein, 594 aa, Methanocaldococcus jannaschii
MEIINKFLDLEALLSPTVYEKLKNFDEEKLKRLIQKIREFKKYNNAFILLDEKFLDIFLQKDLDEIINEYKDFDFIFYYTGEEEKEKPKEVKKEIKKETEEKIEKEKIEFVKKEEKEQFIKKSDEDVEEKLKQLISKEEKKEDFDAERAKRYEHITKIKESVNSRIKWIAKDIDAVIEIYEDSDVSGKSTCTGTIEDFVKYFRDRFERLKVFIERKAQRKGYPLKDIKKMKGQKDIFVVGIVSDVDSTRNGNLIVRIEDTEDEATLILPKEKIEAGKIPDDILLDEVIGAIGTVSKSGSSIYVDEIIRPALPPKEPKRIDEEIYMAFLSDIHVGSKEFLHKEFEKFIRFLNGDVDNELEEKVVSRLKYICIAGDLVDGVGVYPGQEEDLYEVDIIEQYREIAMYLDQIPEHISIIISPGNHDAVRPAEPQPKLPEKITKLFNRDNIYFVGNPCTLNIHGFDTLLYHGRSFDDLVGQIRAASYENPVTIMKELIKRRLLCPTYGGRCPIAPEHKDYLVIDRDIDILHTGHIHINGYGIYRGVVMVNSGTFQEQTDFQKRMGISPTPAIVPIINMAKVGEKGHYLEWDRGVLEVRY

SEQ ID NO: 4275 - protein, 297 aa, Magnaporthe grisea 70-15
MGLELVRTLAKTGMRVFFTARDPAKGAKVREMLRAEDASFKLELVVVELKSLKSVEAGARHILDRADRLDLLMNNAGIAATPHGFTQDGYEQQFGVNYLAHFYLFQMLKPLLLKTAAEHGVQVRVVSTSSTAHTASTVLPAGDYGTADPNGRGYEPGVSYAHSSTARIWFCNEAERRYGPRGLHAISTHPGGFASGLMDSADEQARAALARAIEMPHIRRIWKSVEQGAATNALAGVGREYDGHGGFYMEDCGVARPVPDHLDWAGHGYKSWAFDEAGEKRLWLDSLEMLGLQDDQE

SEQ ID NO: 4276 - protein, 539 aa, Arabidopsis thaliana
MAYASRIINHSKKLKDVSTLLRRENAATIRYYSNTNRAPLNREDIFNSRLGYPPLERISICSTSTLPVSIIFSTTRSNLSSAMGRPIFGKEFSCLMQSARGFSSGSDLPPHQEIGMPSLSPTMTEGNIARWLKKEGDKVAPGEVLCEVETDKATVEMECMEEGYLAKIVKAEGSKEIQVGEVIAITVEDEEDIGKFKDYTPSSTADAAPTKAEPTPAPPKEEKVKQPSSPPEPKASKPSTPPTGDRVFASPLARKLAEDNNVPLSDTEGTGPEGRIVKADIDEYLASSGKGATAKPSKSTDSKAPALDYVDIPHSQIRKVTASRLAFSKQTIPHYYLTVDTCVDKLMALRSQLNSFKEASGGKRISVNDLVVKAAALALRKVPQCNSSWTDDYIRQFKNVNINVAVQTENGLYVPVVKDADRKGLSTIGEEVRLLAQKAKENSLKPEDYEGGTFTVSNLGGPFGIKQFCAVVNPPQAAILAVGSAEKRVVPGNGPDQFNFASYMPVTLSCDHRVVDGAIGAEWLKAFKGYIENPKSMLL

SEQ ID NO: 4277 - protein, 515 aa, Methanosarcina acetivorans C2A
MYTLKEGIDFYIEPMQNKKVTVFDTTLRDGEQTPGVSLTSSQKLEISRQLDKLGVDIIEAGFPISSEGDKESVKSISNAGLETTVCGLARVLKKDIDACFESDVGLVHTFVPTSDVQRIYTIKKSQEEVIQLAVEAVQYIKDHGLKCMFSAMDATRTDPAYLIEVFKAVQEAGCDIINVPDTVGVMVPSAMYRQIKDIAAEITIPIDVHCHNDFGLAVANSLMAVEAGASQVQVTINGIGERAGNADLAQTVMSLASIYGIKTNIRTEYLVETSKMIENYTGIRLPPNTPVVGQNAFSHESGIHSQGVLEKSDTFEPGIMTPEMVGHRRRIVLGKHTGKHAVKQSLESAGVKTSENQLDEIVLRIKEIANKGKQITDADLYAVASAVLGKASSEEELIKLKEVSVMTGNILTPTAVVKADIEGKEIIAAKTGVGPVDAALKAVRDILGESNHFRLQEFRIDAITGGADALADVYIGLENEKGRIVTARSANPDIVMASVEALINAMNLLYKKEKS

SEQ ID NO: 4278 - protein, 265 aa, Geobacillus kaustophilus HTA426
MTAVETKKQYLTVFKEDGIAEIHLHINKSNSYDLEFYKEFNAAIDDIRFDPDIKVVIVMSDVPKFFSAGADINFLRSADPRFKTQFCLFCNETLDKIARSPQVYIACLEGHTVGGGLEMALACDLRFMGDEAGKIGLPEVSLGVLAGTGGTQRLARLIGYSRALDMNITGETITPQEALEIGLVNRVFPQAETRERTREYARKLANSATYAVSNIKLAIMNGKEMPLNVAIRYEGELQNLLFRSEDAKEGLSAFLEKRQPNWKGI

SEQ ID NO: 4279 - protein, 554 aa, Haemophilus influenzae R2846
MKGNTMKNINPTHTQAWKSLEAHKAELSNTTIQDLFKQEKNRFDDYSLTFNNQILVDFSKNNINQTTLSHLRQLAQECALDSAKEAMFTGEKINRTENRAVLHTALRNRTNTPVLVDGKDVMPEVNAVLAKMKDFCQRIISGEWKGYTGKAITDVVNIGIGGSDLGPYMVTEALRPYKNHLNMHFVSNVDGTHIAETLKKVNPQTTLFLVASKTFTTQETMTNAQSARDWLLKAAKNESAVAKHFAALSTNAKDVEKFGIDTNNMFEFWDWVGGRYSLWSAIGISIALSIGFENFEELLNGAHEMDKHFRSAPIEQNIPTTLALVGLWNTNFLGAQTEAILPYDQYLHRFAAYFQQGNMESNGKYVDRDGNVINNYQTGPIIWGEPGTNGQHAFYQLIHQGTTLIPCDFIAPAQTHNPLADHHNKLLSNFFAQTEALAFGKTKEEVEAEFIKAGKSLDDVKNIVPFKVFTGNKPTNSILVQKITPFILGALIAMYEHKIFVQGVIFNIFSFDQWGVELGKQLANRILPELTDSEKVASHDSSTNGLINQFKAWR

SEQ ID NO: 4280 - protein, 430 aa, Oryza sativa (japonica cultivar-group)
MEDEGAGGGGIGGDASPVHVGSATEVGVGRDIVPSPTSSRSVMQTVNGSHMFVIQGYSLAKGMGIGKYIASETFTVGGCQWAIYFYPDGKNPEDNSAYISVFIALISDGIDVRVLFELKLLDQSGKAKHKGHSQFDRSLESSPYTLKNRGSMWGYKRFFRRTALETSDFLKDDCLKINCTVGVVVSTMDYSKPHSIHVPESDIGYHFGTLLDNQEGVDVICNVAGEKFHAHQLVLAARSSFFRSELFEHESDEEKNEVDTSNEIKEIVIDDMEPKVFKAVLHFMYRDNLVGDDELSASSSDCSIFDTLAGKLLAAADRYELPRLRLLCESYLCKHISVNSVATTLALADRHHAMELKSVCLKFAAENLSAVIRTDGFDYLKDNCPALQSEILRTVAGCEEECSSGGKSQSVWGQLSDGGDTSGRRVRPRV

SEQ ID NO: 4281 - protein, 1067 aa, Oryza sativa
MLRRCNQHRLSTLSPSSRKILISRPSAAFTALPRTPIASNNLQNSVRTLATGLSQTSKHVPTTSIFAPLDTFTRRHVGPQPASVQKMLEYLGYESMDAFLKDCVPQDIRLEENAIRDEGAGGIWALSEGELLRRAKEIGKKNKVTRSFIGLGYHQAVLPQVILRNMLENHGWFSQYSPYQAEISQGRLGSLINFQTLTTALTGLDIANASLLDEGTAAAEGMIMAFGHLREKRKTFFVDRSVLPQTVAVVKTRVAPFGINVVVGNVKKLLSEEHGDKAQHKDLIGVLLQYPDVRGEVADWKAVADRTHKLGGLVSCATDFLALTMLKPPGEWGADIAFGNAARFGVPLGYGGPHAAFFACSDALKRRMPGRLIGLSKDKEGRPAYRLALQTREQHIRRDKATSNICTAQALLANTSAMYAVYHGPEGLRAIAEKVHGLARIVKAAVEKLGHKVVNETFFDNLTIRRSGTAATLVHESAVAAGINLRRVDDQHVAVSFDESHSLEDIVDLLNVFVSNQKGPRRINQIQPYTTESLVEFADSLNVPAPRATRSSLGELSSGENIPAIDSPAIPSDLARTSPFLTQPVWNSHHSETDIIRYMHYLQDKDLSLVHAPIPLGSCTMKLNSTTSMTPFTWDEFSRIHPFAPEDQALGYKEMMDELAQDLSLLTGLPGCSLQPNSGAQGEYAGLSVIRAYHLSRGEGHRNICLVPASAHGTNPASAIMAGMKVVPVKVLATGYLDMEDLKAKATQHSKDLAAFMVTYPSTFGVFESGVEDACSIIHENGGQVYLDGANFNAMVGLTSPGKVGADVCHLNLHKTFAIPHGGGGPGMGPICVGEHLIPFLPGHPVVPTGGSDAIGPISASPYGSASILSISWAYIKMLGATGLKFATQVALLNANYAMARLQDHYRVKFVNNKGRCAHEFIIDLAEFEDTAGLKVMDIAKRLQDYGIHPPTCSWPLSTAMLIEPTESEGLRDVDRFCDAMIKIRQEIEDIAQGKQPRGNNLIVNAPHPQQVVTADTWDRPYTREEAAYPDARLRRAKFWPPTSRVDDAYGDKNLFCECGSVDEYAS

SEQ ID NO: 4282 - protein, 635 aa, Rickettsia akari str. Hartford
MSNSNIDNDLDQIDSLLKKAKSKKIPVTYDDINKALPLNENPSIRQLEEAILKFSDAGVDILESNEDDDIKLDIGMDEEFKLSTNIDNEPEDEAEEENIGTTDDPVRLYLKDMGGVDLLTREHEVEIAKRIEEGRKTMTASLCRSPIAMRCFIVWYEDLVNEKMLLRDLIDLEANILHDETPENDEEHSSETEGEEHDDNHLSMSRVETQILPNIIERMKKISFICEELLIEAKKCYEKSFEPKVLQNSKKYNNNLELLLHEVSEIHFNSKRTEEILGKMYGINRDLINKETAFLKLAEKYGVTRQNFLDEYIGSVINAAWKEKMLKNKKVAWKELITKESDYIDQMIAELSVIESNTGLLVNDFKKLVNTIQKSERQTLQAKKDMIEANLRLVISIAKKYANRGLQFLDLIQEGNIGLMKAVDKFEYRRGYKFSTYATWWIRQAITRAIADQARTIRIPVHMIETINKILRTSRQMLNELGYEPTATEIANRLSMPLDKVRKVMKIAKEPISLENPVGDDSDGGQLGDFIEDKNAIAPIDAAIQSNLREVTTRVLATLTPREERVLRMRFGIGMNTDHTLEEVGQQFKVTRERIRQIESKALRKLQHPIRSKKLNSFRSGGKRGEGNPSDLLEA

SEQ ID NO: 4283 - protein, 609 aa, Glycine max
HASDRLILSSSCLFLNTYSRYATETQYAIRSLTESVFLVVCTLDSNLIGVVVKGKKKFSVFVVSYQNSEVIILNIFKQGFSQHIDTRMLRLSIQRVRKLNFLSPQISALGRSHLSTAAEPSSSKSNPPRVPNLIGGSFVDSKASTVIDVINPATQEVVSQVPLSTDEEFKEAVSAAKKAFPSWRNTPITTRQRVMLKLQELIRRDMDKLALNVTTEQGKTLKDAQGDVFRGLEVVEHACGMATLQMGEYVSNVSHGIDTYSITEPLGVCAGICPFNFPAMIPLWMFPMAITCGNTFVLKPSEKDPGASVMLAELALEAGLPEGVLNIVHGTHDIVNAICDDDDIKAISFVGSNVAGMHIYSRAAAKGKRVQSNMGAKNHAIVMADANVDATLNALVAAGFGAAGQRCMALSTVVFVGGSKPWEDKLLEHAKALKVNAGTEPDTDLGPVISKQAKERIHRLVQSGVESGARLLLDGRNIVVPGYESGNFIGPTILSDINANMEADSLEEAINIINSNKYGNGASIFTTSGVAARKFQTEIEAGQVGINVPIPVPLPFFSFTGNKASFAGDLNFYGKAGVNFYTQIKTITQQWKDSTGGSKINLAMPTSQK

SEQ ID NO: 4284 - protein, 311 aa, Oryza sativa (japonica cultivar-group)
MSGELKRDYEIGEEIGRGRFGVVHRCTSRATGEAFAVKSVDRSQLADDLDRELAELEPKLAQLAAAGNPGVVQVHAVYEDDAWTHMVMDLCSGPDLLDWIRLRRGAPVPEPVAAAVVAQLAEALAHCHRRGVAHRDVKPDNILLDVVDDGIDGGGTPRARLADFGSAAWVGESGGSAEGLVGTPHYVAPEVVAGGEYGEKADVWSAGVVLYVLLSGGALPFGGETAAEVLASVLRGSVRFPPRLFAGVSPAAKDLMRRMMCRDTWRRFSAEQVLGFRSKRTNHLIACRAVRNAGHPWIVSGGGARAMEQPT

SEQ ID NO: 4285 - protein, 151 aa, Eucalyptus perriniana
KAVAEKAACAEAKERGVDLVVINPVLVLGPLLQSTINASIIHILKYLTGSAKTYANSVQAYVHVKDVALAHVLVLETPSASGRYLCAESVLHRGDVVEILAKFFPEYNVPTKCSDEVNPRVKPYKFSNQKLRDLGLEFTPVKQCLYETVKS

SEQ ID NO: 4286 - protein, 313 aa, Haemophilus influenzae 86-028NP
MASVVTITLNAAYDLVGRLNRIQLGEVNTVETLGLFPAGKGINVAKVLKDLGVNVAVGGFLGKDNSADFEQMFNQHGLKDKFHRVNGKTRINVKITETEADVTDLNFLGYQISPQIWQQFVTDSLAYCLDYDIVAVCGSLPRGVSPELFADWLNQLHQAGVKVVLDSSNAALTAGLKAKPWLVKPNHRELEAWVGHSLNSLEEIIAAAQQLKAEGIENVIISMGAKGSLWINNEGVLKAEPAKCENVVSTVGAGDSMVAGLIYGFEKGLSKTETLAFATAVSAFAVSQSNVGVSDLSLLDPILEKVQITMIEG

SEQ ID NO: 4287 - protein, 547 aa, Corynebacterium diphtheriae
MSFDVTTTEPWATLSERYTAMKATTLRDLFASNPNRAQELSFEAAGLHVDLSKNLIDAETVAAFTALAKASGMREKIKAMFDGEHINNTEDRAVLHTALRLAVDAELNVDGQDVAADVHEVLGRMRDFATSLRNGSWRGYSNHTIKTIVNIGIGGSDLGPAMATKALRTYATAGINAKFVSNVDPADMHAVLDELDPESTLFVVASKTFTTQETLANAHAAKRWLVAAAGGDESAVAKHFVAVSTNAEKVAEFGIDTKNMFGFWNWVGGRYSVDSAIGLSLMSVIGPMDFMRFLDGFRAMDEHFRTADFESNIPVLMGMLNVFYNDFFGAETHAVLPYSQDLGRFPAYLQQLTMESNGKSVRHDGSAVTTNTGEIYWGEPGTNGQHAFFQLIHQGTKLIPADFIGFARPKEDLPTASGEGSMHDLLMSNFFAQTKVLAFGKTAEEIAAEGVSPELVAHKVMPGNRPTTTIMAEELTPFALGALIALYEHIVFVEGVIWDINSFDQWGVELGKQQANDLAPAVAGEVAVDSGDSSTDALISWYRSHRG

SEQ ID NO: 4288 - protein, 84 aa, Burkholderia tropica
LIKPFKLDEAREALSAIGVSGITVTEVKGFGRQKGHTELYRGAEYVVDFLPKVKIEAAVSDDIVDQAIEALERAARTGKIGDGK

SEQ ID NO: 4289 - protein, 342 aa, Medicago truncatula
MSQLSIQRAKKLKFLMPQISAFGSSHFSTSPQPSSSDHNKRVPNLIGGRFLDSKSSNFIDVLNPATQEVVSQVPLTTDEEFKAAVSAAKKAFPSWRNTPVTTRQRVMLKLQELIRRDMDKLALNITTEQGKTLKDAQGDVFRGLEVVEHACGMGTLQMGEYVSNVSHGVDTYSVREPIGVCAGICPFNFPAMIPLWMFPVAVTCGNTFVLKPSEKDPGASMMLAELALEAGLPEGVLNVVHGTHDVVNAICDDDDIKAISFVGSNVAGMHIYSRAAAKGKRVQSNMGAKNHAIVMPDANVDATVNALVAAGFGAAGQRCMALSTVVFVGGSQAWYRTPFCFD

SEQ ID NO: 4290 - protein, 84 aa, Burkholderia kururiensis
IIKPFKLDEVREALAEVGLTGLTVTEVKGFGRQKGHTELYRGAEYVVDFLPKVKIEVVVANEQTDQGDHAIIGAARTGKIGDGK

SEQ ID NO: 4291 - protein, 211 aa, Desulfovibrio desulfuricans G20
MSDMPKGTILQRDKETYAIRVTPPSGVVTPQELEAVAAVARKYDVPMLKITSGQRFALIGLKEKDLHAACSELPFRVAGHYVQACPGNQWCQLARQNALEMAGVIEEKFRTFDGPAKIKMGVSGCGTCCAESYVRDIGLVGTSKGWNILVGGNSGGRARIADVLAKDLPDDEAVGLLERFLEYYKTNGKTKQRVARFVEARGIESIREALL

SEQ ID NO: 4292 - protein, 168 aa, Zea mays
MAAASSATSVHDFTVKDASGKDVDLSTYKGKVLLIVNVASQCGLTNSNYTELSQLYEKYKDQGFEILAFPCNQFGGQEPGTNEEIVQFACTRFKAEYPIFDKVDVNGDNTAPIYKFLKSSKGSLFGDNIKWNFSKFLVDKEGHVVERYAPTTSPLSIEKDIKKLLGSY

SEQ ID NO: 4293 - protein, 183 aa, Isochrysis galbana
EVRGSVGIITLNRPKALNALSPTLVRELVESAVAMDADTSIGAIVITGAGGKAFAAGADIKEMSTLGYMDMFKRKLFGELDTLGTVRTPIIAAVNGFALGGGCELAMACDLILAADTATFGQPEIKLGTIPGLGGTQRFARALGKSRAMELVLTGDQISAQEACARGLVSRVVPAAELLDEAV

SEQ ID NO: 4294 - protein, 584 aa, Vicia faba
MGSVEDDSSRLEEALIQDEESKLYTGDGSVDFKGRPVLKKNTGNWKACPFILGNECCERLAYYGIATNLVKPILLAKLHEGNVSAARNVTTWQGTCYLAPLIGAVLADSYWGRYWTIAIFSMIYFIGMGTLTLSASIPALKPAECLGAVCPPATPAQYAVFFIGLYLIALGTGGIKPCVSSFGADQFDDTDSRERVKKGSFFNWFYFSINIGALISSSFIVWIQENAGWGLGFGIPALFMGLAIGSFFLGTPLYRFQKPGGSPLTRMCQVVAASFRKRNLTVPEDSSLLYETPDKSSAIEGSRKLQHSDELRCLDRAAVISDDERKRGDYSNLWRLCTVTQVEELKILIRMFPVWATGIVFSAVYAQMSTMFVEQGTMMDTSVGSFKIPAASLSTFDVISVIFWVPVYDRFIVPIARKFTGKERGFSELQRMGIGLFISVLCMSAAAIVEIKRLQLAKELDLVDKAVPVPLTIFLQIPQYFLLGAAEVFTFVGQLEFFYDQSPDAMRSLCSALSLLTTSLGNYLSSFILTVVLYFTTRGGNPGWIPDNLNKGHLDYFSGLAGLSFLNMFLYIVAAKRYKSKKAS

SEQ ID NO: 4295 - protein, 313 aa, Salmonella enterica subsp. enterica serovar Typhi str. CT18
MLDNVLRIATRQSPLALWQAHYVKDALMATHPGLTVELVPMVTRGDVILDTPLAKVGGKGLFVKELEIALLEKRADIAVHSMKDVPVAFPDGLGLVTICEREDPRDAFVSNKYHSLDDLPAGSIVGTSSLRRQCQLAERRPDLIIRSLRGNVGTRLGKLDNGDYDAIILAVAGLKRLGLESRIRTALPPDVSLPAVGQGAVGIECRLDDARTQALLAPLNHSQTALRVTAERAMNTRLEGGCQVPIGSYAEIINGEIWLRALVGAPDGSVMVRGERRGSPEQAEQMGISLAEELLENGARAILTEVYNGETPA

SEQ ID NO: 4296 - protein, 107 aa, Sinorhizobium meliloti
MATVKVDTANFQKEVLNSAEPVVVDFWAEWCGPCKMIAPSLEEIATELAGKVKVVKLNIDENPELAAQYGVRSIPTLAMFKGGEVADIKVGAAPKTALSSWISNAVA

SEQ ID NO: 4297 - protein, 428 aa, Geobacillus stearothermophilus
MAFEFKLPDIGEGIHEGEIVKWFVKPGDEVNEDDVLCEVQNDKAVVEIPSPVKGKVLEILVPEGTVATVGQTLITLDAPGYENMTFKGQEQEEAKKEEKTETVSKEEKVDAVAPNAPAAEAEAGPNRRVIAMPSVRKYAREKGVDIRLVQGTGKNGRVLKEDIDAFLAGGAKPAPAAAEEKAAPAAAKPATTEGEFPETREKMSGIRRAIAKAMVHSKHTAPHVTLMDEADVTKLVAHRKKFKAIAAEKGIKLTFLPYVVKALVSALREYPVLNTSIDDETEEIIQKHYYNIGIAADTDRGLLVPVIKHADRKPIFALAQEINELAEKARDGKLTPGEMKGASCTITNIGSAGGQWFTPVINHPEVAILGIGRIAEKPIVRDGEIVAAPMLALSLSFDHRMIDGATAQKALNHIKRLLSDPELLLMEA

SEQ ID NO: 4298 - protein, 162 aa, Triticum aestivum
FQKLKEMYNEWPFFRVTLDLLEMVFAKGDPGIAGLYDELLVAEELKPSGKQLRDKYVETQQLLLQIAGHKDILEGDPYLKQGLRLRNPYITTLNVFQAYTLKRIRDPSFKVTPQPPLSKEFADENKPAGLVKLNPASEYPPGLEDTLILTMKGIAAGMQNTG

SEQ ID NO: 4299 - protein, 589 aa, Thermoplasma acidophilum
MHVAVLDRDKCHPKKCHHECQYYCPPVRNHVMAIDFPDPDGQPLISETLCIGCGICIRRCPFGAIKIVTLPDELNKEVLHRYGVNGFRIYSIPTISPGRVSAILGQNGLGKTTTLNILSGITVPNLGSYERPPSKEEVIEKFARTEMGAYFRGLYEQNKRAVLKNQYVDYIPKVVKGTIGEVLKKNDETGRYSDVVTQLNLENSVNKNVSECSGGELQRLAIGTVLEKDADIYLFDEMTSYLDINERLNASRIVQDLARKKTVIVVEHDLAILDWLADSVNIVYGDPGVYGIFSEPLSTNRAINAYLSGFLKEENVRIRSYPIEFEEKTSRRDKFTQDLISWTELKKTLGDFALEVSPGKIHRSEIVGILGKNALGKSTFIMMLAGVLNPDSGSISQNVRVSYKPQYISTSFDGSVSDLIRTSLGERSDDSFVKNEIFHPLSIEDIMENPVDGLSGGELQRLSIAITLARDADIYLLDEPSAHLDSSFRMVVAKVIRRVMENTKKTAMVVDHDIYLIDLISDSLIVFSGVPGSHGHSEGPMDMREGMNRFLKIVGVTFRRDQNSRRPRINKENSSLDRMQKEQNNYYYS

SEQ ID NO: 4300 - protein, 181 aa, Brassica napus
MASSMLSSAAVVTSPAQATMVAPFTGLKSSSAFPVTRKANNDITSIASNGGRVSCMKVWPPVGKKKFETLSYLPDLTEVELGKEVDYLLRNKWIPCVEFELEHGFVYREHGSTPGYYDGRYWTMWKLPLFGCTDSAQVLKEVQECKTEYPNAFIRIIGFDNNRQVQCISFIAYKPPSFTGA

SEQ ID NO: 4301 - protein, 566 aa, Campylobacter jejuni RM1221
MKELSGSAMICEALKEENVKIVFGYPGGAALNIYDEIYNQKYFKHILVRHEQAALHAADAYARMSGEVGVAIVTSGPGFTNTITGLATAYSDSIPLVLISGQVANSLIGTDAFQEIDAVGISRPCVKHNYLVTCIEEFPRILKEAFYIARSGRPGPVHIDVPKDVSATLGLWEYSKEISMKTYKPVYKGNSKQIKKFAELLKEAKRPLFYLGGGCISSNASEQIRELIKFTKIPAVETLMALGTLRSDDVFNLKMAGMHGSYAANMALSECDLLVSVGARFDDRITGKTSEFAKHATIVHVDIDPSSISKIINAHYPIVGDIKEVLKELLEELKKENFNTTFKEWHETLKRYNELYPLSYEDSNEILKPQWVIEECAKMAPDARIITDVGQHQMWVAQFYPFNYPRQLATSGGQGTMGYSLPAALGAKLAVGEEVVINFVGDGSVLMNIQELMTAYEYGIKTINIILNNAFLGMVRQWQSMFYKEHFSQTDLSTQPDFIKIAQGFGCEGYEISNKEEFIQAFSQALKSDKTSLLNVKIDRFEDVLPMVPAGGAIYNMILPKAKDRQ

SEQ ID NO: 4302 - protein, 375 aa, Thermoplasma acidophilum
MKDVIVIGAGPSGSFAAYRLAKAGFTVDILEEHREVGKPVECTGLVSQRVLKYVRTKSIAGTVRGANIFFPNGKSVHIEKDDPTIVLFRDAFDKDVAAMAIGAGSGIRINARALSVTEHDDHVTVRYRENGSIKEEDARIVIGADGINSVVRRDVYGMRQKHVVSTLQYDMASGIEDEDSVNVYLGSQYTHGFFGWAVPGGDIVRVGTGSYKASARPYMDNLSRRFGDNRTLGITGAGIPIRMAERLSSRRTVLVGDAGGIVKPLSGGGIYTGIFSSDVAANYVVEALESDSSEASLRKYDREIRNTIGKELKKDAMIQRIYSRISDRSFNRIYSMISNEKIIDVINRSGDIDYPSTVIIKVLLRNPGILYSMWK

SEQ ID NO: 4303 - protein, 247 aa, Ashbya gossypii ATCC 10895
MPKLVLVRHGQSEWNEENLFTGWVDVKLSAVGEQEAARAGELLKEHNVNPDILFTSKLTRAIQTANIALTKADRIWIPVERSWRLNERHYGDLQGKDKAATLAAFGEEKFNTYRRSFDVPPPPIADDSEFSQSNDERYRDVDPNVLPKTESLALVIDRLLPYWQDTISKELLSGKTVMITAHGNSLRGLVKHLEGISDADIAKLNIPTGIPLVFELDENLKPTKPSYYLDPEAAAAGAAAVANQGKK

SEQ ID NO: 4304 - protein, 339 aa, Campylobacter jejuni RM1221
MKFVSVEQAIKDLQAGKMLVMVDAEDRENEGDLIFPAQFSTQEKVNFMIKEARGVVCVALDETLAKKFELPLMVPKNTSNHETAFTITVDAKDATTGVSAYERNMTIQIFADDNAKASDFVRPGHINPLIAKKGGVLERTGHTEGTVDLCKLAGLKGACVICEIVKDNGDMARREDLEIFCQKHDLNMIAVSDLIEYRLKHESLIKLEEKSQSVLAGFKAEKFIFSDHNQTQHIAFCFKDIKKCENVKFHISGSDFELLTSDKFSKLLEQIKFLSENGGVIVFMQGEKSSTTQYKNYGIGAQILRYFGIEEIKLLSQSCDKDYIGLEGFGLNLKACNFN

SEQ ID NO: 4305 - protein, 245 aa, Desulfotalea psychrophila LSv54
MKPSLYIGTIAHSRQIPKKHHFQYPLFMWFLNLDELDQLPYLGKWFSTSKWALSRYHRPDYYGDPDIPLADAIKEKMLELTGHTVEGQVYGLMNMRTLGLYFSPVNFYYGYDSLGKLSHFMAEVSNIPWNDRHQYCHYITESDLTPENPKQFHVSPFNPLNQHYRWGLKAPTETTFVQIDVNDERGHIFTARLDLKRRPLTLKSVRHELLRKPAMTIAMVAGIYWQALKIYIKGVPYITYKKETI

SEQ ID NO: 4306 - protein, 393 aa, Mycobacterium tuberculosis CDC1551
  misc_feature (91)..(91): Xaa can be any naturally occurring amino acid
MSGEDSIRSFPVPDLGEGLQEVTVTCWSVAVGDDVEINQTLCSVETAKAEVEIPSPYAGRIVELGGAEGDVLKVGAELVRIDTGPTAVAQXNGEGAVPTLVGYGADAAIETSRRTSRPLAAPVVRKLAKELAVDLAALQRGSGAGGVITRADVLAAARGGVGAGPDVRPVHGVHARMAEKMTLSHKEIPTAKASVEVICAELLRLRDRFVSAAPEITPFALTLRLLVIALKHNVILNSTWVDSGEGPQVHVHRGVHLGFGAATERGLLVPVVTDAQDKNTRELASRVAELITGAREGTLTPAELRGSTFTVSNFGALGVDDGVPVINHPEAAILGLGAIKPRPVVVGGEVVARPTMTLTCVFDHRVVDGAQVAQFMCELRDLIESPETALLDL

SEQ ID NO: 4307 - protein, 251 aa, Prochlorococcus marinus subsp. pastoris str. CCMP1986
MPETNSKNSVGVNRPIQIIPSVLPADWANMGACVKDLEEAGVDRIQFDVMDGNFVPNLTFGPEMIAACRKYCEVPFETQLMVSQYNCETMLEAYVKATKGPNGEPGVVIAHAEANVHLHRVLGKIRDLGGSPSVALNPHTPFEMIENIMDMVDHVLVMTVNPGFGGQAYIPTMLNKIRKIRNFVIEKNLNVDIEVDGGIKANWTISQCAEAGANCFIAGSGMFAYPTLKEGCDELRSVALDAQNGKIISEP

SEQ ID NO: 4308 - protein, 348 aa, Mycobacterium tuberculosis CDC1551
MTQIADRPARPDETLAVAVSDITQSLTMVQAINRALYDAMAADERVLVFGEDVAVEGGVFRVTEGLADTFGADRCFDTPLAESAIIGIAVGLALRGFVPVPEIQFDGFSYPAFDQVVSHLAKYRTRTRGEVDMPVTVRIPSFGGIGAAEHHSDSTESYWVHTAGLKVVVPSTPGDAYWLLRHAIACPDPVMYLEPKRRYHGRGMVDTSRPEPPIGHAMVRRSGTDVTVVTYGNLVSTALSSADTAEQQHDWSLEVIDLRSLAPLDFDTIAASIQRTGRCVVMHEGPRSLGYGAGLAARIQEEMFYQLEAPVLRACGFDTPYPPARLEKLWLPGPDRLLDCVERVLRQP

SEQ ID NO: 4309 - protein, 307 aa, Methanothermobacter thermautotrophicus str. Delta H
MLILNVNHMNITQGMGVAELIEEMGRSGVLGAGRVHRATKLLRGMIDDLEMAIFMSVAGPLVPGGMRRIIRDLIDDGTISALITSGANLTHDLLEAFGGAHYRDYGFDDEKLHQEGIGRIGDVYTRSEDFEVFESENQEIFSSIFSAKPHISIQELIHEIGGHLDDDMSIIRTAHLRGVPIYAPGLIDSMLGLQLWMYTQDNRICLDAVKDMHSLSDLVFSHERIGAIILGGGLPKHYTLASTLLRGGVDAAVQITMDRSETGSLSGAPLEEAKSWAKAQAGSNLVTVVGDATALFPVILAGALSEL

SEQ ID NO: 4310 - protein, 510 aa, Streptococcus mutans
MALDAEIKEQLGQYLQLLECEIVLQAQLKDDANSQKVKEFLQEIVAMSPMISLDEKELPRTPSFRIAKKGQESGVEFAGLPLGHEFYFVYLGSVTGFRASAKVETDIVKRIQAVDEPMHFETYVSLTCHNCPDVVQAFNIMSVVNPNISHTMVEGGMFKDEIEAKGIMSVPTVYKDGTEFTSGRASIEQLLDLIAGPLKEDAFDDKGVFDVLVIGGGPAGNSAAIYAARKGVKTGLLAETMGGQVMETVGIENMIGTPYVEGPQLMAQVEEHTKSYSVDIMKAPRAKSIQKTDLVEVELDNGAHLKAKTAVLALGAKWRKINVPGEKEFFNKGVTYCPHCDGPLFTDKKVAVIGGGNSGLEAAIDLAGLASHVYILEFLPELKADKILQDRAEALDNITILTNVATKEIIGNDHVEGLRYSDRTTNEEYLLDLEGVFVQIGLVPSTDWLKDSGLALNEKGEIIVAKDGATNIPAIFAAGDCTDSAYKQIIISMGSGATAALGAFDYLIRN

SEQ ID NO: 4311 - protein, 563 aa, Synechococcus sp. WH 5701
MTSSASSDAPAAAMDTSPSPSVRQVLLSAPFTDQKPGTSGLRKSSRQFEQPHYLESFVEAVFRVMPGVAGGTLILGGDGRYGNLRAIDVIARMAAAHGVARLITTTGGILSTPAASNLIRKHQAIGGIILSASHNPGGPEGDFGVKVNGANGGPAPESITDAIYSATTQLEGYRILDAETPSLKGTGTYALGGLRIEVIDGVDDYVALLQGLFDFDAISEMLRGDFPIAFDAMHAVTGPYASRLLEGMLGAPAGTVRNGTPLEDFGGGHPDPNLTYAHDLAELLLDGDDYRFGAACDGDGDRNMILGHRCFVNPSDSLAVLTANATLAPGYAGGLSGVARSMPTSAAVDVVAKELAIPCFETPTGWKFFGNLLDAGRITLCGEESFGTGSDHIREKDGLWAVLFWLQILARRRCSVAEVMASHWSRFGRHYYSRHDYEAIASDRADGLYGRLKGLLPSLAGAGFAGRSIATADDFSYTDPVDGSLTSGQGLRLLLDDGSRVVFRLSGTGTQGATLRLYLESYVGAGGNLDQDPQQALADLITAADHLAEIRGCTGMERPTVIT

SEQ ID NO: 4312 - protein, 304 aa, Xanthomonas oryzae pv. oryzae KACC10331
MTTLRIATRKSPLALWQSEHVAAALRQHHPGLEVVLVPMSTRGDEVLDRSLAAIGDKGLFLKELELAMLRGDADCAVHSFKDVPMELDDPFVLPAILERGDPADALVSNLYASLQALPLGARVGTSSLRRQAQLRAARPDLELIDLRGNVNTRLAKLDNGGYDAIVLACAGLQRLGLDERISARLDAPEWLPAPAQGAVAVECRGDDARIHSLLAVLDAGRTRACVEAERAMNRALHGSCHVPVAALARWEGEGLFLQGMVGSASDGRLIHADAHGSADDTQDLGRRVAQGLFDKGAAQLLAAL

SEQ ID NO: 4313 - protein, 455 aa, Streptomyces griseus
MSVAVVLFTSDLRLHDNPVLRAALRDADEVVPLFVRDDAVHRAGFDAPNPLAFLADCLAALDAGLRHRGGRLIVRRGEAATEVRRVAEETGAARVHIAAGVSRYAARREQRIREALADSGRELHVHDAVVTALAPGRVVPTGGKDHFAVFTPYFRRWEAEGVRGTQTAPRTVRVPDGVASDPLPDRDCVENLSPGLARGGEEAGRKLVTSWLNGPMADYEDGHDDLAGDATSRLSPHLHFGTVSAAELVHRAREKGGLGGEAFVRQLAWRDFHHQVLADRPDASWSDYRPRHDRWRSDADEMHAWKSGLTGYPLVDAAMRQLAHEGWMHNRARMLAASFLTKTLYVDWREGARHFLDLLVDGDVANNQLNWQWVAGTGTDTRPNRVLNPVIQGKRFDARGDYVRGWVPELAEVEGSAIHEPWKLQGLDRAGLDYPDPVVDLAEARARFERARGLD

SEQ ID NO: 4314 - protein, 493 aa, Geobacillus kaustophilus HTA426
MRIKQHYPLFINGQYVESSNGEVFETVNPATEEVIATVAKATKEDVDHAVEAARTAFESGKWPKMTGAKRARLLNQIANLMRERFDDLVYAEVLNSGKTVDAAKGQIMQAIEDFEFYAAAAITLQGDVNQVPNGFFNYTVKEPVGVCGQIIPWNYPLMMAAWKLAPALAAGCTVVLKPASYTPITAYMLAEICQEAGVPDGVVNVIAGSGSEIGPYMTEHPGIDKVAFTGETETGKDIMRRASETLKRVTLELGGKSPNIVFDDCDIEAAVNGSLYGIFYNTGQSCEARSRLFVHENIYDEFMEKLIEKASRIRVGNPFEKGVHMGAVISRSHQQVIDSYVKLAVEEGGEILYGGKIPEGEEFAKGYWYMPTIIGNVRNDMRVAQEEIFGPVVVVMKFHDEEEVIELANDTIFGLGSAVWTKDHGKAHRVAACIRAGIVMINSPISAFPGTPFGGYKQSGFGRELALETLNLYTETKSVVSYIGAKPLNLFGI

SEQ ID NO: 4315 - protein, 494 aa, Corynebacterium diphtheriae
MTHTTQTLDDRIHELLQRIPTELFIAGQFQPAHNGATLSVTNPSDGSELATVASASEKEARAALDAAEKAQPTWAATPARERSEILRRAYDLVIEHKDDLAMIQSLELGRALPDSEAEVTYAAEFFRWFAEEAVRIRGDYRHNPTGNARIITHQQPVGPCLAITPWNFPLAMGARKLAPALAAGCTMILKPASKTPLTMLYLAQLLAEAGVPHGVVSVLPTANASVVSDLLHDARIRKLTFTGSTAVGQKLAAMAAEHSAAVSLELGGNAPYIVLDDADIDTAAQAVAVAKMRGAGQVCIAANRFLVHSSIAEEFTQRVVNIMRGFTQGPATAPGVDFGALSGDDQVSTVTTLVDDALSRGATKLLGDLPKGLPEHGSYYPATVLVDVPEDADIHCEEIFGPVVVISTFDDDDEAVARANDTKFGLAAYVFGSDLQRVLNVAERVDAGMIAVNKGALSDPAAPFGGVKESGLGREGGFEGIGEFLETKLISLPL

SEQ ID NO: 4316 - protein, 752 aa, Oryza sativa
MVIQDRVKLLTSLWGNYSIPKDNPYTDDSDLELEVWALGLRNPWRCSFDSARPSYFYRADVGQIQAFSTWYISEYVYSYVKISEYLLLVVAVQSREFPAFSHPPESSRTVEIARLLRTVTFIYFLPLDAPVQTRTKPPTDSDPTISIARSASLPDRSAPPPRAMADEAKAKGNAAFSAGRFEEAAAHFTDAIALAPDNHVLYSNRSAAYASLHRYPEALADAERTVALRPDWAKGCSRLGAARLGLGDAAGAVAAYEKGLALEPSNGALKDGLAHARQARRPAPASGAGAIGKVFQGPELWSRMAADPTTRPYLDQPDFMRMLRDVQRNPSSLNNYLSDPRMVQVLSLMLNLRLPNNDAPPRPPAQSTPPPPPQQQQHQPETKAREPEPEPEPMEVTEEEKERKERKAAAQEEKEAGNAAYKKDFETAIQHYTKAMELDDEDVSYLTNRAAVYLEMGKYDECINDCDKAVERGRELHADFKIISRALTRKGTALAKIAKCFKDYDVAIETYQKALTEHRNPDTLKKLNDAEIAKKELEQQEYYDPKIADEEREKGGDEDETLILVHSCAGNEFFKQQKYPEAVKHYSEALRRNPKDPRVYSNRAACYTKLGAMPEGLKDAEKCIELDPTFSKGYTRKGAIQFFMKEYDKALETYQAGLKHDPNNQELLDGVRRCVQRINKASRGELSQEELQERQNKAMQDPEIQNILKDPIMQQVLTDFQENPKAAQAHLKNPGVMQKIQKLVSAGIVQMK

SEQ ID NO: 4317 - protein, 106 aa, Roseovarius nubinhibens ISM
MATVAVTDDTFDAEVKNSDIPVVVDFWAEWCGPCKQIGPALEEIAAEMGGKVKIAKVDVDSNPNSAAQMGVRGIPALFIFKNGEVVSNRAGAAPKAALQSWIEESI

SEQ ID NO: 4318 - protein, 164 aa, Castanea sativa
VVKDAVNLCGHLVTLRNTAAASSGPHTCGLELARLESLSTNSDKLAPYGENPPHTHPRGTEILVVVEGTLFVGFVTSNPENRLFTKTLNKGDVFVFPIGLIHFQLNVGKTNAIAISGLSSQNAGVITIADAVFGSDPPINPDVLTKAFQLDKNVVEELQKGIWR

SEQ ID NO: 4319 - protein, 342 aa, Brucella melitensis 16M
MFSKSGNRFCLWTCMKTNDETRYHGRGNMQTASFKNGTLKIGTRGSKLALAQAYLTRRLLQEAHGLPEDAIEILPMSTAGDRIQDRPLSEVGGKGLFTEEIEQALKDGRIDIAVHSTKDMPTALPEGLHLSVFLEREDPRDAFIGRSARRFMDLPQGATVGSSSLRRQALIRRLRPDIEVVMYRGNVDTRLRKLDAGEVDGTFLACAGLRRLGLADVITDVLDPSVFPPAPGQGAIGIESRIGDERIDVLLAPLAHRETQIALACERAFLGALDGSCRTPIAGLATVEGDRLSFRGMILTPDGRQAHEVTAEGVVSDAAALGTDAANRVRAMAGPHFFDGWQ

SEQ ID NO: 4320 - protein, 990 aa, Rhodopseudomonas palustris CGA009
MTPLRFPSNLPLRAVAFDEDQSMPHRRPIDAANDFVRRHIGPSPQDIAAMLATAGAGSLEQLVAETLPYAIRHREPLKLGAPLTESEALAHMSELGAQNQVFTSLIGQGYYGTILPTVIQRNILENPAWYTAYTPYQPEISQGRLEALFNFQTMICDLTGLDVANASLLDEGTAAAEAMALAERAAAKNAKAFFVDADTHPQTIAVLRTRAEPLGWRIIVGNPETGLEGADVFGALLQYPGSSGRLSDPRAVIAALRKKGALAVVAADLLALTLITPPGELGADIAIGSAQRFGVPMGYGGPHAAYMAVRDSLKRSLPGRIVGLSIDSHGQPAYRLALQTREQHIRREKATSNICTAQVLLAVINAMYAVYHGPDGLAAIARRVHRRTAVLAAGLQQLGFAPTHGNYFDTLTIEVGDRRDAIVARAEAENINLRINASSLGISLDETTTPATVEALWRAFGGSLDYAAVERDAGDALGTALPAALKRTSDYLTQPAFQDYRSETELLRYMRKLSDRDLALDRAMIPLGSCTMKLNATTEMMPLTWPEFGSLHPFVPKAQAAGYHALFERLETWLAEITGYDAVSLQPNSGAQGEYAGLLTIRGYHLSRGEPHRKVCLIPSSAHGTNPASAAMAGMDVVVVACDAHGDVDVDDLRAKAEAHSADLAAVMITYPSTHGVFEEHIREICDIVHAHGGQVYLDGANLNAQVGLARPGSYGADVSHLNLHKTFCIPHGGGGPGMGPIGVKAHLAPFLPGHPAEGEPLNGGLHGGGTVSAAPWGSASILTISYIYILMMGAAGLKRATEIAILNANYIAAKLHPHFPVLYRNPRGRVAHECIIDPRALKTSTGVTVDDIAKRLIDYGFHAPTMSFPVPGTLMIEPTESESKAEIDRFCDAMIAIRREIAQVEAGRYPIEQSPLRHAPHTAHDVTSAEWTRPYPRTEGCFPAPNSRTDKYWSPVGRVDNVYGDRNLICSCPPVEDYALAADYARAAE

SEQ ID NO: 4321 - protein, 324 aa, Bromelia fastuosa
EPSDPMMERFEEWMAEYGRVYNDNAEKMRRFQIFKNNVNHIETFNNRSGNSYTLGVNQFTDMTNNEFLARYTGASLPLNIERDPVVSFDDVDISAVPQSIDWRDYGAVTSVKNQGSCGSCWAFSAIATVEGIYKIKAGNLISLSEQEVLDCALSYGCDGGWVNKAYDFIISNNGVTSFANLPYKGYKGPCNHNDLPNKAYITGYTYVQSNNERSMMIAVANQPIAALIDAGGDFQYYKSGVFTGSCGTSLNHAITVIGYGQTSSGTKYWIVKNSWGTSWGERGYIRMARDVSSPYGLCGIAMAPLFPTLQSGANAEVIKMISES

SEQ ID NO: 4322 - protein, 190 aa, Triticum aestivum
  misc_feature (143)..(143): Xaa can be any naturally occurring amino acid
MTTMVALSSFAGAAVVGRPSSWSPAVPHRRTLLVRAQTEPDIESTKDTTSASTFWATPTPTPSPVAPKPKPKANPSVWDALAFSGPAPERINGRLAMVGFVAAFSVEAARGGGLLDQAGSGAGLGWFLTTAAVFSVASLVPLXLQGQSVESKSSGVWSADAELWNGRFAMLGLVALAITEFITGTPFVNV

SEQ ID NO: 4323 - protein, 536 aa, Zea mays
  misc_feature (16)..(16): Xaa can be any naturally occurring amino acid
  misc_feature (247)..(247): Xaa can be any naturally occurring amino acid
  misc_feature (403)..(403): Xaa can be any naturally occurring amino acid
MEVSTWVMLVAAAAAXYMAWFWRLSRGLSGPRVWPVLGSLPGLVQHAEDMHEWIVGNLRRTGGTYQTCIFAVPGVARRGGLVTVTCDPRNLEHVLKARFDNYPKGPFWHAVFRDLLGDGIFNSDGDTWVAQRKTAALEFTTRTLRTAMSRWVSRSIHLRLLPILDEAATEKTHVDLQDLLLRLTFDNICGLAFGKDPETLAPGLPENAFATAFDRATEATLNRFIFPECLWRCKKWLGLGMESTLAXSVAHVDQYLAAVIKARKLELAGNGKCDAPAHDDLLSRFMRKGSYSDESLQHVALNFILAGRDTSSVALSWFFWLVSTHPDVERQIVLELCAALAASRGSHDPALWLASPLTFEELDRLVYLKAALSETLRLYPSVPEDSKHVVADDYLPDGTFVPXAGSSVTYSIYSAGRMKTVWGEDCLEFRPERWLSADGTRFEPHDSYRFVAFNAGPRICLGKDLAYLQMKNIAGSVLLRHRLAVARGHRVEQKMSLTLFMKHGLRMEVHPRDLAPVIDELRGAGAARPAMAPCCA

SEQ ID NO: 4324 - protein, 393 aa, Oryza sativa (indica cultivar-group)
MAIGSSGTSVYKTATTTEDMSWWCCIPKSKKGENPYSHGVSGIPPEKNIRLFSYSELRSATENFNRSNKIGRGGFGTVYKGTIRNGRDVAVKVLSAESRQGVREFLTEIDVITNVKHPNLVELIGCCVEGNNRILVYEYLENSSLDRALLGSNSEPANFTWSIRSAICIGIAKGLAYLHEEIASPIVHRDIKASNILLDKLYNPKIGDFGLAKLFPDNITHISTRVAGTTGYLAPEYAWHGQLTKRADIYSFGVLVLEIVSGKSSSRSLLADDKILLEKAWELHEVGKLKELVDSEMGDYPEEEVLRFIKTALFCTQAAAARRPSMPQVVTMLSKPIRINERELTAPGYIHDYNGTVSKATNSSNSRFKHSASDTSDMFSTVVPPTVSEISPR

SEQ ID NO: 4325 - protein, 288 aa, Lactobacillus johnsonii NCC 533
MSSDPGAGDIFSKLRAKFRGDEDIDGQRKLNKILNKLHEQKEISDREYSMMEGILEFEEKMAREVMVPRTDAFMVDINDSFQENLDKILKEPYSRVPVYDGDKDKIVGVIHIRTVLRKAHKVGFDKLDYDQVMFKPLFAPETIELGELLVEMQETQRQLAILTDEYGGVVGLATIEDLIEEIVGDIDDEVDKAEVLFSKIGPREYVIYGKMPLADFNEEFGTDLAMENVDTVAGYVITKLGLIPAKGEKLSVKLDNGMVLTTRRMKGSRLLTLLLTIPEKQEKEEAKD

SEQ ID NO: 4326 - protein, 483 aa, Cyanidium caldarium
MIDRKKSSNIQNILNKPYKYGFSTEIQSEEFPKGINEEIIRLMSHKKQEPDFILKFRLKAYQIWKKMQAPDWGHLHHNEINFNDVLCYASPKLEQGKNKAQTISEEILATFEKLGVPIKPNNKQPKIAVDAVFDSISFGTTLQKELKEQGIIFCSISEAIKAYPNLIKKYLGSIVPAGDNYFAALNSAVFTDGSFCYIPKNIRCPVDLSTYFRINNKEAGQFERTLIIADENSFVNYLEGCTAPQFDTNQLHAAVVELICFKNATINYSTVQNWYAGNNKGEGGVYNFVTKRGLCQGENSKISWTQLETGSAITWKYPSCLLKGKRSTGEFFSVTLTNNAQEADTGTKMLHFGRQSKSLVISKGISGGVSKNTYRGLVKISGSAIYSDNRSQCDSLLIGKGSESNTYPNLHVHNSLSKVEHEAFVSRIGEEQIFYFQQRGINIEEALNMIVSGFCQDVCNKLPMEFALEANKLLNIKLEGSIG

SEQ ID NO: 4327 - protein, 353 aa, Cyanidium caldarium
MTSTADVFDKKDQFNFVFPFTAIVGQEEMKISLLLNVVDPKIGGVMIMGDRGTGKTTTIRALVDILPDILVVKDDPYNSHPHDVDLMSSEVQALVLNRMNIETCYTKVPLVDLPLGATEDRVCGSIDIEKALSEGKKSFEPGLLAKANRGLLYVDEINLLDDHLVDVLLDCSASGWNLVEREGISVKHPSKFVLIGSGNPEEGELRPQLLDRFGLHAEIKTVKDPELRVKIVEERTEFDKDPVAYIRKFSKSQDELREKIINAQNLLPKVEMPRELKFNISKICGILDIDGLRGDIVTNRASKAYAAIQQRNVVEIGDIQKVIVSCLRHRLRKDPLEIIESGEKIQKAFTNIF

SEQ ID NO: 4328 - protein, 421 aa, Burkholderia vietnamiensis G4
MNQPHHIRIIGMPRSRDAYAIRDFLQRRMVAYDWCELTSDADSTRELGIAPLRDVRLPVVIFPDGSRLYRPTLAEIAARLGWVAQPRFVEYDVSIYGAGPAGLSAAVYAASEGLRAVLIERAAVGGQAGTSSLIENYMGFPDGIPGAELAERAREQAMKFGVELLTMREGVHARFVDGKIHVDLADGSVLVARSNICATGIEYRSLGLPEEPAFLNAGLFYGAGSSEAPMCSGEHVFIVGGGNSAGQAAMNFSRHAREVTMLVRGASLADTLSRYLIDRIERTPNIAVRYRSAVDALYGDGWLDAIGIRTDDGPSERVPATRLFVCIGGAPNTEWAKDTAIIRNSGGYLVTGTDLYDCPAFERVWPLERRPYYLETSVPGSFAAGDVRSGSVKRVASAVGEGAMAVTFVHRFLGEDAHRLA

SEQ ID NO: 4329 - protein, 352 aa, Helicobacter hepaticus ATCC 51449
MMRNSSSLPYLSLDESAQYYECGFSCDNALLVCIEESRFFITDSRYTLEAKELCKPHTEVIESANFIQSVQEVLQKLHIHKIVFNPQELSVQMYEKLKNALEKHKCEIIPQENFHQKLRICKSEQEIGLIKTSQKLNKKAFKRFGIYLNKIVKKSPSEKELHYQAMQFLSHFGEYELSFEPIVGINANGAKPHALPNAKCYLAKNDILLFDAGIKYKRYCSDMTRTAAIKGEIHFGKKQKFKNPKYQKIYDIVLKAQEEAISKARSGMKAKQIDSLARDVIEKSGYGKYFVHSTGHGVGLDIHELPRISRLSEECVEDGMVFSVEPGIYLPQEFGVRIEDLVVMKNGRAEVL

SEQ ID NO: 4330 - protein, 513 aa, Buchnera aphidicola (Cinara tujafilina)
MNKKVLIFDTTLRDGEQALPASLSSKEKLQIALSLERLGVDIIEAGFPISSPGDFKSVELISKNIKNCKICSLARCLPQDIETASQAMKFAVSPRIHVFLGTSSIHIESRLKKSFHEITEMMINAIKKARKYTDDVEFSCEDAGRTSLDDLCFFVEKAIKYGANTINIPDTVGYTLPAQFKNIIEILHKKVPNIHKAIISVHCHNDLGMAVGNSISAIEAGARQIEGTISGLGERAGNAALEEIIMALKIHEKTLGVTTNIKTKEIYRTSKIISQLCHTPIPVNKAIIGKNAFSHSSGIHQDGILKNKKNYEIIDPVDIGLKKSILNLTSRSGRAAVNHRMNEMGYQQKDYDINKLYIDFLKLADKKGQIFDYDLEALAFINNQKEKKIEFFQLKYFDIQSKLSGLSTASVILKCGSKKSIQEVTTKNGPIDAIYQALNKAVLYPIKLKKFNLIAKGEGKDALGQANILIKYKSRNFHGIGLSTDVIEASAKALINVFNHIYQSDLIEKKFNK

SEQ ID NO: 4331 - protein, 478 aa, Methanococcoides burtonii DSM 6242
MAEQEKEATLPSKENFSEWYNGMLQIAEIMDVRYPVKGSYVWYPFGFSIRRNVYDIIRGLLDKDHQETLFPLLIPENEFMKEAEHIKGFEEEVYWVLNGGTTPLDVKLALRPTSETAIYPMYRLWVRSHADLPLKLYQIVNTFRYETKHTRPLIRLREITSFKEAHTVHATWDEAASQVEEAIRLYIEFYKRLAIPVLPSKRPSWDKFPGADYTIAVDSLMPDGKTLQVGTAHHLGDNFAKTFDIKYEDVDGEQVYAHQTCYGVSERCIATLLSTHGDDKGLVLPPEVAPTQVVIIPIIFKEPEAVLNACNDVKAELEAAGVRVTIDDSDKRPGSKYYKWEMKGVPLRIEIGPRDLKNEAAMLARRDTGEKEQVPLASIKDEVLSRFKIIQTSLLEKATSELNERIFDCSTVDDVKEKVQDGIALVPWCGEEKCGLDLDEQVGAGILGIPTDMDEDGTYKCPICSKETRTRVYVARTY

SEQ ID NO: 4332 - protein, 430 aa, Staphylococcus aureus
MAFEFRLPDIGEGIHEGEIVKWFVKAGDTIEEDDVLAEVQNDKSVVEIPSPVSGTVEEVMVEEGTVAVVGDVIVKIDAPDAEDMQFKGHDDDSSSKEEPAKEEAPAEQAPVATQTEEVDENRTVKAMPSVRKYAREKGVNIKAVSGSGKNGRITKEDVDAYLNGGAPTASNESADSATNEEVAETPAAPAAVSLEGDFPETTEKIPAMRRAIAKAMVNSKHTAPHVTLMDEIDVQALWDHRKKFKEIAAEQGTKLTFLPYVVKALVSALKKYPALNTSFNEEAGEIVHKHYWNIGIAADTDRGLLVPVVKHADRKSIFQISDEINELAVKARDGKLTADEMKGATCTISNIGSAGGQWFTPVINHPEVAILGIGRIAQKPIVKDGEIVAAPVLALSLSFDHRQIDGATGQNAMNHIKRLLNNPELLLMEG

SEQ ID NO: 4333 - protein, 135 aa, Arabidopsis thaliana
  misc_feature (79)..(79): Xaa can be any naturally occurring amino acid
  misc_feature (90)..(90): Xaa can be any naturally occurring amino acid
  misc_feature (92)..(92): Xaa can be any naturally occurring amino acid
  misc_feature (102)..(103): Xaa can be any naturally occurring amino acid
  misc_feature (109)..(109): Xaa can be any naturally occurring amino acid
  misc_feature (112)..(112): Xaa can be any naturally occurring amino acid
  misc_feature (115)..(116): Xaa can be any naturally occurring amino acid
  misc_feature (119)..(119): Xaa can be any naturally occurring amino acid
  misc_feature (121)..(122): Xaa can be any naturally occurring amino acid
  misc_feature (128)..(133): Xaa can be any naturally occurring amino acid
MASSMLSSTAVVTSPAQATMVAPFTGLKSSASFPVTRKANNDITSITSNGGRVSCMKVWPPIGKKKFETLSYLPDLSDXVNLVKEVDLPXSXTKWVPCVEFXXGHGFFXPLXTGXXPGXLXXGRVLGXXXXXXFF

SEQ ID NO: 4334 - protein, 819 aa, Magnetospirillum magnetotacticum MS-1
MNAVPRQKLVVIGNGMAGMRTVEELLAIAPARYDITVFGAEPHPNYNRIMLSSVLAGEKQVDDIVINSRAWYAENGITLHTGDPVVAINRAAKTVSSATGLVVTYDRLLLATGSKPLMPPLPGLDLPGVVAFRDIADVEKMLDAAEKQQRAVVIGGGLLGLEAAWGLKRRGMPVALVHLMPTLMERQLDVEAGGLLQKDLTERGLHFFTSGQTEEIMGAEEGCAKGVKLTDGREIPADLVVVAIGIRPNVDLAKAAGLDINRGIEVGDDMATSDPAIFSVGECVEHRGQIFGLVAPIWEQAKVCASRLAGRDEAHYETPPLSTRLKITGIDVFSAGQLAAQDEADEELVYRDTARGIYKKLVIRSDRVVGAVMYGDVADGSWYFQLIREKADVSAIRDRMIFGQAYADTGCKGHGGGVNVAAMSDDAQVCGCNGVSKGAIVKAITEKGLTSLDEVKAHTKASASCGQCASVVQAILAHVTGEVVESKAAGMCGCTDLSHDEVRKEILRQELKNQDAVRSALGWRHADGCAKCRPALNYYLLCAWPAEYVDDYQSRFINERAHANIQKDGTYSVIPRMWGGLTNPTELRAIADVVDKFKIPTVKVTGGQRLDLLGVRKEDLPAVWADLGKAGLVSGHGYAKGLRTVKTCVGSEWCRFGTQDSTGLGVKLEKMMWGSWTPHKVKLAVSGCPRNCAEATIKDMGVVCVEAGYDISVGGNGGIELRGTDHLVRVATEAEVLEYCAAFMQIYREEAHYLERTAPWVERVGMDYVTKRVVEDEEGRKAAHARFLFSQKYAQTDPWAERASGAVDAHEFKTLAEVG

SEQ ID NO: 4335 - protein, 322 aa, Cryptococcus neoformans var. neoformans JEC21
MRSSTVLILSLRSLAHETIKNLVLAGIGRLIVADSDVVTEEDLGSGFLFREEDNAVGKLRTDAALEQIQSLNPLVTLSKIGMDSFEGEEDKVAEILKKEAVDVVVTCDLSVKENERIDAAARKASSLFYAAGTYGFTGYVFADLGESYEYVVNSIDGLSKKVLSYPSFSTVLDRSNWAKPGGSPFKGLSRNATRSAAPATILGITGEAIQTLWEYESQNGHLPAEESSLSALTSSAESIRTALGVNSTAVPSVDSSLLTHLASHATHFFPPTLAILGGLLAQDVLRALSRKDKPVANLLAVDSMSGVGTVGRWSMMDAKDTQ

SEQ ID NO: 4336 - protein, 115 aa, Triticum aestivum
MARGAAIPLVLVAMVATMLLVATDAVISCGQVTSALSPCISYARGNGANPTAVCCSFVRSLAGAARSTADKQAACKCIKSAAGGLNAGKAAGIPSKCGVSVPYAISANVDCSKIR

(The sequence listing continues in the following parts.)

What is claimed is:

1. A plant cell nucleus with stably integrated, recombinant DNA, wherein
a. said recombinant DNA comprises a promoter that is functional in said plant cell and that is operably linked to a protein coding DNA encoding a protein having an amino acid sequence comprising a Pfam domain module selected from the group consisting of Gp_dh_N::Gp_dh_C, Mg_chelatase::VWA, zf-CCCH::zf-CCCH::zf-CCCH::zf-CCCH::zf-CCCH, WD40, tRNA-synt_{—}2b::HGTP_anticodon, RNase_PH::RNase_PH_C, F-box::Kelch_{—}1::Kelch_{—}1, Peptidase_C54, Iso_dh, Metallophos, OTU, Rotamase, Sugar_tr, Glyoxalase::Glyoxalase, Ras, Brix, S6PP::S6PP_C, PsbR, Pkinase, p450, PP2C, CH::EB1, DUF537, Histone, PPR::PPR::PPR::PPR::PPR, TFIIS_M::TFIIS_, DUF751, RRM_{—}1::RRM_{—}1, ETC_C1_NDUFA4, SRF-TF, CCT, Globin::FAD_binding_{—}6::NAD_binding_{—}1, FAE1_CUT1_RppA::ACP_syn_III_C, Frataxin_Cyay, F-box::LRR_{—}2, Tryp_alpha_amyl, PFK::PFK, Dehydrin, RLI::Fer4::ABC_tran::ABC_tran, CTP_transf_{—}2, GTP_EFTU::GTP_EFTU_D2::GTP_EFTU_D3, PfkB, IPT, TPR_{—}1::TPR_{—}2::TPR_{—}1::TPR_{—}2::TPR_{—}1::TPR_{—}1::TPR_{—}1::TPR_{—}1::TPR_{—}1, Globin, Porphobil_deam::Porphobil_deamC, NB-ARC::LRR_{—}1::LRR_{—}1::LRR_{—}1, Bromodomain, DUF1365, PTS_{—}2-RNA, Pkinase::UBA::KA1, MATH::BTB, DUF6::TPT, Cyclin_N::Cyclin_C, zf-AN1, Methyltransf_{—}6, Thioredoxin, DNA_photolyase::FAD_binding_{—}7, vATP-synt_E, Bac_globin, B_lectin::S_locus_glycop::PAN_{—}2::Pkinase_Tyr, Sigma70_r2::Sigma70_r3::Sigma70_r4, Ribosomal_L10, zf-C3HC4::WD40::WD40::WD40, PGM_PMM_I:PGM_PMM_II:PGM_PMM_III::PGM_PMM_IV, Hydrolase, Peptidase_C1, DS, Carotene_hydrox, Aa_trans, Mov34, zf-MYND::UCH, Heme_oxygenase, S6PP, SSB, Peptidase_M16::Peptidase_M16_C, Bet_v_I, Auxin_inducible, Response_reg, Di19, DUF125, GDC-P, Pyr_redox_{—}2::Fer2_BFD::NIR_SIR_ferr::NIR_SIR, KOW::eIF-5a, MtN3_slv::MtN3_slv, Ribul_P_{—}3_epim, NPH3, DnaJ::DnaJ_C, UQ_con, RRM_{—}1::RRM_{—}1::RRM_{—}1, F-box, CoA_binding::Ligase_CoA, adh_short, Ribosomal_L22, AA_permease, Acyltransferase, AMPKBI, RRM_{—}1, Chalcone, GATase_{—}2::Asn_synthase, Peptidase_M24, DUF498, DAGAT, PFK, DUF1677, Glyco_transf_{—}43, zf-DNL, DHBP_synthase::GTP_cyclohydro-2, PseudoU_synth_{—}2, Glyoxalase, DUF21::CBS, Ribosomal_S30AE, Glycolytic, Chloroa_b-bind, ZF-HD_dimer, Usp, Ferrochelatase, Pyridoxal_deC, Glyco_transf_{—}8, Pyr_redox_{—}2::Glutaredoxin, Epimerase, UPF0113, RNase_PH, AIG1, Phi_{—}1, CorA, HD::RelA_SpoT, P-II, GSHPx, PGAM, PGI, DUF868, Lung_{—}7-TM_R, F-box::FBA_{—}1, TPP_enzyme_N::TPP_enzyme_M::TPP_enzyme_C, DnaJ::zf-CSL, DEAD::Helicase_C, 2OG-FeII_Oxy, HMGL-like::LeuA_dimer, VQ, DUF298, DREPP, ketoacyl-synt::Ketoacyl-synt_C, THF_DHG_CYH::THF_DHG_CYH_C, DNA_pol_E_B, UPF0051, Pkinase::efhand::efhand::efhand::efhand, malic::Malic_M, ThiF, Transket_pyr::Transketolase_C, Ribosomal_L37ae, PEPcase, Glyco_hydro_{—}32N::Glyco_hydro_{—}32C, GASA, DnaJ, AA_kinase::ACT::ACT, Pkinase_Tyr, Cupin_{—}1, zf-LSD1::zf-LSD1::zf-LSD1, Cupin_{—}3, GAF::HisKA::HATPase_c::Response_reg, Methyltransf_{—}12::Mg-por_mtran_C, DUF516, PTR2, Ammonium_transp, eIF-5a, ECH, Aldedh, zf-C3HC4, SAM_decarbox, X8, Mg_chelatase, PurA, Ribosomal_S6e, Molybdop_Fe4S4::Molybdopterin::Molydop_binding, CP12, Biotin_lipoyl::E3_binding::2-oxoacid_dh, NOI, Tubulin::Tubulin_C, V-SNARE, AP2, ELFV_dehydrog_N::ELFV_dehydrog, Ribosomal_L32e, and FAD_binding_{—}3;
b. said recombinant DNA comprises a promoter that is functional in said plant cell and that is operably linked to a protein coding DNA encoding a protein comprising an amino acid sequence with at least 90% identity to a consensus amino acid sequence selected from the group consisting of SEQ ID NO: 30377 through SEQ ID NO: 30418;
c. said recombinant DNA comprises a promoter that is functional in plant cells and that is operably linked to a protein coding DNA encoding a protein comprising an amino acid sequence selected from the group consisting of 395, 553, 640, and homologs thereof listed in table 9; or
d. said recombinant DNA comprises a promoter that is functional in said plant cell and that is operably linked to a protein coding recombinant DNA encoding a protein having an amino acid sequence having at least 70% identity to an amino acid sequence selected from the group consisting of 560;
and wherein said plant cell nucleus is selected by screening a population of transgenic plants that have said recombinant DNA and an enhanced trait as compared to control plants that do not have said recombinant DNA in their nuclei; and wherein said enhanced trait is selected from group of enhanced traits consisting of enhanced water use efficiency, enhanced cold tolerance, enhanced heat tolerance, enhanced resistance to salt exposure, enhanced shade tolerance, increased yield, enhanced nitrogen use efficiency, enhanced seed protein and enhanced seed oil.

2. The plant cell nucleus of claim 1 wherein said protein coding DNA encodes a protein having an amino acid sequence selected from the group consisting of SEQ ID NO: 350 through SEQ ID NO: 30327.

3. The plant cell nucleus of claim 1 further comprising DNA expressing a protein that provides tolerance from exposure to an herbicide applied at levels that are lethal to a wild type of said plant cell.

4. The plant cell nucleus of claim 3 wherein the agent of said herbicide is a glyphosate, dicamba, or glufosinate compound.

5. A transgenic plant cell or plant comprising a plurality of plant cells with the plant cell nucleus of claim 1.

6. The transgenic plant cell or plant of claim 5 which is homozygous for said recombinant DNA.

7. A transgenic seed comprising a plurality of plant cells with the plant cell nucleus of claim 1.

8. The transgenic seed of claim 7 from a corn, soybean, cotton, canola, alfalfa, wheat or rice plant.

9. A transgenic pollen grain comprising a haploid derivative of the plant cell nucleus of claim 1.

10. A method for manufacturing non-natural, transgenic seed of claim 7 that can be used to produce a crop of transgenic plants with an enhanced trait resulting from expression of stably-integrated recombinant DNA wherein said method for manufacturing said transgenic seed comprising:
(a) screening a population of plants for said enhanced trait and said recombinant DNA wherein individual plants in said population can exhibit said trait at a level less than, essentially the same as or greater than the level that said trait is exhibited in control plants which do not express the recombinant DNA, wherein said enhanced trait is selected from the group of enhanced traits consisting of enhanced water use efficiency, enhanced cold tolerance, enhanced heat tolerance, enhanced resistance to salt exposure, enhanced shade tolerance, increased yield, enhanced nitrogen use efficiency, enhanced seed protein and enhanced seed oil;
(b) selecting from said population one or more plants that exhibit said trait at a level greater than the level that said trait is exhibited in control plants; and
(c) collecting seed from selected plants selected from step b.

11. The method of claim 10 further comprising
(d) verifying that said recombinant DNA is stably integrated in said selected plants; and
(e) analyzing tissue of said selected plant to determine the expression or suppression of a gene that encodes an protein having the function of a protein having an amino acid sequence selected from the group consisting of one of SEQ ID NO:358-716.

12. A method of producing hybrid corn seed comprising:
(a) acquiring hybrid corn seed from a herbicide tolerant corn plant which also has stably-integrated, recombinant DNA in a nucleus of claim 1;
(b) producing corn plants from said hybrid corn seed, wherein a fraction of the plants produced from said hybrid corn seed is homozygous for said recombinant DNA, a fraction of the plants produced from said hybrid corn seed is hemizygous for said recombinant DNA, and a fraction of the plants produced from said hybrid corn seed has none of said recombinant DNA;
(c) selecting corn plants which are homozygous and hemizygous for said recombinant DNA by treating with an herbicide;
(d) collecting seed from herbicide-treated-surviving corn plants and planting said seed to produce further progeny corn plants;
(e) repeating steps (c) and (d) at least once to produce an inbred corn line; and
(f) crossing said inbred corn line with a second corn line to produce hybrid seed.
